United States Patent Application Publication US 2026/0193644 A1 - sequence listing, part 4

SEQ ID NO: 7440 - protein, 1141 aa, Homo sapiens
MPEAKPAAKKAPKGKDAPKGAPKEAPPKEAPAEAPKEAPPEDQSPTAEEPTGVFLKKPDSVSVETGKDAVVVAKVNGKELPDKPTIKWFKGKWLELGSKSGARFSFKESHNSASNVYTVELHIGKVVLGDRGYYRLEVKAKDTCDSCGFNIDVEAPRQDASGQSLESFKRTSEKKSDTAGELDFSGLLKKREVVEEEKKKKKKDDDDLGIPPEIWELLKGAKKSEYEKIAFQYGITDLRGMLKRLKKAKVEVKKSAAFTKKLDPAYQVDRGNKIKLMVEISDPDLTLKWFKNGQEIKPSSKYVFENVGKKRILTINKCTLADDAAYEVAVKDEKCFTELFVKEPPVLIVTPLEDQQVFVGDRVEMAVEVSEEGAQVMWMKDGVELTREDSFKARYRFKKDGKRHILIFSDVVQEDRGRYQVITNGGQCEAELIVEEKQLEVLQDIADLTVKASEQAVFKCEVSDEKVTGKWYKNGVEVRPSKRITISHVGRFHKLVIDDVRPEDEGDYTFVPDGYALSLSAKLNFLEIKVEYVPKQEPPKIHLDCSGKTSENAIVVVAGNKLRLDVSITGEPPPVATWLKGDEVFTTTEGRTRIEKRVDCSSFVIESAQREDEGRYTIKVTNPVGEDVASIFLQVVDVPDPPEAVRITSVGEDWAILVWEPPMYDGGKPVTGYLVERKKKGSQRWMKLNFEVFTETTYESTKMIEGILYEMRVFAVNAIGVSQPSMNTKPFMPIAPTSEPLHLIVEDVTDTTTTLKWRPPNRIGAGGIDGYLVEYCLEGSEEWVPANTEPVERCGFTVKNLPTGARILFRVVGVNIAGRSEPATLAQPVTIREIAEPPKIRLPRHLRQTYIRKVGEQLNLVVPFQGKPRPQVVWTKGGAPLDTSRVHVRTSDFDTVFFVRQAARSDSGEYELSVQIENMKDTATIRIRVVEKAGPPINVMVKEVWGTNALVEWQAPKDDGNSEIMGYFVQKADKKTMEWFNVYERNRHTSCTVSDLIVGNEYYFRVYTENICGLSDSPGVSKNTARILKTGITFKPFEYKEHDFRMAPKFLTPLIDRVVVAGYSAALNCAVRGHPKPKVVWMKNKMEIREDPKFLITNYQGVLTLNIRRPSPFDAGTYTCRAVNELGEALAECKLEVRVPQ

SEQ ID NO: 7441 - protein, 1083 aa, Homo sapiens
MGPPRHPQAGEIEAGGAGGGRRLQVEMSSQQFPRLGAPSTGLSQAPSQIANSGSAGLINPAATVNDESGRDSEVSAREHMSSSSSLQSREEKQEPVVVRPYPQVQMLSTHHAVASATPVAVTAPPAHLTPAVPLSFSEGLMKPPPKPTMPSRPIAPAPPSTLSLPPKVPGQVTVTMESSIPQASAIPVATISGQQGHPSNLHHIMTTNVQMSIIRSNAPGPPLHIGASHLPRGAAAAAVMSSSKVTTVLRPTSQLPNAATAQPAVQHIIHQPIQSRPPVTTSNAIPPAVVATVSATRAQSPVITTTAAHATDSALSRPTLSIQHPPSAAISIQRPAQSRDVTTRITLPSHPALGTPKQQLHTMAQKTIFSTGTPVAAATVAPILATNTIPSATTAGSVSHTQAPTSTIVTMTVPSHSSHATAVTTSNIPVAKVVPQQITHTSPRIQPDYPAERSSLIPISGHRASPNPVAMETRSDNRPSVPVQFQYFLPTYPPSAYPLAAHTYTPITSSVSTIRQYPVSAQAPNSAITAQTGVGVASTVHLNPMQLMTVDASHARHIQGIQPAPISTQGIQPAPIGTPGIQPAPLGTQGIHSATPINTQGLQPAPMGTQQPQPEGKTSAVVLADGATIVANPISNPFSAAPAATTVVQTHSQSASTNAPAQGSSPRPSILRKKPATDGMAVRKTLIPPQPPDVASPRVESSMRSTSGSPRPAGAKPKSEIHVSMATPVTVSMETVSNQNNDQPTIAVPPTAQQPPPTIPTMIAAASPPSQPAVALSTIPGAVPITPPITTIAAAPPPSVTVGGSLSSVLGPPVPEIKVKEEVEPMDIMRPVSAVPPLATNTVSPSLALLANNLSMPTSDLPPGASPRKKPRKQQHVISTEEGDMMETNSTDDEKSTAKSLLVKAEKRKSPPKEYIDEEGVRYVPVRPRPPITLLRHYRNPWKAAYHHFQRYSDVRVKEEKKAMLQEIANQKGVSCRAQGWKVHLCAAQLLQLTNLEHDVYERLTNLQEGIIPKKKAATDDDLHRINELIQGNMQRCKLVMDQISEARDSMLKVLDHKDRVLKLLNKNGTVKKVSKLKRKEKV

SEQ ID NO: 7442 - protein, 616 aa, Homo sapiens
MDLWQLLLTLALAGSSDAFSGSEDSSKEPKFTKCRSPERETFSCHWTDEVHHGTKNLGPIQLFYTRRNTQEWTQEWKECPDYVSAGENSCYFNSSFTSIWIPYCIKLTSNGGTVDEKCFSVDEIVQPDPPIALNWTLLNVSLTGIHADIQVRWEAPRNADIQKGWMVLEYELQYKEVNETKWKMMDPILTTSVPVYSLKVDKEYEVRVRSKQRNSGNYGEFSEVLYVTLPQMSQFTCEEDFYFPWLLIIIFGIFGLTVMLFVFLFSKQQRIKMLILPPVPVPKIKGIDPDLLKEGKLEEVNTILAIHDSYKPEFHSDDSWVEFIELDIDEPDEKTEESDTDRLLSSDHEKSHSNLGVKDGDSGRTSCCEPDILETDFNANDIHEGTSEVAQPQRLKGEADLLCLDQKNQNNSPYHDACPATQQPSVIQAEKNKPQPLPTEGAESTHQAAHIQLSNPSSLSNIDFYAQVSDITPAGSVVLSPGQKNKAGMSQCDMHPEMVSLCQENFLMDNAYFCEADAKKCIPVAPHIKVESHIQPSLNQEDIYITTESLTTAAGRPGTGEHVPGSEMPVPDYTSIHIVQSPQGLILNATALPLPDKEFLSSCGYVSTDQLNKIMP

SEQ ID NO: 7443 - protein, 915 aa, Homo sapiens
MVQLRKLLRVLTLMKFPCCVLEVLLCALAAAARGQEMYAPHSIRIEGDVTLGGLFPVHAKGPSGVPCGDIKRENGIHRLEAMLYALDQINSDPNLLPNVTLGARILDTCSRDTYALEQSLTFVQALIQKDTSDVRCTNGEPPVFVKPEKVVGVIGASGSSVSIMVANILRLFQIPQISYASTAPELSDDRRYDFFSRVVPPDSFQAQAMVDIVKALGWNYVSTLASEGSYGEKGVESFTQISKEAGGLCIAQSVRIPQERKDRTIDFDRIIKQLLDTPNSRAVVIFANDEDIKQILAAAKRADQVGHFLWVGSDSWGSKINPLHQHEDIAEGAITIQPKRATVEGFDAYFTSRTLENNRRNVWFAEYWEENFNCKLTISGSKKEDTDRKCTGQERIGKDSNYEQEGKVQFVIDAVYAMAHALHHMNKDLCADYRGVCPEMEQAGGKKLLKYIRNVNFNGSAGTPVMFNKNGDAPGRYDIFQYQTTNTSNPGYRLIGQWTDELQLNIEDMQWGKGVREIPASVCTLPCKPGQRKKTQKGTPCCWTCEPCDGYQYQFDEMTCQHCPYDQRPNENRTGCQDIPIIKLEWHSPWAVIPVFLAMLGIIATIFVMATFIRYNDTPIVRASGRELSYVLLTGIFLCYIITFLMIAKPDVAVCSFRRVFLGLGMCISYAALLTKTNRIYRIFEQGKKSVTAPRLISPTSQLAITSSLISVQLLGVFIWFGVDPPNIIIDYDEHKTMNPEQARGVLKCDITDLQIICSLGYSILLMVTCTVYAIKTRGVPENFNEAKPIGFTMYTTCIVWLAFIPIFFGTAQSAEKLYIQTTTLTISMNLSASVALGMLYMPKVYIIIFHPELNVQKRKRSFKAVVTAATMSSRLSHKPSDRPNGEAKTELCENVDPNSPAAKKKYVSYNNLVI

SEQ ID NO: 7444 - protein, 577 aa, Homo sapiens
MKHQERFLFQGNNGTVLYTGDFRLAQGEAARMELLHSGGRVKDIQSVYLDTTFCDPRFYQIPSREECLSGVLELVRSWITRSPYHVVWLNCKAAYGYEYLFTNLSEELGVQVHVNKLDMFRNMPEILHHLTTDRNTQIHACRHPKAEEYFQWSKLPCGITSRNRIPLHIISIKPSTMWFGERSRKTNVIVRTGESSYRACFSFHSSYSEIKDFLSYLCPVNAYPNVIPVGTTMDKVVEILKPLCRSSQSTEPKYKPLGKLKRARTVHRDSEEEDDYLFDDPLPIPLRHKVPYPETFHPEVFSMTAVSEKQPEKLRQTPGCCRAECMQSSRFTNFVDCEESNSESEEEVGIPASLQGDLGSVLHLQKADGDVPQWEVFFKRNDEITDESLENFPSSTVAGGSQSPKLFSDSDGESTHISSQNSSQSTHITEQGSQGWDSQSDTVLLSSQERNSGDITSLDKADYRPTIKENIPASLMEQNVICPKDTYSDLKSRDKDVTIVPSTGEPTTLSSETHIPEEKSLLNLSTNADSQSSSDFEVPSTPEAELPKREHLQYLYEKLATGESIAVKKRKCSLLDT

SEQ ID NO: 7445 - protein, 831 aa, Homo sapiens
MDVSLCPAKCSFWRIFLLGSVWLDYVGSVLACPANCVCSKTEINCRRPDDGNLFPLLEGQDSGNSNGNASINITDISRNITSIHIENWRSLHTLNAVDMELYTGLQKLTIKNSGLRSIQPRAFAKNPHLRYINLSSNRLTTLSWQLFQTLSLRELQLEQNFFNCSCDIRWMQLWQEQGEAKLNSQNLYCINADGSQLPLFRMNISQCDLPEISVSHVNLTVREGDNAVITCNGSGSPLPDVDWIVTGLQSINTHQTNLNWTNVHAINLTLVNVTSEDNGFTLTCIAENVVGMSNASVALTVYYPPRVVSLEEPELRLEHCIEFVVRGNPPPTLHWLHNGQPLRESKIIHVEYYQEGEISEGCLLFNKPTHYNNGNYTLIAKNPLGTANQTINGHFLKEPFPVDEVSPTPPITVTHKPEEDTFGVSIAVGLAAFACVLLVVLFVMINKYGRRSKFGMKGPVAVISGEEDSASPLHHINHGITTPSSLDAGPDTVVIGMTRIPVIENPQYFRQGHNCHKPDTYVQHIKRRDIVLKRELGEGAFGKVFLAECYNLSPTKDKMLVAVKALKDPTLAARKDFQREAELLTNLQHEHIVKFYGVCGDGDPLIMVFEYMKHGDLNKFLRAHGPDAMILVDGQPRQAKGELGLSQMLHIASQIASGMVYLASQHFVHRDLATRNCLVGANLLVKIGDFGMSRDVYSTDYYRLFNPSGNDFCIWCEVGGHTMLPIRWMPPESIMYRKFTTESDVWSFGVILWEIFTYGKQPWFQLSNTEVIECITQGRVLERPRVCPKEVYDVMLGCWQREPQQRLNIKEIYKILHALGKATPIYLDILG

SEQ ID NO: 7446 - protein, 483 aa, Homo sapiens
MSLQAPPRLLELAEQSLLRDRALAIPTLEELPRELFPPLFMEAFTRRCCETLTTMVQAWPFTCLPLGSLMKSCNLEIFRAVLEGLDALLAQKVRPRRWKLQVLDLRNVDENFWGIWSGASALSPEALSKRRTAGNCPRPGGQQPLMVILDLCFKNGTLDECLTHFLEWGKQRKGLLHVCCKELQIFGIAIHRIIEVLNTVELDCIQEVEVCCPWELSILIRFAPYLGQMRNLRKLVLFNIHVSACIPLDRKEQFVIQFTSQFLKLDYFQKLYMHSVSFLEGHLDQLLRCLQAPLETVVMTECLLSESDLKHLSWCPSIRQLKELDLRGITLTHFSPEPLSVLLEQAEATLQTLDLEDCGIVDSQLSAILPALSRCSQLSTFSFCGNLISMAALENLLRHTVGLSKLSLELYPAPLESYDAQGALCWGRFSQLGAELMKTLRDLRQPKIIVFSTVPCPRCGIRASYDLEPSHCLLNACCQGGFI

SEQ ID NO: 7447 - protein, 878 aa, Homo sapiens
MDLDKPSVWGSLKQRTRPLLINLSKKKVKKNPSKPPDLRARHHLDRRLSLSVPDLLEAEALAPEGRPYSGPQSSYTSVPSSLSTAGIFPKSSSSSLKQSEEELDWSQEEASHLHVVETDSEEAYASPAERRRVSSNGIFDLQKTSLGGDAPEEPEKLCGSSDLNASMTSQHFEEQSVPGEASDGLSNLPSPFAYLLTIHLKEGRNLVVRDRCGTSDPYVKFKLNGKTLYKSKVIYKNLNPVWDEIVVLPIQSLDQKLRVKVYDRDLTTSDFMGSAFVILSDLELNRTTEHILKLEDPNSLEDDMGVIVLNLNLVVKQGDFKRHRWSNRKRLSASKSSLIRNLRLSESLKKNQLWNGIISITLLEGKNVSGGSMTEMFVQLKLGDQRYKSKTLCKSANPQWQEQFDFHYFSDRMGILDIEVWGKDNKKHEERLGTCKVDISALPLKQANCLELPLDSCLGALLMLVTLTPCAGVSVSDLCVCPLADLSERKQITQRYCLQNSLKDVKDVGILQVKVLKAADLLAADFSGKSDPFCLLELGNDRLQTHTVYKNLNPEWNKVFTFPIKDIHDVLEVTVFDEDGDKPPDFLGKVAIPLLSIRDGQPNCYVLKNKDLEQAFKGVIYLEMDLIYNPVKASIRTFTPREKRFVEDSRKLSKKILSRDVDRVKRITMAIWNTMQFLKSCFQWESTLRSTIAFAVFLITVWNFELYMIPLALLLIFVYNFIRPVKGKVSSIQDSQESTDIDDEEDEDDKESEKKGLIERIYMVQDIVSTVQNVLEEIASFGERIKNTFNWTVPFLSSLACLILAAATIILYFIPLRYIILIWGINKFTKKLRNPYSIDNNELLDFLSRVPSDVQKVQYAELKLCSSHSPLRKKRSAL

SEQ ID NO: 7448 - protein, 414 aa, Homo sapiens
MKAQTALSFFLILITSLSGSQGIFPLAFFIYVPMNEQIVIGRLDEDIILPSSFERGSEVVIHWKYQDSYKVHSYYKGSDHLESQDPRYANRTSLFYNEIQNGNASLFFRRVSLLDEGIYTCYVGTAIQVITNKVVLKVGVFLTPVMKYEKRNTNSFLICSVLSVYPRPIITWKMDNTPISENNMEETGSLDSFSINSPLNITGSNSSYECTIENSLLKQTWTGRWTMKDGLHKMQSEHVSLSCQPVNDYFSPNQDFKVTWSRMKSGTFSVLAYYLSSSQNTIINESRFSWNKELINQSDFSMNLMDLNLSDSGEYLCNISSDEYTLLTIHTVHVEPSQETASHNKGLWILVPSAILAAFLLIWSVKCCRAQLEARRSRHPADGAQQERCCVPPGERCPSAPDNGEENVPLSGKV

SEQ ID NO: 7449 - protein, 779 aa, Homo sapiens
MGDEKDSWKVKTLDEILQEKKRRKEQEEKAEIKRLKNSDDRDSKRDSLEEGELRDHCMEITIRNSPYRREDSMEDRGEEDDSLAIKPPQQMSRKEKVHHRKDEKRKEKWKHARVKEREHERRKRHREEQDKARREWERQKRREMAREHSRRERGNDGVCLFRDRLEQLERKRERERKMREQQKEQREQKERERRAEERRKEREARREVSAHHRTMREDYSDKVKASHWSRSPPRPPRERFELGDGRKPVKEEKMEERDLLSDLQDISDSERKTSSAESSSAESGSGSEEEEEEEEEEEEEGSTSEESEEEEEEEEEEEEETGSNSEEASEQSAEEVSEEEMSEDEERENENHLLVVPESRFDRDSGESEEAEEEVGEGTPQSSALTEGDYVPDSPALLPIELKQELPKYLPALQGCRSVEEFQCLNRIEEGTYGVVYRAKDKKTDEIVALKRLKMEKEKEGFPITSLREINTILKAQHPNIVTVREIVVGSNMDKIYIVMNYVEHDLKSLMETMKQPFLPGEVKTLMIQLLRGVKHLHDNWILHRDLKTSNLLLSHAGILKVGDFGLAREYGSPLKAYTPVVVTQWYRAPELLLGAKEYSTAVDMWSVGCIFGELLTQKPLFPGNSEIDQINKVFKELGTPSEKIWPGYSELPVVKKMTFSEHPYNNLRKRFGALLSDQGFDLMNKFLTYFPGRRISAEDGLKHEYFRETPLPIDPSMFPTWPAKSEQQRVKRGTSPRPPEGGLGYSQLGDDDLKETGFHLTTTNQGASAAGPGFSLKF

SEQ ID NO: 7450 - protein, 658 aa, Homo sapiens
MFVSYLILTLLHVQTAVLARPGGESIGCDDYLGSDKVVDKCGVCGGDNTGCQVVSGVFKHALTSLGYHRVVEIPEGATKINITEMYKSNNYLALRSRSGRSIINGNWAIDRPGKYEGGGTMFTYKRPNEISSTAGESFLAEGPTNEILDVYMIHQQPNPGVHYEYVIMGTNAISPQVPPHRRPGEPFNGQMVTEGRSQEEGEQKGRNEEKEDLRGEAPEMFTSESAQTFPVRHPDRFSPHRPDNLVPPAPQPPRRSRDHNWKQLGTTECSTTCGKGSQYPIFRCVHRSTHEEAPESYCDSSMKPTPEEEPCNIFPCPAFWDIGEWSECSKTCGLGMQHRQVLCRQVYANRSLTVQPYRCQHLEKPETTSTCQLKICSEWQIRTDWTSCSVPCGVGQRTRDVKCVSNIGDVVDDEECNMKLRPNDIENCDMGPCAKSWFLTEWSERCSAECGAGVRTRSVVCMTNHVSSLPLEGCGNNRPAEATPCDNGPCTGKVEWFAGSWSQCSIECGSGTQQREVICVRKNADTFEVLDPSECSFLEKPPSQQSCHLKPCGAKWFSTEWSMCSKSCQGGFRVREVRCLSDDMTLSNLCDPQLKPEERESCNPQDCVPEVDENCKDKYYNCNVVVQARLCVYNYYKTACCASCTRVANRQTGFLGSR

SEQ ID NO: 7451 - protein, 515 aa, Homo sapiens
MGDWNLLGDTLEEVHIHSTMIGKIWLTILFIFRMLVLGVAAEDVWNDEQSGFICNTEQPGCRNVCYDQAFPISLIRYWVLQVIFVSSPSLVYMGHALYRLRVLEEERQRMKAQLRVELEEVEFEMPRDRRRLEQELCQLEKRKLNKAPLRGTLLCTYVIHIFTRSVVEVGFMIGQYLLYGFHLEPLFKCHGHPCPNIIDCFVSRPTEKTIFLLFMQSIATISLFLNILEIFHLGFKKIKRGLWGKYKLKKEHNEFHANKAKQNVAKYQSTSANSLKRLPSAPDYNLLVEKQTHTAVYPSLNSSSVFQPNPDNHSVNDEKCILDEQETVLSNEISTLSTSCSHFQHISSNNNKDTHKIFGKELNGNQLMEKRETEGKDSKRNYYSRGHRSIPGVAIDGENNMRQSPQTVFSLPANCDWKPRWLRATWGSSTEHENRGSPPKGNLKGQFRKGTVRTLPPSQGDSQSLDIPNTADSLGGLSFEPGLVRTCNNPVCPPNHVVSLTNNLIGRRVPTDLQI

SEQ ID NO: 7452 - protein, 486 aa, Homo sapiens
MVSHTFHMRTEESDASQEGDDLPKSSANTSHPKQDDSPKSSEETIQPKEGDIPKAPEETIQSKKEDLPKSSEKAIQPKESNIPKSSAKPIQPKLGNIPKASVKPSQPKEGDIPKAPEETIQSKKEDLPKSSEEAIQPKEGDIPKSSAKPIQPKLGNIAKTSVKPSQPKESDIPKSPEETIQPKEGDIPKSSAKPIQPKLGNIPKASVKPSQPKEGDISKSPEEAIQPKEGDLPKSLEEAIQPKEGDIPKSPEEAIQPKEGDIPKSLEEAIQPKEGDIPKSPEETIQPKKGDIPKSPEEAIQPKEGDIPKSPKQAIQPKEGDIPKSLEEAIPPKEIDIPKSPEETIQPKEDDSPKSLEEATPSKEGDILKPEEETMEFPEGDKVKVILSKEDFEASLKEAGERLVAVDFSATWCGPCRTIRPFFHALSVKHEDVVFLEVDADNCEEVVRECAIMCVPTFQFYKKEEKVDELCGALKEKLEAVIAELK

SEQ ID NO: 7453 - protein, 396 aa, Homo sapiens
MFLKAVVLTLALVAVAGARAEVSADQVATVMWDYFSQLSNNAKEAVEHLQKSELTQQLNALFQDKLGEVNTYAGDLQKKLVPFATELHERLAKDSEKLKEEIGKELEELRARLLPHANEVSQKIGDNLRELQQRLEPYADQLRTQVSTQAEQLRRQLTPYAQRMERVLRENADSLQASLRPHADELKAKIDQNVEELKGRLTPYADEFKVKIDQTVEELRRSLAPYAQDTQEKLNHQLEGLTFQMKKNAEELKARISASAEELRQRLAPLAEDVRGNLRGNTEGLQKSLAELGGHLDQQVEEFRRRVEPYGENFNKALVQQMEQLRQKLGPHAGDVEGHLSFLEKDLRDKVNSFFSTFKEKESQDKTLSLPELEQQQEQQQEQQQEQVQMLAPLES

SEQ ID NO: 7454 - protein, 637 aa, Homo sapiens
MASNERDAISWYQKKIGAYDQQIWEKSIEQTQIKGLKNKPKKMGHIKPDLIDVDLIRGSTFAKAKPEIPWTSLTRKGLVRVVFFPLFSNWWIQVTSLRIFVWLLLLYFMQVIAIVLYLMMPIVNISEVLGPLCLMLLMGTVHCQIVSTQITRPSGNNGNRRRRKLRKTVNGDGSRENGNNSSDKVRGIETLESVPIIGGFWETIFGNRIKRVKLISNKGTETDNDPSCVHPIIKRRQCRPEIRMWQTREKAKFSDGEKCRREAFRRLGNGVSDDLSSEEDGEARTQMILLRRSVEGASSDNGCEVKNRKSILSRHLNSQVKKTTTRWCHIVRDSDSLAESEFESAAFSQGSRSGVSGGSRSLNMSRRDSESTRHDSETEDMLWDDLLHGPECRSSVTSDSEGAHVNTLHSGTKRDPKEDVFQQNHLFWLQNSSPSSDRVSAIIWEGNECKKMDMSVLEISGIIMSRVNAYQQGVGYQMLGNVVTIGLAFFPFLHRLFREKSLDQLKSISAEEILTLFCGAPPVTPIIVLSIINFFERLCLTWMFFFMMCVAERTYKQRFLFAKLFSHITSARKARKYEIPHFRLKKVENIKIWLSLRSYLKRRGPQRSVDVVVSSVFLLTLSIAFICCAQVKVSHLL

SEQ ID NO: 7455 - protein, 926 aa, Homo sapiens
MDMFPLTWVFLALYFSRHQVRGQPDPPCGGRLNSKDAGYITSPGYPQDYPSHQNCEWIVYAPEPNQKIVLNFNPHFEIEKHDCKYDFIEIRDGDSESADLLGKHCGNIAPPTIISSGSMLYIKFTSDYARQGAGFSLRYEIFKTGSEDCSKNFTSPNGTIESPGFPEKYPHNLDCTFTILAKPKMEIILQFLIFDLEHDPLQVGEGDCKYDWLDIWDGIPHVGPLIGKYCGTKTPSELRSSTGILSLTFHTDMAVAKDGFSARYYLVHQEPLENFQCNVPLGMESGRIANEQISASSTYSDGRWTPQQSRLHGDDNGWTPNLDSNKEYLQVDLRFLTMLTAIATQGAISRETQNGYYVKSYKLEVSTNGEDWMVYRHGKNHKVFQANNDATEVVLNKLHAPLLTRFVRIRPQTWHSGIALRLELFGCRVTDAPCSNMLGMLSGLIADSQISASSTQEYLWSPSAARLVSSRSGWFPRIPQAQPGEEWLQVDLGTPKTVKGVIIQGARGGDSITAVEARAFVRKFKVSYSLNGKDWEYIQDPRTQQPKLFEGNMHYDTPDIRRFDPIPAQYVRVYPERWSPAGIGMRLEVLGCDWTDSKPTVETLGPTVKSEETTTPYPTEEEATECGENCSFEDDKDLQLPSGFNCNFDFLEEPCGWMYDHAKWLRTTWASSSSPNDRTFPDDRNFLRLQSDSQREGQYARLISPPVHLPRSPVCMEFQYQATGGRGVALQVVREASQESKLLWVIREDQGGEWKHGRIILPSYDMEYQIVFEGVIGKGRSGEIAIDDIRISTDVPLENCMEPISAFAVDIPEIHEREGYEDEIDDEYEVDWSNSSSATSGSGAPSTDKEKSWLYTLDPILITIIAMSSLGVLLGATCAGLLLYCTCSYSGLSSRSCTTLENYNFELYDGLKHKVKMNHQKCCSEA

SEQ ID NO: 7456 - protein, 849 aa, Homo sapiens
MVQKESQATLEERESELSSNPAASAGASLEPPAAPAPGEDNPAGAGGAAVAGAAGGARRFLCGVVEGFYGRPWVMEQRKELFRRLQKWELNTYLYAPKDDYKHRMFWREMYSVEEAEQLMTLISAAREYEIEFIYAISPGLDITFSNPKEVSTLKRKLDQVSQFGCRSFALLFDDIDHNMCAADKEVFSSFAHAQVSITNEIYQYLGEPETFLFCPTEYCGTFCYPNVSQSPYLRTVGEKLLPGIEVLWTGPKVVSKEIPVESIEEVSKIIKRAPVIWDNIHANDYDQKRLFLGPYKGRSTELIPRLKGVLTNPNCEFEANYVAIHTLATWYKSNMNGVRKDVVMSRQVAHSGAKASVVDGTPLVAAPSLNATTVVTTVYQEPIMSQGAALSGEPTTLTKEEEKKQPDEEPMDMVVEKQEETDHKNDNQILSEIVEAKMAEELKPMDTDKESIAESKSPEMSMQEDCISDIAPMQTDEQTNKEQFVPGPNEKPLYTAEPVTLEDLQLLADLFYLPYEHGPKGAQMLREFQWLRANSSVVSVNCKGKDSEKIEEWRSRAAKFEEMCGLVMGMFTRLSNCANRTILYDMYSYVWDIKSIMSMVKSFVQWLGCRSHSSAQFLIGDQEPWAFRGGLAGEFQPPPLTPTSKVYTIRPYFPKDEASVYKICREMYDDGVGLPFQSQPDLIGDKLVGGLLSLSLDYCFVLEDEDGICGYALGTVDVTPFIKKCKISWIPFMQEKYTKPNGDKELSEAEKIMLSFHEEQEVLPETFLANFPSLIKMDIHKKVTDPSVAKSMMACLLSSLKANGSRGAFCEVRPDDKRILEFYSKLGCFEIAKMEGFPKDVVILGRSL

SEQ ID NO: 7457 - protein, 920 aa, Homo sapiens
MAPTKPSFQQDPSRRERLQALRKEKSRDAARSRRGKENFEFYELAKLLPLPAAITSQLDKASIIRLTISYLKMRDFANQGDPPWNLRMEGPPPNTSVKGIQMWKSELCMRKTPCEVIGAQRRRSPSALAIEVFEAHLGSHILQSLDGFVFALNQEGKFLYISETVSIYLGLSQVELTGSSVFDYVHPGDHVEMAEQLGMKLPPGRGLLSQGTAEDGASSASSSSQSETPEPVESTSPSLLTTDNTLERSFFIRMKSTLTKRGVHIKSSGYKVIHITGRLRLRVSLSHGRTVPSQIMGLVVVAHALPPPTINEVRIDCHMFVTRVNMDLNIIYCENRISDYMDLTPVDIVGKRCYHFIHAEDVEGIRHSHLDLLNKGQCVTKYYRWMQKNGGYIWIQSSATIAINAKNANEKNIIWVNYLLSNPEYKDTPMDIAQLPHLPEKTSESSETSDSESDSKDTSGITEDNENSKSDEKGNQSENSEDPEPDRKKSGNACDNDMNCNDDGHSSSNPDSRDSDDSFEHSDFENPKAGEDGFGALGAMQIKVERYVESESDLRLQNCESLTSDSAKDSDSAGEAGAQASSKHQKRKKRRKRQKGGSASRRRLSSASSPGGLDAGLVEPPRLLSSPNSASVLKIKTEISEPINFDNDSSIWNYPPNREISRNESPYSMTKPPSSEHFPSPQGGGGGGGGGGGLHVAIPDSVLTPPGADGAAARKTQFGASATAALAPVASDPLSPPLSASPRDKHPGNGGGGGGGGGGAGGGGPSASNSLLYTGDLEALQRLQAGNVVLPLVHRVTGTLAATSTAAQRVYTTGTIRYAPAEVTLAMQSNLLPNAHAVNFVDVNSPGFGLDPKTPMEMLYHHVHRLNMSGPFGGAVSAASLTQMPAGNVFTTAEGLFSTLPFPVYSNGIHAAQTLERKED

SEQ ID NO: 7458 - protein, 1265 aa, Homo sapiens
MECPVMETGSLFTSGIKRHLKDKRISKTTKLNVSLASKIKTKILNNSSIFKISLKHNNRALAQALSREKENSRRITTEKMLLQKEVEKLNFENTFLRLKLNNLNKKLIDIEALMNNNLITAIEMSSLSEFHQSSFLLSASKKKRISKQCKLMRLPFARVPLTSNDDEDEDKEKMQCDNNIKSKTLPDIPSSGSTTQPLSTQDNSEVLFLKENNQNVYGLDDSEHISSIVDVPPRESHSHSDQSSKTSLMSEMRNAQSIGRRWEKPSPSNVTERKKRGSSWESNNLSADTPCATVLDKQHISSPELNCNNEINGHTNETNTEMQRNKQDLPGLSSESAREPNAECMNQIEDNDDFQLQKTVYDADMDLTASEVSKIVTVSTGIKKKSNKKTNEHGMKTFRKVKDSSSEKKRERSKRQFKNSSDVDIGEKIENRTERSDVLDGKRGAEDPGFIFNNEQLAQMNEQLAQVNELKKMTLQTGFEQGDRENVLCNKKEKRITNEQEETYSLSQSSGKFHQESKFDKGQNSLTCNKSKASRQTFVIHKLEKDNLLPNQKDKVTIYENLDVTNEFHTANLSTKDNGNLCDYGTHNILDLKKYVTDIQPSEQNESNINKLRKKVNRKTEIISGMNHMYEDNDKDVVHGLKKGNFFFKTQEDKEPISENIEVSKELQIPALSTRDNENQCDYRTQNVLGLQKQITNMYPVQQNESKVNKKLRQKVNRKTEIISEVNHLDNDKSIEYTVKSHSLFLTQKDKEIIPGNLEDPSEFETPALSTKDSGNLYDSEIQNVLGVKHGHDMQPACQNDSKIGKKPRLNVCQKSEIIPETNQIYENDNKGVHDLEKDNFFSLTPKDKETISENLQVTNEFQTVDLLIKDNGNLCDYDTQNILELKKYVTDRKSAEQNESKINKLRNKVNWKTEIISEMNQIYEDNDKDAHVQESYTKDLDFKVNKSKQKLECQDIINKHYMEVNSNEKESCDQILDSYKVVKKRKKESSCKAKNILTKAKNKLASQLTESSQTSISLESDLKHITSEADSDPGNPVELCKTQKQSTTTLNKKDLPFVEEIKEGECQVKKVNKMTSKSKKRKTSIDPSPESHEVMERILDSVQGKSTVSEQADKENNLENEKMVKNKPDFYTKAFRSLSEIHSPNIQDSSFDSVREGLVPLSVSSGKNVIIKENFALECSPAFQVSDDEHEKMNKMKFKVNRRTQKSGIGDRPLQDLSNTSFVSNNTAESENKSEDLSSERTSRRRRCTPFYFKEPSLRDKMRR

SEQ ID NO: 7459 - protein, 339 aa, Homo sapiens
MGGCAGSRRRFSDSEGEETVPEPRLPLLDHQGAHWKNAVGFWLLGLCNNFSYVVMLSAAHDILSHKRTSGNQSHVDPGPTPIPHNSSSRFDCNSVSTAPPGSRQWDLCCWKLRPGCLFSFCGDQPVCYFLLLTSPEAQDPGGEEEAESAARQPLIRTEAPESKPGSSSSLSLRERWTVFKGLLWYIVPLVVVYFAEYFINQGLFELLFFWNTSLSHAQQYRWYQMLYQAGVFASRSSLRCCRIRFTWALALLQCLNLVFLLADVWFGFLPSIYLVFLIILYEGLLGGAAYVNTFHNIALETSDEHREFAMAATCISDTLGISLSGLLALPLHDFLCQLS

SEQ ID NO: 7460 - protein, 684 aa, Homo sapiens
MVAERTHKAAATGARGPGELGAPGTVALVAARAERGARLPSPGSCGLLTLALCSLALSLLAHFRTAELQARVLRLEAERGEQQMETAILGRVNQLLDEKWKLHSRRRREAPKTSPGCNCPPGPPGPTGRPGLPGVKGQPGEKGSPGDAGLSIIGPRGPPGQPGTRGFPGFPGPIGLDGKPGHPGPKGDMGLTGPPGQPGPQGQKGEKGQCGEYPHRLLPLLNSVRLAPPPVIKRRTFQGEQSQASIQGPPGPPGPPGPSGPLGHPGLPGPMGPPGLPGPPGPKGDPGIQGYHGRKGERGMPGMPGKHGAKGAPGIAVAGMKGEPGIPGTKGDPGAEGKPGPPGLLGKRGQRGEKGAEGSPGLPGLLGQKGEKGDAGNSIGGGRGEPGPPGLPGPPGPKGEAGVDGQVGPPGQPGDKGERGAAGEQGPDGPKGSKGEPGKGEMVDYNGNINEALQEIRTLALMGPPGLPGQIGPPGAPGIPGQKGEIGLPGPPGHDGEKGPRGKPGDMGPPGPQGPPGKDGPPGVKGENGHPGSPGEKGEKGETGQAGSPGLQGVPGPKGEAGLDGAKGEKGFQGEKGDRGPLGLPGASGLDGRPGPPGTPGPIGVPGPAGPKGERGSKGDPGMTGPTGAAGLPGLHGPPGDKGNRGHRGFKGEKGEPGLPGLDGLDAPCPLGEDGLPVQGCWNK

SEQ ID NO: 7461 - protein, 308 aa, Homo sapiens
MTMENYSMAAQFVLDGLTQQAELQLPLFLLFLGIYVVTVVGNLGMILLIAVSPLLHTPMYYFLSSLSFVDFCYSSVITPKMLVNFLGKKNTILYSECMVQLFFFVVFVVAEGYLLTAMAYDRYVAICSPLLYNAIMSSWVCSLLVLAAFFLGFLSALTHTSAMMKLSFCKSHIINHYFCDVLPLLNLSCSNTHLNELLLFIIAGFNTLVPTLAVAVSYAFILYSILHIRSSEGRSKAFGTCSSHLMAVVIFFGSITFMYFKPPSSNSLDQEKVSSVFYTTVIPMLNPLIYSLRNKDVKKALRKVLVGK

SEQ ID NO: 7462 - protein, 420 aa, Homo sapiens
METFDPTELPELLKLYYRRLFPYSQYYRWLNYGGVIKNYFQHREFSFTLKDDIYIRYQSFNNQSDLEKEMQKMNPYKIDIGAVYSHRPNQHNTVKLGAFQAQEKELVFDIDMTDYDDVRRCCSSADICPKCWTLMTMAIRIIDRALKEDFGFKHRLWVYSGRRGVHCWVCDESVRKLSSAVRSGIVEYLSLVKGGQDVKKKVHLSEKIHPFIRKSINIIKKYFEEYALVNQDILENKESWDKILALVPETIHDELQQSFQKSHNSLQRWEHLKKVASRYQNNIKNDKYGPWLEWEIMLQYCFPRLDINVSKGINHLLKSPFSVHPKTGRISVPIDLQKVDQFDPFTVPTISFICRELDAISTNEEEKEENEAESDVKHRTRDYKKTSLAPYVKVFEHFLENLDKSRKGELLKKSDLQKDF

SEQ ID NO: 7463 - protein, 384 aa, Homo sapiens
MLSAAHDILSHKRTSGNQSHVDPGPTPIPHNSSSRFDCNSVSTAAVLLADILPTLVIKLLAPLGLHLLPYSPRVLVSGICAAGSFVLVAFSHSVGTSLCGVVFASISSGLGEVTFLSLTAFYPRAVISWWSSGTGGAGLLGALSYLGLTQAGLSPQQTLLSMLGIPALLLASYFLLLTSPEAQDPGGEEEAESAARQPLIRTEAPESKPGSSSSLSLRERWTVFKGLLWYIVPLVVVYFAEYFINQGLFELLFFWNTSLSHAQQYRWYQMLYQAGVFASRSSLRCCRIRFTWALALLQCLNLVFLLADVWFGFLPSIYLVFLIILYEGLLGGAAYVNTFHNIALETSDEHREFAMAATCISDTLGISLSGLLALPLHDFLCQLS

SEQ ID NO: 7464 - protein, 110 aa, Homo sapiens
MEEIPAQEAAGSPRVQFQSLETQSECLSPEPQFVQDTDMEQGLTGGILLRLPTTRIHSVNSCPALSHTQASAFSGETLAVLTAGISKRWPKYRLPIDIARPCSETPFPRL

SEQ ID NO: 7465 - protein, 2176 aa, Homo sapiens
MLRGPGPGLLLLAVQCLGTAVPSTGASKSKRQAQQMVQPQSPVAVSQSKPGCYDNGKHYQINQQWERTYLGNALVCTCYGGSRGFNCESKPEAEETCFDKYTGNTYRVGDTYERPKDSMIWDCTCIGAGRGRISCTIANRCHEGGQSYKIGDTWRRPHETGGYMLECVCLGNGKGEWTCKPIAEKCFDHAAGTSYVVGETWEKPYQGWMMVDCTCLGEGSGRITCTSRNRCNDQDTRTSYRIGDTWSKKDNRGNLLQCICTGNGRGEWKCERHTSVQTTSSGSGPFTDVRAAVYQPQPHPQPPPYGHCVTDSGVVYSVGMQWLKTQGNKQMLCTCLGNGVSCQETAVTQTYGGNSNGEPCVLPFTYNGRTFYSCTTEGRQDGHLWCSTTSNYEQDQKYSFCTDHTVLVQTRGGNSNGALCHFPFLYNNHNYTDCTSEGRRDNMKWCGTTQNYDADQKFGFCPMAAHEEICTTNEGVMYRIGDQWDKQHDMGHMMRCTCVGNGRGEWTCIAYSQLRDQCIVDDITYNVNDTFHKRHEEGHMLNCTCFGQGRGRWKCDPVDQCQDSETGTFYQIGDSWEKYVHGVRYQCYCYGRGIGEWHCQPLQTYPSSSGPVEVFITETPSQPNSHPIQWNAPQPSHISKYILRWRPKNSVGRWKEATIPGHLNSYTIKGLKPGVVYEGQLISIQQYGHQEVTRFDFTTTSTSTPVTSNTVTGETTPFSPLVATSESVTEITASSFVVSWVSASDTVSGFRVEYELSEEGDEPQYLDLPSTATSVNIPDLLPGRKYIVNVYQISEDGEQSLILSTSQTTAPDAPPDTTVDQVDDTSIVVRWSRPQAPITGYRIVYSPSVEGSSTELNLPETANSVTLSDLQPGVQYNITIYAVEENQESTPVVIQQETTGTPRSDTVPSPRDLQFVEVTDVKVTIMWTPPESAVTGYRVDVIPVNLPGEHGQRLPISRNTFAEVTGLSPGVTYYFKVFAVSHGRESKPLTAQQTTKLDAPTNLQFVNETDSTVLVRWTPPRAQITGYRLTVGLTRRGQPRQYNVGPSVSKYPLRNLQPASEYTVSLVAIKGNQESPKATGVFTTLQPGSSIPPYNTEVTETTIVITWTPAPRIGFKLGVRPSQGGEAPREVTSDSGSIVVSGLTPGVEYVYTIQVLRDGQERDAPIVNKVVTPLSPPTNLHLEANPDTGVLTVSWERSTTPDITGYRITTTPTNGQQGNSLEEVVHADQSSCTFDNLSPGLEYNVSVYTVKDDKESVPISDTIIPAVPPPTDLRFTNIGPDTMRVTWAPPPSIDLTNFLVRYSPVKNEEDVAELSISPSDNAVVLTNLLPGTEYVVSVSSVYEQHESTPLRGRQKTGLDSPTGIDFSDITANSFTVHWIAPRATITGYRIRHHPEHFSGRPREDRVPHSRNSITLTNLTPGTEYVVSIVALNGREESPLLIGQQSTVSDVPRDLEVVAATPTSLLISWDAPAVTVRYYRITYGETGGNSPVQEFTVPGSKSTATISGLKPGVDYTITVYAVTGRGDSPASSKPISINYRTEIDKPSQMQVTDVQDNSISVKWLPSSSPVTGYRVTTTPKNGPGPTKTKTAGPDQTEMTIEGLQPTVEYVVSVYAQNPSGESQPLVQTAVTTIPAPTDLKFTQVTPTSLSAQWTPPNVQLTGYRVRVTPKEKTGPMKEINLAPDSSSVVVSGLMVATKYEVSVYALKDTLTSRPAQGVVTTLENVSPPRRARVTDATETTITISWRTKTETITGFQVDAVPANGQTPIQRTIKPDVRSYTITGLQPGTDYKIYLYTLNDNARSSPVVIDASTAIDAPSNLRFLATTPNSLLVSWQPPRARITGYIIKYEKPGSPPREVVPRPRPGVTEATITGLEPGTEYTIYVIALKNNQKSEPLIGRKKTGQEALSQTTISWAPFQDTSEYIISCHPVGTDEEPLQFRVPGTSTSATLTGLTRGATYNVIVEALKDQQRHKVREEVVTVGNSVNEGLNQPTDDSCFDPYTVSHYAVGDEWERMSESGFKLLCQCLGFGSGHFRCDSSRWCHDNGVNYKIGEKWDRQGENGQMMSCTCLGNGKGEFKCDPHEATCYDDGKTYHVGEQWQKEYLGAICSCTCFGGQRGWRCDNCRRPGGEPSPEGTTGQSYNQYSQRYHQRTNTNVNCPIECFMPLDVQADREDSRE

SEQ ID NO: 7466 - protein, 1115 aa, Homo sapiens
MSWFSGLLVPKVDERKTAWGERNGQKRSRRRGTRAGGFCTPRYMSCLRDAEPPSPTPAGPPRCPWQDDAFIRRGGPGKGKELGLRAVALGFEDTEVTTTAGGTAEVAPDAVPRSGRSCWRRLVQVFQSKQFRSAKLERLYQRYFFQMNQSSLTLLMAVLVLLTAVLLAFHAAPARPQPAYVALLACAAALFVGLMVVCNRHSFRQDSMWVVSYVVLGILAAVQVGGALAADPRSPSAGLWCPVFFVYIAYTLLPIRMRAAVLSGLGLSTLHLILAWQLNRGDAFLWKQLGANVLLFLCTNVIGICTHYPAEVSQRQAFQETRGYIQARLHLQHENRQQERLLLSVLPQHVAMEMKEDINTKKEDMMFHKIYIQKHDNVSILFADIEGFTSLASQCTAQELVMTLNELFARFDKLAAENHCLRIKILGDCYYCVSGLPEARADHAHCCVEMGVDMIEAISLVREVTGVNVNMRVGIHSGRVHCGVLGLRKWQFDVWSNDVTLANHMEAGGRAGRIHITRATLQYLNGDYEVEPGRGGERNAYLKEQHIETFLILGASQKRKEEKAMLAKLQRTRANSMEGLMPRWVPDRAFSRTKDSKAFRQMGIDDSSKDNRGTQDALNPEDEVDEFLSRAIDARSIDQLRKDHVRRFLLTFQREDLEKKYSRKVDPRFGAYVACALLVFCFICFIQLLIFPHSTLMLGIYASIFLLLLITVLICAVYSCGSLFPKALQRLSRSIVRSRAHSTAVGIFSVLLVFTSAIANMYFIGNMLLSLLASSVFLHISSIGKLAMIFVLGLIYLVLLLLGPPATIFDNYDLLLGVHGLASSNETFDGLDCPAAGRVALKYMTPVILLVFALALYLHAQQVESTARLDFLWKLQATGEKEEMEELQAYNRRLLHNILPKDVAAHFLARERRNDELYYQSCECVAVMFASIANFSEFYVELEANNEGVECLRLLNEIIADFDEIISEERFRQLEKIKTIGSTYMAASGLNASTYDQVGRSHITALADYAMRLMEQMKHINEHSFNNFQMKIGLNMGPVVAGVIGARKPQYDIWGNTVNVSSRMDSTGVPDRIQVTTDLYQVLAAKGYQLECRGVVKVKGKGEMTTYFLNGGPSS

SEQ ID NO: 7467 - protein, 990 aa, Homo sapiens
MGPPSSSGFYVSRAVALLLAGLVAALLLALAVLAALYGHCERVPPSELPGLRDLEAESSPPLRQKPTPTPKPSSARELAVTTTPSNWRPPGPWDQLRLPPWLVPLHYDLELWPQLRPDELPAGSLPFTGRVNITVRCTVATSRLLLHSLFQDCERAEVRGPLSPGTGNATVGRVPVDDVWFALDTEYMVLELSEPLKPGSSYELQLSFSGLVKEDLREGLFLNVYTDQGERRALLASQLEPTFARYVFPCFDEPALKATFNITMIHHPSYVALSNMPKLGQSEKEDVNGSKWTVTTFSTTPHMPTYLVAFVICDYDHVNRTERGKEIRIWARKDAIANGSADFALNITGPIFSFLEDLFNISYSLPKTDIIALPSFDNHAMENWGLMIFDESGLLLEPKDQLTEKKTLISYVVSHEIGHQWFGNLVTMNWWNNIWLNEGFASYFEFEVINYFNPKLPRNEIFFSNILHNILREDHALVTRAVAMKVENFKTSEIQELFDIFTYSKGASMARMLSCFLNEHLFVSALKSYLKTFSYSNAEQDDLWRHFQMAIDDQSTVILPATIKNIMDSWTHQSGFPVITLNVSTGVMKQEPFYLENIKNRTLLTSNDTWIVPILWIKNGTTQPLVWLDQSSKVFPEMQVSDSDHDWVILNLNMTGYYRVNYDKLGWKKLNQQLEKDPKAIPVIHRLQLIDDAFSLSKNNYIEIETALELTKYLAEEDEIIVWHTVLVNLVTRDLVSEVNIYDIYSLLKRYLLKRLNLIWNIYSTIIRENVLALQDDYLALISLEKLFVTACWLGLEDCLQLSKELFAKWVDHPENEIPYPIKDVVLCYGIALGSDKEWDILLNTYTNTTNKEEKIQLAYAMSCSKDPWILNRYMEYAISTSPFTSNETNIIEVVASSEVGRYVAKDFLVNNWQAVSKRYGTQSLINLIYTIGRTVTTDLQIVELQQFFSNMLEEHQRIRVHANLQTIKNENLKNKKLSARIAAWLRRNT

SEQ ID NO: 7468 - protein, 770 aa, Homo sapiens
MPASAARPRPGPGQPTASPFPLLLLAVLSGPVSGRVPRSVPRTSLPISEADSCLTRFAVPHTYNYSVLLVDPASHTLYVGARDTIFALSLPFSGERPRRIDWMVPEAHRQNCRKKGKKEDECHNFVQILAIANASHLLTCGTFAFDPKCGVIDVSRFQQVERLESGRGKCPFEPAQRSAAVMAGGVLYAATVKNYLGTEPIITRAVGRAEDWIRTDTLPSWLNAPAFVAAVALSPAEWGDEDGDDEIYFFFTETSRAFDSYERIKVPRVARVCAGDLGGRKTLQQRWTTFLKADLLCPGPEHGRASSVLQDVAVLRPELGAGTPIFYGIFSSQWEGATISAVCAFRPQDIRTVLNGPFRELKHDCNRGLPVVDNDVPQPRPGECITNNMKLRHFGSSLSLPDRVLTFIRDHPLMDRPVFPADGHPLLVTTDTAYLRVVAHRVTSLSGKEYDVLYLGTEDGHLHRAVRIGAQLSVLEDLALFPEPQPVENMKLYHSWLLVGSRTEVTQVNTTNCGRLQSCSECILAQDPVCAWSFRLDECVAHAGEHRGLVQDIESADVSSLCPKEPGERPVVFEVPVATAAHVVLPCSPSSAWASCVWHQPSGVTALTPRRDGLEVVVTPGAMGAYACECQEGGAAHVVAAYSLVWGSQRDAPSRAHTVGAGLAGFFLGILAASLTLILIGRRQQRRRQRELLARDKVGLDLGAPPSGTTSYSQDPPSPSPEDERLPLALAKRGSGFGGFSPPFLLDPCPSPAHIRLTGAPLATCDETSI

SEQ ID NO: 7469 - protein, 357 aa, Homo sapiens
MPEPGPDAAGTASAQPQPPPPPPPAPKESPFSIKNLLNGDHHRPPPKPQPPPRTLFAPASAAAAAAAAAAAAAKGALEGAAGFALSQVGDLAFPRFEIPAQRFALPAHYLERSPAWWYPYTLTPAGGHLPRPEASEKALLRDSSPASGTDRDSPEPLLKADPDHKELDSKSPDEIILEESDSEESKKEGEAAPGAAGASVGAAAATPGAEDWKKGAESPEKKPACRKKKTRTVFSRSQVFQLESTFDMKRYLSSSERAGLAASLHLTETQVKIWFQNRRNKWKRQLAAELEAANLSHAAAQRIVRVPILYHENSAAEGAAAAAAGAPVPVSQPLLTFPHPVYYSHPVVSSVPLLRPV

SEQ ID NO: 7470 - protein, 744 aa, Homo sapiens
MIKRRAHPGAGGDRTRPRRRRSTESWIERCLNESENKRYSSHTSLGNVSNDENEEKENNRASKPHSTPATLQWLEENYEIAEGVCIPRSALYMHYLDFCEKNDTQPVNAASFGKIIRQQFPQLTTRRLGTRGQSKYHYYGIAVKESSQYYDVMYSKKGAAWVSETGKKEVSKQTVAYSPRSKLGTLLPEFPNVKDLNLPASLPEEKVSTFIMMYRTHCQRILDTVIRANFDEVQSFLLHFWQGMPPHMLPVLGSSTVVNIVGVCDSILYKAISGVLMPTVLQALPDSLTQVIRKFAKQLDEWLKVALHDLPENLRNIKFELSRRFSQILRRQTSLNHLCQASRTVIHSADITFQMLEDWRNVDLNSITKQTLYTMEDSRDEHRKLITQLYQEFDHLLEEQSPIESYIEWLDTMVDRCVVKVAAKRQGSLKKVAQQFLLMWSCFGTRVIRDMTLHSAPSFGSFHLIHLMFDDYVLYLLESLHCQERANELMRAMKGEGSTAEVREEIILTEAAAPTPSPVPSFSPAKSATSVEVPPPSSPVSNPSPEYTGLSTTGAMQSYTWSLTYTVTTAAGSPAENSQQLPCMRNTHVPSSSVTHRIPVYPHREEHGYTGSYNYGSYGNQHPHPMQSQYPALPHDTAISGPLHYAPYHRSSAQYPFNSPTSRMEPCLMSSTPRLHPTPVTPRWPEVPSANTCYTSPSVHSARYGNSSDMYTPLTTRRNSEYEHMQHFPGFAYINGEASTGWAK

SEQ ID NO: 7471 - protein, 925 aa, Homo sapiens
MAWLRLQPLTSAFLHFGLVTFVLFLNGLRAEAGGSGDVPSTGQNNESCSGSSDCKEGVILPIWYPENPSLGDKIARVIVYFVALIYMFLGVSIIADRFMASIEVITSQEREVTIKKPNGETSTTTIRVWNETVSNLTLMALGSSAPEILLSLIEVCGHGFIAGDLGPSTIVGSAAFNMFIIIGICVYVIPDGETRKIKHLRVFFITAAWSIFAYIWLYMILAVFSPGVVQVWEGLLTLFFFPVCVLLAWVADKRLLFYKYMHKKYRTDKHRGIIIETEGDHPKGIEMDGKMMNSHFLDGNLVPLEGKEVDESRREMIRILKDLKQKHPEKDLDQLVEMANYYALSHQQKSRAFYRIQATRMMTGAGNILKKHAAEQAKKASSMSEVHTDEPEDFISKVFFDPCSYQCLENCGAVLLTVVRKGGDMSKTMYVDYKTEDGSANAGADYEFTEGTVVLKPGETQKEFSVGIIDDDIFEEDEHFFVRLSNVRIEEEQPEEGMPPAIFNSLPLPRAVLASPCVATVTILDDDHAGIFTFECDTIHVSESIGVMEVKVLRTSGARGTVIVPFRTVEGTAKGGGEDFEDTYGELEFKNDETVKTIHIKVIDDEAYEKNKNYFIEMMGPRMVDMSFQKALLLSPDRKLTMEEEEAKRIAEMGKPVLGEHPKLEVIIEESYEFKTTVDKLIKKTNLALVVGTHSWRDQFMEAITVSAAGDEDEDESGEERLPSCFDYVMHFLTVFWKVLFACVPPTEYCHGWACFAVSILIIGMLTAIIGDLASHFGCTIGLKDSVTAVVFVAFGTSVPDTFASKAAALQDVYADASIGNVTGSNAVNVFLGIGLAWSVAAIYWALQGQEFHVSAGTLAFSVTLFTIFAFVCISVLLYRRRPHLGGELGGPRGCKLATTWLFVSLWLLYILFATLEAYCYIKGF

SEQ ID NO: 7472 - protein, 901 aa, Homo sapiens
MSGPGNKRAAGDGGSGPPEKKLSREEKTTTTLIEPIRLGGISSTEEMDLKVLQFKNKKLAERLEQRQACEDELRERIEKLEKRQATDDATLLIVNRYWAQLDETVEALLRCHESQGELSSAPEAPGTQEGPTCDGTPLPEPGTSELRDPLLMQLRPPLSEPALAFVVALGASSSEEVELELQGRMEFSKAAVSRVVEASDRLQRRVEELCQRVYSRGDSEPLSEAAQAHTRELGRENRRLQDLATQLQEKHHRISLEYSELQDKVTSAETKVLEMETTVEDLQWDIEKLRKREQKLNKHLAEALEQLNSGYYVSGSSSGFQGGQITLSMQKSDELGLQKKLRTEVIQLEDTLAQVRKEYEMLRIEFEQNLAANEQAGPINREMRHLISSLQNHNHQLKGDAQRYKRKLREVQAEIGKLRAQASGSAHSTPNLGHPEDSGVSAPAPGKEEGGPGPVSTPDNRKEMAPVPGTTTTTTSVKKEELVPSEEDFQGITPGAQGPSSRGREPEARPKRELREREGPSLGPPPVASALSRADREKAKVEETKRKESELLKGLRAELKKAQESQKEMKLLLDMYKSAPKEQRDKVQLMAAERKAKAEVDELRSRIRELEERDRRESKKIADEDALRRIRQAEEQIEHLQRKLGATKQEEEALLSEMDVTGQAFEDMQEQNGRLLQQLREKDDANFKLMSERIKANQIHKLLREEKDELGEQVLGLKSQVDAQLLTVQKLEEKERALQGSLGGVEKELTLRSQALELNKRKAVEAAQLAEDLKVQLEHVQTRLREIQPCLAESRAAREKESFNLKRAQEDISRLRRKLEKQRKVEVYADADEILQEEIKEYKARLTCPCCNTRKKDAVLTKCFHVFCFECVRGRYEARQRKCPKCNAAFGAHDFHRIYIS

SEQ ID NO: 7473 - protein, 693 aa, Homo sapiens
MDSVAFEDVAINFTCEEWALLGPSQKSLYRDVMQETIRNLDCIGMIWQNHDIEEDQYKDLRRNLRCHMVERACEIKDNSQCGGPFTQTQDSIVNEKIPGVDPWESSECTDVLMGRSSLNCYVRVDSEHKPCEYQEYGEKPYTHTQCGTAFSYQPCFQIHERPQHGKKLYDCKECASFSSLENLQRHMAAHHGDGPRICKLCGNAFIWPSLFHMLRRTHTEEKPYEYEQCSTAFPAYSSTLRHERTHSGEKPYQCKQCGKAFSCSCYTQLYERTHTGEQSYECKQCGKAFYHLGSFQRHMIVHTGDGPHKCKICGKGFLSPSSVRRHKRTHTGEKPYECKYCGKAFSDCTGFRRHMITHTGDGPHKCKVCGKAFDSPSLCRRHETTHTGEKPYKCECGKAFSDFYYFRNHETTHTGEKPYKCKQCGKAFICCTYLQIHERIHTGERPYKCKQCGKAFRSSNYIRVHEKTHTGEKPYECKQCGKALSHLKSFQRHMIMHTGDGPHKCKICGKSFDSPSSFRRHERIHTGERPYKCKLCGKGFRSSSYIQLHERTHTGEKPYGCQQCGKALSDLSSFRRHMITHTGNGPHKCKICGKGFDYPSSVQRHERTHTGEKPYECKECGKAFSHSSYLRIHERVHTGEKPYKCKECGKPFHCPSAFHKHERTHSMEKPYKCKECGEAFHCISSFHKHEMTH

SEQ ID NO: 7474 - protein, 751 aa, Homo sapiens
MLPGLALLLLAAWTARALEVPTDGNAGLLAEPQIAMFCGRLNMHMNVQNGKWDSDPSGTKTCIDTKEGILQYCQEVYPELQITNVVEANQPVTIQNWCKRGRKQCKTHPHFVIPYRCLVGEFVSDALLVPDKCKFLHQERMDVCETHLHWHTVAKETCSEKSTNLHDYGMLLPCGIDKFRGVEFVCCPLAEESDNVDSADAEEDDSDVWWGGADTDYADGSEDKVVEVAEEEEVAEVEEEEADDDEDDEDGDEVEEEAEEPYEEATERTTSIATTTTTTTESVEEVVREVCSEQAETGPCRAMISRWYFDVTEGKCAPFFYGGCGGNRNNFDTEEYCMAVCGSAIPTTAASTPDAVDKYLETPGDENEHAHFQKAKERLEAKHRERMSQVMREWEEAERQAKNLPKADKKAVIQHFQEKVESLEQEAANERQQLVETHMARVEAMLNDRRRLALENYITALQAVPPRPRHVFNMLKKYVRAEQKDRQHTLKHFEHVRMVDPKKAAQIRSQVMTHLRVIYERMNQSLSLLYNVPAVAEEIQDEVDELLQKEQNYSDDVLANMISEPRISYGNDALMPSLTETKTTVELLPVNGEFSLDDLQPWHSFGADSVPANTENEVEPVDARPAADRGLTTRPGSGLTNIKTEEISEVKMDAEFRHDSGYEVHHQKLVFFAEDVGSNKGAIIGLMVGGVVIATVIVITLVMLKKKQYTSIHHGVVEVDAAVTPEERHLSKMQQNGYENPTYKFFEQMQN

SEQ ID NO: 7475 - protein, 314 aa, Homo sapiens
MPLEQRSQHCKPEEGLEAQGEALGLVGAQAPATEEQETASSSSTLVEVTLREVPAAESPSPPHSPQGASTLPTTINYTLWSQSDEGSSNEEQEGPSTFPDLETSFQVALSRKMAELVHFLLLKYRAREPFTKAEMLGSVIRNFQDFFPVIFSKASEYLQLVFGIEVVEVVRIGHLYILVTCLGLSYDGLLGDNQIVPKTGLLIIVLAIIAKEGDCAPEEKIWEELSVLEASDGREDSVFAHPRKLLTQDLVQENYLEYRQVPGSDPACYEFLWGPRALVETSYVKVLHHLLKISGGPHISYPPLHEWAFREGEE

SEQ ID NO: 7476 - protein, 480 aa, Homo sapiens
MNASEFRRRGKEMVDYMANYMEGIEGRQVYPDVEPGYLRPLIPAAAPQEPDTFEDIINDVEKIIMPGVTHWHSPYFFAYFPTASSYPAMLADMLCGAIGCIGFSWAASPACTELETVMMDWLGKMLELPKAFLNEKAGEGGGVIQGSASEATLVALLAARTKVIHRLQAASPELTQAAIMEKLVAYSSDQAHSSVERAGLIGGVKLKAIPSDGNFAMRASALQEALERDKAAGLIPFFMVATLGTTTCCSFDNLLEVGPICNKEDIWLHVDAAYAGSAFICPEFRHLLNGVEFADSFNFNPHKWLLVNFDCSAMWVKKRTDLTGAFRLDPTYLKHSHQDSGLITDYRHWQIPLGRRFRSLKMWFVFRMYGVKGLQAYIRKHVQLSHEFESLVRQDPRFEICVEVILGLVCFRLKGSNKVNEALLQRINSAKKIHLVPCHLRDKFVLRFAICSRTVESAHVQRAWEHIKELAADVLRAERE

SEQ ID NO: 7477 - protein, 350 aa, Homo sapiens
MKEDGGAEFSARSRKRKANVTVFLQDPDEEMAKIDRTARDQCGSQPWDNNAVCADPCSLIPTPDKEDDDRVYPNSTCKPRIIAPSRGSPLPVLSWANREEVWKIMLNKEKTYLRDQHFLEQHPLLQPKMRAILLDWLMEVCEVYKLHRETFYLAQDFFDRYMATQENVVKTLLQLIGISSLFIAAKLEEIYPPKLHQFAYVTDGACSGDEILTMELMIMKLLDLCVLDVDCLEFPYGILAASALYHFSSSELMQKVSGYQWCDIENCVKWMVPFAMVIRETGSSKLKHFRGVADEDAHNIQTHRDSLDLLDKARAKKAMLSEQNRASPLPSGLLTPPQSGKKQSSGPEMA

SEQ ID NO: 7478 - protein, 1015 aa, Homo sapiens
MPRATALGALVSLLLLLPLPRGAGGLGERPDATADYSELDGEEGTEQQLEHYHDPCKAAVFWGDIALDEDDLKLFHIDKARDWTKQTVGATGHSTGGLEEQASESSPDTTAMDTGTKEAGKDGRENTTLLHSPGTLHAAAKTFSPRVRRATTSRTERIWPGGVIPYVIGGNFTGSQRAIFKQAMRHWEKHTCVTFIERTDEESFIVFSYRTCGCCSYVGRRGGGPQAISIGKNCDKFGIVAHELGHVVGFWHEHTRPDRDQHVTIIRENIQPGQEYNFLKMEAGEVSSLGETYDFDSIMHYARNTFSRGVFLDTILPRQDDNGVRPTIGQRVRLSQGDIAQARKLYKCPACGETLQDTTGNFSAPGFPNGYPSYSHCVWRISVTPGEKIVLNFTSMDLFKSRLCWYDYVEVRDGYWRKAPLLGRFCGDKIPEPLVSTDSRLWVEFRSSSNILGKGFFAAYEATCGGDMNKDAGQIQSPNYPDDYRPSKECVWRITVSEGFHVGLTFQAFEIERHDSCAYDYLEVRDGPTEESALIGHFCGYEKPEDVKSSSNRLWMKFVSDGSINKAGFAANFFKEVDECSWPDHGGCEHRCVNTLGSYKCACDPGYELAADKKMCEVACGGFITKLNGTITSPGWPKEYPTNKNCVWQVVAPAQYRISLQFEVFELEGNDVCKYDFVEVRSGLSPDAKLHGRFCGSETPEVITSQSNNMRVEFKSDNTVSKRGFRAHFFSDKDECAKDNGGCQHECVNTFGSYLCRCRNGYWLHENGHDCKEAGCAHKISSVEGTLASPNWPDKYPSRRECTWNISSTAGHRVKLTFNEFEIEQHQECAYDHLEMYDGPDSLAPILGRFCGSKKPDPTVASGSSMFLRFYSDASVQRKGFQAVHSTECGGRLKAEVQTKELYSHAQFGDNNYPSEARCDWVIVAEDGYGVELTFRTFEVEEEADCGYDYMEAYDGYDSSAPRLGRFCGSGPLEEIYSAGDSLMIRFRTDDTINKKGFHARYTSTKFQDALHMKK

SEQ ID NO: 7479 - protein, 1274 aa, Homo sapiens
MLDPSSSEEESDEIVEEESGKEVLGSAPSGARLSPSRTSEGSAGSAGLGGGGAGAGAGVGAGGGGGSGASSGGGAGGLQPSSRAGGGRPSSPSPSVVSEKEKEELERLQKEEEERKKRLQLYVFVMRCIAYPFNAKQPTDMARRQQKISKQQLQTVKDRFQAFLNGETQIMADEAFMNAVQSYYEVFLKSDRVARMVQSGGCSANDSREVFKKHIEKRVRSLPEIDGLSKETVLSSWMAKFDAIYRGEEDPRKQQARMTASAASELILSKEQLYEMFQNILGIKKFEHQLLYNACQLDNPDEQAAQIRRELDGRLQMADQIARERKFPKFVSKEMENMYIEELKSSVNLLMANLESMPVSKGGEFKLQKLKRSHNASIIDMGEESENQLSKSDVVLSFSLEVVIMEVQGLKSLAPNRIVYCTMEVEGGEKLQTDQAEASKPTWGTQGDFSTTHALPAVKVKLFTESTGVLALEDKELGRVILHPTPNSPKQSEWHKMTVSKNCPDQDLKIKLAVRMDKPQNMKHSGYLWAIGKNVWKRWKKRFFVLVQVSQYTFAMCSYREKKAEPQELLQLDGYTVDYTDPQPGLEGGRAFFNAVKEGDTVIFASDDEQDRILWVQAMYRATGQSHKPVPPTQVQKLNAKGGNVPQLDAPISQFYADRAQKHGMDEFISSNPCNFDHASLFEMGWFSPGQVFVLDEYCARNGVRGCHRHLCYLRDLLERAENGAMIDPTLLHYSFAFCASHVHGNRPDGIGTVTVEEKERFEEIKERLRVLLENQITHFRYCFPFGRPEGALKATLSLLERVLMKDIVTPVPQEEVKTVIRKCLEQAALVNYSRLSEYAKIEENVGRLITPAKKLEDTIRLAELVIEVLQQNEEHHAEAFAWWSDLMVEHAETFLSLFAVDMDAALEVQPPDTWDSFPLFQLLNDFLRTDYNLCNGKFHKHLQDLFAPLVVRYVDLMESSIAQSIHRGFERESWEPVNNGSGTSEDLFWKLDALQTFIRDLHWPEEEFGKHLEQRLKLMASDMIESCVKRTRIAFEVKLQKTSRSTDFRVPQSICTMFNVMVDAKAQSTKLCSMEMGQEHQYHSKIDELIEETVKEMITLLVAKFVTILEGVLAKLSRYDEGTLFSSFLSFTVKAASKYVDVPKPGMDVADAYVTFVRHSQDVLRDKVNEEMYIERLFDQWYNSSMNVICTWLTDRMDLQLHIYQLKTLIRMVKKTYRDFRLQGVLDSTLNSKTYETIRNRLTVEEATASVSEGGGLQGISMKDSDEEDEEDD

SEQ ID NO: 7480 - protein, 236 aa, Homo sapiens [sequence omitted]

SEQ ID NO: 7481 - protein, 691 aa, Homo sapiens
MATKRLARQLGLIRRKSIAPANGNLGRSKSKQLFDYLIVIDFESTCWNDGKHHHSQEIIEFPAVLLNTSTGQIDSEFQAYVQPQEHPILSEFCMELTGIKQAQVDEGVPLKICLSQFCKWIHKIQQQKNIIFATGISEPSASEVKLCAFVTWSDWDLGVCLEYECKRKQLLKPVFLNSWIDLRATYKLFYRRKPKGLSGALQEVGIEFSGREHSGLDDSRNTALLAWKMIRDGCVMKITRSLNKVPTKKNFSILARNLNTIQVEEMSACNISIQGPSIYNKEPKNIINPHEKVQMKSICANSPIKAQQDQLQVKNNIKASLHNVKSSLPLFNTKSSTSVGQLQSPTLNSPIYMQKQGKNEHLAFNTKSKASTVGSELVLVSTTVPTVHHVSDLEMSSTLDCLPVLADWEDVVLLPASQPEENVDCTVPISDSDLEISFNSGERLMVLKELEMSSHENFGDIEETPQKSETSKSIVYKSPHTTIYNVKEAKDPGSDISAFKLPEHKSSTFNRVNANMSHPLVLGKHPLLSGGTKRNPCSPQAFPPAKKQPFTIHEEKPTSSDCSPVRSSSWRRLPSILTSTVNLQEPWKSGKMTPPLCKCGRRSKRLVVSNNGPNHGKVFYCCPIGKYQENRKCCGYFKWEQTLQKERANSMVPSHSTGGLTFSSPETSHICDRNLSISTKNSLRLRPSMRN

SEQ ID NO: 7482 - protein, 1060 aa, Homo sapiens
MNRSRAIVQRGRVLPPPAPLDTTNLAGRRTLQGRAKMASVPVYCLCRLPYDVTRFMIECDMCQDWFHGSCVGVEEEKAADIDLYHCPNCEVLHGPSIMKKRRGSSKGHDTHKGKPVKTGSPTFVRELRSRTFDSSDEVILKPTGNQLTVEFLEENSFSVPILVLKKDGLGMTLPSPSFTVRDVEHYVGSDKEIDVIDVTRQADCKMKLGDFVKYYYSGKREKVLNVISLEFSDTRLSNLVETPKIVRKLSWVENLWPEECVFERPNVQKYCLMSVRDSYTDFHIDFGGTSVWYHVLKGEKIFYLIRPTNANLTLFECWSSSSNQNEMFFGDQVDKCYKCSVKQGQTLFIPTGWIHAVLTPVDCLAFGGNFLHSLNIEMQLKAYEIEKRLSTADLFRFPNFETICWYVGKHILDIFRGLRENRRHPASYLVHGGKALNLAFRAWTRKEALPDHEDEIPETVRTVQLIKDLAREIRLVEDIFQQNVGKTSNIFGLQRIFPAGSIPLTRPAHSTSVSMSRLSLPSKNGSKKKGLKPKELFKKAERKGKESSALGPAGQLSYNLMDTYSHQALKTGSFQKAKFNITGACLNDSDDDSPDLDLDGNESPLALLMSNGSTKRVKSLSKSRRTKIAKKVDKARLMAEQVMEDEFDLDSDDELQIDERLGKEKATLIIRPKFPRKLPRAKPCSDPNRVREPGEVEFDIEEDYTTDEDMVEGVEGKLGNGSGAGGILDLLKASRQVGGPDYAALTEAPASPSTQEAIQGMLCMANLQSSSSSPATSSLQAWWTGGQDRSSGSSSSGLGTVSNSPASQRTPGKRPIKRPAYWRTESEEEEENASLDEQDSLGACFKDAEYIYPSLESDDDDPALKSRPKKKKNSDDAPWSPKARVTPTLPKQDRPVREGTRVASIETGLAAAAAKLAQQELQKAQKKKYIKKKPLLKEVEQPRPQDSNLSLTVPAPTVAATPQLVTSSSPLPPPEPKQEALSGSLADHEYTARPNAFGMAQANRSTTPMAPGVFLTQRRPSVGSQSNQAGQGKRPKKGLATAKQRLGRILKIHRNGKLLL

SEQ ID NO: 7483 - protein, 1014 aa, Homo sapiens
MVFSVRQCGHVGRTEEVLLTFKIFLVIICLHVVLVTSLEEDTDNSSLSPPPAKLSVVSFAPSSNEVETTSLNDVTLSLLPSNETEKTKITIVKTFNASGVKPQRNICNLSSICNDSAFFRGEIMFQYDKESTVPQNQHITNGTLTGVLSLSELKRSELNKTLQTLSETYFIMCATAEAQSTLNCTFTIKLNNTMNACAVIAALERVKIRPMEHCCCSVRIPCPSSPEELEKLQCDLQDPIVCLADHPRGPPFSSSQSIPVVPRATVLSQVPKATSFAEPPDYSPVTHNVPSPIGEIQPLSPQPSAPIASSPAIDMPPQSETISSPMPQTHVSGTPPPVKASFSSPTVSAPANVNTTSAPPVQTDIVNTSSISDLENQVLQMEKALSLGSLEPNLAGEMINQVSRLLHSPPDMLAPLAQRLLKVVDDIGLQLNFSNTTISLTSPSLALAVIRVNASSFNTTTFVAQDPANLQVSLETQAPENSIGTITLPSSLMNNLPAHDMELASRVQFNFFETPALFQDPSLENLSLISYVISSSVANLTVRNLTRNVTVTLKHINPSQDELTVRCVFWDLGRNGGRGGWSDNGCSVKDRRLNETICTCSHLTSFGVLLDLSRTSVLPAQMMALTFITYIGCGLSSIFLSVTLVTYIAFEKIRRDYPSKILIQLCAALLLLNLVFLLDSWIALYKMQGLCISVAVFLHYFLLVSFTWMGLEAFHMYLALVKVFNTYIRKYILKFCIVGWGVPAVVVTIILTISPDNYGLGSYGKFPNGSPDDFCWINNNAVFYITVVGYFCVIFLLNVSMFIVVLVQLCRIKKKKQLGAQRKTSIQDLRSIAGLTFLLGITWGFAFFAWGPVNVTFMYLFAIFNTLQGFFIFIFYCVAKENVRKQWRRYLCCGKLRLAENSDWSKTATNGLKKQTVNQGVSSSSNSLQSSSNSTNSTTLLVNNDCSVHASGNGNASTERNGVSFSVQNGDVCLHDFTGKQHMFNEKEDSCNGKGRMALRRTSKRGSLHFIEQM

SEQ ID NO: 7484 - protein, 431 aa, Homo sapiens
MDSAITLWQFLLQLLQKPQNKHMICWTSNDGQFKLLQAEEVARLWGIRKNKPNMNYDKLSRALRYYYVKNIIKKVNGQKFVYKFVSYPEILNMDPMTVGRIEGDCESLNFSEVSSSSKDVENGGKDKPPQPGAKTSSRNDYIHSGLYSSFTLNSLNSSNVKLFKLIKTENPAEKLAEKKSPQEPTPSVIKFVTTPSKKPPVEPVAATISIGPSISPSSEETIQALETLVSPKLPSLEAPTSASNVMTAFATTPPISSIPPLQEPPRTPSPPLSSHPDIDTDIDSVASQPMELPENLSLEPKDQDSVLLEKDKVNNSSRSKKPKGLELAPTLVITSSDPSPLGILSPSLPTASLTPAFFSQTPIILTPSPLLSSIHFWSTLSPVAPLSPARLQGANTLFQFPSVLNSHGPFTLSGLDGPSTPGPFSPDLQKT

SEQ ID NO: 7485 - protein, 1094 aa, Homo sapiens
MGNENSTSDNQRTLSAQTPRSAQPPGNSQNIKRKQQDTPGSPDHRDASSSPVADDIIQPAAPADLESPTLAASSYHGDVVGQVSTDLIAQRSSDSEEAFETPESTTPVKAPPAPPPPPPEVIPEPEVSTQPPPEEPGCGSETVPVPDGPRSDSVEGSPFRPPSHSFSAVFDEDKPIASSGTYNLDFDNIELVDTFQTLEPRASDAKNQEGKVNTRRKSTDSVPISKSTLSRSLSLQASDFDGASSSGNPEAVALAPDAYSTGSSSASSTLKRTKKPRPPSLKKKQTTKKPTETPPVKETQQEPDEESLVPSGENLASETKTESAKTEGPSPALLEETPLEPAVGPKAACPLDSESAEGVVPPASGGGRVQNSPPVGRKTLPLTTAPEAGEVTPSDSGGQEDSPAKGLSVRLEFDYSEDKSSWDNQQENPPPTKKIGKKPVAKMPLRRPKMKKTPEKLDNTPASPPRSPAEPNDIPIAKGTYTFDIDKWDDPNFNPFSSTSKMQESPKLPQQSYNFDPDTCDESVDPFKTSSKTPSSPSKSPASFEIPASAMEANGVDGDGLNKPAKKKKTPLKTDTFRVKKSPKRSPLSDPPSQDPTPAATPETPPVISAVVHATDEEKLAVTNQKWTCMTVDLEADKQDYPQPSDLSTFVNETKFSSPTEELDYRNSYEIEYMEKIGSSLPQDDDAPKKQALYLMFDTSQESPVKSSPVRMSESPTPCSGSSFEETEALVNTAAKNQHPVPRGLAPNQESHLQVPEKSSQKELEAMGLGTPSEAIEITAPEGSFASADALLSRLAHPVSLCGALDYLEPDLAEKNPPLFAQKLQEELEFAIMRIEALKLARQIALASRSHQDAKREAAHPTDVSISKTALYSRIGTAEVEKPAGLLFQQPDLDSALQIARAEIITKEREVSEWKDKYEESRREVMEMRKIVAEYEKTIAQMIEDEQREKSVSHQTVQQLVLEKEQALADLNSVEKSLADLFRRYEKMKEVLEGFRKNEEVLKRCAQEYLSRVKKEEQRYQALKVHAEEKLDRANAEIAQVRGKAQQEQAAHQASLRKEQLRVDALERTLEQKNKEIEELTKICDELIAKMGKS

SEQ ID NO: 7486 - protein, 709 aa, Homo sapiens
MKRCRSDELQQQQGEEDGAGLEDAASHLPGADLRPGETTGANSAGGPTSDAGAAAAPNPGPRSKPPDLKKIQQLSEGSMFGHGLKHLFHSRRRSREREHQTSQDSQQHQQQQGMSDHDSPDEKERSPEMHRVSYAMSLHDLPARPTAFNRVLQQIRSRPSIKRGASLHSSSGGGSSGSSSRRTKSSSLEPQRGSPHLLRKAPQDSSLAAILHQHQCRPRSSSTTDTALLLADGSNVYLLAEEAEGIGDKVDKGDLVALSLPAGHGDTDGPISLDVPDGAPDPQRTKAAIDHLHQKILKITEQIKIEQEARDDNVAEYLKLANNADKQQVSRIKQVFEKKNQKSAQTIAQLHKKLEHYRRRLKEIEQNGPSRQPKDVLRDMQQGLKDVGANVRAGISGFGGGVVEGVKGSLSGLSQATHTAVVSKPREFASLIRNKFGSADNIAHLKDPLEDGPPEEAARALSGSATLVSSPKYGSDDECSSASASSAGAGSNSGAGPGGALGSPKSNALYGAPGNLDALLEELREIKEGQSHLEDSMEDLKTQLQRDYTYMTQCLQEERYRYERLEEQLNDLTELHQNEMTNLKQELASMEEKVAYQSYERARDIQEAVESCLTRVTKLELQQQQQQVVQLEGVENANARALLGKFINVILALMAVLLVFVSTIANFITPLMKTRLRITSTTLLVLVLFLLWKHWDSLTYLLEHVLLPS

SEQ ID NO: 7487 - protein, 6907 aa, Homo sapiens
MASSPELPTEDEQGSWGIDDLHISLQAEQEDTQKKAFTCWINSQLARHTSPSVISDLFTDIKKGHVLLDLLEVLSGQQLPRDKGSNTFQCRINIEHALTFLRNRSIKLINIHVTDIIDGNPSIILGLIWTIILHFHIEKLAQTLSCNYNQPSLDDVSVVDSSPASSPPAKKCSKVQARWQMSARKALLLWAQEQCATYESVNVTDFKSSWRNGMAFLAIIHALRPDLIDMKSVKHRSNKDNLREAFRIAEQELKIPRLLEPEDVDVVDPDEKSIMTYVAQFLQYSKDAPGTGEEAQGKVKDAMGWLTLQKEKLQKLLKDSENDTYFKKYNSLLSFMESFNEEKKSFLDVLSIKRDLDELDKDHLQLREAWDGLDHQINAWKIKLNYALPPPLHQTEAWLQEVEELMDEDLSASQDHSQAVTLIQEKMTLFKSLMDRFEHHSNILLTFENKDENHLPLVPPNKLEEMKRRINNILEKKFILLLEFHYYKCLVLGLVDEVKSKLDIWNIKYGSRESVELLLEDWHKFIEEKEFLARLDTSFQKCGEIYKNLAGECQNINKQYMMVKSDVCMYRKNIYNVKSTLQKVLACWATYVENLRLLRACFEETKKEEIKEVPFETLAQWNLEHATLNEAGNFLVEVSNDVVGSSISKELRRLNKRWRKLVSKTQLEMNLPLMIKKQDQPTFDNSGNILSKEEKATVEFSTDMSVELPENYNQNIKAGEKHEKENEEFTGQLKVAKDVEKLIGQVEIWEAEAKSVLDQDDVDTSMEESLKHLIAKGSMFDELMARSEDMLQMDIQNISSQESFQHVLTTGLQAKIQEAKEKVQINVVKLIAALKNLTDVSPDLDIRLKMEESQKELESYMMRAQQLLGQRESPGELISKHKEALIISNTKSLAKYLKAVEELKNNVTEDIKMSLEEKSRDVCAKWESLHHELSLYVQQLKIDIEKGKLSDNILKLEKQINKEKKLIRRGRTKGLIKEHEACFSEEGCLYQLNHHMEVLRELCEELPSQKSQQEVKRLLKDYEQKIERLLKCASEIHMTLQPTAGGTSKNEGTITTSENRGGDPHSEAPFAKSDNQPSTEKAMEPTMKFSLASVLRPLQEESIMEKDYSASINSLLERYDTYRDILEHHLQNNKFRITSDFSSEEDRSSSCLQAKLTDLQVIKNETDARWKEFEIISLKLENHVNDIKKPFVIKERDTLKERERELQMTLNTRMESLETALRLVLPVEKASLLLCGSDLPLHKMAIQGFHLIDADRIYQHLRNIQDSIAKQIEICNRLEEPGNFVLKELHPFDLHAMQNIILKYKTQFEGMNHRVQRSEDTLKALEDFLASLRTAKLSAEPVTDLSASDTQVAQENTLTVKNKEGEIHLMKDKAKHLDKCLKMLDMSFKDAERGDDTSCENLLDAFSIKLSETHGYGVQEEFTEENKLLEACIFKNNELLKNIQDVQSQISKIGLKDPTVPAVKHRKKSLIRLDKVLDEYEEEKRHLQEMANSLPHFKDGREKTVNQQCQNTVVLWENTKALVTECLEQCGRVLELLKQYQNFKSILTTLIQKEESVISLQASYMGKENLKKRIAEIEIVKEEFNEHLEVVDKINQVCKNLQFYLNKMKTFEEPPFEKEANIIVDRWLDINEKTEDYYENLGRALALWDKLFNLKNVIDEWTEKALQKMELHQLTEEDRERLKEELQVHEQKTSEFSRRVAEIQFLLQSSEIPLELQVMESSILNKMEHVQKCLTGESNCHALSGSTAELREDLDQAKTQIGMTESLLKALSPSDSLEIFTKLEEIQQQILQQKHSMILLENQIGCLTPELSELKKQYESVSDLFNTKKSVLQDHFSKLLNDQCKNFNDWFSNIKVNLKECFESSETKKSVEQKLQKLSDFLTLEGRNSKIKQVDSVLKHVKKHLPKAHVKELISWLVGQEFELEKMESICQARAKELEDSLQQLLRLQDDHRNLRKWLTNQEEKWKGMEEPGEKTELFCQALARKREQFESVAQLNNSLKEYGFTEEEEIIMEATCLMDRYQTLLRQLSEIEEEDKLLPTEDQSFNDLAHDVIHWIKEIKESLMVLNSSEGKMPLEERIQKIKEIILLKPEGDARIETIMKQAESSEAPLVQKTLTDISNQWDNTLHLASTYLSHQEKLLLEGEKYLQSKEDLRLMLIELKKKQEAGFALQHGLQEKKAQLKIYKKFLKKAQDLTSLLKELKSQGNYLLECTKNPSFSEEPWLEIKHLHESLLQQLQDSVQNLDGHVREHDSYQVCVTDLNTTLDNFSKEFVSFSDKPVDQIAVEEKLQKLQELENRLSLQDGTLKKILALAKSVKQNTSSVGQKIIKDDIKSLQCKQKDLENRLASAKQEMECCLNSILKSKRSTEKKGKFTLPGREKQATSDVQESTQESAAVEKLEEDWEINKDSAVEMAMSKQLSLNAQESMKNTEDERKVNELQNQPLELDTMLRNEQLEEIEKLYTQLEAKKAAIKPLEQTECLNKTETGALVLHNIGYSAQHLDNLLQALITLKKNKESQYCVLRDFQEYLAAVESSMKALLTDKESLKVGPLDSVTYLDKIKKFIASIEKEKDSLGNLKIKWENLSNHVTDMDKKLLESQIKQLEHGWEQVEQQIQKKYSQQVVEYDEFTTLMNKVQDTEISLQQQQQHLQLRLKSPEERAGNQSMIALTTDLQATKHGFSVLKGQAELQMKRIWGEKEKKNLEDGINNLKKQWETLEPLHLEAENQIKKCDIRNKMKETILWAKNLLGELNPSIPLLPDDILSQIRKCKVTHDGILARQQSVESLAEEVKDKVPSLTTYEGSDLNNTLEDLRNQYQMLVLKSTQRSQQLEFKLEERSNFFAIIRKFQLMVQESETLIIPRVETAATEAELKHHHVTLEASQKELQEIDSGISTHLQELTNIYEELNVFERLFLEDQLKNLKIRTNRIQRFIQNTCNEVEHKIKFCRQFHEKTSALQEEADSIQRNELLLNQEVNKGVKEEIYNLKDRLTAIKCCILQVLKLKKVFDYIGLNWDFSQLDQLQTQVFEKEKELEEKIKQLDTFEEEHGKYQALLSKMRAIDLQIKKMTEVVLKAPDSSPESRRLNAQILSQRIEKAKCLCDEIIKKLNENKTFDDSFKEKEILQIKLNAEENDKLYKVLQNMVLELSPKELDEKNCQDKLETSLHVLNQIKSQLQQPLLINLEIKHIQNEKDNCEAFQEQVWAEMCSIKAVTAIEKQREENSSEASDVETKLREFEDLQMQLNTSIDLRTNVLNDAYENLTRYKEAVTRAVESITSLEAIIIPYRVDVGNPEESLEMPLRKQEELESTVAHIQDLTEKLGMISSPEAKLQLQYTLQELVSKNSAMKEAFKAQETEAERYLENYKCYRKMEEDIYTNLSKMETVLGQSMSSLPLSYREALERLEQSKALVSNLISTKEELMKLRQILRLLRLRCTENDGICLLKIVSALWEKWLSLLEAAKEWEMWCEELKQEWKFVSEEIEREAIILDNLQEELPEISKTKEAATTEELSELLDCLCQYGENVEKQQLLLTLLLQRIRSIQNVPESSGAVETVPAFQEITSMKERCNKLLQKVQKNKELVQTEIQERHSFTKEIIALKNFFQQTTTSFQNMAFQDHPEKSEQFEELQSILKKGKLTFENIMEKLRIKYSEMYTIVPAEIESQVEECRKALEDIDEKISNEVLKSSPSYAMRRKIEEINNGLHNVEKMLQQKSKNIEKAQEIQKKMWDELDLWHSKLNELDSEVQDIVEQDPGQAQEWMDNLMIPFQQYQQVSQRAECRTSQLNKATVKMEEYSDLLKSTEAWIENTSHLLANPADYDSLRTLSHHASTVQMALEDSEQKHNLLHSIFMDLEDLSIIFETDELTQSIQELSNQVTALQQKIMESLPQIQRMADDVVAIESEVKSMEKRVSKIKTILLSKEIFDFSPEEHLKHGEVILENIRPMKKTIAEIVSYQVELRLPQTGMKPLPVFQRTNQLLQDIKLLENVTQEQNELLKVVIKQTNEWDEEIENLKQILNNYSAQFSLEHMSPDQADKLPQLQGEIERMEKQILSLNQRKEDLLVDLKATVLNLHQHLKQEQEGVERDRLPAVTSEEGGVAERDASERKLNRRGSMSYLAAVEEEVEESSVKSDNGDEKAEPSPQSWSSLWKHDKDMEEDRASSSSGTIVQEAYGKISTSDNSMAQILTPDSLNTEQGPECSLRPNQTEEGTTPPIEADTLDSSDAQGGLEPRVEKTRPEPTEVLHACKTQVAELELWLQQANVAVEPETLNADMQQVLEQQLVGCQAMLTEIEHKVAFLLETCKDQGLGDNGATQHEAEALSLKLKTVKCNLEKVQMMLQEKHSEDQHPTILKKSSEPEHQEALQPVNLSELESIVTERPQFSRQKDFQQQQVLELKPMEQKDFIKFIEFNAKKMWPQYCQHDNDTTQESSASNQASSPENDVPDSILSPQGQNGDKWQYLHHELSSKIKLPLPQLVEPQVSTNMGILPSVTMYNFRYPTTEELKTYTTQLEDLRQEASNLQTQENMTEEAYINLDKKLFELFLTLSQCLSSVEEMLEMPRLYREDGSGQQVHYETLALELKKLYLALSDKKGDLLKAMTWPGENTNLLLECFDNLQVCLEHTQAAAVCRSKSLKAGLDYNRSYQNEIKRLYHQLIKSKTSLQQSLNEISGQSVAEQLQKADAYTVELENAESRVAKLRDEGERLHLPYALLQEVYKLEDVLDSMWGMLRARYTELSSPFVTESQQDALLQGMVELVKIGKEKLAHGHLKQTKSKVALQAQIENHKVFFQKLVADMLLIQAYSAKILPSLLQNRETFWAEQVTEVKILEEKSRQCGMKLQSLLQKWEEFDENYASLEKDLEILISTLPSVSLVEETEERLVERISFYQQIKRNIGGKHARLYQTLNEGKQLVASVSCPELEGQIAKLEEQWLSLNKKIDHELHRLQALLKHLLSYNRDSDQLTKWLESSQHTLNYWKEQSLNVSQDLDTIRSNINNFFEFSKEVDEKSSLKTAVISIGNQLLHLKETDTATLRASLAQFEQKWTMLITQLPDIQEKLHQLQMEKLPSRKAITEMISWMNNVEHQTSDEDSVHSPSSASQVKHLLQKHKEFRMEMDYKQWIVDFVNQSLLQLSTCDVESKRYERTEFAEHLGEMNRQWHRVHGMLNRKIQHLEQLLESITESENKIQILNNWLEAQEERLKTLQKPESVISVQKLLLDCQDIENQLAIKSKALDELKQSYLTLESGAVPLLEDTASRIDELFQKRSSVLTQVNQLKTSMQSVLQEWKIYDQLYDEVNMMTIRFWYCMEHSKPVVLSLETLRCQVENLQSLQDEAESSEGSWEKLQEVIGKLKGLCPSVAEIIEEKCQNTHKRWTQVNQAIADQLQKAQSLLQLWKAYSNAHGEAAARLKQQEAKFQQLANISMSGNNLAEILPPALQDIKELQHDVQKTKEAFLQNSSVLDRLPQPAESSTHMLLPGPLHSLQRAAYLEKMLLVKANEFEFVLSQFKDFGVRLESLKGLIMHEEENLDRLHQQEKENPDSFLNHVLALTAQSPDIEHLNEVSLKLPLSDVAVKTLQNMNRQWIRATATALERCSELQGIGLNEKFLYCCEKWIQLLEKIEEALKVDVANSLPELLEQQKTYKMLEAEVSINQTIADSYVTQSLQLLDTTEIENRPEFITEFSKLTDRWQNAVQGVRQRKGDVDGLVRQWQDFTTSVENLFRFLTDTSHLLSAVKGQERFSLYQTRSLIHELKNKEIHFQRRRTTCALTLEAGEKLLLTTDLKTKESVGRRISQLQDSWKDMEPQLAEMIKQFQSTVETWDQCEKKIKELKSRLQVLKAQSEDPLPELHEDLHNEKELIKELEQSLASWTQNLKELQTMKADLTRHVLVEDVMVLKEQIEHLHRQWEDLCLRVAIRKQEIEDRLNTWVVFNEKNKELCAWLVQMENKVLQTADISIEEMIEKLQKDCMEEINLFSENKLQLKQMGDQLIKASNKSRAAEIDDKLNKINDRWQHLFDVIGSRVKKLKETFAFIQQLDKNMSNLRTWLARIESELSKPVVYDVCDDQEIQKRLAEQQDLQRDIEQHSAGVESVFNICDVLLHDSDACANETECDSIQQTTRSLDRRWRNICAMSMERRMKIEETWRLWQKFLDDYSRFEDWLKSAERTAACPNSSEVLYTSAKEELKRFEAFQRQIHERLTQLELINKQYRRLARENRTDTASRLKQMVHEGNQRWDNLQRRVTAVLRRLRHFTNQREEFEGTRESILVWLTEMDLQLTNVEHFSESDADDKMRQLNGFQQEITLNTNKIDQLIVFGEQLIQKSEPLDAVLIEDELEELHRYCQEVFGRVSRFHRRLTSCTPGLEDEKEASENETDMEDPREIQTDSWRKRGESEEPSSPQSLCHLVAPGHERSGCETPVSVDSIPLEWDHTGDVGGSSSHEEDEEGPYYSALSDVEIPENPEAYLKMTTKTLKASSGKSISDGHSWHVPDSPSCPEHHYKQMEGDRNVPPVPPASSTPYKPPYGKLLLPPGTDGGKEGPRVLNGNPQQEDGGLAGITEQQSGAFDRWEMIQAQELHNKLKIKQNLQQLNSDISAITTWLKKTEAELEMLKMAKPPSDIQEIELRVKRLQEILKAFDTYKALVVSVNVSSKEFLQTESPESTELQSRLRQLSLLWEAAQGAVDSWRGGLRQSLMQCQDFHQLSQNLLLWLASAKNRRQKAHVTDPKADPRALLECRRELMQLEKELVERQPQVDMLQEISNSLLIKGHGEDCIEAEEKVHVIEKKLKQLREQVSQDLMALQGTQNPASPLPSFDEVDSGDQPPATSVPAPRAKFRAVRTTEGEEETESRVPGSTRPQRSFLSRVVRAALPLQLLLLLLLLLACLLPSSEEDYSCTQANNFARSFYPMLRYTNGPPPT

SEQ ID NO: 7488 - protein, 321 aa, Homo sapiens
MATRRLTDAFLLLRNNSIQNRQLLAEQVSSHITSSPLHSRSIAALADDRMALVSGISLDPEAAIGVTKRPPPKWVDGVDEIQYDVGRIKQKMKELASLHDKHLNRPTLDDSSEEEHAIEITTQEITQLFHRCQRAVQALPSRARACSEQEGRLLGNVVASLAQALQELSTSFRHAQSGYLKRMKNREERSQHFFDTSVPLMDDGDDNTLYHRGFTEDQLVLVEQNTLMVEEREREIRQIVQSISDLNEIFRDLGAMIVEQGTVLDRIDYNVEQSCIKTEDGLKQLHKAEQYQKKNRKMLVILILFVIIIVLIVVLVGVKSR

SEQ ID NO: 7489 - protein, 575 aa, Homo sapiens
MADRGGVGEAAAVGASPASVPGLNPTLGWRERLRAGLAGTGASLWFVAGLGLLYALRIPLRLCENLAAVTVFLNSLTPKFYVALTGTSSLISGLIFIFEWWYFHKHGTSFIEQVSVSHLQPLMGGTESSISEPGSPSRNRENETSRQNLSECKVWRNPLNLFRGAEYRRYTWVTGKEPLTYYDMNLSAQDHQTFFTCDTDFLRPSDTVMQKAWRERNPPARIKAAYQALELNNDCATAYVLLAEEEATTIVDAERLFKQALKAGETIYRQSQQCQHQSPQHEAQLRRDTNVLVYIKRRLAMCARKLGRIREAVKIMRDLMKEFPPLTMLNIHENLLESLLELQAYPDVQAVLAKYDDISLPKSAAICYTAALLKTRTVSEKFSPETASRRGLSTAEINAVEAIHRAVEFNPHVPKYLLEMKSLILPPEHILKRGDSEAIAYAFFHLQHWKRIEGALNLLQCTWEGTFRMIPYPLEKGHLFYPYPSCTETADRELLPTFHHVSVYPKKELPLFIHFTAGFCSSTAMIAILTHQFPEIMGIFAKAVLGLWCPQPWASSGFEENTQDLKSEDLGLSSG

SEQ ID NO: 7490 - protein, 142 aa, Homo sapiens
MSESLVVCDVAEDLVEKLRKFRFRKETNNAAIIMKIDKDKRLVVLDEELEGISPDELKDELPERQPRFIVYSYKYQHDDGRVSYPLCFIFSSPVGCKPEQQMMYAGSKNKLVQTAELTKVFEIRNTEDLTEEWLREKLGFFH

SEQ ID NO: 7491 - protein, 1386 aa, Homo sapiens
VSRALPEKQGEIEAQIKDLGQLEKKLEDLEEQLNHLLLWLSPIRNQLEIYNQPNQEGPFDVKETEIAVQAKQPDVEEILSKGQHLYKEKPATQPVKRKLEDLSSEWKAVNRLLQELRAKQPDLAPGLTTIGASPTQTVTLVTQPVVTKETAISKLEMPSSLMLEVPALADFNRAWTELTDWLSLLDQVIKSQRVMVGDLEDINEMIIKQKATMQDLEQRRPQLEELITAAQNLKNKTSNQEARTIITDRIERIQNQWDEVQEHLQNRRQQLNEMLKDSTQWLEAKEEAEQVLGQARAKLESWKEGPYTVDAIQKKITETKQLAKDLRQWQTNVDVANDLALKLLRDYSADDTRKVHMITENINASWRSIHKRVSEREAALEETHRLLQQFPLDLEKFLAWLTEAETTANVLQDATRKERLLEDSKGVKELMKQWQDLQGEIEAHTDVYHNLDENSQKILRSLEGSDDAVLLQRRLDNMNFKWSELRKKSLNIRSHLEASSDQWKRLHLSLQELLVWLQLKDDELSRQAPIGGDFPAVQKQNDVHRAFKRELKTKEPVIMSTLETVRIFLTEQPLEGLEKLYQEPRELPPEERAQNVTRLLRKQAEEVNTEWEKLNLHSADWQRKIDETLERLRELQEATDELDLKLRQAEVIKGSWQPVGDLLIDSLQDHLEKVKALRGEIAPLKENVSHVNDLARQLTTLGIQLSPYNLSTLEDLNTRWKLLQVAVEDRVRQLHEAHRDFGPASQHFLSTSVQGPWERAISPNKVPYYINHETQTTCWDHPKMTELYQSLADLNNVRFSAYRTAMKLRRLQKALCLDLLSLSAACDALDQHNLKQNDQPMDILQIINCLTTIYDRLEQEHNNLVNVPLCVDMCLNWLLNVYDTGRTGRIRVLSFKTGIISLCKAHLEDKYRYLFKQVASSTGFCDQRRLGLLLHDSIQIPRQLGEVASFGGSNIEPSVRSCFQFANNKPEIEAALFLDWMRLEPQSMVWLPVLHRVAAAETAKHQAKCNICKECPIIGFRYRSLKHFNYDICQSCFFSGRVAKGHKMHYPMVEYCTPTTSGEDVRDFAKVLKNKFRTKRYFAKHPRMGYLPVQTVLEGDNMETPASSPQLSHDDTHSRIEHYASRLAEMENSNGSYLNDSISPNESIDDEHLLIQHYCQSLNQDSPLSQPRSPAQILISLESEERGELERILADLEEENRNLQAEYDRLKQQHEHKGLSPLPSPPEMMPTSPQSPRDAELIAEAKLLRQHKGRLEARMQILEDHNKQLESQLHRLRQLLEQPQAEAKVNGTTVSSPSTSLQRSDSSQPMLLRVVGSQTSDSMGEEDLLSPPQDTSTGLEEVMEQLNNSFPSSRGHNVGSLFHMADDLGRAMESLVSVMTDEEGAE

SEQ ID NO: 7492 - protein, 1011 aa, Homo sapiens
MRVFLLCAYILLLMVSQLRAVSFPEDDEPLNTVDYHYSRQYPVFRGRPSGNESQHRLDFQLMLKIRDTLYIAGRDQVYTVNLNEMPKTEVIPNKKLTWRSRQQDRENCAMKGKHKDECHNFIKVFVPRNDEMVFVCGTNAFNPMCRYYRLSTLEYDGEEISGLARCPFDARQTNVALFADGKLYSATVADFLASDAVIYRSMGDGSALRTIKYDSKWIKEPHFLHAIEYGNYVYFFFREIAVEHNNLGKAVYSRVARICKNDMGGSQRVLEKHWTSFLKARLNCSVPGDSFFYFDVLQSITDIIQINGIPTVVGVFTTQLNSIPGSAVCAFSMDDIEKVFKGRFKEQKTPDSVWTAVPEDKVPKPRPGCCAKHGLAEAYKTSIDFPDETLSFIKSHPLMDSAVPPIADEPWFTKTRVRYRLTAISVDHSAGPYQNYTVIFVGSEAGMVLKVLAKTSPFSLNDSVLLEEIEAYNHAKCSAENEEDKKVISLQLDKDHHALYVAFSSCIIRIPLSRCERYGSCKKSCIASRDPYCGWLSQGSCGRVTPGMLLLTEDFFAFHNHSAEGYEQDTEFGNTAHLGDCHGVRWEVQSGESNQMVHMNVLITCVFAAFVLGAFIAGVAVYCYRDMFVRKNRKIHKDAESAQSCTDSSGSFAKLNGLFDSPVKEYQQNIDSPKLYSNLLTSRKELPPNGDTKSMVMDHRGQPPELAALPTPESTPVLHQKTLQAMKSHSEKAHGHGASRKETPQFFPSSPPPHSPLSHGHIPSAIVLPNATHDYNTSFSNSNAHKAEKKLQNIDHPLTKSSSKRDHRRSVDSRNTLNDLLKHLNDPNSNPKAIMGDIQMAHQNLMLDPMGSMSEVPPKVPNREASLYSPPSTLPRNSPTKRVDVPTTPGVPMTSLERQRGYHKNSSQRHSISAMPKNLNSPNGVLLSRQPSMNRGGYMPTPTGAKVDYIQGTPVSVHLQPSLSRQSSYTSNGTLPRTGLKRTPSLKPDVPPKPSFVPQTPSVRPLNKYTY

SEQ ID NO: 7493 - protein, 541 aa, Homo sapiens
MRLKMTTRNFPEREVPCDVEVERFTREVPCLSSLGDGWDCENQEGHLRQSALTLEKPGTQEAICEYPGFGEHLIASSDLPPSQRVLATNGFHAPDSNVSGLDCDPALPSYPKSYADKRTGDSDACGKGFNHSMEVIHGRNPVREKPYKYPESVKSFNHFTSLGHQKIMKRGKKSYEGKNFENIFTLSSSLNENQRNLPGEKQYRCTECGKCFKRNSSLVLHHRTHTGEKPYTCNECGKSFSKNYNLIVHQRIHTGEKPYECSKCGKAFSDGSALTQHQRIHTGEKPYECLECGKTFNRNSSLILHQRTHTGEKPYRCNECGKPFTDISHLTVHLRIHTGEKPYECSKCGKAFRDGSYLTQHERTHTGEKPFECAECGKSFNRNSHLIVHQKIHSGEKPYECKECGKTFIESAYLIRHQRIHTGEKPYGCNQCQKLFRNIAGLIRHQRTHTGEKPYECNQCGKAFRDSSCLTKHQRIHTKETPYQCPECGKSFKQNSHLAVHQRLHSREGPSRCPQCGKMFQKSSSLVRHQRAHLGEQPMET

SEQ ID NO: 7494 - protein, 360 aa, Homo sapiens
MELDFGHFDERDKTSRNMRGSRMNGLPSPTHSAHCSFYRTRTLQALSNEKKAKKVRFYRNGDRYFKGIVYAVSSDRFRSFDALLADLTRSLSDNINLPQGVRYIYTIDGSRKIGSMDELEEGESYVCSSDNFFKKVEYTKNVNPNWSVNVKTSANMKAPQSLASSNSAQARENKDFVRPKLVTIIRSGVKPRKAVRVLLNKKTAHSFEQVLTDITEAIKLETGVVKKLYTLDGKQVTCLHDFFGDDDVFIACGPEKFRYAQDDFSLDENECRVMKGNPSATAGPKASPTPQKTSAKSPGPMRRSKSPADSANGTSSSQLSTPKSKQSPISTPTSPGSLRKHKDLYLPLSLDDSDSLGDSM

SEQ ID NO: 7495 - protein, 1430 aa, Homo sapiens
MTVFRQENVDDYYDTGEELGSGQFAVVKKCREKSTGLQYAAKFIKKRRTKSSRRGVSREDIEREVSILKEIQHPNVITLHEVYENKTDVILILELVAGGELFDFLAEKESLTEEEATEFLKQILNGVYYLHSLQIAHFDLKPENIMLLDRNVPKPRIKIIDFGLAHKIDFGNEFKNIFGTPEFVAPEIVNYEPLGLEADMWSIGVITYILLSGASPFLGDTKQETLANVSAVNYEFEDEYFSNTSALAKDFIRRLLVKDPKKRMTIQDSLQHPWIKPKDTQQALSRKASAVNMEKFKKFAARKKWKQSVRLISLCQRLSRSFLSRSNMSVARSDDTLDEEDSFVMKAIIHAINDDNVPGLQHLLGSLSNYDVNQPNKHGTPPLLIAAGCGNIQILQLLIKRGSRIDVQDKGGSNAVYWAARHGHVDTLKFLSENKCPLDVKDKSGEMALHVAARYGHADVAQLLCSFGSNPNIQDKEEETPLHCAAWHGYYSVAKALCEAGCNVNIKNREGETPLLTASARGYHDIVECLAEHGADLNACDKDGHIALHLAVRRCQMEVIKTLLSQGCFVDYQDRHGNTPLHVACKDGNMPIVVALCEANCNLDISNKYGRTPLHLAANNGILDVVRYLCLMGASVEALTTDGKTAEDLARSEQHEHVAGLLARLRKDTHRGLFIQQLRPTQNLQPRIKLKLFGHSGSGKTTLVESLKCGLLRSFFRRRRPRLSSTNSSRFPPSPLASKPTVSVSINNLYPGCENVSVRSRSMMFEPGLTKGMLEVFVAPTHHPHCSADDQSTKAIDIQNAYLNGVGDFSVWEFSGNPVYFCCYDYFAANDPTSIHVVVFSLEEPYEIQLNQVIFWLSFLKSLVPVEEPIAFGGKLKNPLQVVLVATHADIMNVPRPAGGEFGYDKDTSLLKEIRNRFGNDLHISNKLFVLDAGASGSKDMKVLRNHLQEIRSQIVSVCPPMTHLCEKIISTLPSWRKLNGPNQLMSLQQFVYDVQDQLNPLASEEDLRRIAQQLHSTGEINIMQSETVQDVLLLDPRWLCTNVLGKLLSVETPRALHHYRGRYTVEDIQRLVPDSDVEELLQILDAMDICARDLSSGTMVDVPALIKTDNLHRSWADEEDEVMVYGGVRIVPVEHLTPFPCGIFHKVQVNLCRWIHQQSTEGDADIRLWVNGCKLANRGAELLVLLVNHGQGIEVQVRGLETEKIKCCLLLDSVCSTIENVMATTLPGLLTVKHYLSPQQLREHHEPVMIYQPRDFFRAQTLKETSLTNTMGGYKESFSSIMCFGCHDVYSQASLGMDIHASDLNLLTRRKLSRLLDPPDPLGKDWCLLAMNLGLPDLVAKYNTSNGAPKDFLPSPLHALLREWTTYPESTVGTLMSKLRELGRRDAADFLLKASSVFKINLDGNGQEAYASSCNSGTSYNSISSVVSR

SEQ ID NO: 7496 - protein, 666 aa, Homo sapiens
MLSGAAGAARRGGAALAPSLTRSLAGTHAGADSCAGADKGSHKETIEERDKRQQRQQRQRQHQGCGAAGSGSDSPTSGPHPVPVLFPLALSLEEQPLPPLPLGRAPGLLAREGQGREALASPSSRGQMPIEIVCKIKFAEEDAKPKEKEAGDEQSLLGAVAPGAAPRDLATFASTSTLHGLGRACGPGPHGLRRTLWALALLTSLAAFLYQAAGLARGYLTRPHLVAMDPAAPAPVAGFPAVTLCNINRFRHSALSDADIFHLANLTGLPPKDRDGHRAAGLRYPEPDMVDILNRTGHQLADMLKSCNFSGHHCSASNFSVVYTRYGKCYTFNADPRSSLPSRAGGMGSGLEIMLDIQQEEYLPIWRETNETSFEAGIRVQIHSQEEPPYIHQLGFGVSPGFQTFVSCQEQRLTYLPQPWGNCRAESELREPELQGYSAYSVSACRLRCEKEAVLQRCHCRMVHMPGNETICPPNIYIECADHTLDSLGGGPEGPCFCPTPCNLTRYGKEISMVRIPNRGSARYLARKYNRNETYIRENFLVLDVFFEALTSEAMEQRAAYGLSALLGDLGGQMGLFIGASILTLLEILDYIYEVSWDRLKRVWRRPKTPLRTSTGGISTLGLQELKEQSPCPSRGRVEGGGVSSLLPNHHHPHGPPGGLFEDFAC

SEQ ID NO: 7497 - protein, 1569 aa, Homo sapiens
MYVRVSFDTKPDLLLHLMTKEWQLELPKLLISVHGGLQNFELQPKLKQVFGKGLIKAAMTTGAWIFTGGVNTGVIRHVGDALKDHASKSRGKICTIGIAPWGIVENQEDLIGRDVVRPYQTMSNPMSKLTVLNSMHSHFILADNGTTGKYGAEVKLRRQLEKHISLQKINTRCLPFFSLDSRLFYSFWGSCQLDSVGIGQGVPVVALIVEGGPNVISIVLEYLRDTPPVPVVVCDGSGRASDILAFGHKYSEEGGLINESLRDQLLVTIQKTFTYTRTQAQHLFIILMECMKKKELITVFRMGSEGHQDIDLAILTALLKGANASAPDQLSLALAWNRVDIARSQIFIYGQQWPVGSLEQAMLDALVLDRVDFVKLLIENGVSMHRFLTISRLEELYNTRHGPSNTLYHLVRDVKKGNLPPDYRISLIDIGLVIEYLMGGAYRCNYTRKRFRTLYHNLFGPKRDDIPLRRGRKTTKKREEEVDIDLDDPEINHFPFPFHELMVWAVLMKRQKMALFFWQHGEEAMAKALVACKLCKAMAHEASENDMVDDISQELNHNSRDFGQLAVELLDQSYKQDEQLAMKLLTYELKNWSNATCLQLAVAAKHRDFIAHTCSQMLLTDMWMGRLRMRKNSGLKVILGILLPPSILSLEFKNKDDMPYMSQAQEIHLQEKEAEEPEKPTKEKEEEDMELTAMLGRNNGESSRKKDEEEVQSKHRLIPLGRKIYEFYNAPIVKFWFYTLAYIGYLMLFNYIVLVKMERWPSTQEWIVISYIFTLGIEKMREILMSEPGKLLQKVKVWLQEYWNVTDLIAILLFSVGMILRLQDQPFRSDGRVIYCVNIIYWYIRLLDIFGVNKYLGPYVMMIGKMMIDMMYFVIIMLVVLMSFGVARQAILFPNEEPSWKLAKNIFYMPYWMIYGEVFADQIDPPCGQNETREDGKIIQLPPCKTGAWIVPAIMACYLLVANILLVNLLIAVFNNTFFEVKSISNQVWKFQRYQLIMTFHERPVLPPPLIIFSHMTMIFQHLCCRWRKHESDPDERDYGLKLFITDDELKKVHDFEEQCIEEYFREKDDRFNSSNDERIRVTSERVENMSMRLEEVNEREHSMKASLQTVDIRLAQLEDLIGRMATALERLTGLERAESNKIRSRTSSDCTDAAYIVRQSSFNSQEGNTFKLQESIDPAGEETMSPTSPTLMPRMRSHSFYSVNMKDKGGIEKLESIFKERSLSLHRATSSHSVAKEPKAPAAPANTLAIVPDSRRPSSCIDIYVSAMDELHCDIDPLDNSVNILGLGEPSFSTPVPSTAPSSSAYATLAPTDRPPSRSIDFEDITSMDTRSFSSDYTHLPECQNPWDSEPPMYHTIERSKSSRYLATTPFLLEEAPIVKSHSFMFSPSRSYYANFGVPVKTAEYTSITDCIDTRCVNAPQAIADRAAFPGGLGDKVEDLTCCHPEREAELSHPSSDSEENEAKGRRATIAISSQEGDNSERTLSNNITVPKIERANSYSAEEPSAPYAHTRKSFSISDKLDRQRNTASLRNPFQRSKSSKPEGRGDSLSMRRLSRTSAFQSFESKHN

SEQ ID NO: 7498 - protein, 388 aa, Homo sapiens
MSRSGDRTSTFDPSHSDNLLHGLNLLWRKQLFCDVTLTAQGQQFHCHKAVLASCSQYFRSLFSSHPPLGGGVGGQDGLGAPKDQQQPPQQQPSQQQQPPPQEEPGTPSSSPDDKLLTSPRAINNLVLQGCSSIGLRLVLEYLYTANVTLSLDTVEEVLSVSKILHIPQVTKLCVQFLNDQISVQNYKQVCKIAALHGLEETKKLANKYLVEDVLLLNFEEMRALLDSLPPPVESELALFQMSVLWLEHDRETRMQYAPDLMKRLRFALIPAPELVERVQSVDFMRTDPVCQKLLLDAMNYHLMPFRQHCRQSLASRIRSNKKMLLLVGGLPPGPDRLPSNLVQYYDDEKKTWKILTITGPHPISGKQESASSPEFRRRKTREFSNNTM

SEQ ID NO: 7499 - protein, 3126 aa, Homo sapiens
MEDEERQKKLEAGKAKLAQFRQRKAQSDGQSPSKKQKKKRKTSSSKHDVSAHHDLNIDQSQCNEMYINSSQRVESTVIPESTIMRTLHSGEITSHEQGFSVELESEISTTADDCSSEVNGCSFVMRTGKPTNLLREEEFGVDDSYSEQGAQDSPTHLEMMESELAGKQHEIEELNRELEEMRVTYGTEGLQQLQEFEAAIKQRDGIITQLTANLQQARREKDETMREFLELTEQSQKLQIQFQQLQASETLRNSTHSSTAADLLQAKQQILTHQQQLEEQDHLLEDYQKKKEDFTMQISFLQEKIKVYEMEQDKKVENSNKEEIQEKETIIEELNTKIIEEEKKTLELKDKLTTADKLLGELQEQIVQKNQEIKNMKLELTNSKQKERQSSEEIKQLMGTVEELQKRNHKDSQFETDIVQRMEQETQRKLEQLRAELDEMYGQQIVQMKQELIRQHMAQMEEMKTRHKGEMENALRSYSNITVNEDQIKLMNVAINELNIKLQDTNSQKEKLKEELGLILEEKCALQRQLEDLVEELSFSREQIQRARQTIAEQESKLNEAHKSLSTVEDLKAEIVSASESRKELELKHEAEVTNYKIKLEMLEKEKNAVLDRMAESQEAELERLRTQLLFSHEEELSKLKEDLEIEHRINIEKLKDNLGIHYKQQIDGLQNEMSQKIETMQFEKDNLITKQNQLILEISKLKDLQQSLVNSKSEEMTLQINELQKEIEILRQEEKEKGTLEQEVQELQLKTELLEKQMKEKENDLQEKFAQLEAENSILKDEKKTLEDMLKIHTPVSQEERLIFLDSIKSKSKDSVWEKEIEILIEENEDLKQQCIQLNEEIEKQRNTFSFAEKNFEVNYQELQEEYACLLKVKDDLEDSKNKQELEYKSKLKALNEELHLQRINPTTVKMKSSVFDEDKTFVAETLEMGEVVEKDTTELMEKLEVTKREKLELSQRLSDLSEQLKQKHGEISFLNEEVKSLKQEKEQVSLRCRELEIIINHNRAENVQSCDTQVSSLLDGVVTMTSRGAEGSVSKVNKSFGEESKIMVEDKVSFENMTVGEESKQEQLILDHLPSVTKESSLRATQPSENDKLQKELNVLKSEQNDLRLQMEAQRICLSLVYSTHVDQVREYMENEKDKALCSLKEELIFAQEEKIKELQKIHQLELQTMKTQETGDEGKPLHLLIGKLQKAVSEECSYFLQTLCSVLGEYYTPALKCEVNAEDKENSGDYISENEDPELQDYRYEVQDFQENMHTLLNKVTEEYNKLLVLQTRLSKIWGQQTDGMKLEFGEENLPKEETEFLSIHSQMTNLEDIDVNHKSKLSSLQDLEKTKLEEQVQELESLISSLQQQLKETEQNYEAEIHCLQKRLQAVSESTVPPSLPVDSVVITESDAQRTMYPGSCVKKNIDGTIEFSGEFGVKEETNIVKLLEKQYQEQLEEEVAKVIVSMSIAFAQQTELSRISGGKENTASSKQAHAVCQQEQHYFNEMKLSQDQIGFQTFETVDVKFKEEFKPLSKELGEHGKEILLSNSDPHDIPESKDCVLTISEEMFSKDKTFIVRQSIHDEISVSSMDASRQLMLNEEQLEDMRQELVRQYQEHQQATELLRQAHMRQMERQREDQEQLQEEIKRLNRQLAQNGNENQGEVEEQTFKEKELDRKPEDVPPEILSNERYALQKANNRLLKILLEVVKTTAAVEETIGRHVLGILDRSSKSQSSASLIWRSEAEASVKSCVHEEHTRVTDESIPSYSGSDMPRNDINMWSKVTEEGTELSQRLVRSGFAGTEIDPENEELMLNISSRLQAAVEKLLEAISETSSQLEHAKVTQTELMRESFRQKQEATESLKCQEELRERLHEESRAREQLAVELSKAEGVIDGYADEKTLFERQIQEKTDIIDRLEQELLCASNRLQELEAEQQQIQEERELLSRQKEAMKAEAGPVEQQLLQETEKLMKEKLEVQCQAEKVRDDLQKQVKALEIDVEEQVSRFIELEQEKNTELMDLRQQNQALEKQLEKMRKFLDEQAIDREHERDVFQQEIQKLEQQLKVVPRFQPISEHQTREVEQLANHLKEKTDKCSELLLSKEQLQRDIQERNEEIEKLEFRVRELEQALLVSADTFQKVEDRKHFGAVEAKPELSLEVQLQAERDAIDRKEKEITNLEEQLEQFREELENKNEEVQQLHMQLEIQKKESTTRLQELEQENKLFKDDMEKLGLAIKESDAMSTQDQHVLFGKFAQIIQEKEVEIDQLNEQVTKLQQQLKITTDNKVIEEKNELIRDLETQIECLMSDQECVKRNREEEIEQLNEVIEKLQQELANIGQKTSMNAHSLSEEADSLKHQLDVVIAEKLALEQQVETANEEMTFMKNVLKETNFKMNQLTQELFSLKRERESVEKIQSIPENSVNVAIDHLSKDKPELEVVLTEDALKSLENQTYFKSFEENGKGSIINLETRLLQLESTVSAKDLELTQCYKQIKDMQEQGQFETEMLQKKIVNLQKIVEEKVAAALVSQIQLEAVQEYAKFCQDNQTISSEPERTNIQNLNQLREDELGSDISALTLRISELESQVVEMHTSLILEKEQVEIAEKNVLEKEKKLLELQKLLEGNEKKQREKEKKRSPQDVEVLKTTTELFHSNEESGFFNELEALRAESVATKAELASYKEKAEKLQEELLVKETNMTSLQKDLSQVRDHLAEAKEKLSILEKEDETEVQESKKACMFEPLPIKLSKSIASQTDGTLKISSSNQTPQILVKNAGIQINLQSECSSEEVTEIISQFTEKIEKMQELHAAEILDMESRHISETETLKREHYVAVQLLKEECGTLKAVIQCLRSKEGSSIPELAHSDAYQTREICSSDSGSDWGQGIYLTHSQGFDIASEGRGEESESATDSFPKKIKGLLRAVHNEGMQVLSLTESPYSDGEDHSIQQVSEPWLEERKAYINTISSLKDLITKMQLQREAEVYDSSQSHESFSDWRGELLLALQQVFLEERSVLLAAFRTELTALGTTDAVGLLNCLEQRIQEQGVEYQAAMECLQKADRRSLLSEIQALHAQMNGRKITLKREQESEKPSQGMLYDKLIWLHKQVKRFHFVFFLIIIKLKHIFLVTFSSHSHNVKDTIYINYSRG

SEQ ID NO: 7500 - protein, 294 aa, Homo sapiens
MAHGIPSQGKVTITVDEYSSNPTQAFTHYNINQSRFQPPHVHMVDPIPYDTPKPAGHTRFVCISDTHSRTDGIQMPYGDILLHTGDFTELGLPSEVKKFNDWLGNLPYEYKIVIAGNHELTFDKEFMADLVKQDYYRFPSVSKLKPEDFDNVQSLLTNSIYLQDSEVTVKGFRIYGAPWTPWFNGWGFNLPRGQSLLDKWNLIPEGIDILMTHGPPLGFRDWVPKELQRVGCVELLNTVQRRVRPKLHVFGGIHEGYGIMTDGYTTYINASTCTVSFQPTNPPIIFDLPNPQGS

SEQ ID NO: 7501 - protein, 312 aa, Homo sapiens
MEKWNHTSNDFILLGLLPPNQTGIFLLCLIILIFFLASVGNSAMIHLIHVDPRLHTPMYFLLSQLSLMDLMYISTTVPKMAYNFLSGQKGISFLGCGVQSFFFLTMACSEGLLLTSMAYDRYLAICHSLYYPIRMSKMMCVKMIGGSWTLGSINSLAHTVFALHIPYCRSRAIDHFFCDVPAMLLLACTDTWVYEYMVFVSTSLFLLFPFIGITSSCGRVLFAVYHMHSKEGRKKAFTTISTHLTVVIFYYAPFVYTYLRPRNLRSPAEDKILAVFYTILTPMLNPIIYSLRNKEVLGAMRRVFGIFSFLKE

SEQ ID NO: 7502 - protein, 391 aa, Homo sapiens
MDLEKNYPTPRTSRTGHGGVNQLGGVFVNGRPLPDVVRQRIVELAHQGVRPCDISRQLRVSHGCVSKILGRYYETGSIKPGVIGGSKPKVATPKVVEKIAEYKRQNPTMFAWEIRDRLLAERVCDNDTVPSVSSINRIIRTKVQQPPNQPVPASSHSIVSTGSVTQVSSVSTDSAGSSYSISGILGITSPSADTNKRKRDEGIQESPVPNGHSLPGRDFLRKQMRGDLFTQQQLEVLDRVFERQHYSDIFTTTEPIKPEQTTEYSAMASLAGGLDDMKANLASPTPADIGSSVPGPQSYPIVTGRDLASTTLPGYPPHVPPAGQGSYSAPTLTGMVPGSEFSGSPYSHPQYSSYNDSWRFPNPGLLGSPYYYSAAARGAAPPAAATAYDRH

SEQ ID NO: 7503 - protein, 488 aa, Homo sapiens
MQQTRTEAVAGAFSRCLGFCGMRLGLLLLARHWCIAGVFPQKFDGDSAYVGMSDGNPELLSTSQTYNGQSENNEDYEIPPITPPNLPEPSLLHLGDHEASYHSLCHGLTPNGLLPAYSYQAMDLPAIMVSNMLAQDSHLLSGQLPTIQEMVHSEVAAYDSGRPGPLLGRPAMLASHMSALSQSQLISQMGIRSSIAHSSPSPPGSKSATPSPSSSTQEEESEVHFKISGEKRPSADPGKKAKNPKKKKKKDPNEPQKPVSAYALFFRDTQAAIKGQNPSATFGDVSKIVASMWDSLGEEQKQSSPDQGETKSTQANPPAKMLPPKQPMYAMPGLASFLTPSDLQAFRSGASPASLARTLGSKSLLPGLSASPPPPPSFPLSPTLHQQLSLPPHAQGALLSPPVSMSPAPQPPVLPTPMALQVQLAMSPSPPGPQDFPHISEFPSSSGSCSPGPSNPTSSGDWDSSYPSGECGISTCSLLPRDKSLYLT

SEQ ID NO: 7504 - protein, 501 aa, Homo sapiens
MGKKINKLFCFNFLVQCFRGKSKPSKCQIRKKVKNHIERLLDTEDELSDIQTDSVPSEVRDWLASTFTRKMGMTKKKPEEKPKFRSIVHAVQAGIFVERMYRKTYHMVGLAYPAAVIVTLKDVDKWSFDVFALNEASGEHSLKFMIYELFTRYDLINRFKIPVSCLITFAEALEVGYSKYKNPYHNLIHAADVTQTVHYIMLHTGIMHWLTELEILAMVFAAAIHDYEHTGTTNNFHIQTRSDVAILYNDRSVLENHHVSAAYRLMQEEEMNILINLSKDDWRDLRNLVIEMVLSTDMSGHFQQIKNIRNSLQQPEGIDRAKTMSLILHAADISHPAKSWKLHYRWTMALMEEFFLQGDKEAELGLPFSPLCDRKSTMVAQSQIGFIDFIVEPTFSLLTDSTEKIVIPLIEEASKAETSSYVASSSTTIVGLHIADALRRSNTKGSMSDGSYSPDYSLAAVDLKSFKNNLVDIIQQNKERWKELAAQEARTSSQKCEFIHQ

SEQ ID NO: 7505 - protein, 1039 aa, Homo sapiens
MEVTAVATQGGYGSSDWVTSYLLMFSDGGRNWKQYRREESIWGFPGNTNADSVVHYRLQPPFEARFLRFLPLAWNPRGRIGMRIEVYGCAYKSEVVYFDGQSALLYRLDKKPLKPIRDVISLKFKAMQSNGILLHREGQHGNHITLELIKGKLVFFLNSGNAKLPSTIAPVTLTLGSLLDDQHWHSVLIELLDTQVNFTVDKHTHHFQAKGDSSYLDLNFEISFGGIPTPGRSRAFRRKSFHGCLENLYYNGVDVTELAKKHKPQILMMGNVSFSCPQPQTVPVTFLSSRSYLALPGNSGEDKVSVTFQFRTWNRAGHLLFGELRRGSGSFVLFLKDGKLKLSLFQPGQSPRNVTAGAGLNDGQWHSVSFSAKWSHMNVVVDDDTAVQPLVAVLIDSGDTYYFGGCLDNSSGSGCKSPLGGFQGCLRLITIGDKAVDPILVQQGALGSFRDLQIDSCGITDRCLPSYCEHGGECSQSWDTFSCDCLGTGYTGETCHSSLYEQSCEAHKHRGNPSGLYYIDADGSGPLGPFLVYCNMTADAAWTVVQHGGPDAVTLRGAPSGHPRSAVSFAYAAGAGQLRSAVNLAERCEQRLALRCGTARRPDSRDGTPLSWWVGRTNETHTSWGGSLPDAQKCTCGLEGNCIDSQYYCNCDAGRNEWTSDTIVLSQKEHLPVTQIVMTDAGRPHSEAAYTLGPLLCRGDQSFWNSASFNTETSYLHFPAFHGELTADVCFFFKTTVSSGVFMENLGITDFIRIELRAPTEVTFSFDVGNGPCEVTVQSPTPFNDNQWHHVRAERNVKGASLQVDQLPQKMQPAPADGHVRLQLNSQLFIGGTATRQRGFLGCIRSLQLNGVALDLEERATVTPGVEPGCAGHCSTYGHLCRNGGRCREKRRGVTCDCAFSAYDGPFCSNEISAYFATGSSMTYHFQEHYTLSENSSSLVSSLHRDVTLTREMITLSFRTTRTPSLLLYVSSFYEEYLSVILANNGSLQIRYKLDRHQNPDAFTFDFKNMADGQLHQVKINREEAVVMVEVIPQMQKSN

SEQ ID NO: 7506 - protein, 662 aa, Homo sapiens
MEGAPTVRQVMNEGDSSLATDLQEDVEENPSPTVEENNVVVKKQGPNLHNWSGDWSFWISSSTYKDRNEEYRRQFTHLPDTERLIADYACALQRDILLQGRLYLSENWLCFYSNIFRWETTISIALKNITFMTKEKTARLIPNAIQIVTESEKFFFTSFGARDRSYLSIFRLWQNVLLDKSLTRQEFWQLLQQNYGTELGLNAEEMENLSLSIEDVQPRSPGRSSLDDSGERDEKLSKSISFTSESISRVSETESFDGNSSKGGLGKEESQNEKQTKKSLLPTLEKKLTRVPSKSLDLNKNEYLSLDKSSTSDSVDEENVPEKDLHGRLFINRIFHISADRMFELLFTSSRFMQKFASSRNIIDVVSTPWTAELGGDQLRTMTYTIVLNSPLTGKCTAATEKQTLYKESREARFYLVDSEVLTHDVPYHDYFYTVNRYCIIRSSKQKCRLRVSTDLKYRKQPWGLVKSLIEKNSWSSLEDYFKQLESDLLIEESVLNQAIEDPGKLTGLRRRRRTFNRTAETVPKLSSQHSSGDVGLGAKGDITGKKKEMENYNVTLIVVMSIFVLLLVLLNVTLFLKLSKIEHAAQSFYRLRLQEEKSLNLASDMVSRAETIQKNKDQAHRLKGVLRDSIVMLEQLKSSLIMLQKTFDLLNKNKTGMAVES

SEQ ID NO: 7507 - protein, 2452 aa, Homo sapiens
MDPSGVKVLETAEDIQERRQQVLDRYHRFKELSTLRRQKLEDSYRFQFFQRDAEELEKWIQEKLQIASDENYKDPTNLQGKLQKHQAFEAEVQANSGAIVKLDETGNLMISEGHFASETIRTRLMELHRQWELLLEKMREKGIKLLQAQKLVQYLRECEDVMDWINDKEAIVTSEELGQDLEHVEVLQKKFEEFQTDMAAHEERVNEVNQFAAKLIQEQHPEEELIKTKQDEVNAAWQRLKGLALQRQGKLFGAAEVQRFNRDVDETISWIKEKEQLMASDDFGRDLASVQALLRKHEGLERDLAALEDKVKALCAEADRLQQSHPLSATQIQVKREELITNWEQIRTLAAERHARLNDSYRLQRFLADFRDLTSWVTEMKALINADELASDVAGAEALLDRHQEHKGEIDAHEDSFKSADESGQALLAAGHYASDEVREKLTVLSEERAALLELWELRRQQYEQCMDLQLFYRDTEQVDNWMSKQEAFLLNEDLGDSLDSVEALLKKHEDFEKSLSAQEEKITALDEFATKLIQNNHYAMEDVATRRDALLSRRNALHERAMRRRAQLADSFHLQQFFRDSDELKSWVNEKMKTATDEAYKDPSNLQGKVQKHQAFEAELSANQSRIDALEKAGQKLIDVNHYAKDEVAARMNEVISLWKKLLEATELKGIKLREANQQQQFNRNVEDIELWLYEVEGHLASDDYGKDLTNVQNLQKKHALLEADVAAHQDRIDGITIQARQFQDAGHFDAENIKKKQEALVARYEALKEPMVARKQKLADSLRLQQLFRDVEDEETWIREKEPIAASTNRGKDLIGVQNLLKKHQALQAEIAGHEPRIKAVTQKGNAMVEEGHFAAEDVKAKLHELNQKWEALKAKASQRRQDLEDSLQAQQYFADANEAESWMREKEPIVGSTDYGKDEDSAEALLKKHEALMSDLSAYGSSIQALREQAQSCRQQVAPTDDETGKELVLALYDYQEKSPREVTMKKGDILTLLNSTNKDWWKVEVNDRQGFVPAAYVKKLDPAQSASRENLLEEQGSIALRQEQIDNQYHSLLELGEKRKGMLEKSCKKFMLFREANELQQWINEKEAALTSEEVGADLEQVEVLQKKFDDFQKDLKANESRLKDINKVAEDLESEGLMAEEVQAVQQQEVYGMMPRDETDSKTASPWKSARLMVHTVATFNSIKELNERWRSLQQLAEERSQLLGSAHEVQRFHRDADETKEWIEEKNQALNTDNYGHDLASVQALQRKHEGFERDLAALGDKVNSLGETAERLIQSHPESAEDLQEKCTELNQAWSSLGKRADQRKAKLGDSHDLQRFLSDFRDLMSWINGIRGLVSSDELAKDVTGAEALLERHQEHRTEIDARAGTFQAFEQFGQQLLAHGHYASPEIKQKLDILDQERADLEKAWVQRRMMLDQCLELQLFHRDCEQAENWMAAREAFLNTEDKGDSLDSVEALIKKHEDFDKAINVQEEKIAALQAFADQLIAAGHYAKGDISSRRNEVLDRWRRLKAQMIEKRSKLGESQTLQQFSRDVDEIEAWISEKLQTASDESYKDPTNIQSKHQKHQAFEAELHANADRIRGVIDMGNSLIERGACAGSEDAVKARLAALADQWQFLVQKSAEKSQKLKEANKQQNFNTGIKDFDFWLSEVEALLASEDYGKDLASVNNLLKKHQLLEADISAHEDRLKDLNSQADSLMTSSAFDTSQVKDKRDTINGRFQKIKSMAASRRAKLNESHRLHQFFRDMDDEESWIKEKKLLVGSEDYGRDLTGVQNLRKKHKRLEAELAAHEPAIQGVLDTGKKLSDDNTIGKEEIQQRLAQFVEHWKELKQLAAARGQRLEESLEYQQFVANVEEEEAWINEKMTLVASEDYGDTLAAIQGLLKKHEAFETDFTVHKDRVNDVCTNGQDLIKKNNHHEENISSKMKGLNGKVSDLEKAAAQRKAKLDENSAFLQFNWKADVVESWIGEKENSLKTDDYGRDLSSVQTLLTKQETFDAGLQAFQQEGIANITALKDQLLAAKHVQSKAIEARHASLMKRWSQLLANSAARKKKLLEAQSHFRKVEDLFLTFAKKASAFNSWFENAEEDLTDPVRCNSLEEIKALREAHDAFRSSLSSAQADFNQLAELDRQIKSFRVASNPYTWFTMEALEETWRNLQKIIKERELELQKEQRRQEENDKLRQEFAQHANAFHQWIQETRTYLLDGSCMVEESGTLESQLEATKRKHQEIRAMRSQLKKIEDLGAAMEEALILDNKYTEHSTVGLAQQWDQLDQLGMRMQHNLEQQIQARNTTGVTEEALKEFSMMFKHFDKDKSGRLNHQEFKSCLRSLGYDLPMVEEGEPDPEFEAILDTVDPNRDGHVSLQEYMAFMISRETENVKSSEEIESAFRALSSEGKPYVTKEELYQNLTREQADYCVSHMKPYVDGKGRELPTAFDYVEFTRSLFVN

SEQ ID NO: 7508 - protein, 1086 aa, Homo sapiens
MKDSCITVMAMALLSGFFFFAPASSYNLDVRGARSFSPPRAGRHFGYRVLQVGNGVIVGAPGEGNSTGSLYQCQSGTGHCLPVTLRGSNYTSKYLGMTLATDPTDGSILFAAVQFSTSYKTEFDFSDYVKRKDPDALLKHVKHMLLLTNTFGAINYVATEVFREELGARPDATKVLIIITDGEATDSGNIDAAKDIIRYIIGIGKHFQTKESQETLHKFASKPASEFVKILDTFEKLKDLFTELQKKIYVIEGTSKQDLTSFNMELSSSGISADLSRGHAVVGAVGAKDWAGGFLDLKADLQDDTFIGNEPLTPEVRAGYLGYTVTWLPSRQKTSLLASGAPRYQHMGRVLLFQEPQGGGHWSQVQTIHGTQIGSYFGGELCGVDVDQDGETELLLIGAPLFYGEQRGGRVFIYQRRQLGFEEVSELQGDPGYPLGRFGEAITALTDINGDGLVDVAVGAPLEEQGAVYIFNGRHGGLSPQPSQRIEGTQVLSGIQWFGRSIHGVKDLEGDGLADVAVGAESQMIVLSSRPVVDMVTLMSFSPAEIPVHEVECSYSTSNKMKEGVNITICFQIKSLIPQFQGRLVANLTYTLQLDGHRTRRRGLFPGGRHELRRNIAVTTSMSCTDFSFHFPVCVQDLISPINVSLNFSLWEEEGTPRDQRAGKDIPPILRPSLHSETWEIPFEKNCGEDKKCEANLRVSFSPARSRALRLTAFASLSVELSLSNLEEDAYWVQLDLHFPPGLSFRKVEMLKPHSQIPVSCEELPEESRLLSRALSCNVSSPIFKAGHSVALQMMFNTLVNSSWGDSVELHANVTCNNEDSDLLEDNSATTIIPILYPINILIQDQEDSTLYVSFTPKGPKIHQVKHMYQVRIQPSIHDHNIPTLEAVVGVPQPPSEGPITHQWSVQMEPPVPCHYEDLERLPDAAEPCLPGALFRCPVVFRQEILVQVIGTLELVGEIEASSMFSLCSSLSISFNSSKHFHLYGSNASLAQVVMKVDVVYEKQMLYLYVLSGIGGLLLLLLIFIVLYKVGFFKRNLKEKMEAGRGVPNGIPAEDSEQLASGQEAGDPGCLKPLHEKDSESGGGKD

SEQ ID NO: 7509 - protein, 987 aa, Homo sapiens
MELRVLLCWASLAAALEETLLNTKLETADLKWVTFPQVDGQWEELSGLDEEQHSVRTYEVCDVQRAPGQAHWLRTGWVPRRGAVHVYATLRFTMLECLSLPRAGRSCKETFTVFYYESDADTATALTPAWMENPYIKVDTVAAEHLTRKRPGAEATGKVNVKTLRLGPLSKAGFYLAFQDQGACMALLSLHLFYKKCAQLTVNLTRFPETVPRELVVPVAGSCVVDAVPAPGPSPSLYCREDGQWAEQPVTGCSCAPGFEAAEGNTKCRACAQGTFKPLSGEGSCQPCPANSHSNTIGSAVCQCRVGYFRARTDPRGAPCTTPPSAPRSVVSRLNGSSLHLEWSAPLESGGREDLTYALRCRECRPGGSCAPCGGDLTFDPGPRDLVEPWVVVRGLRPDFTYTFEVTALNGVSSLATGPVPFEPVNVTTDREVPPAVSDIRVTRSSPSSLSLAWAVPRAPSGAVLDYEVKYHEKGAEGPSSVRFLKTSENRAELRGLKRGASYLVQVRARSEAGYGPFGQEHHSQTQLDESEGWREQLALIAGTAVVGVVLVLVVIVVAVLCLRKQSNGREAEYSDKHGQYLIGHGTKVYIDPFTYEDPNEAVREFAKEIDVSYVKIEEVIGAGEFGEVCRGRLKAPGKKESCVAIKTLKGGYTERQRREFLSEASIMGQFEHPNIIRLEGVVTNSMPVMILTEFMENGALDSFLRLNDGQFTVIQLVGMLRGIASGMRYLAEMSYVHRDLAARNILVNSNLVCKVSDFGLSRFLEENSSDPTYTSSLGGKIPIRWTAPEAIAFRKFTSASDAWSYGIVMWEVMSFGERPYWDMSNQDVINAIEQDYRLPPPPDCPTSLHQLMLDCWQKDRNARPRFPQVVSALDKMIRNPASLKIVARENGGASHPLLDQRQPHYSAFGSVGEWLRAIKMGRYEESFAAAGFGSFELVSQISAEDLLRIGVTLAGHQKKILASVQHMKSQAKPGTPGGTGGPAPQY

SEQ ID NO: 7510 - protein, 1966 aa, Homo sapiens
MKAADTVILWARSKNDQLRISFPPGLCWGDRMPDKDDIRLLPSALGVKKRKRGPKKQKENKPGKPRKRKKRDSEEEFGSERDEYREKSESGGSEYGTGPGRKRRRKHREKKEKKTKRRKKGEGDGGQKQVEQKSSATLLLTWGLEDVEHVFSEEDYHTLTNYKAFSQFMRPLIAKKNPKIPMSKMMTILGAKWREFSANNPFKGSAAAVAAAAAAAAAAVAEQVSAAVSSATPIAPSGPPALPPPPAADIQPPPIRRAKTKEGKGPGHKRRSKSPRVPDGRKKLRGKKMAPLKIKLGLLGGKRKKGGSYVFQSDEGPEPEAEESDLDSGSVHSASGRPDGPVRTKKLKRGRPGRKKKKVLGCPAVAGEEEVDGYETDHQDYCEVCQQGGEIILCDTCPRAYHLVCLDPELDRAPEGKWSCPHCEKEGVQWEAKEEEEEYEEEGEEEGEKEEEDDHMEYCRVCKDGGELLCCDACISSYHIHCLNPPLPDIPNGEWLCPRCTCPVLKGRVQKILHWRWGEPPVAVPAPQQADGNPDVPPPRPLQGRSEREFFVKWVGLSYWHCSWAKELQLEIFHLVMYRNYQRKNDMDEPPPLDYGSGEDDGKSDKRKVKDPHYAEMEEKYYRFGIKPEWMTVHRIINHSVDKKGNYHYLVKWRDLPYDQSTWEEDEMNIPEYEEHKQSYWRHRELIMGEDPAQPRKYKKKKKELQGDGPPSSPTNDPTVKYETQPRFITATGGTLHMYQLEGLNWLRFSWAQGTDTILADEMGLGKTIQTIVFLYSLYKEGHTKGPFLVSAPLSTIINWEREFQMWAPKFYVVTYTGDKDSRAIIRENEFSFEDNAIKGGKKAFKMKREAQVKFHVLLTSYELITIDQAALGSIRWACLVVDEAHRLKNNQSKFFRVLNGYKIDHKLLLTGTPLQNNLEELFHLLNFLTPERFNNLEGFLEEFADISKEDQIKKLHDLLGPHMLRRLKADVFKNMPAKTELIVRVELSPMQKKYYKYILTRNFEALNSRGGGNQVSLLNIMMDLKKCCNHPYLFPVAAMESPKLPSGAYEGGALIKSSGKLMLLQKMLRKLKEQGHRVLIFSQMTKMLDLLEDFLDYEGYKYERIDGGITGALRQEAIDRFNAPGAQQFCFLLSTRAGGLGINLATADTVIIFDSDWNPHNDIQAFSRAHRIGQANKVMIYRFVTRASVEERITQVAKRKMMLTHLVVRPGLGSKAGSMSKQELDDILKFGTEELFKDENEGENKEEDSSVIHYDNEAIARLLDRNQDATEDTDVQNMNEYLSSFKVAQYVVREEDKIEEIEREIIKQEENVDPDYWEKLLRHHYEQQQEDLARNLGKGKRVRKQVNYNDAAQEDQDNQSEYSVGSEEEDEDFDERPEGRRQSKRQLRNEKDKPLPPLLARVGGNIEVLGFNTRQRKAFLNAVMRWGMPPQDAFTTQWLVRDLRGKTEKEFKAYVSLFMRHLCEPGADGSETFADGVPREGLSRQQVLTRIGVMSLVKKKVQEFEHINGRWSMPELMPDPSADSKRSSRASSPTKTSPTTPEASATNSPCTSKPATPAPSEKGEGIRTPLEKEEAENQEEKPEKNSRIGEKMETEADAPSPAPSLGERLEPRKIPLEDEVPGVPGEMEPEPGYRGDREKSEDVKGDRELRPGPRDEPRSNGRREEKTEKPRFMFNIADGGFTELHTLWQNEERAAISSGKLNEIWHRRHDYWLLAGIVLHGYARWQDIQNDAQFAIINEPFKTEANKGNFLEMKNKFLARRFKLLEQALVIEEQLRRAAYLNLSQEPAHPAMALHARFAEAECLAESHQHLSKESLAGNKPANAVLHKVLNQLEELLSDMKADVTRLPATLSRIPPIAARLQMSERSILSRLASKGTEPHPTPAYPPGPYATPPGYGAAFSAAPVGALAAAGANYSQMPAGSFITAATNGPPVLVKKEKEMVGALVSDGLDRKEPRAGEVICIDD

SEQ ID NO: 7511 - protein, 396 aa, Homo sapiens
MKTLLLLLLVLLELGEAQGSLHRVPLRRHPSLKKKLRARSQLSEFWKSHNLDMIQFTESCSMDQSAKEPLINYLDMEYFGTISIGSPPQNFTVIFDTGSSNLWVPSVYCTSPACKTHSRFQPSQSSTYSQPGQSFSIQYGTGSLSGIIGADQVSVEGLTVVGQQFGESVTEPGQTFVDAEFDGILGLGYPSLAVGGVTPVFDNMMAQNLVDLPMFSVYMSSNPEGGAGSELIFGGYDHSHFSGSLNWVPVTKQAYWQIALDNIQVGGTVMFCSEGCQAIVDTGTSLITGPSDKIKQLQNAIGAAPVDGEYAVECANLNVMPDVTFTINGVPYTLSPTAYTLLDFVDGMQFCSSGFQGLDIHPPAGPLWILGDVFIRQFYSVFDRGNNRVGLAPAVP

SEQ ID NO: 7512 - protein, 414 aa, Homo sapiens
MRESQDAAGAHGWNRVGSTATKWFTGAPFGVQSHRFDISAVYPNWKKFSTFTEAPYSTRYSTQVSHIGPGTYSSKETCFSKKKLMKEVDTGWAKAQEATRLTQLPHFQYQAIMKEKRLKEQKLGPGSYNLKDFLEQLREKPCSTRGLLSSGEVRFRGLTGNYYPGPGNYGEKGNPYTKLEENAWNRSHSEGLMCRMSNKPHPRPHQGSGLGPGTYFFKSDLETYVARSVGTRGPYDTFSGDRSKPLPYGHYSMQKKKPRELMNFKSFVEELNSHHNKKHGVFSKLPRNPKTPTERIYWANLSQCPRTLATSGPSFWLPQEKKCKPVNQPPFLLTSKGSGAKACQMIMGSWNPVGVGRYLNTWLMETKDRRQRYRSLFLSGSKRYLSDLARDMLMQIRLFCWKGLEVINFGLSPM

SEQ ID NO: 7513 - protein, 594 aa, Homo sapiens
MASSTPSSSATSSNAGADPNTTNLRPTTYDTWCGVAHGCTRKLGLKICGFLQRTNSLEEKSRLVSAFKERQSSKNLLSCENSDRDARFRRTETDFSNLFARDLLPAKNGEEQTVQFLLEVVDILLNYVRKTFDRSTKVLDFHHPHQLLEGMEGFNLELSDHPESLEQILVDCRDTLKYGVRTGHPRFFNQLSTGLDIIGLAGEWLTSTANTNMFTYEIAPVFVLMEQITLKKMREIVGWSSKDGDGIFSPGGAISNMYSIMAARYKYFPEVKTKGMAAVPKLVLFTSEQSHYSIKKAGAALGFGTDNVILIKCNERGKIIPADFEAKILEAKQKGYVPFYVNATAGTTVYGAFDPIQEIADICEKYNLWLHVDAAWGGGLLMSRKHRHKLNGIERANSVTWNPHKMMGVLLQCSAILVKEKGILQGCNQMCAGYLFQPDKQYDVSYDTGDKAIQCGRHVDIFKFWLMWKAKGTVGFENQINKCLELAEYLYAKIKNREEFEMVFNGEPEHTNVCFWYIPQSLRGVPDSPQRREKLHKVAPKIKALMMESGTTMVGYQPQGDKANFFRMVISNPAATQSDIDFLIEEIERLGQDL

SEQ ID NO: 7514 - protein, 569 aa, Homo sapiens
MAAAAPVAADDDERRRRPGAALEDSRSQEGANGEAESGELSRLRAELAGALAEMETMKAVAEVSESTKAEAVAAVQRQCQEEVASLQAILKDSISSYEAQITALKQERQQQQQDCEEKERELGRLKQLLSRAYPLDSLEKQMEKAHEDSEKLREIVLPMEKEIEELKAKLLRAEELIQEIQRRPRHAPSLHGSTELLPLSRDPSPPLEPLEELSGDGGPAAEAFAHNCDDSASISSFSLGGGVGSSSSLPQSRQGLSPEQEETASLVSTGTLVPEGIYLPPPGYQLVPDTQWEQLQTEGRQLQKDLESVSRERDELQEGLRRSNEDCAKQMQVLLAQVQNSEQLLRTLQGTVSQAQERVQLQMAELVTTHKCLHHEVKRLNEENQGLRAEQLPSSAPQGSQQEQGEEESLPSSVPELQQLLCCTRQEARARLQAQEHGAERLRIEIVTLREALEEETVARASLEGQLRVQREETEVLEASLCSLRTEMERVQQEQSKAQLPDLLSEQRAKVLRLQAELETSEQVQRDFVRLSQALQVRLERIRQAETLEQVRSIMDEAPLTDVRDIKDT

SEQ ID NO: 7515 - protein, 421 aa, Homo sapiens
MDLENKVKKMGLGHEQGFGAPCLKCKEKCEGFELHFWRKICRNCKCGQEEHDVLLSNEEDRKVGKLFEDTKYTTLIAKLKSDGIPMYKRNVMILTNPVAAKKNVSINTVTYEWAPPVQNQALARQYMQMLPKEKQPVAGSEGAQYRKKQLAKQLPAHDQDPSKCHELSPREVKEMEQFVKKYKSEALGVGDVKLPCEMDAQGPKQMNIPGGDRSTPAAVGAMEDKSAEHKRTQYSCYCCKLSMKEGDPAIYAERAGYDKLWHPACFVCSTCHELLVDMIYFWKNEKLYCGRHYCDSEKPRCAGCDELIFSNEYTQAENQNWHLKHFCCFDCDSILAGEIYVMVNDKPVCKPCYVKNHAVVCQGCHNAIDPEVQRVTYNNFSWHASTECFLCSCCSKCLIGQKFMPVEGMVFCSVECKKRMS

SEQ ID NO: 7516 - protein, 1855 aa, Homo sapiens
MAASELYTKFARVWIPDPEEVWKSAELLKDYKPGDKVLLLHLEEGKDLEYHLDPKTKELPHLRNPDILVGENDLTALSYLHEPAVLHNLRVRFIDSKLIYTYCGIVLVAINPYEQLPIYGEDIINAYSGQNMGDMDPHIFAVAEEAYKQMARDERNQSIIVSGESGAGKTVSAKYAMRYFATVSGSASEANVEEKVLASNPIMESIGNAKTTRNDNSSRFGKYIEIGFDKRYRIIGANMRTYLLEKSRVVFQAEEERNYHIFYQLCASAKLPEFKMLRLGNADNFNYTKQGGSPVIEGVDDAKEMAHTRQACTLLGISESHQMGIFRILAGILHLGNVGFTSRDADSCTIPPKHEPLCIFCELMGVDYEEMCHWLCHRKLATATETYIKPISKLQATNARDALAKHIYAKLFNWIVDNVNQALHSAVKQHSFIGVLDIYGFETFEINSFEQFCINYANEKLQQQFNMHVFKLEQEEYMKEQIPWTLIDFYDNQPCINLIESKLGILDLLDEECKMPKGTDDTWAQKLYNTHLNKCALFEKPRLSNKAFIIQHFADKVEYQCEGFLEKNKDTVFEEQIKVLKSSKFKMLPELFQDDEKAISPTSATSSGRTPLTRTPAKPTKGRPGQMAKEHKKTVGHQFRNSLHLLMETLNATTPHYVRCIKPNDFKFPFTFDEKRAVQQLRACGVLETIRISAAGFPSRWTYQEFFSRYRVLMKQKDVLSDRKQTCKNVLEKLILDKDKYQFGKTKIFFRAGQVAYLEKLRADKLRAACIRIQKTIRGWLLRKKYLRMRKAAITMQRYVRGYQARCYAKFLRRTKAATIIQKYWRMYVVRRRYKIRRAATIVLQSYLRGFLARNRYRKILREHKAVIIQKRVRGWLARTHYKRSMHAIIYLQCCFRRMMAKRELKKLKIEARSVERYKKLHIGMENKIMQLQRKVDEQNKDYKCLVEKLTNLEGIYNSETEKLRSDLERLQLSEEEAKVATGRVLSLQEEIAKLRKDLEQTRSEKKCIEEHADRYKQETEQLVSNLKEENTLLKQEKEALNHRIVQQAKEMTETMEKKLVEETKQLELDLNDERLRYQNLLNEFSRLEERYDDLKEEMTLMVHVPKPGHKRTDSTHSSNESEYIFSSEIAEMEDIPSRTEEPSEKKVPLDMSLFLKLQKRVTELEQEKQVMQDELDRKEEQVLRSKAKEEERPQIRGAELEYESLKRQELESENKKLKNELNELRKALSEKSAPEVTAPGAPAYRVLMEQLTSVSEELDVRKEEVLILRSQLVSQKEAIQPKDDKNTMTDSTILLEDVQKMKDKGEIAQAYIGLKETNRSSALDYHELNEDGELWLVYEGLKQANRLLESQLQSQKRSHENEAEALRGEIQSLKEENNRQQQLLAQNLQLPPEARIEASLQHEITRLTNENLDLMEQLEKQDKTVRKLKKQLKVFAKKIGELEVGQMENISPGQIIDEPIRPVNIPRKEKDFQGMLEYKKEDEQKLVKNLILGNKPRGVAVNLIPGLPAYILFMCVRHADYLNDDQKVRSLLTSTINSIKKVLKKRGDDFETVSFWLSNTCRFLHCLKQYSGEEGFMKHNTSRQNEHCLTNFDLAEYRQVLSDLAIQIYQQLVRVLENILQPMIVSGMLEHETIQGVSGVKPTGLRKRTSSIADEGTYTLDSILRQLNSFHSVMCQHGMDPELIKQVVKQMFYIIGAITLNNLLLRKDMCSWSKGMQIRYNVSQLEEWLRDKNLMNSGAKETLEPLIQAAQLLQVKKKTDDDAEAICSMCNALTTAQIVKVLNLYTPVNEFEERVSVSFIRTIQMRLRDRKDSPQLLMDAKHIFPVTFPFNPSSLALETIQIPASLGLGFISRV

SEQ ID NO: 7517 - protein, 663 aa, Homo sapiens
MESTLTLATEQPVKKNTLKKYKIACIVLLALLVIMSLGLGLGLGLRKLEKQGSCRKKCFDASFRGLENCRCDVACKDRGDCCWDFEDTCVESTRIWMCNKFRCGETRLEASLCSCSDDCLQRKDCCADYKSVCQGETSWLEENCDTAQQSQCPEGFDLPPVILFSMDGFRAEYLYTWDTLMPNINKLKTCGIHSKYMRAMYPTKTFPNHYTIVTGLYPESHGIIDNNMYDVNLNKNFSLSSKEQNNPAWWHGQPMWLTAMYQGLKAATYFWPGSEVAINGSFPSIYMPYNGSVPFEERISTLLKWLDLPKAERPRFYTMYFEEPDSSGHAGGPVSARVIKALQVVDHAFGMLMEGLKQRNLHNCVNIILLADHGMDQTYCNKMEYMTDYFPRINFFYMYEGPAPRIRAHNIPHDFFSFNSEEIVRNLSCRKPDQHFKPYLTPDLPKRLHYAKNVRIDKVHLFVDQQWLAVRSKSNTNCGGGNHGYNNEFRSMEAIFLAHGPSFKEKTEVEPFENIEVYNLMCDLLRIQPAPNNGTHGSLNHLLKVPFYEPSHAEEVSKFSVCGFANPLPTESLDCFCPHLQNSTQLEQVNQMLNLTQEEITATVKVNLPFGRPRVLQKNVDHCLLYHREYVSGFGKAMRMPMWSSYTVPQLPAIEHQIANMML

SEQ ID NO: 7518 - protein, 826 aa, Homo sapiens
MVAPVLETSHVFCCPNRVRGVLNWSSGPRGLLAFGTSCSVVLYDPLKRVVVTNLNGHTARVNCIQWICKQDGSPSTELVSGGSDNQVIHWEIEDNQLLKAVHLQGHEGPVYAVHAVYQRRTSDPALCTLIVSAAADSAVRLWSKKGPEVMCLQTLNFGNGFALALCLSFLPNTDVPILACGNDDCRIHIFAQQNDQFQKVLSLCGHEDWIRGVEWAAFGRDLFLASCSQDCLIRIWKLYIKSTSLETQDDDNIRLKENTFTIENESVKIAFAVTLETVLAGHENWVNAVHWQPVFYKDGVLQQPVRLLSASMDKTMILWAPDEESGVWLEQVRVGEVGGNTLGFYDCQFNEDGSMIIAHAFHGALHLWKQNTVNPREWTPEIVISGHFDGVQDLVWDPEGEFIITVGTDQTTRLFAPWKRKDQSQVTWHEIARPQIHGYDLKCLAMINRFQFVSGADEKVLRVFSAPRNFVENFCAITGQSLNHVLCNQDSDLPEGATVPALGLSNKAVFQGDIASQPSDEEELLTSTGFEYQQVAFQPSILTEPPTEDHLLQNTLWPEVQKLYGHGYEIFCVTCNSSKTLLASACKAAKKEHAAIILWNTTSWKQVQNLVFHSLTVTQMAFSPNEKFLLAVSRDRTWSLWKKQDTISPEFEPVFSLFAFTNKITSVHSRIIWSCDWSPDSKYFFTGSRDKKVVVWGECDSTDDCIEHNIGPCSSVLDVGGAVTAVSVCPVLHPSQRYVVAVGLECGKICLYTWKKTDQVPEINDWTHCVETSQSQSHTLAIRKLCWKNCSGKTEQKEAEGAEWLHFASCGEDHTVKIHRVNKCAL

SEQ ID NO: 7519 - protein, 2171 aa, Homo sapiens
MDEEEDGAGAEESGQPRSFMRLNDLSGAGGRPGPGSAEKDPGSADSEAEGLPYPALAPVVFFYLSQDSRPRSWCLRTVCNPWFERISMLVILLNCVTLGMFRPCEDIACDSQRCRILQAFDDFIFAFFAVEMVVKMVALGIFGKKCYLGDTWNRLDFFIVIAGMLEYSLDLQNVSFSAVRTVRVLRPLRAINRVPSMRILVTLLLDTLPMLGNVLLLCFFVFFIFGIVGVQLWAGLLRNRCFLPENFSLPLSVDLERYYQTENEDESPFICSQPRENGMRSCRSVPTLRGDGGGGPPCGLDYEAYNSSSNTTCVNWNQYYTNCSAGEHNPFKGAINFDNIGYAWIAIFQVITLEGWVDIMYFVMDAHSFYNFIYFILLIIVGSFFMINLCLVVIATQFSETKQRESQLMREQRVRFLSNASTLASFSEPGSCYEELLKYLVYILRKAARRLAQVSRAAGVRVGLLSSPAPLGGQETQPSSSCSRSHRRLSVHHLVHHHHHHHHHYHLGNGTLRAPRASPEIQDRDANGSRRLMLPPPSTPALSGAPPGGAESVHSFYHADCHLEPVRCQAPPPRSPSEASGRTVGSGKVYPTVHTSPPPETLKEKALVEVAASSGPPTLTSLNIPPGPYSSMHKLLETQSTGACQSSCKISSPCLKADSGACGPDSCPYCARAGAGEVELADREMPDSDSEAVYEFTQDAQHSDLRDPHSRRQRSLGPDAEPSSVLAFWRLICDTFRKIVDSKYFGRGIMIAILVNTLSMGIEYHEQPEELTNALEISNIVFTSLFALEMLLKLLVYGPFGYIKNPYNIFDGVIVVISVWEIVGQQGGGLSVLRTFRLMRVLKLVRFLPALQRQLVVLMKTMDNVATFCMLLMLFIFIFSILGMHLFGCKFASERDGDTLPDRKNFDSLLWAIVTVFQILTQEDWNKVLYNGMASTSSWAALYFIALMTFGNYVLFNLLVAILVEGFQAEGDANKSESEPDFFSPSLDGDGDRKKCLALVSLGEHPELRKSLLPPLIIHTAATPMSLPKSTSTGLGEALGPASRRTSSSGSAEPGAAHEMKSPPSARSSPHSPWSAASSWTSRRSSRNSLGRAPSLKRRSPSGERRSLLSGEGQESQDEEESSEEERASPAGSDHRHRGSLEREAKSSFDLPDTLQVPGLHRTASGRGSASEHQDCNGKSASGRLARALRPDDPPLDGDDADDEGNLSKGERVRAWIRARLPACCLERDSWSAYIFPPQSRFRLLCHRIITHKMFDHVVLVIIFLNCITIAMERPKIDPHSAERIFLTLSNYIFTAVFLAEMTVKVVALGWCFGEQAYLRSSWNVLDGLLVLISVIDILVSMVSDSGTKILGMLRVLRLLRTLRPLRVISRAQGLKLVVETLMSSLKPIGNIVVICCAFFIIFGILGVQLFKGKFFVCQGEDTRNITNKSDCAEASYRWVRHKYNFDNLGQALMSLFVLASKDGWVDIMYDGLDAVGVDQQPIMNHNPWMLLYFISFLLIVAFFVLNMFVGVVVENFHKCRQHQEEEEARRREEKRLRRLEKKRRSKEKQMAEAQCKPYYSDYSRFRLLVHHLCTSHYLDLFITGVIGLNVVTMAMEHYQQPQILDEALKICNYIFTVIFVLESVFKLVAFGFRRFFQDRWNQLDLAIVLLSIMGITLEEIEVNASLPINPTIIRIMRVLRIARVLKLLKMAVGMRALLDTVMQALPQVGNLGLLFMLLFFIFAALGVELFGDLECDETHPCEGLGRHATFRNFGMAFLTLFRVSTGDNWNGIMKDTLRDCDQESTCYNTVISPIYFVSFVLTAQFVLVNVVIAVLMKHLEESNKEAKEEAELEAELELEMKTLSPQPHSPLGSPFLWPGVEGPDSPDSPKPGALHPAAHARSASHFSLEHPTMQPHPTELPGPDLLTVRKSGVSRTHSLPNDSYMCRHGSTAEGPLGHRGWGLPKAQSGSVLSVHSQPADTSYILQLPKDAPHLLQPHSAPTWGTIPKLPPPGRSPLAQRPLRRQAAIRTDSLDVQGLGSREDLLAEEEPPSPRDLKKCYSVEAQSCQRRPTSWLDEQRRHSIAVSCLDSGSQPHLGTDPSNLGGQPLGGPGSRPKKKLSPPSITIDPPESQGPRTPPSPGICLRRRAPSSDSKDPLASGPPDSMAASPSPKKDVLSLSGLSSDPADLDP

SEQ ID NO: 7520 - protein, 1729 aa, Homo sapiens
MKVSTLRESSAMASPLPREMEEELVPTGSEPGDTRAKPPVKPKPRALPAKPALPAKPSLLVPVGPRPPRGPLAELPSARKMNMLAGPQPYGGSKRPLPFAPRPAVEASTGGEATQETGKEEAGKEEPPPLTPPARCAAPGGVRKAPAPFRPASERFAATTVEEILAKMEQPRKEVLASPDRLWGSRLTFNHDGSSRYGPRTYGTTTAPRDEDGSTLFRGWSQEGPVKSPAECREEHSKTPEERSLPSDLAFNGDLAKAASSELPADISKPWIPSSPAPSSENGGPASPGLPAEASGSGPGSPHLHPPDKSSPCHSQLLEAQTPEASQASPCPAVTPSAPSAALPDEGSRHTPSPGLPAEGAPEAPRPSSPPPEVLEPHSLDQPPATSPRPLIEVGELLDLTRTFPSGGEEEAKGDAHLRPTSLVQRRFSEGVLQSPSQDQEKLGGSLAALPQGQGSQLALDRPFGAESNWSLSQSFEWTFPTRPSGLGVWRLDSPPPSPITEASEAAEAAEAGNLAVSSREEGVSQQGQGAGSAPSGSGSSWVQGDDPSMSLTQKGDGESQPQFPAVPLEPLPTTEGTPGLPLQQAEERYESQEPLAGQESPLPLATREAALPILEPVLGQEQPAAPDQPCVLFADAPEPGQALPVEEEAVTLARAETTQARTEAQDLCRASPEPPGPESSSRWLDDLLASPPPSGGGARRGAGAELKDTQSPSTCSEGLLGWSQKDLQSEFGITGDPQPSSFSPSSWCQGASQDYGLGGASPRGDPGLGERDWTSKYGQGAGEGSTREWASRCGIGQEEMEASSSQDQSKVSAPGVLTAQDRVVGKPAQLGTQRSQEADVQDWEFRKRDSQGTYSSRDAELQDQEFGKRDSLGTYSSRDVSLGDWEFGKRDSLGAYASQDANEQGQDLGKRDHHGRYSSQDADEQDWEFQKRDVSLGTYGSRAAEPQEQEFGKSAWIRDYSSGGSSRTLDAQDRSFGTRPLSSGFSPEEAQQQDEEFEKKIPSVEDSLGEGSRDAGRPGERGSGGLFSPSTAHVPDGALGQRDQSSWQNSDASQEVGGHQERQQAGAQGPGSADLEDGEMGKRGWVGEFSLSVGPQREAAFSPGQQDWSRDFCIEASERSYQFGIIGNDRVSGAGFSPSSKMEGGHFVPPGKTTAGSVDWTDQLGLRNLEVSSCVGSGGSSEARESAVGQMGWSGGLSLRDMNLTGCLESGGSEEPGGIGVGEKDWTSDVNVKSKDLAEVGEGGGHSQARESGVGQTDWSGVEAGEFLKSRERGVGQADWTPDLGLRNMAPGAVCSPGESKELGVGQMDWGNNLGLRDLEVTCDPDSGGSQGLRGCGVGQMDWTQDLAPQNVELFGAPSEAREHGVGGVSQCPEPGLRHNGSLSPGLEARDPLEARELGVGETSGPETQGEDYSSSSLEPHPADPGMETGEALSFGASPGRCPARPPPSGSQGLLEEMLAASSSKAVARRESAASGLGGLLEEEGAGAGAAQEEVLEPGRDSPPSWRPQPDGEASQTEDVDGTWGSSAARWSDQGPAQTSRRPSQGPPARSPSQDFSFIEDTEILDSAMYRSRANLGRKRGHRAPVIRPGGTLGLSEAADSDAHLFQDSTEPRASRVPSSDEEVVEEPQSRRTRMSLGTKGLKVNLFPGLSPSALKAKLRPRNRSAEEGELAESKSSQKESAVQRSKSCKVPGLGKPLTLPPKPEKSSGSEGSSPNWLQALKLKKKKV

SEQ ID NO: 7521 - protein, 2839 aa, Homo sapiens
MAAHRPVEWVQAVVSRFDEQLPIKTGQQNTHTKVSTEHNKECLINISKYKFSLVISGLTTILKNVNNMRIFGEAAEKNLYLSQLIILDTLEKCLAGQPKDTMRLDETMLVKQLLPEICHFLHTCREGNQHAAELRNSASGVLFSLSCNNFNAVFSRISTRLQELTVCSEDNVDVHDIELLQYINVDCAKLKRLLKETAFKFKALKKVAQLAVINSLEKAFWNWVENYPDEFTKLYQIPQTDMAECAEKLFDLVDGFAESTKRKAAVWPLQIILLILCPEIIQDISKDVVDENNMNKKLFLDSLRKALAGHGGSRQLTESAAIACVKLCKASTYINWEDNSVIFLLVQSMVVDLKNLLFNPSKPFSRGSQPADVDLMIDCLVSCFRISPHNNQHFKICLAQNSPSTFHYVLVNSLHRIITNSALDWWPKIDAVYCHSVELRNMFGETLHKAVQGCGAHPAIRMAPSLTFKEKVTSLKFKEKPTDLETRSYKYLLLSMVKLIHADPKLLLCNPRKQGPETQGSTAELITGLVQLVPQSHMPEIAQEAMEALLVLHQLDSIDLWNPDAPVETFWEISSQMLFYICKKLTSHQMLSSTEILKWLREILICRNKFLLKNKQADRSSCHFLLFYGVGCDIPSSGNTSQMSMDHEELLRTPGASLRKGKGNSSMDSAAGCSGTPPICRQAQTKLEVALYMFLWNPDTEAVLVAMSCFRHLCEEADIRCGVDEVSVHNLLPNYNTFMEFASVSNMMSTGRAALQKRVMALLRRIEHPTAGNTEAWEDTHAKWEQATKLILNYPKAKMEDGQAAESLHKTIVKRRMSHVSGGGSIDLSDTDSLQEWINMTGFLCALGGVCLQQRSNSGLATYSPPMGPVSERKGSMISVMSSEGNADTPVSKFMDRLLSLMVCNHEKVGLQIRTNVKDLVGLELSPALYPMLFNKLKNTISKFFDSQGQVLLTDTNTQFVEQTIAIMKNLLDNHTEGSSEHLGQASIETMMLNLVRYVRVLGNMVHAIQIKTKLCQLVEVMMARRDDLSFCQEMKFRNKMVEYLTDWVMGTSNQAADDDVKCLTRDLDQASMEAVVSLLAGLPLQPEEGDGVELMEAKSQLFLKYFTLFMNLLNDCSEVEDESAQTGGRKRGMSRRLASLRHCTVLAMSNLLNANVDSGLMHSIGLGYHKDLQTRATFMEVLTKILQQGTEFDTLAETVLADRFERLVELVTMMGDQGELPIAMALANVVPCSQWDELARVLVTLFDSRHLLYQLLWNMFSKEVELADSMQTLFRGNSLASKIMTFCFKVYGATYLQKLLDPLLRIVITSSDWQHVSFEVDPTRLEPSESLEENQRNLLQMTEKFFHAIISSSSEFPPQLRSVCHCLYQATCHSLLNKATVKEKKENKKSVVSQRFPQNSIGAVGSAMFLRFINPAIVSPYEAGILDKKPPPRIERGLKLMSKILQSIANHVLFTKEEHMRPFNDFVKSNFDAARRFFLDIASDCPTSDAVNHSLSFISDGNVLALHRLLWNNQEKIGQYLSSNRDHKAVGRRPFDKMATLLAYLGPPEHKPVADTHWSSLNLTSSKFEEFMTRHQVHEKEEFKALKTLSIFYQAGTSKAGNPIFYYVARRFKTGQINGDLLIYHVLLTLKPYYAKPYEIVVDLTHTGPSNRFKTDFLSKWFVVFPGFAYDNVSAVYIYNCNSWVREYTKYHERLLTGLKGSKRLVFIDCPGKLAEHIEHEQQKLPAATLALEEDLKVFHNALKLAHKDTKVSIKVGSTAVQVTSAERTKVLGQSVFLNDIYYASEIEEICLVDENQFTLTIANQGTPLTFMHQECEAIVQSIIHIRTRWELSQPDSIPQHTKIRPKDVPGTLLNIALLNLGSSDPSLRSAAYNLLCALTCTFNLKIEGQLLETSGLCIPANNTLFIVSISKTLAANEPHLTLEFLEECISGFSKSSIELKHLCLEYMTPWLSNLVRFCKHNDDAKRQRVTAILDKLITMTINEKQMYPSIQAKIWGSLGQITDLLDVVLDSFIKTSATGGLGSIKAEVMADTAVALASGNVKLVSSKVIGRMCKIIDKTCLSPTPTLEQHLMWDDIAILARYMLMLSFNNSLDVAAHLPYLFHVVTFLVATGPLSLRASTHGLVINIIHSLCTCSQLHFSEETKQVLRLSLTEFSLPKFYLLFGISKVKSAAVIAFRSSYRDRSFSPGSYERETFALTSLETVTEALLEIMEACMRDIPTCKWLDQWTELAQRFAFQYNPSLQPRALVVFGCISKRVSHGQIKQIIRILSKALESCLKGPDTYNSQVLIEATVIALTKLQPLLNKDSPLHKALFWVAVAVLQLDEVNLYSAGTALLEQNLHTLDSLRIFNDKSPEEVFMAIRNPLEWHCKQMDHFVGLNFNSNFNFALVGHLLKGYRHPSPAIVARTVRILHTLLTLVNKHRNCDKFEVNTQSVAYLAALLTVSEEVRSRCSLKHRKSLLLTDISMENVPMDTYPIHHGDPSYRTLKETQPWSSPKGSEGYLAATYPTVGQTSPRARKSMSLDMGQPSQANTKKLLGTRKSFDHLISDTKAPKRQEMESGITTPPKMRRVAETDYEMETQRISSSQQHPHLRKVSVSESNVLLDEEVLTDPKIQALLLTVLATLVKYTTDEFDQRILYEYLAEASVVFPKVFPVVHNLLDSKINTLLSLCQDPNLLNPIHGIVQSVVYHEESPPQYQTSYLQSFGFNGLWRFAGPFSKQTQIPDYAELIVKFLDALIDTYLPGIDEETSEESLLTPTSPYPPALQSQLSITANLNLSNSMTSLATSQHSPGIDKENVELSPTTGHCNSGRTRHGSASQVQKQRSAGSFKRNSIKKIV

SEQ ID NO: 7522 - protein, 366 aa, Homo sapiens
MLPRLLLLICAPLCEPAELFLIASPSHPTEGSPVTLTCKMPFLQSSDAQFQFCFFRDTRALGPGWSSSPKLQIAAMWKEDTGSYWCEAQTMASKVLRSRRSQINVHRVPVADVSLETQPPGGQVMEGDRLVLICSVAMGTGDITFLWYKGAVGLNLQSKTQRSLTAEYEIPSVRESDAEQYYCVAENGYGPSPSGLVSITVRIPVSRPILMLRAPRAQAAVEDVLELHCEALRGSPPILYWFYHEDITLGSRSAPSGGGASFNLSLTEEHSGNYSCEANNGLGAQRSEAVTLNFTGRRSARDPLRSLPSPLPQEFTYLNSPTPGQLQPIYENEPREQSVAVHGRQQHSSEQKAQKPWGHIWRTRFP

SEQ ID NO: 7523 - protein, 383 aa, Homo sapiens
MNAGPSWNKVQHSKNSSGKRQSKSQVPHASSQPRSSLTAVTQPTEEKLKESISPEARRKRNPLGSRCQGASGNKLFLDFQSMKIIKENADEDSASDLSDSERIPIPPSPLTPPDLNLRAEEIDPVYFDLHPGQGHTKPEYYYPNFLPSPFSSWDLRDMALLLNAENKTEAVPRVGGLLGKYIDRLIQLEWLQVQTVQCEKAKGGKARPPTAPGTSGALKSPGRSKLIASALSKPLPHQEGASKSGPSRKKAFHHEEIHPSHYAFETSPRPIDVLGGTRFCSQRQTLEMRTEEKKKKSSKSTKLQRWDLSGSGSSSKVETSGHIRVPKQAAVILDSADSCKASKTQAHAHPRKKGKAESCGHATVSSEKKLKTNGVKQNTYKLK

SEQ ID NO: 7524 - protein, 542 aa, Homo sapiens
MDDPRYGMCPLKGASGCPGAERSLLVQSYFEKGPLTFRDVAIEFSLEEWQCLDSAQQGLYRKVMLENYRNLVFLAGIALTKPDLITCLEQGKEPWNIKRHEMVAKPPVICSHFPQDLWAEQDIKDSFQEAILKKYGKYGHDNLQLQKGCKSVDECKVHKEHDNKLNQCLITTQSNIFQCDPSAKVFHTFSNSNRHKIRHTRKKPFKCKKCEKSFCMLLHLTQHKRFHITENSYQCKDCGKAFNWFSTLTTHRRIHTGEKPYKCEECGKAFNRSSHLTTHKIIHTGEKPYRCEECGKAFNRSSHLTTHKRIHTGVKPYKCTECGKAFNRSSHLTTHRIIHTGEKPYKCEECGKAFNQSSTLTTHKITHAGEKPYKCEECGKAFYRFSYLTKHKTSHTGEKFYKCEECGKGFNWSSALTKHKRIHTGEKPYKCEECGKAFNESSNLTTHKMIHTGEKPYKCDECGKAFNRSSQLTAHKMIHTGEKPYKCEECGKAFNRSSTLTKHKITHTGEKSYKWEECGKDFNQSLSLIKQNNSYWRETLQM

SEQ ID NO: 7525 - protein, 482 aa, Homo sapiens
MDSFGQPRPEDNQSVVRRMQKKYWKTKQVFIKATGKKEDEHLVASDAELDAKLEVFHSVQETCTELLKIIEKYQLRLNVISEEENELGLFLKFQAERDATQAGKMMDATGKALCSSAKQRLALCTPLSRLKQEVATFSQRAVSDTLMTINRMEQARTEYRGALLWMKDVSQELDPDTLKQMEKFRKVQMQVRNSKASFDKLKMDVCQKVDLLGASRCNMLSHSLTTYQRTLLGFWKKTARMMSQIHEACIGFHPYDFVALKQLQDTPSKISEDNKDEQIGGFLTEQLNKLVLSDEEASFESEQANKDHNEKHSQMREFGAPQFSNSENVAKDLPVDSLEGEDFEKEFSFLNNLLSSGSSSTSEFTQECQTAFGSPSASLTSQEPSMGSEPLAHSSRFLPSQLFDLGFHVAGAFNNWVSQEESELCLSHTDNQPVPSQSPKKLTRSPNNGNQDMSAWFNLFADLDPLSNPDAIGHSDDELLNA

SEQ ID NO: 7526 - protein, 591 aa, Homo sapiens
MFGKRKKRVEISAPSNFEHRVHTGFDQHEQKFTGLPRQWQSLIEESARRPKPLVDPACITSIQPGAPKTIVRGSKGAKDGALTLLLDEFENMSVTRSNSLRRDSPPPPARARQENGMPEEPATTARGGPGKAGSRGRFAGHSEAGGGSGDRRRAGPEKRPKSSREGSGGPQESSRDKRPLSGPDVGTPQPAGLASGAKLAAGRPFNTYPRADTDHPSRGAQGEPHDVAPNGPSAGGLAIPQSSSSSSRPPTRARGAPSPGVLGPHASEPQLAPPACTPAAPAVPGPPGPRSPQREPQRVSHEQFRAALQLVVDPGDPRSYLDNFIKIGEGSTGIVCIATVRSSGKLVAVKKMDLRKQQRRELLFNEVVIMRDYQHENVVEMYNSYLVGDELWVVMEFLEGGALTDIVTHTRMNEEQIAAVCLAVLQALSVLHAQGVIHRDIKSDSILLTHDGRVKLSDFGFCAQVSKEVPRRKSLVGTPYWMAPELISRLPYGPEVDIWSLGIMVIEMVDGEPPYFNEPPLKAMKMIRDNLPPRLKNLHKVSPSLKGFLDRLLVRDPAQRATAAELLKHPFLAKAGPPASIVPLMRQNRTR

SEQ ID NO: 7527 - protein, 502 aa, Homo sapiens
MAAPCEGQAFAVGVEKNWGAVVRSPEGTPQKIRQLIDEGIAPEEGGVDAKDTSATSQSVNGSPQAEQPSLESTSKEAFFSRVETFSSLKWAGKPFELSPLVCAKYGWVTVECDMLKCSSCQAFLCASLQPAFDFDRYKQRCAELKKALCTAHEKFCFWPDSPSPDRFGMLPLDEPAILVSEFLDRFQSLCHLDLQLPSLRPEDLKTMCLTEDKISLLLHLLEDELDHRTDERKTTIKLGSDIQVHVTACILSVCGWACSSSLESMQLSLITCSQCMRKVGLWGFQQIESSMTDLDASFGLTSSPIPGLEGRPERLPLVPESPRRMMTRSQDATFSPGSEQAEKSPGPIVSRTRSWDSSSPVDRPEPEAASPTTRTRPVTRSMGTGDTPGLEVPSSPLRKAKRARLCSSSSSDTSSRSFFDPTSQHRDWCPWVNITLGKESRENGGTEPDASAPAEPGWKAVLTILLAHKQSSQPAETDSMSLSEKSRKVFRIFRQWESLCSC

SEQ ID NO: 7528 - protein, 446 aa, Homo sapiens
MAITVSLVNNKRKIVVLAQPTTVKRKRITPYKSIMTDLYYLSQTDGAGDWREKEAKDLTELVQRRITYLQNPKDCSKAKKLVCNINKGCGYGCQLHHVVYCFMIAYGTQRTLILESQNWRYATGGWETVFRPVSETCTDRSGISTGHWSGEVKDKNVQVVELPIVDSLHPRPPYLPLAVPEDLADRLVRVHGDPAVWWVSQFVKYLIRPQPWLEKEIEEATKKLGFKHPVIGVHVRRTDKVGTEAAFHPIEEYMVHVEEHFQLLARRMQVDKKRVYLATDDPSLLKEAKTKYPNYEFISDNSISWSAGLHNRYTENSLRGVILDIHFLSQADFLVCTFSSQVCRVAYEIMQTLHPDASANFHSLDDIYYFGGQNAHNQIAIYAHQPRTADEIPMEPGDIIGVAGNHWDGYSKGVNRKLGRTGLYPSYKVREKIETVKYPTYPEAEK

SEQ ID NO: 7529 - protein, 465 aa, Homo sapiens
MATEAQSEGEVPARESGRSDAICSFVICNDSSLRGQPIIFNPDFFVEKLRHEKPEIFTELVVSNITRLIDLPGTELAQLMGEVDLKLPGGAGPASGFFRSLMSLKRKEKGVIFGSPLTEEGIAQIYQLIEYLHKNLRVEGLFRVPGNSVRQQILRDALNNGTDIDLESGEFHSNDVATLLKMFLGELPEPLLTHKHFNAHLKIADLMQFDDKGNKTNIPDKDRQIEALQLLFLILPPPNRNLLKLLLDLLYQTAKKQDKNKMSAYNLALMFAPHVLWPKNAPAYIRECARLHYLGSRTQASKDDLDLIASCHTKSFQLAKSQKRNRVDSCPHQEETQHHTEEALRELFQHVHDMPESAKKKQLIRQFNKQSLTQTPGREPSTSQVQKRARSRSFSGLIKRKVLGNQMMSEKKKKNPTPESVAIGELKGTSKENRNLLFSGSPAVTMTPTRLKWSEGKKEGKKGFL

SEQ ID NO: 7530 - protein, 387 aa, Homo sapiens
MREPLEAFKLADLDFRKSSLASGWRMASGAFTMDQFPESVTENFEYDDLAEACYIGDIVVFGTVFLSIFYSVIFAIGLVGNLLVVFALTNSKKPKSVTDIYLLNLALSDLLFVATLPFWTHYLINEKGLHNAMCKFTTAFFFIGFFGSIFFITVISIDRYLAIVLAANSMNNRTVQHGVTISLGVWAAAILVAAPQFMFTKQKENECLGDYPEVLQEIWPVLRNVETNFLGFLLPLLIMSYCYFRIIQTLFSCKNHKKAKAIKLILLVVIVFFLFWTPYNVMIFLETLKLYDFFPSCDMRKDLRLALSVTETVAFSHCCLNPLIYAFAGEKFRRYLYHLYGKCLAVLCGRSVHVDFSSSESQRSRHGSVLSSNFTYHTSDGDALLLL

SEQ ID NO: 7531 - protein, 822 aa, Homo sapiens
MKPALLPWALLLLATALGPGPGPTADAQESCSMRCGALDGPCSCHPTCSGLGTCCLDFRDFCLEILPYSGSMMGGKDFVVRHFKMSSPTDASVICRFKDSIQTLGHVDSSGQVHCVSPLLYESGRIPFTVSLDNGHSFPRAGTWLAVHPNKVSMMEKSELVNETRWQYYGTANTSGNLSLTWHVKSLPTQTITIELWGYEETGMPYSQEWTAKWSYLYPLATHIPNSGSFTFTPKPAPPSYQRWRVGALRIIDSKNYAGQKDVQALWTNDHALAWHLSDDFREDPVAWARTQCQAWEELEDQLPNFLEELPDCPCTLTQARADSGRFFTDYGCDMEQGSVCTYHPGAVHCVRSVQASLRYGSGQQCCYTADGTQLLTADSSGGSTPDRGHDWGAPPFRTPPRVPSMSHWLYDVLSFYYCCLWAPDCPRYMQRRPSNDCRNYRPPRLASAFGDPHFVTFDGTNFTFNGRGEYVLLEAALTDLRVQARAQPGTMSNGTETRGTGLTAVAVQEGNSDVVEVRLANRTGGLEVLLNQEVLSFTEQSWMDLKGMFLSVAAGDRVSIMLASGAGLEVSVQGPFLSVSVLLPEKFLTHTHGLLGTLNNDPTDDFTLHSGRVLPPGTSPQELFLFGANWTVHNASSLLTYDSWFLVHNFLYQPKHDPTFEPLFPSETTLNPSLAQEAAKLCGDDHFCNFDVAATGSLSTGTATRVAHQLHQRRMQSLQPVVSCGWLAPPPNGQKEGNRYLAGSTIYFHCDNGYSLAGAETSTCQADGTWSSPTPKCQPGRSYAVLLGIIFGGLAVVAAVALVYVLLRRRKGNTHVWGAQP

SEQ ID NO: 7532 - protein, 2048 aa, Homo sapiens
MLRVIVESASNIPKTKFGKPDPIVSVIFKDEKKKTKKVDNELNPVWNEILEFDLRGIPLDFSSSLGIIVKDFETIGQNKLIGTATVALKDLTGDQSRSLPYKLISLLNEKGQDTGATIDLVIGYDPPSAPHPNDLSGPSVPGMGGDGEEDEGDEDRLDNAVRGPGPKGPVGTVSEAQLARRLTKVKNSRRMLSNKPQDFQIRVRVIEGRQLSGNNIRPVVKVHVCGQTHRTRIKRGNNPFFDELFFYNVNMTPSELMDEIISIRVYNSHSLRADCLMGEFKIDVGFVYDEPGHAVMRKWLLLNDPEDTSSGSKGYMKVSMFVLGTGDEPPPERRDRDNDSDDVESNLLLPAGIALRWVTFLLKIYRAEDIPQMDDAFSQTVKEIFGGNADKKNLVDPFVEVSFAGKKVCTNIIEKNANPEWNQVVNLQIKFPSVCEKIKLTIYDWDRLTKNDVVGTTYLHLSKIAASGGEVEVNTGETEVGFVPTFGPCYLNLYGSPREYTGFPDPYDELNTGKGEGVAYRGRILVELATFLEKTPPDKKLEPISNDDLLVVEKYQRRRKYSLSAVFHSATMLQDVGEAIQFEVSIGNYGNKFDTTCKPLASTTQYSRAVFDGNYYYYLPWAHTKPVVTLTSYWEDISHRLDAVNTLLAMAERLQTNIEALKSGIQGKIPANQLAELWLKLIDEVIEDTRYTLPLTEGKANVTVLDTQIRKLRSRSLSQIHEAAVRMRSEATDVKSTLAEIEDWLDKLMQLTEEPQNSMPDIIIWMIRGEKRLAYARIPAHQVLYSTSGENASGKYCGKTQTIFLKYPQEKNNGPKVPVELRVNIWLGLSAVEKKFNSFAEGTFTVFAEMYENQALMFGKWGTSGLVGRHKFSDVTGKIKLKREFFLPPKGWEWEGEWIVDPERSLLTEADAGHTEFTDEVYQNESRYPGGDWKPAEDTYTDANGDKAASPSELTCPPGWEWEDDAWSYDINRAVDEKGWEYGITIPPDHKPKSWVAAEKMYHTHRRRRLVRKRKKDLTQTASSTARAMEELQDQEGWEYASLIGWKFHWKQRSSDTFRRRRWRRKMAPSETHGAAAIFKLEGALGADTTEDGDEKSLEKQKHSATTVFGANTPIVSCNFDRVYIYHLRCYVYQARNLLALDKDSFSDPYAHICFLHRSKTTEIIHSTLNPTWDQTIIFDEVEIYGEPQTVLQNPPKVIMELFDNDQVGKDEFLGRSIFSPVVKLNSEMDITPKLLWHPVMNGDKACGDVLVTAELILRGKDGSNLPILPPQRAPNLYMVPQGIRPVVQLTAIEILAWGLRNMKNFQMASITSPSLVVECGGERVESVVIKNLKKTPNFPSSVLFMKVFLPKEELYMPPLVIKVIDHRQFGRKPVVGQCTIERLDRFRCDPYAGKEDIVPQLKASLLSAPPCRDIVIEMEDTKPLLASKLTEKEEEIVDWWSKFYASSGEHEKCGQYIQKGYSKLKIYNCELENVAEFEGLTDFSDTFKLYRGKSDENEDPSVVGEFKGSFRIYPLPDDPSVPAPPRQFRELPDSVPQECTVRIYIVRGLELQPQDNNGLCDPYIKITLGKKVIEDRDHYIPNTLNPVFGRMYELSCYLPQEKDLKISVYDYDTFTRDEKVGETIIDLENRFLSRFGSHCGIPEEYCVSGVNTWRDQLRPTQLLQNVARFKGFPQPILSEDGSRIRYGGRDYSLDEFEANKILHQHLGAPEERLALHILRTQGLVPEHVETRTLHSTFQPNISQGKLQMWVDVFPKSLGPPGPPFNITPRKAKKYYLRVIIWNTKDVILDEKSITGEEMSDIYVKGWIPGNEENKQKTDVHYRSLDGEGNFNWRFVFPFDYLPAEQLCIVAKKEHFWSIDQTEFRIPPRLIIQIWDNDKFSLDDYLGFLELDLRHTIIPAKSPEKCRLDMIPDLKAMNPLKAKTASLFEQKSMKGWWPCYAEKDGARVMAGKVEMTLEILNEKEADERPAGKGRDEPNMNPKLDLPNRPETSFLWFTNPCKTMKFIVWRRFKWVIIGLLFLLILLLFVAVLLYSLPNYLSMKIVKPNV

SEQ ID NO: 7533 - protein, 383 aa, Homo sapiens
MDRTCEERPAEDGSDEEDPDSMEAPTRIRDTPEDIVLEAPASGLAFHPARDLLAAGDVDGDVFVFSYSCQEGETKELWSSGHHLKACRAVAFSEDGQKLITVSKDKAIHVLDVEQGQLERRVSKAHGAPINSLLLVDENVLATGDDTGGICLWDQRKEGPLMDMRQHEEYIADMALDPAKKLLLTASGDGCLGIFNIKRRRFELLSEPQSGDLTSVTLMKWGKKVACGSSEGTIYLFNWNGFGATSDRFALRAESIDCMVPVTESLLCTGSTDGVIRAVNILPNRVVGSVGQHTGEPVEELALSHCGRFLASSGHDQRLKFWDMAQLRAVVVDDYRRRKKKGGPLRALSSKTWSTDDFFAGLREEGEDSMAQEEKEETGDDSD

SEQ ID NO: 7534 - protein, 2251 aa, Homo sapiens
MARFGEAVVARPGSGDGDSDQSRNRQGTPVPASGQAAAYKQTKAQRARTMALYNPIPVRQNCFTVNRSLFIFGEDNIVRKYAKKLIDWPPFEYMILATIIANCIVLALEQHLPEDDKTPMSRRLEKTEPYFIGIFCFEAGIKIVALGFIFHKGSYLRNGWNVMDFIVVLSGILATAGTHFNTHVDLRTLRAVRVLRPLKLVSGIPSLQIVLKSIMKAMVPLLQIGLLLFFAILMFAIIGLEFYSGKLHRACFMNNSGILEGFDPPHPCGVQGCPAGYECKDWIGPNDGITQFDNILFAVLTVFQCITMEGWTTVLYNTNDALGATWNWLYFIPLIIIGSFFVLNLVLGVLSGEFAKERERVENRRAFMKLRRQQQIERELNGYRAWIDKAEEVMLAEENKNAGTSALEVLRRATIKRSRTEAMTRDSSDEHCVDISSVGTPLARASIKSAKVDGVSYFRHKERLLRISIRHMVKSQVFYWIVLSLVALNTACVAIVHHNQPQWLTHLLYYAEFLFLGLFLLEMSLKMYGMGPRLYFHSSFNCFDFGVTVGSIFEVVWAIFRPGTSFGISVLRALRLLRIFKITKYWASLRNLVVSLMSSMKSIISLLFLLFLFIVVFALLGMQLFGGRFNFNDGTPSANFDTFPAAIMTVFQILTGEDWNEVMYNGIRSQGGVSSGMWSAIYFIVLTLFGNYTLLNVFLAIAVDNLANAQELTKDEQEEEEAFNQKHALQKAKEVSPMSAPNMPSIERERRRRHHMSVWEQRTSQLRKHMQMSSQEALNREEAPTMNPLNPLNPLSSLNPLNAHPSLYRRPRAIEGLALGLALEKFEEERISRGGSLKGDGGDRSSALDNQRTPLSLGQREPPWLARPCHGNCDPTQQEAGGGEAVVTFEDRARHRQSQRRSRHRRVRTEGKESSSASRSRSASQERSLDEAMPTEGEKDHELRGNHGAKEPTIQEERAQDLRRTNSLMVSRGSGLAGGLDEADTPLVLPHPELEVGKHVVLTEQEPEGSSEQALLGNVQLDMGRVISQSEPDLSCITANTDKATTESTSVTVAIPDVDPLVDSTVVHISNKTDGEASPLKEAEIREDEEEVEKKKQKKEKRETGKAMVPHSSMFIFSTTNPIRRACHYIVNLRYFEMCILLVIAASSIALAAEDPVLTNSERNKVLRYFDYVFTGVFTFEMVIKMIDQGLILQDGSYFRDLWNILDFVVVVGALVAFALANALGTNKGRDIKTIKSLRVLRVLRPLKTIKRLPKLKAVFDCVVTSLKNVFNILIVYKLFMFIFAVIAVQLFKGKFFYCTDSSKDTEKECIGNYVDHEKNKMEVKGREWKRHEFHYDNIIWALLTLFTVSTGEGWPQVLQHSVDVTEEDRGPSRSNRMEMSIFYVVYFVVFPFFFVNIFVALIIITFQEQGDKMMEECSLEKNERACIDFAISAKPLTRYMPQNRHTFQYRVWHFVVSPSFEYTIMAMIALNTVVLMMKYYSAPCTYELALKYLNIAFTMVFSLECVLKVIAFGFLNYFRDTWNIFDFITVIGSITEIILTDSKLVNTSGFNMSFLKLFRAARLIKLLRQGYTIRILLWTFVQSFKALPYVCLLIAMLFFIYAIIGMQVFGNIKLDEESHINRHNNFRSFFGSLMLLFRSATGEAWQEIMLSCLGEKGCEPDTTAPSGQNENERCGTDLAYVYFVSFIFFCSFLMLNLFVAVIMDNFEYLTRDSSILGPHHLDEFVRVWAEYDRAACGRIHYTEMYEMLTLMSPPLGLGKRCPSKVAYKRLVLMNMPVAEDMTVHFTSTLMALIRTALDIKIAKGGADRQQLDSELQKETLAIWPHLSQKMLDLLVPMPKASDLTVGKIYAAMMIMDYYKQSKVKKQRQQLEEQKNAPMFQRMEPSSLPQEIIANAKALPYLQQDPVSGLSGRSGYPSMSPLSPQDIFQLACMDPADDGQFQERQSLVVTDPSSMRRSFSTIRDKRSNSSWLEEFSMERSSENTYKSRRRSYHSSLRLSAHRLNSDSGHKSDTHRSGGRERGRSKERKHLLSPDVSRCNSEERGTQADWESPERRQSRSPSEGRSQTPNRQGTGSLSESSIPSVSDTSTPRRSRRQLPPVPPKPRPLLSYSSLIRHAGSISPPADGSEEGSPLTSQALESNNACLTESSNSPHPQQSQHASPQRYISEPYLALHEDSHASDCGEEETLTFEAAVATSLGRSNTIGSAPPLRHSWQMPNGHYRRRRRGGPGPGMMCGAVNNLLSDTEEDDKC

SEQ ID NO: 7535 - protein, 332 aa, Homo sapiens
MSEAGEEQPMETTGATENGHEAVPEGESPAGAGTGAAAGAGGATAAPPSGNQNGAEGDQINASKNEEDAGKMFVGGLSWDTSKKDLKDYFTKFGEVVDCTIKMDPNTGRSRGFGFILFKDAASVEKVLDQKEHRLDGRVIDPKKAMAMKKDPVKKIFVGGLNPEATEEKIREYFGEFGEIEAIELPMDPKLNKRRGFVFITFKEEEPVKKVLEKKFHTVSGSKCEIKVAQPKEVYQQQQYGSGGRGNRNRGNRGSGGGGGGGGQSQSWNQGYGNYWNQGYGYQQGYGPGYGGYDYSPYGYYGYGPGYDYSQGSTNYGKSQRRGGHQNNYKPY

SEQ ID NO: 7536 - protein, 3013 aa, Homo sapiens
MSNITIDPDVKPGEYVIKSLFAEFAVQAEKKIEVVMAEPLEKLLSRSLQRGEDLQFDQLISSMSSVAEHCLPSLLRTLFDWYRRQNGTEDESYEYRPRSSTKSKGDEQQRERDYLLERRDLAVDFIFCLVLVEVLKQIPVHPVPDPLVHEVLNLAFKHFKHKEGYSGTNTGNVHIIADLYAEVIGVLAQSKFQAVRKKFVTELKELRQKEQSPHVVQSVISLIMGMKFFRVKMYPVEDFEASFQFMQECAQYFLEVKDKDIKHALAGLFVEILIPVAAAVKNEVNVPCLKNFVEMLYQTTFELSSRKKHSLALYPLITCLLCVSQKQFFLNNWHIFLQNCLSHLKNKDPKMSRVALESLYRLLWVYVIRIKCESNTVTQSRLMSIVSALFPKGSRSVVPRDTPLNIFVKIIQFIAQERLDFAMKEIIFDLLSVGKSTKTFTINPERMNIGLRVFLVIADSLQQKDGEPPMPTTGVILPSGNTLRVKKIFLNKTLTDEEAKVIGMSVYYPQVRKALDSILRHLDKEVGRPMCMTSVQMSNKEPEDMITGERKPKIDLFRTCIAAIPRLIPDGMSRTDLIELLARLTIHMDEELRALAFNTLQALMLDFPDWREDVLSGFVYFIVREVTDVHPTLLDNAVKMLVQLINQWKQAAQMHNKNQDTQHGVANGASHPPPLERSPYSNVFHVVEGFALVILCSSRPATRRLAVSVLREIRALFALLEIPKGDDELAIDVMDRLSPSILESFIHLTGADQTTLLYCPSSIDLQTLAEWNSSPISHQFDVISPSHIWIFAHVTQGQDPWIISLSSFLKQENLPKHCSTAVSYAWMFAYTRLQLLSPQVDINSPINAKKVNTTTSSDSYIGLWRNYLILCCSAATSSSSTSAGSVRCSPPETLASTPDSGYSIDSKIIGIPSPSSLFKHIVPMMRSESMEITESLVLGLGRTNPGAFRELIEELHPIIKEALERRPENMKRRRRRDILRVQLVRIFELLADAGVISHSASGGLDNETHFLNNTLLEYVDLTRQLLEAENEKDSDTLKDIRCHFSALVANIIQNVPVHQRRSIFPQQSLRHSLFMLFSHWAGPFSIMFTPLDRYSDRNMQINRHQYCALKAMSAVLCCGPVADNVGLSSDGYLYKWLDNILDSLDKKVHQLGCEAVTLLLELNPDQSNLMYWAVDRCYTGSGRVAAGCFKAIANVFQNRDYQCDTVMLLNLILFKAADSSRSIYEVAMQLLQILEPKMFRYAHKLEVQRTDGVLSQLSPLPHLYSVSYYQLSEELARAYPELTLAIFSEISQRIQTAHPAGRQVMLHYLLPWMNNIELVDLKPLPTARRHDEDEDDSLKDRELMVTSRRWLRGEGWGSPQATAMVLNNLMYMTAKYGDELAWSEVENVWTTLADGWPKNLKIILHFLISICGVNSEPSLLPYVKKVIVYLGRDKTMQLLEELVSELQLTDPVSSGVTHMDNPPYYRITSSYKIPSVTSGTTSSSNTMVAPTDGNPDNKPIKENIEESYVHLDIYSGLNSHLNRQHHRLESRYSSSSGGSYEEEKSDSMPLYSNWRLKVMEHNQGEPLPFPPAGGCWSPLVDYVPETSSPGLPLHRCNIAVILLTDLIIDHSVKVEWGSYLHLLLHAIFIGFDHCHPEVYEHCKRLLLHLLIVMGPNSNIRTVASVLLRNKEFNEPRVLTVKQVAHLDYNFTAGINDFIPDYQPSPMTDSGLSSSSTSSSISLGNNSAAISHLHTTILNEVDISVEQDGKVKTLMEFITSRKRGPLWNHEDVSAKNPSIKSAEQLTTFLKHVVSVFKQSSSEGIHLEHHLSEVALQTALSCSSRHYAGRSFQIFRALKQPLTATTLSDVLSRLVETVGDPGEDAQGFVIELLLTLESAIDTLAETMKHYDLLSALSQTSYHDPIMGNKYAANRKSTGQLNLSTSPINSSSYLGYNSNARSNSLRLSLIGDRRGDRRRSNTLDIMDGRINHSSSLARTRSLSSLREKGMYDVQSTTEPTNLMATIFWIAASLLESDYEYEYLLALRLLNKLLIHLPLDKSESREKIENVQSKLKWTNFPGLQQLFLKGFTSASTQEMTVHLLSKLISVSKHTLVDPSQLSGFPLNILCLLPHLIQHFDSPTQFCKETASRIAKVCAEEKCPTLVNLAHMMSLYSTHTYSRDCSNWINVVCRYLHDSFSDTTFNLVTYLAELLEKGLSSMQQSLLQIIYSLLSHIDLSAAPAKQFNLEIIKIIGKYVQSPYWKEALNILKLVVSRSASLVVPSDIPKTYGGDTGSPEISFTKIFNNVSKELPGKTLDFHFDISETPIIGNKYGDQHSAAGRNGKPKVIAVTRSTSSTSSGSNSNALVPVSWKRPQLSQRRTREKLMNVLSLCGPESGLPKNPSVVFSSNEDLEVGDQQTSLISTTEDINQEEEVAVEDNSSEQQFGVFKDFDFLDVELEDAEGESMDNFNWGVRRRSLDSIDKGDTPSLQEYQCSSSTPSLNLTNQEDTDESSEEEAALTASQILSRTQMLNSDSATDETIPDHPDLLLQSEDSTGSITTEEVLQIRDETPTLEASLDNANSRLPEDTTSVLKEEHVTTFEDEGSYIIQEQQESLVCQGILDLEETEMPEPLAPESYPESVCEEDVTLALKELDERCEEEEADFSGLSSQDEEEQDGFPEVQTSPLPSPFLSAIIAAFQPVAYDDEEEAWRCHVNQMLSDTDGSSAVFTFHVFSRLFQTIQRKFGEITNEAVSFLGDSLQRIGTKFKSSLEVMMLCSECPTVFVDAETLMSCGLLETLKFGVLELQEHLDTYNVKREAAEQWLDDCKRTFGAKEDMYRINTDAQQMEILAELELCRRLYKLHFQLLLLFQAYCKLINQVNTIKNEAEVINMSEELAQLESILKEAESASENEEIDISKAAQTTIETAIHSLIETLKNKEFISAVAQVKAFRSLWPSDIFGSCEDDPVQTLLHIYFHHQTLGQTGSFAVIGSNLDMSEANYKLMELNLEIRESLRMVQSYQLLAQAKPMGNMVSTGF

SEQ ID NO: 7537 - protein, 839 aa, Homo sapiens
MGSWALLWPPLLFTGLLVRPPGTMAQAQYCSVNKDIFEVEENTNVTEPLVDIHVPEGQEVTLGALSTPFAFRIQGNQLFLNVTPDYEEKSLLEAQLLCQSGGTLVTQLRVFVSVLDVNDNAPEFPFKTKEIRVEEDTKVNSTVIPETQLQAEDRDKDDILFYTLQEMTAGASDYFSLVSVNRPALRLDRPLDFYERPNMTFWLLVRDTPGENVEPSHTATATLVLNVVPADLRPPWFLPCTFSDGYVCIQAQYHGAVPTGHILPSPLVLRPGPIYAEDGDRGINQPIIYSIFRGNVNGTFIIHPDSGNLTVARSVPSPMTFLLLVKGQQADLARYSVTQVTVEAVAAAGSPPRFPQRLYRGTVARGAGAGVVVKDAAAPSQPLRIQAQDPEFSDLNSAITYRITNHSHFRMEGEVVLTTTTLAQAGAFYAEVEAHNTVTSGTATTVIEIQVSEQEPPSTEAGGTTGPWTSTTSEVPRPPEPSQGPSTTSSGGGTGPHPPSGTTLRPPTSSTPGGPPGAENSTSHQPATPGGDTAQTPKPGTSQPMPPGVGTSTSHQPATPSGGTAQTPEPGTSQPMPPSMGTSTSHQPATPGGGTAQTPEAGTSQPMPPGMGTSTSHQPTTPGGGTAQTPEPGTSQPMPLSKSTPSSGGGPSEDKRFSVVDMAALGGVLGALLLLALLGLAVLVHKHYGPRLKCCCGKAPEPQPQGFDNQAFLPDHKANWAPVPSPTHDPKPAEAPMPAEPAPPGPASPGGAPEPPAAARAGGSPTAVRSILTKERRPEGGYKAVWFGEDIGTEADVVVLNAPTLDVDGASDSGSGDEGEGAGRGGGPYDAPGGDDSYI

SEQ ID NO: 7538 - protein, 984 aa, Homo sapiens
MVCSPVTVRIAPPDRRFSRSAIPEQIISSTLSSPSSNAPDPCAKETVLSALKEKEKKRTVEEEDQIFLDGQENKRRRHDSSGSGHSAFEPLVANGVPASFVPKPGSLKRGLNSQSSDDHLNKRSRSSSMSSLTGAYASGIPSSSRNAITSSYSSTRGISQLWKRNGPSSSPFSSPASSRSQTPERPAKKIREEELCHHSSSSTPLAADRESQGEKAADTTPRKKQNSNSQSTPGSSGQRKRKVQLLPSRRGEQLTLPPPPQLGYSITAEDLDLEKKASLQWFNQALEDKSDAASNSVTETPPITQPSFTFTLPAAAPASPPTSLLAPSTNPLLESLKKMQTPPSLPPCPESAGAATTEALSPPKTPSLLPPLGLSQSGPPGLLPSPSFDSKPPTTLLGLIPAPSMVPATDTKAPPTLQAETATKPQATSAPSPAPKQSFLFGTQNTSPSSPAAPAASSAPPMFKPIFTAPPKSEKEGPTPPGPSVTATAPSSSSLPTTTSTTAPTFQPVFSSMGPPASVPLPAPFFKQTTTPATAPTTTAPLFTGLASATSAVAPITSASPSTDSASKPAFGFGINSVSSSSVSTTTSTATAASQPFLFGAPQASAASFTPAMGSIFQFGKPPALPTTTTVTTFSQSLHTAVPTATSSSAADFSGFGSTLATSAPATSSQPTLTFSNTSTPTFNIPFGSSAKSPLPSYPGANPQPAFGAAEGQPPGAAKPALAPSFGSSFTFGNSAAPAAAPTPAPPSMIKVVPAYVPTPIHPIFGGATHSAFGLKATASAFGAPASSQPAFGGSTAVFFGAATSSGFGATTQTASSGSSSSVFGSTTPSPFTFGGSAAPAGSGSFGINVATPGSSTTTGAFSFGAGQSGSTATSTPFAGGLGQNALGTTGQSTPFAFNVSSTTESKPVFGGTATPTFGLNTPAPGVGTSGSSLSFGASSAPAQGFVGVAPFGSAALSFSIGAGSKTPGARQRLQARRQHTRKK

SEQ ID NO: 7539 - protein, 1243 aa, Homo sapiens
MSEAPRFFVGPEDTEINPGNYRHFFHHADEDDEEEDDSPPERQIVVGICSMAKKSKSKPMKEILERISLFKYITVVVFEEEVILNEPVENWPLCDCLISFHSKGFPLDKAVAYAKLRNPFVINDLNMQYLIQDRREVYSILQAEGILLPRYAILNRDPNNPKECNLIEGEDHVEVNGEVFQKPFVEKPVSAEDHNVYIYYPTSAGGGSQRLFRKIGSRSSVYSPESNVRKTGSYIYEEFMPTDGTDVKVYTVGPDYAHAEARKSPALDGKVERDSEGKEVRYPVILNAREKLIAWKVCLAFKQTVCGFDLLRANGQSYVCDVNGFSFVKNSMKYYDDCAKILGNIVMRELAPQFHIPWSIPLEAEDIPIVPTTSGTMMELRCVIAVIRHGDRTPKQKMKMEVRHQKFFDLFEKCDGYKSGKLKLKKPKQLQEVLDIARQLLMELGQNNDSEIEENKPKLEQLKTVLEMYGHFSGINRKVQLTYLPHGCPKTSSEEEDSRREEPSLLLVLKWGGELTPAGRVQAEELGRAFRCMYPGGQGDYAGFPGCGLLRLHSTYRHDLKIYASDEGRVQMTAAAFAKGLLALEGELTPILVQMVKSANMNGLLDSDSDSLSSCQQRVKARLHEILQKDRDFTAEDYEKLTPSGSISLIKSMHLIKNPVKTCDKVYSLIQSLTSQIRHRMEDPKSSDIQLYHSETLELMLRRWSKLEKDFKTKNGRYDISKIPDIYDCIKYDVQHNGSLKLENTMELYRLSKALADIVIPQEYGITKAEKLEIAKGYCTPLVRKIRSDLQRTQDDDTVNKLHPVYSRGVLSPERHVRTRLYFTSESHVHSLLSILRYGALCNESKDEQWKRAMDYLNVVNELNYMTQIVIMLYEDPNKDLSSEERFHVELHFSPGAKGCEEDKNLPSGYGYRPASRENEGRRPFKIDNDDEPHTSKRDEVDRAVILFKPMVSEPIHIHRKSPLPRSRKTATNDEESPLSVSSPEGTGTWLHYTSGVGTGRRRRRSGEQITSSPVSPKSLAFTSSIFGSWQQVVSENANYLRTPRTLVEQKQNPTVGSHCAGLFSTSVLGGSSSAPNLQDYARTHRKKLTSSGCIDDATRGSAVKRFSISFARHPTNGFELYSMVPSICPLETLHNALSLKQVDEFLASIASPSSDVPRKTAEISSTALRSSPIMRKKVSLNTYTPAKILPTPPATLKSTKASSKPATSGPSSAVVPNTSSRKKNITSKTETHEHKKNTGKKK

SEQ ID NO: 7540 - protein, 353 aa, Homo sapiens
MKIIFPILSNPVFRRTVKLLLCLLWIGYSQGTTHVLRFGGIFEYVESGPMGAEELAFRFAVNTINRNRTLLPNTTLTYDTQKINLYDSFEASKKACDQLSLGVAAIFGPSHSSSANAVQSICNALGVPHIQTRWKHQVSDNKDSFYVSLYPDFSSLSRAILDLVQFFKWKTVTVVYDDSTGLIRLQELIKAPSRYNLRLKIRQLPADTKDAKPLLKEMKRGKEFHVIFDCSHEMAAGILKQALAMGMMTEYYHYIFTTLDLFALDVEPYRYSGVNMTGFRILNTENTQVSSIIEKWSMERLQAPPKPDSGLLDGFMTMEFHSCCPGWSAMARSQLTATSASWVQAILLPQPPE

SEQ ID NO: 7541 - protein, 691 aa, Homo sapiens
MKKDVRILLVGEPRVGKTSLIMSLVSEEFPEEVPPRAEEITIPADVTPERVPTHIVDYSEAEQSDEQLHQEISQANVICIVYAVNNKHSIDKVTSRWIPLINERTDKDSRLPLILVGNKSDLVEYSSMETILPIMNQYTEIETCVECSAKNLKNISELFYYAQKAVLHPTGPLYCPEEKEMKPACIKALTRIFKISDQDNDGTLNDAELNFFQRICFNTPLAPQALEDVKNVVRKHISDGVADSGLTLKGFLFLHTLFIQRGRHETTWTVLRRFGYDDDLDLTPEYLFPLLKIPPDCTTELNHHAYLFLQSTFDKHDLDRDCALSPDELKDLFKVFPYIPWGPDVNNTVCTNERGWITYQGFLSQWTLTTYLDVQRCLEYLGYLGYSILTEQESQASAVTVTRDKKIDLQKKQTQRNVFRCNVIGVKNCGKSGVLQALLGRNLMRQKKIREDHKSYYAINTVYVYGQEKYLLLHDISESEFLTEAEIICDVVCLVYDVSNPKSFEYCARIFKQHFMDSRIPCLIVAAKSDLHEVKQEYSISPTDFCRKHKMPPPQAFTCNTADAPSKDIFVKLTTMAMYPEDHYRDRLSRDMGHTDRIENLRKIWVFLKTAFHARLRCMCTCNRCTFCICQNFLNSDLLQSVKNKIFTAVLNRHVTQADLKSSTFWLRASFGATVFAVLGFAMYKALLKQR

SEQ ID NO: 7542 - protein, 855 aa, Homo sapiens
MVVMARLSRPERPDLVFEEEDLPYEEEIMRNQFSVKCWLRYIEFKQGAPKPRLNQLYERALKLLPCSYKLWYRYLKARRAQVKHRCVTDPAYEDVNNCHERAFVFMHKMPRLWLDYCQFLMDQGRVTHTRRTFDRALRALPITQHSRIWPLYLRFLRSHPLPETAVRGYRRFLKLSPESAEEYIEYLKSSDRLDEAAQRLATVVNDERFVSKAGKSNYQLWHELCDLISQNPDKVQSLNVDAIIRGGLTRFTDQLGKLWCSLADYYIRSGHFEKARDVYEEAIRTVMTVRDFTQVFDSYAQFEESMIAAKMETASELGREEEDDVDLELRLARFEQLISRRPLLLNSVLLRQNPHHVHEWHKRVALHQGRPREIINTYTEAVQTVDPFKATGKPHTLWVAFAKFYEDNGQLDDARVILEKATKVNFKQVDDLASVWCQCGELELRHENYDEALRLLRKATALPARRAEYFDGSEPVQNRVYKSLKVWSMLADLEESLGTFQSTKAVYDRILDLRIATPQIVINYAMFLEEHKYFEESFKAYERGISLFKWPNVSDIWSTYLTKFIARYGGRKLERARDLFEQALDGCPPKYAKTLYLLYAQLEEEWGLARHAMAVYERATRAVEPAQQYDMFNIYIKRAAEIYGVTHTRGIYQKAIEVLSDEHAREMCLRFADMECKLGEIDRARAIYSFCSQICDPRTTGAFWQTWKDFEVRHGNEDTIKEMLRIRRSVQATYNTQVNFMASQMLKVSGSATGTVSDLAPGQSGMDDMKLLEQRAEQLAAEAERDQPLRAQSKILFVRSDASREELAELAQQVNPEEIQLGEDEDEDEMDLEPNEVRLEQQSVPAAVFGSLKED

SEQ ID NO: 7543 - protein, 1215 aa, Homo sapiens
MSSMPKPERHAESLLDICHDTNSSPTDLMTVTKNQNIILQSISRSEEFDQDGDCSHSTLVNEEEDPSGGRQDWQPRTEEFSTSHMKYSGRSIKFLLPPLSLLPTRSGVLTIPQNHKFPKEKERNIPSLTSFVPKLSVSVRQSDELSPSNEPPGALVKSLMDPTLRSSDGFIWSRNMCSFPKTNHHRQCLEKEENWKSKEIEECNKIEITHFEKGQSLVSFENLKEGNIPAVREEDIDCHGSKTRKPEEENSQYLSSRKNESSVAKNYEQDPEIVCTIPSKFQETQHSEITPSQDEEMRNNKAASKRVSLHKNEAMEPNNILEECTVLKSLSSVVFDDPIDKLPEGCSSMETNIKISIAERAKPEMSRMVPLIHITFPVDGSPKEPVIAKPSLQTRKGTIHNNHSVNIPVHQENDKHKMNSHRSKLDSKTKTSKKTPQNFVISTEGPIKPTMHKTSIKTQIFPALGLVDPRPWQLPRFQKKMPQIAKKQSTHRTQKPKKQSFPCICKNPGTQKSCVPLSVQPTEPRLNYLDLKYSDMFKEINSTANGPGIYEMFGTPVYCHVRETERDENTYYREICSAPSGRRITNKCRSSHSERKSNIRTRLSQKKTHMKCPKTSFGIKQEHKVLISKEKSSKAVHSNLHDIENGDGISEPDWQIKSSGNEFLSSKDEIHPMNLAQTPEQSMKQNEFPPVSDLSIVEEVSMEESTGDRDISNNQILTTSLRDLQELEELHHQIPFIPSEDSWAVPSEKNSNKYVQQEKQNTASLSKVNASRILTNDLEFDSVSDHSKTLTNFSFQAKQESASSQTYQYWVHYLDHDSLANKSITYQMFGKTLSGTNSISQEIMDSVNNEELTDELLGCLAAELLALDEKDNNSCQKMANETDPENLNLVLRWRGSTPKEMGRETTKVKIQRHSSGLRIYDREEKFLISNEKKIFSENSLKSEEPILWTKGEILGKGAYGTVYCGLTSQGQLIAVKQVALDTSNKLAAEKEYRKLQEEVDLLKALKHVNIVAYLGTCLQENTVSIFMEFVPGGSISSIINRFGPLPEMVFCKYTKQILQGVAYLHENCVVHRDIKGNNVMLMPTGIIKLIDFGCARRLAWAGLNGTHSDMLKSMHGTPYWMAPEVINESGYGRKSDIWSIGCTVFEMATGKPPLASMDRMAAMFYIGAHRGLMPPLPDHFSENAADFVRMCLTRDQHERPSALQLLKHSFLERSH

SEQ ID NO: 7544 - protein, 908 aa, Homo sapiens
MVCEGKRSASCPCFFLLTAKFYWILTMMQRTHSQEYAHSIRVDGDIILGGLFPVHAKGERGVPCGELKKEKGIHRLEAMLYAIDQINKDPDLLSNITLGVRILDTCSRDTYALEQSLTFVQALIEKDASDVKCANGDPPIFTKPDKISGVIGAAASSVSIMVANILRLFKIPQISYASTAPELSDNTRYDFFSRVVPPDSYQAQAMVDIVTALGWNYVSTLASEGNYGESGVEAFTQISREIGGVCIAQSQKIPREPRPGEFEKIIKRLLETPNARAVIMFANEDDIRRILEAAKKLNQSGHFLWIGSDSWGSKIAPVYQQEEIAEGAVTILPKRASIDGFDRYFRSRTLANNRRNVWFAEFWEENFGCKLGSHGKRNSHIKKCTGLERIARDSSYEQEGKVQFVIDAVYSMAYALHNMHKDLCPGYIGLCPRMSTIDGKELLGYIRAVNFNGSAGTPVTFNENGDAPGRYDIFQYQITNKSTEYKVIGHWTNQLHLKVEDMQWAHREHTHPASVCSLPCKPGERKKTVKGVPCCWHCERCEGYNYQVDELSCELCPLDQRPNMNRTGCQLIPIIKLEWHSPWAVVPVFVAILGIIATTFVIVTFVRYNDTPIVRASGRELSYVLLTGIFLCYSITFLMIAAPDTIICSFRRVFLGLGMCFSYAALLTKTNRIHRIFEQGKKSVTAPKFISPASQLVITFSLISVQLLGVFVWFVVDPPHIIIDYGEQRTLDPEKARGVLKCDISDLSLICSLGYSILLMVTCTVYAIKTRGVPETFNEAKPIGFTMYTTCIIWLAFIPIFFGTAQSAEKMYIQTTTLTVSMSLSASVSLGMLYMPKVYIIIFHPEQNVQKRKRSFKAVVTAATMQSKLIQKGNDRPNGEVKSELCESLETNSKSSVEFPMVKSGSTS

SEQ ID NO: 7545 - protein, 495 aa, Homo sapiens
MNKSRWQSRRRHGRRSHQQNPWFRLRDSEDRSDSRAAQPAHDSGHGDDESPSTSSGTAGTSSVPELPGFYFDPEKKRYFRLLPGHNNCNPLTKESIRQKEMESKRLRLLQEEDRRKKIARMGFNASSMLRKSQLGFLNVTNYCHLAHELRLSCMERKKVQIRSMDPSALASDRFNLILADTNSDRLFTVNDVKVGGSKYGIINLQSLKTPTLKVFMHENLYFTNRKVNSVCWASLNHLDSHILLCLMGLAETPGCATLLPASLFVNSHPGIDRPGMLCSFRIPGAWSCAWSLNIQANNCFSTGLSRRVLLTNVVTGHRQSFGTNSDVLAQQFALMAPLLFNGCRSGEIFAIDLRCGNQGKGWKATRLFHDSAVTSVRILQDEQYLMASDMAGKIKLWDLRTTKCVRQYEGHVNEYAYLPLHVHEEEGILVAVGQDCYTRIWSLHDARLLRTIPSPYPASKADIPSVAFSSRLGGSRGAPGLLMAVGQDLYCYSYS

SEQ ID NO: 7546 - protein, 888 aa, Homo sapiens
QYLEEKRSALEEQRLMYERELEQLRQQLSPDRQPQSSGPDRLAYSSQTAQQKVTQWAEERDELFRQSLAKLREQLVKANTLVREANFLAEEMSKLTDYQVTLQIPAANLSANRKRGAIVSEPAIQVRRKGKSTQVWTIEKLENKLIDMRDLYQEWKEKVPEAKRLYGKRGDPFYEAQENHNLIGVANVFLECLFCDVKLQYAVPIISQQGEVAGRLHVEVMRVTGAVPERVVEDDSSENSSESGSLEVVDSSGEIIHRVKKLTCRVKIKEATGLPLNLSNFVFCQYTFWDQCESTVAAPVVDPEVPSPQSKDAQYTVTFSHCKDYVVNVTEEFLEFISDGALAIEVWGHRCAGNGSSIWEVDSLHAKTRTLHDRWNEVTRRIEMWISILELNELGEYAAVELHQAKDVNTGGIFQLRQGHSRRVQVTVKPVQHSGTLPLMVEAILSVSIGCVTARSTKLQRGLDSYQRDDEDGDDMDSYQEEDLNCVRERWSDALIKRREYLDEQIKKVSNKTEKTEDDVEREAQLVEQWVGLTEERNAVLVPAPGSGIPGAPADWIPPPGMETHIPVLFLDLNADDLSANEQLVGPHASGVNSILPKEHGSQFFYLPIIKHSDDEVSATASWDSSVHDSVHLNRVTPQNERIYLIVKTTVQLSHPAAMELVLRKRIAANIYNKQSFTQSLKRRISLKNIFYSCGVTYEIVSNIPKATEEIEDRETLALLAARSENEGTSDGETYIEKYTRGVLQVENILSLERLRQAVTVKEALSTKARHIRRSLSTPNVHNVSSSRPDLSGFDEDDKGWPENQLDMSDYSSSYQDVACYGTLPRDSPRRNKEGCTSETPHALTVSPFKAFSPQPPKFFKPLMPVKEEHKKRIALEARPLLSQEVNA

SEQ ID NO: 7547 - protein, 558 aa, Homo sapiens
MAKNRRDRNSWGGFSEKTYEWSSEEEEPVKKAGPVQVLIVKDDHSFELDETALNRILLSEAVRDKEVVAVSVAGAFRKGKSFLMDFMLRYMYNQESVDWVGDYNEPLTGFSWRGGSERETTGIQIWSEIFLINKPDGKKVAVLLMDTQGTFDSQSTLRDSATVFALSTMISSIQVYNLSQNVQEDDLQHLQLFTEYGRLAMEETFLKPFQSLIFLVRDWSFPYEFSYGADGGAKFLEKRLKVSGNQHEELQNVRKHIHSCFTNISCFLLPHPGLKVATNPNFDGKLKEIDDEFIKNLKILIPWLLSPESLDIKEINGNKITCRGLVEYFKAYIKIYQGEELPHPKSMLQATAEANNLAAVATAKDTYNKKMEEICGGDKPFLAPNDLQTKHLQLKEESVKLFRGVKKMGGEEFSRRYLQQLESEIDELYIQYIKHNDSKNIFHAARTPATLFVVIFITYVIAGVTGFIGLDIIASLCNMIMGLTLITLCTWAYIRYSGEYRELGAVIDQVAAALWDQGSTNEALYKLYSAAATHRHLYHQAFPTPKSESTEQSEKKKM

SEQ ID NO: 7548 - protein, 1818 aa, Homo sapiens
MEPWSSRWKTKRWLWDFTVTTLALTFLFQAREVRGAAPVDVLKALDFHNSPEGISKTTGFCTNRKNSKGSDTAYRVSKQAQLSAPTKQLFPGGTFPEDFSILFTVKPKKGIQSFLLSIYNEHGIQQIGVEVGRSPVFLFEDHTGKPAPEDYPLFRTVNIADGKWHRVAISVEKKTVTMIVDCKKKTTKPLDRSERAIVDTNGITVFGTRILDEEVFEGDIQQFLITGDPKAAYDYCEHYSPDCDSSAPKAAQAQEPQIDEKKKSNFKKKMRTVATKSKEKSKKFTPPKSEKFSSKKKKSYQASAKAKLGVKANIVDDFQEYNYGTMESYQTEAPRHVSGTNEPNPVEEIFTEEYLTGEDYDSQRKNSEDTLYENKEIDGRDSDLLVDGDLGEYDFYEYKEYEDKPTSPPNEEFGPGVPAETDITETSINGHGAYGEKGQKGEPAVVEPGMLVEGPPGPAGPAGIMGPPGLQGPTGPPGDPGDRGPPGRPGLPGADGLPGPPGTMLMLPFRYGGDGSKGPTISAQEAQAQAILQQARIALRGPPGPMGLTGRPGPVGGPGSSGAKGESGDPGPQGPRGVQGPPGPTGKPGKRGRPGADGGRGMPGEPGAKGDRGFDGLPGLPGDKGHRGERGPQGPPGPPGDDGMRGEDGEIGPRGLPGEAGPRGLLGPRGTPGAPGQPGMAGVDGPPGPKGNMGPQGEPGPPGQQGNPGPQGLPGPQGPIGPPGEKGPQGKPGLAGLPGADGPPGHPGKEGQSGEKGALGPPGPQGPIGYPGPRGVKGADGVRGLKGSKGEKGEDGFPGFKGDMGLKGDRGEVGQIGPRGEDGPEGPKGRAGPTGDPGPSGQAGEKGKLGVPGLPGYPGRQGPKGSTGFPGFPGANGEKGARGVAGKPGPRGQRGPTGPRGSRGARGPTGKPGPKGTSGGDGPPGPPGERGPQGPQGPVGFPGPKGPPGPPGKDGLPGHPGQRGETGFQGKTGPPGPGGVVGPQGPTGETGPIGERGHPGPPGPPGEQGLPGAAGKEGAKGDPGPQGISGKDGPAGLRGFPGERGLPGAQGAPGLKGGEGPQGPPGPVGSPGERGSAGTAGPIGLPGRPGPQGPPGPAGEKGAPGEKGPQGPAGRDGVQGPVGLPGPAGPAGSPGEDGDKGEIGEPGQKGSKGDKGENGPPGPPGLQGPVGAPGIAGGDGEPGPRGQQGMFGQKGDEGARGFPGPPGPIGLQGLPGPPGEKGENGDVGPMGPPGPPGPRGPQGPNGADGPQGPPGSVGSVGGVGEKGEPGEAGNPGPPGEAGVGGPKGERGEKGEAGPPGAAGPPGAKGPPGDDGPKGNPGPVGFPGDPGPPGEPGPAGQDGVGGDKGEDGDPGQPGPPGPSGEAGPPGPPGKRGPPGAAGAEGRQGEKGAKGEAGAEGPPGKTGPVGPQGPAGKPGPEGLRGIPGPVGEQGLPGAAGQDGPPGPMGPPGLPGLKGDPGSKGEKGHPGLIGLIGPPGEQGEKGDRGLPGTQGSPGAKGDGGIPGPAGPLGPPGPPGLPGPQGPKGNKGSTGPAGQKGDSGLPGPPGSPGPPGEVIQPLPILSSKKTRRHTEGMQADADDNILDYSDGMEEIFGSLNSLKQDIEHMKFPMGTQTNPARTCKDLQLSHPDFPDGEYWIDPNQGCSGDSFKVYCNFTSGGETCIYPDKKSEGVRISSWPKEKPGSWFSEFKRGKLLSYLDVEGNSINMVQMTFLKLLTASARQNFTYHCHQSAAWYDVSSGSYDKALRFLGSNDEEMSYDNNPFIKTLYDGCASRKGYEKTVIEINTPKIDQVPIVDVMINDFGDQNQKFGFEVGPVCFLG

SEQ ID NO: 7549 - protein, 677 aa, Homo sapiens
MTASPDYLVVLFGITAGATGAKLGSDEKELILLFWKVVDLANKKVGQLHEVLVRPDQLELTEDCKEETKIDVESLSSASQLDQALRQFNQSVSNELNIGVGTSFCLCTDGQLHVRQILHPEASKKNVLLPECFYSFFDLRKEFKKCCPGSPDIDKLDVATMTEYLNFEKSSSVSRYGASQVEDMGNIILAMISEPYNHRFSDPERVNYKFESGTCSKMELIDDNTVVRARGLPWQSSDQDIARFFKGLNIAKGGAALCLNAQGRRNGEALVRFVSEEHRDLALQRHKHHMGTRYIEVYKATGEDFLKIAGGTSNEVAQFLSKENQVIVRMRGLPFTATAEEVVAFFGQHCPITGGKEGILFVTYPDGRPTGDAFVLFACEEYAQNALRKHKDLLGKRYIELFRSTAAEVQQVLNRFSSAPLIPLPTPPIIPVLPQQFVPPTNVRDCIRLRGLPYAATIEDILDFLGEFATDIRTHGVHMVLNHQGRPSGDAFIQMKSADRAFMAAQKCHKKNMKDRYVEVFQCSAEEMNFVLMGGTLNRNGLSPPPCLSPPSYTFPAPAAVIPTEAAIYQPSVILNPRALQPSTAYYPAGTQLFMNYTAYYPSPPGSPNSLGYFPTAANLSGVPPQPGTVVRMQGLAYNTGVKEILNFFQGYQYATEDGLIHTNDQARTLPKEWVCI

SEQ ID NO: 7550 - protein, 1232 aa, Homo sapiens
MDLEAAKNGTAWRPTSAEGDFELGISSKQKRKKTKTVKMIGVLTLFRYSDWQDKLFMSLGTIMAIAHGSGLPLMMIVFGEMTDKFVDTAGNFSFPVNFSLSLLNPGKILEEEMTRYAYYYSGLGAGVLVAAYIQVSFWTLAAGRQIRKIRQKFFHAILRQEIGWFDINDTTELNTRLTDDISKISEGIGDKVGMFFQAVATFFAGFIVGFIRGWKLTLVIMAISPILGLSAAVWAKILSAFSDKELAAYAKAGAVAEEALGAIRTVIAFGGQNKELERYQKHLENAKEIGIKKAISANISMGIAFLLIYASYALAFWYGSTLVISKEYTIGNAMTVFFSILIGAFSVGQAAPCIDAFANARGAAYVIFDIIDNNPKIDSFSERGHKPDSIKGNLEFNDVHFSYPSRANVKILKGLNLKVQSGQTVALVGSSGCGKSTTVQLIQRLYDPDEGTINIDGQDIRNFNVNYLREIIGVVSQEPVLFSTTIAENICYGRGNVTMDEIKKAVKEANAYEFIMKLPQKFDTLVGERGAQLSGGQKQRIAIARALVRNPKILLLDEATSALDTESEAEVQAALDKAREGRTTIVIAHRLSTVRNADVIAGFEDGVIVEQGSHSELMKKEGVYFKLVNMQTSGSQIQSEEFELNDEKAATRMAPNGWKSRLFRHSTQKNLKNSQMCQKSLDVETDGLEANVPPVSFLKVLKLNKTEWPYFVVGTVCAIANGGLQPAFSVIFSEIIAIFGPGDDAVKQQKCNIFSLIFLFLGIISFFTFFLQGFTFGKAGEILTRRLRSMAFKAMLRQDMSWFDDHKNSTGALSTRLATDAAQVQGATGTRLALIAQNIANLGTGIIISFIYGWQLTLLLLAVVPIIAVSGIVEMKLLAGNAKRDKKELEAAGKIATEAIENIRTVVSLTQERKFESMYVEKLYGPYRVFSAIVFGAVALGHASSFAPDYAKAKLSAAHLFMLFERQPLIDSYSEEGLKPDKFEGNITFNEVVFNYPTRANVPVLQGLSLEVKKGQTLALVGSSGCGKSTVVQLLERFYDPLAGTVLLDGQEAKKLNVQWLRAQLGIVSQEPILFDCSIAENIAYGDNSRVVSQDEIVSAAKAANIHPFIETLPHKYETRVGDKGTQLSGGQKQRIAIARALIRQPQILLLDEATSALDTESEKVVQEALDKAREGRTCIVIAHRLSTIQNADLIVVFQNGRVKEHGTHQQLLAQKGIYFSMVSVQAGTQNL

SEQ ID NO: 7551 - protein, 1060 aa, Homo sapiens
MEQLNELELLMEKSFWEEAELPAELFQKKVVASFPRTVLSTGMDNRYLVLAVNTVQNKEGNCEKRLVITASQSLENKELCILRNDWCSVPVEPGDIIHLEGDCTSDTWIIDKDFGYLILYPDMLISGTSIASSIRCMRRAVLSETFRSSDPATRQMLIGTVLHEVFQKAINNSFAPEKLQELAFQTIQEIRHLKEMYRLNLSQDEIKQEVEDYLPSFCKWAGDFMHKNTSTDFPQMQLSLPSDNSKDNSTCNIEVVKPMDIEESIWSPRFGLKGKIDVTVGVKIHRGYKTKYKIMPLELKTGKESNSIEHRSQVVLYTLLSQERRADPEAGLLLYLKTGQMYPVPANHLDKRELLKLRNQMAFSLFHRISKSATRQKTQLASLPQIIEEEKTCKYCSQIGNCALYSRAVEQQMDCSSVPIVMLPKIEEETQHLKQTHLEYFSLWCLMLTLESQSKDNKKNHQNIWLMPASEMEKSGSCIGNLIRMEHVKIVCDGQYLHNFQCKHGAIPVTNLMAGDRVIVSGEERSLFALSRGYVKEINMTTVTCLLDRNLSVLPESTLFRLDQEEKNCDIDTPLGNLSKLMENTFVSKKLRDLIIDFREPQFISYLSSVLPHDAKDTVACILKGLNKPQRQAMKKVLLSKDYTLIVGMPGTGKTTTICTLVRILYACGFSVLLTSYTHSAVDNILLKLAKFKIGFLRLGQIQKVHPAIQQFTEQEICRSKSIKSLALLEELYNSQLIVATTCMGINHPIFSRKIFDFCIVDEASQISQPICLGPLFFSRRFVLVGDHQQLPPLVLNREARALGMSESLFKRLEQNKSAVVQLTVQYRMNSKIMSLSNKLTYEGKLECGSDKVANAVINLRHFKDVKLELEFYADYSDNPWLMGVFEPNNPVCFLNTDKVPAPEQVEKGGVSNVTEAKLIVFLTSIFVKAGCSPSDIGIIAPYRQQLKIINDLLARSIGMVEVNTVDKYQGRDKSIVLVSFVRSNKDGTVGELLKDWRRLNVAITRAKHKLILLGCVPSLNCYPPLEKLLNHLNSEKLIIDLPSREHESLCHILGDFQRE

SEQ ID NO: 7552 - protein, 946 aa, Homo sapiens
MKRLTCFFICFFLSEVSGFEIPINGLSEFVDYEDLVELAPGKFQLVAENRRYQRSLPGESEEMMEEVDQVTLYSYKVQSTITSRMATTMIQSKVVNNSPQPQNVVFDVQIPKGAFISNFSMTVDGKTFRSSIKEKTVGRALYAQARAKGKTAGLVRSSALDMENFRTEVNVLPGAKVQFELHYQEVKWRKLGSYEHRIYLQPGRLAKHLEVDVWVIEPQGLRFLHVPDTFEGHFDGVPVISKGQQKAHVSFKPTVAQQRICPNCRETAVDGELVVLYDVKREEKAGELEVFNGYFVHFFAPDNLDPIPKNILFVIDVSGSMWGVKMKQTVEAMKTILDDLRAEDHFSVIDFNQNIRTWRNDLISATKTQVADAKRYIEKIQPSGGTNINEALLRAIFILNEANNLGLLDPNSVSLIILVSDGDPTVGELKLSKIQKNVKENIQDNISLFSLGMGFDVDYDFLKRLSNENHGIAQRIYGNQDTSSQLKKFYNQVSTPLLRNVQFNYPHTSVTDVTQNNFHNYFGGSEIVVAGKFDPAKLDQIESVITATSANTQLVLETLAQMDDLQDFLSKDKHADPDFTRKLWAYLTINQLLAERSLAPTAAAKRRITRSILQMSLDHHIVTPLTSLVIENEAGDERMLADAPPQDPSCCSGALYYGSKVVPDSTPSWANPSPTPVISMLAQGSQVLESTPPPHVMRVENDPHFIIYLPKSQKNICFNIDSEPGKILNLVSDPESGIVVNGQLVGAKKPNNGKLSTYFGKLGFYFQSEDIKIEISTETITLSHGSSTFSLSWSDTAQVTNQRVQISVKKEKVVTITLDKEMSFSVLLHRVWKKHPVNVDFLGIYIPPTNKFSPKAHGLIGQFMQEPKIHIFNERPGKDPEKPEASMEVKGQKLIITRGLQKDYRTDLVFGTDVTCWFVHNSGKGFIDGHYKDYFVPQLYSFLKRP

SEQ ID NO: 7553 - protein, 684 aa, Homo sapiens
MEANHSEQLSAERQSTPPGDSSSLPSHNGLEKEDGQDSPTPVQPPEKEASVHPDISEELNRQLEDIINTYGSAASTAGKEGSARASEQPENAESPDNEDGDCEETTEEAGREPVASGEPPTVKEPVSNKEQKLEKKILKGLGKEANLLMQNLNKLQTPEEKFDFLFKKYAELLDEHRTEQKKLKLLQKKQVQIQKEKDQLQGEHSRAILARSKLESLCRELQRHNKTLKEEALQRAREEEEKRKEITSHFQSTLTDIQGQIEQQSERNMKLCQENTELAEKLKSIIDQYELREEHLDKIFKHRELQQKLVDAKLEQAQEMMKEAEERHKREKEYLLNQAAEWKLQAKVLKEQETVLQAQLTLYSGRFEEFQSTLTKSNEVFATFKQEMDKTTKKMKKLEKDTATWKARFENCNKALLDMIEEKALRAKEYECFVMKIGRLENLCRALQEERNELHKKIRDAEISEKDDQSQHNSDEEPESNVSVDQEIDAEEVNSVQTAVKNLATAFMIIHHPESTPHQSKETQPEIGSSQESADAALKEPEQPPLIPSRDSESPLPPLTPQAEAEGGSDAEPPSKASNSPAGLGAETQCEGLPVGAQADQASWKPEAEASGQAPQAPTEASLQKMEADVPAPACAAEEHVAAMVPACEPSRQPPRAAAEELPVGASAGPQPRNVADTNLEGVD

SEQ ID NO: 7554 - protein, 976 aa, Homo sapiens
MELQAARACFALLWGCALAAAAAAQGKEVVLLDFAAAGGELGWLTHPYGKGWDLMQNIMNDMPIYMYSVCNVMSGDQDNWLRTNWVYRGEAERIFIELKFTVRDCNSFPGGASSCKETFNLYYAESDLDYGTNFQKRLFTKIDTIAPDEITVSSDFEARHVKLNVEERSVGPLTRKGFYLAFQDIGACVALLSVRVYYKKCPELLQGLAHFPETIAGSDAPSLATVAGTCVDHAVVPPGGEEPRMHCAVDGEWLVPIGQCLCQAGYEKVEDACQACSPGFFKFEASESPCLECPEHTLPSPEGATSCECEEGFFRAPQDPASMPCTRPPSAPHYLTAVGMGAKVELRWTPPQDSGGREDIVYSVTCEQCWPESGECGPCEASVRYSEPPHGLTRTSVTVSDLEPHMNYTFTVEARNGVSGLVTSRSFRTASVSINQTEPPKVRLEGRSTTSLSVSWSIPPPQQSRVWKYEVTYRKKGDSNSYNVRRTEGFSVTLDDLAPDTTYLVQVQALTQEGQGAGSKVHEFQTLSPEGSGNLAVIGGVAVGVVLLLVLAGVGFFIHRRRKNQRARQSPEDVYFSKSEQLKPLKTYVDPHTYEDPNQAVLKFTTEIHPSCVTRQKVIGAGEFGEVYKGMLKTSSGKKEVPVAIKTLKAGYTEKQRVDFLGEAGIMGQFSHHNIIRLEGVISKYKPMMIITEYMENGALDKFLREKDGEFSVLQLVGMLRGIAAGMKYLANMNYVHRDLAARNILVNSNLVCKVSDFGLSRVLEDDPEATYTTSGGKIPIRWTAPEAISYRKFTSASDVWSFGIVMWEVMTYGERPYWELSNHEVMKAINDGFRLPTPMDCPSAIYQLMMQCWQQERARRPKFADIVSILDKLIRAPDSLKTLADFDPRVSIRLPSTSGSEGVPFRTVSEWLESIKMQQYTEHFMAAGYTAIEKVVQMTNDDIKRIGVRLPGHQKRIAYSLLGLKDQVNTVGIPI

SEQ ID NO: 7555 - protein, 55 aa, Homo sapiens
MVKLSKEAKQRLQQLFKGSQFAIRWGFIPLVIYLGFKRGADPGMPEPTVLSLLWG

SEQ ID NO: 7556 - protein, 683 aa, Homo sapiens
MLKQARRPLFRNVLSATQWKKVKITRLVQISGASLAEKQEKHQDFLIQRQTKTKDRRFNDEIDKLTGYKTKSLLCMPIRSSDGEIIGVAQAINKIPEGAPFTEDDEKVMQMYLPFCGIAISNAQLFAASRKEYERSRALLEVVNDLFEEQTDLEKIVKKIMHRAQTLLKCERCSVLLLEDIESPVVKFTKSFELMSPKCSADAENSFKESMEKSSYSDWLINNSIAELVASTGLPVNISDAYQDPRFDAEADQISGFHIRSVLCVPIWNSNHQIIGVAQVLNRLDGKPFDDADQRLFEAFVIFCGLGINNTIMYDQVKKSWAKQSVALDVLSYHATCSKAEVDKFKAANIPLVSELAIDDIHFDDFSLDVDAMITAALRMFMELGMVQKFKIDYETLCRWLLTVRKNYRMVLYHNWRHAFNVCQLMFAMLTTAGFQDILTEVEILAVIVGCLCHDLDHRGTNNAFQAKSGSALAQLYGTSATLEHHHFNHAVMILQSEGHNIFANLSSKEYSDLMQLLKQSILATDLTLYFERRTEFFELVSKGEYDWNIKNHRDIFRSMLMTACDLGAVTKPWEISRQVAELVTSEFFEQGDRERLELKLTPSAIFDRNRKDELPRLQLEWIDSICMPLYQALVKVNVKLKPMLDSVATNRSKWEELHQKRLLASTASSSPASVMVAKEDRN

SEQ ID NO: 7557 - protein, 395 aa, Homo sapiens
MTHTLYPTPFALYPINISAAWHLGPLPVSCFVSNKYQCSLAFGATTGLRVLVVVVPQTQLSFLSSLCLVSLFLHSLVSAHGEKPTKPVGLDPTLFQVVVGILGNFSLLYYYMFLYFRGYKPRSTDLILRHLTVADSLVILSKRIPETMATFGLKHFDNYFGCKFLLYAHRVGRGVSIGSTCLLSVFQVITINPRNSRWAEMKVKAPTYIGLSNILCWAFHMLVNAIFPIYTTGKWSNNNITKKGDLGYCSAPLSDEVTKSVYAALTSFHDVLCLGLMLWASSSIVLVLYRHKQQVQHICRNNLYPNSSPGNRAIQSILALVSTFALCYALSFITYVYLALFDNSSWWLVNTAALIIACFPTISPFVLMCRDPSRSRLCSICCRRNRRFFHDFRKM

SEQ ID NO: 7558 - protein, 730 aa, Homo sapiens
MEELIVELRLFLELLDHEYLTSTVREKKAVITNILLRIQSSKGFDVKDHAQKQETANSLPAPPQMPLPEIPQPWLPPDSGPPPLPTSSLPEGYYEEAVPLSPGKAPEYITSNYDSDAMSSSYESYDEEEEDGKGKKTRHQWPSEEASMDLVKDAKICAFLLRKKRFGQWTKLLCVIKDTKLLCYKSSKDQQPQMELPLQGCNITYIPKDSKKKKHELKITQQGTDPLVLAVQSKEQAEQWLKVIKEAYSGCSGPVDSECPPPPSSPVHKAELEKKLSSERPSSDGEGVVENGITTCNGKEQVKRKKSSKSEAKGTVSKVTGKKITKIISLGKKKPSTDEQTSSAEEDVPTCGYLNVLSNSRWRERWCRVKDNKLIFHKDRTDLKTHIVSIPLRGCEVIPGLDSKHPLTFRLLRNGQEVAVLEASSSEDMGRWIGILLAETGSSTDPEALHYDYIDVEMSASVIQTAKQTFCFMNRRVISANPYLGGTSNGYAHPSGTALHYDDVPCINGSLKGKKPPVASNGVTGKGKTLSSQPKKADPAAVVKRTGSNAAQYKYGKNRVEADAKRLQTKEEELLKRKEALRNRLAQLRKERKDLRAAIEVNAGRKPQAILEEKLKQLEEECRQKEAERVSLELELTEVKESLKKALAGGVTLGLAIEPKSGTSSPQSPVFRHRTLENSPISSCDTSDTEGPVPVNSAAVLKKSQAAPGSSPCRGHVLRKAKEWELKNGT

SEQ ID NO: 7559 - protein, 1127 aa, Homo sapiens
MAENKGGGEAESGGGGSGSAPVTAGAAGPAAQEAEPPLTAVLVEEEEEEGGRAGAEGGAAGPDDGGVAAASSGSAQAASSPAASVGTGVAGGAVSTPAPAPASAPAPGPSAGPPPGPPASLLDTCAVCQQSLQSRREAEPKLLPCLHSFCLRCLPEPERQLSVPIPGGSNGDIQQVGVIRCPVCRQECRQIDLVDNYFVKDTSEAPSSSDEKSEQVCTSCEDNASAVGFCVECGEWLCKTCIEAHQRVKFTKDHLIRKKEDVSESVGASGQRPVFCPVHKQEQLKLFCETCDRLTCRDCQLLEHKEHRYQFLEEAFQNQKGAIENLLAKLLEKKNYVHFAATQVQNRIKEVNETNKRVEQEIKVAIFTLINEINKKGKSLLQQLENVTKERQMKLLQQQNDITGLSRQVKHVMNFTNWAIASGSSTALLYSKRLITFQLRHILKARCDPVPAANGAIRFHCDPTFWAKNVVNLGNLVIESKPAPGYTPNVVVGQVPPGTNHISKTPGQINLAQLRLQHMQQQVYAQKHQQLQQMRMQQPPAPVPTTTTTTQQHPRQAAPQMLQQQPPRLISVQTMQRGNMNCGAFQAHQMRLAQNAARIPGIPRHSGPQYSMMQPHLQRQHSNPGHAGPFPVVSVHNTTINPTSPTTATMANANRGPTSPSVTAIELIPSVTNPENLPSLPDIPPIQLEDAGSSSLDNLLSRYISGSHLPPQPTSTMNPSPGPSALSPGSSGLSNSHTPVRPPSTSSTGSRGSCGSSGRTAEKTSLSFKSDQVKVKQEPGTEDEICSFSGGVKQEKTEDGRRSACMLSSPESSLTPPLSTNLHLESELDALASLENHVKIEPADMNESCKQSGLSSLVNGKSPIRSLMHRSARIGGDGNNKDDDPNEDWCAVCQNGGDLLCCEKCPKVFHLTCHVPTLLSFPSGDWICTFCRDIGKPEVEYDCDNLQHSKKGKTAQGLSPVDQRKCERLLLYLYCHELSIEFQEPVPASIPNYYKIIKKPMDLSTVKKKLQKKHSQHYQIPDDFVADVRLIFKNCERFNEMMKVVQVYADTQEINLKADSEVAQAGKAVALYFEDKLTEIYSDRTFAPLPEFEQEEDDGEVTEDSDEDFIQPRRKRLKSDERPVHIK

SEQ ID NO: 7560 - protein, 748 aa, Homo sapiens
MSQWNQVQQLEIKFLEQVDQFYDDNFPMEIRHLLAQWIENQDWEAASNNETMATILLQNLLIQLDEQLGRVSKEKNLLLIHNLKRIRKVLQGKFHGNPMHVAVVISNCLREERRILAAANMPVQGPLEKSLQSSSVSERQRNVEHKVAAIKNSVQMTEQDTKYLEDLQDEFDYRYKTIQTMDQSDKNSAMVNQEVLTLQEMLNSLDFKRKEALSKMTQIIHETDLLMNTMLIEELQDWKRRQQIACIGGPLHNGLDQLQNCFTLLAESLFQLRRQLEKLEEQSTKMTYEGDPIPMQRTHMLERVTFLIYNLFKNSFVVERQPCMPTHPQRPLVLKTLIQFTVKLRLLIKLPELNYQVKVKASIDKNVSTLSNRRFVLCGTNVKAMSIEESSNGSLSVEFRHLQPKEMKSSAGGKGNEGCHMVTEELHSITFETQICLYGLTIDLETSSLPVVMISNVSQLPNAWASIIWYNVSTNDSQNLVFFNNPPPATLSQLLEVMSWQFSSYVGRGLNSDQLHMLAEKLTVQSSYSDGHLTWAKFCKEHLPGKSFTFWTWLEAILDLIKKHILPLWIDGYVMGFVSKEKERLLLKDKMPGTFLLRFSESHLGGITFTWVDHSESGEVRFHSVEPYNKGRLSALPFADILRDYKVIMAENIPENPLKYLYPDIPKDKAFGKHYSSQPCEVSRPTERGDKGYVPSVFIPISTIRSDSTEPHSPSDLLPMSPSVYAVLRENLSPTTIETAMKSPYSAE

SEQ ID NO: 7561 - protein, 464 aa, Homo sapiens
MFENESRKIFSEMPEGESAQHSDGESDFERDAGIQRLQGHSPGEDHGEVVSQDREVGQLIGLQGTYLGEKPYECPQCGKTFSRKSHLITHERTHTGEKYYKCDECGKSFSDGSNFSRHQTTHTGEKPYKCRDCGKSFSRSANLITHQRIHTGEKPFQCAECGKSFSRSPNLIAHQRTHTGEKPYSCPECGKSFGNRSSLNTHQGIHTGEKPYECKECGESFSYNSNLIRHQRIHTGEKPYKCTDCGQRFSQSSALITHRRTHTGEKPYQCSECGKSFSRSSNLATHRRTHMVEKPYKCGVCGKSFSQSSSLIAHQGMHTGEKPYECLTCGESFSWSSNLLKHQRIHTGEKPYKCSECGKCFSQRSQLVVHQRTHTGEKPYKCLMCGKSFSRGSILVMHQRAHLGDKPYRCPECGKGFSWNSVLIIHQRIHTGEKPYKCPECGKGFSNSSNFITHQRTHMKEKLY

SEQ ID NO: 7562 - protein, 893 aa, Homo sapiens
MAQFYYKRNVNAPYRDRIPLRIVRAESELSPSEKAYLNAVEKGDYASVKKSLEEAEIYFKININCIDPLGRTALLIAIENENLELIELLLSFNVYVGDALLHAIRKEVVGAVELLLNHKKPSGEKQVPPILLDKQFSEFTPDITPIILAAHTNNYEIIKLLVQKGVSVPRPHEVRCNCVECVSSSDVDSLRHSRSRLNIYKALASPSLIALSSEDPFLTAFQLSWELQELSKVENEFKSEYEELSRQCKQFAKDLLDQTRSSRELEIILNYRDDNSLIEEQSGNDLARLKLAIKYRQKEFVAQPNCQQLLASRWYDEFPGWRRRHWAVKMVTCFIIGLLFPVFSVCYLIAPKSPLGLFIRKPFIKFICHTASYLTFLFLLLLASQHIDRSDLNRQGPPPTIVEWMILPWVLGFIWGEIKQMWDGGLQDYIHDWWNLMDFVMNSLYLATISLKIVAFVKYSALNPRESWDMWHPTLVAEALFAIANIFSSLRLISLFTANSHLGPLQISLGRMLLDILKFLFIYCLVLLAFANGLNQLYFYYEETKGLTCKGIRCEKQNNAFSTLFETLQSLFWSIFGLINLYVTNVKAQHEFTEFVGATMFGTYNVISLVVLLNMLIAMMNNSYQLIADHADIEWKFARTKLWMSYFEEGGTLPTPFNVIPSPKSLWYLIKWIWTHLCKKKMRRKPESFGTIGRRAADNLRRHHQYQEVMRNLVKRYVAAMIRDAKTEEGLTEENFKELKQDISSFRFEVLGLLRGSKLSTIQSANASKESSNSADSDEKSDSEEEVARQQAAGPLERNIQLESRGLASRGDLSIPGLSEQCVLVDHRERNTDTLGLQVGKRVCPFKSEKVVVEDTVPIIPKEKHAKEEDSSIDYDLNLPDTVTHEDYVTTRL

SEQ ID NO: 7563 - protein, 538 aa, Homo sapiens
MEGGRRARVVIESKRNFFLGAFPTPFPAEHVELGRLGDSETAMVPGKGGADYILLPFKKMDFSRNLYDIGEQLDSEDLASLKFLSLDYIPQRKQEPIKDALMLFQRLQEKRMLEESNLSFLKELLFRINRLDLLITYLNTRKEEMERELQTPGRAQISAYRVMLYQISEEVSRSELRSFKFLLQEEISKCKLDDDMNLLDIFIEMEKRVILGEGKLDILKRVCAQINKSLLKIINDYEEFSKERSSSLEGSPDEFSNGEELCGVMTISDSPREQDSESQTLDKVYQMKSKPRGYCLIINNHNFAKAREKVPKLHSIRDRNGTHLDAGALTTTFEELHFEIKPHDDCTVEQIYEILKIYQLMDHSNMDCFICCILSHGDKGIIYGTDGQEAPIYELTSQFTGLKCPSLAGKPKVFFIQACQGDNYQKGIPVETDSEEQPYLEMDLSSPQTRYIPDEADFLLGMATVNNCVSYRNPAEGTWYIQSLCQSLRERCPRGDDILTILTEVNYEVSNKDDKKNMGKQMPQPTFTLRKKLVFPSD

SEQ ID NO: 7564 - protein, 821 aa, Homo sapiens
MVSWGRFICLVVVTMATLSLARPSFSLVEDTTLEPEEPPTKYQISQPEVYVAAPGESLEVRCLLKDAAVISWTKDGVHLGPNNRTVLIGEYLQIKGATPRDSGLYACTASRTVDSETWYFMVNVTDAISSGDDEDDTDGAEDFVSENSNNKRAPYWTNTEKMEKRLHAVPAANTVKFRCPAGGNPMPTMRWLKNGKEFKQEHRIGGYKVRNQHWSLIMESVVPSDKGNYTCVVENEYGSINHTYHLDVVERSPHRPILQAGLPANASTVVGGDVEFVCKVYSDAQPHIQWIKHVEKNGSKYGPDGLPYLKVLKAAGVNTTDKEIEVLYIRNVTFEDAGEYTCLAGNSIGISFHSAWLTVLPAPGREKEITASPDYLEIAIYCIGVFLIACMVVTVILCRMKNTTKKPDFSSQPAVHKLTKRIPLRRQVTVSAESSSSMNSNTPLVRITTRLSSTADTPMLAGVSEYELPEDPKWEFPRDKLTLGKPLGEGCFGQVVMAEAVGIDKDKPKEAVTVAVKMLKDDATEKDLSDLVSEMEMMKMIGKHKNIINLLGACTQDGPLYVIVEYASKGNLREYLRARRPPGMEYSYDINRVPEEQMTFKDLVSCTYQLARGMEYLASQKCIHRDLAARNVLVTENNVMKIADFGLARDINNIDYYKKTTNGRLPVKWMAPEALFDRVYTHQSDVWSFGVLMWEIFTLGGSPYPGIPVEELFKLLKEGHRMDKPANCTNELYMMMRDCWHAVPSQRPTFKQLVEDLDRILTLTTNEEYLDLSQPLEQYSPSYPDTRSSCSSGDDSVFSPDPMPYEPCLPQYPHINGSVKT

SEQ ID NO: 7565 - protein, 674 aa, Homo sapiens
MGPLTFTDVAIEFSLEEWQCLDTAQQNLYRNVMLENYRNLVFLGIAVSKPDLITCLEKEKEPCKMKRHEMVDEPPVVCSHFAEDFWPEQDIKDSFQKVTLRRYDKRGHENLQLRKGYKTVGDCKLYKGGYNGLNQCLTLTQSKMYHCDIYVKVFYAFSNADRYKTRHTGKKPFQCKKCGKSFCMLSQLTQHKKIHIRENTYRCKEFGNAFNQSSALTNHKRIYVGEKHYRCEECGKAFNHYSTLTNHKRIHTGEKPYKCKECGKAFSRYSTLTTHKRIHSGEKPYKCDECGKTFSISSTFTKHKIIHTEEKPYKCKECGKAFNRSSTLTSHKRIHTGEKPYKCEECGKAFNWSSTLTKHKVIHTGEKPYKCEECGKAFNQSSRLTRHKKIHTGEEPYKFEKCGRVFTCSSTLTQDKKIHTGEKPYNCEECGKVFTYSSTLTRHKRIHTEEKPYKCNECGKAFNRSSHLTSHRRIHTGEKPYKCEECGKAFKQSSNLNSHKKIHSGEKPYKCEECGKAFILSSRLTQHKKIHTGEKPYKCEECGKAFNRSSRLTQHKKIHTGEKPYKCKQCDKAFTHSSNLSSHKKIHSGEKPYKCEECGKAFNRSSRLTQHKKIHTREKPYKCEECAKAFTRSSRLTQHKKIHRMGVVAHACNPSTLGGRGGRITRSGDRDRPG

SEQ ID NO: 7566 - protein, 418 aa, Homo sapiens
MFSLALKCLISLSTIILLGLIIAYHTREVQLFVIDNGADDWRIAMTYERILYISLEMLVCAIHPIPGEYKFFWTARLAFSYTPSRAEADVDIILSIPMFLRLYLIARVMLLHSKLFTDASSRSIGALNKINFNTRFVMKTLMTICPGTVLLVFSISLWIIAAWTVRVCERYHDQQDVTSNFLGAMWLISITFLSIGYGDMVPHTYCGKGVCLLTGIMGAGCTALVVAVVARKLELTKAEKHVHNFMMDTQLTKRIKNAAANVLRETWLIYKHTKLLKKIDHAKVRKHQRKFLQAIHQLRSVKMEQRKLSDQANTLVDLSKMQNVMYDLITELNDRSEDLEKQIGSLESKLEHLTASFNSLPLLIADTLRQQQQQLLSAIIEARGVSVAVGTTHTPISDSPIGVSSTSFPTPYTSSSSC

SEQ ID NO: 7567 - protein, 793 aa, Homo sapiens
MSRRKQGKPQHLSKREFSPEPLEAILTDDEPDHGPLGAPEGDHDLLTCGQCQMNFPLGDILIFIEHKRKQCNGSLCLEKAVDKPPSPSPIEMKKASNPVEVGIQVTPEDDDCLSTSSRGICPKQEHIAGKDEPSSYTCTTCKQPFTSAWFLLQHAQNTHGLRIYLESEHGSPLTPRVGIPSGLGAECPSQPPLHGIHIADNNPFNLLRIPGSVSREASGLAEGRFPPTPPLFSPPPRHHLDPHRIERLGAEEMALATHHPSAFDRVLRLNPMAMEPPAMDFSRRLRELAGNTSSPPLSPGRPSPMQRLLQPFQPGSKPPFLATPPLPPLQSAPPPSQPPVKSKSCEFCGKTFKFQSNLVVHRRSHTGEKPYKCNLCDHACTQASKLKRHMKTHMHKSSPMTVKSDDGLSTASSPEPGTSDLVGSASSALKSVVAKFKSENDPNLIPENGDEEEEEDDEEEEEEEEEEEEELTESERVDYGFGLSLEAARHHENSSRGAVVGVGDESRALPDVMQGMVLSSMQHFSEAFHQVLGEKHKRGHLAEAEGHRDTCDEDSVAGESDRIDDGTVNGRGCSPGESASGGLSKKLLLGSPSSLSPFSKRIKLEKEFDLPPAAMPNTENVYSQWLAGYAASRQLKDPFLSFGDSRQSPFASSSEHSSENGSLRFSTPPGELDGGISGRSGTGSGGSTPHISGPGPGRPSSKEGRRSDTCEYCGKVFKNCSNLTVHRRSHTGERPYKCELCNYACAQSSKLTRHMKTHGQVLHTPPFGVVPRELKMCGSFRMEAREPLSSEKI

SEQ ID NO: 7568 - protein, 2263 aa, Homo sapiens
MMLLILFLVIICSHISVNQDSGPEYADVVFLVDSSDRLGSKSFPFVKMFITKMISSLPIEADKYRVALAQYSDKLHSEFHLSTFKGRSPMLNHLRKNFGFIGGSLQIGKALQEAHRTYFSAPANGRDKKQFPPILVVLASSESEDNVEEASKALRKDGVKIISVGVQKASEENLKAMATSQFHFNLRTVRDLSMFSQNMTHIIKDVIKYKEGAVDDIFVEACQGPSMADVVFLLDMSINGSEENFDYLKGFLEESVSALDIKENCMRVGLVAYSNETKVINSLSMGINKSEVLQHIQNLSPRTGKAYTGAAIKKLRKEVFSARNGSRKNQGVPQIAVLVTHRDSEDNVTKAAVNLRREGVTIFTLGIEGASDTQLEKIASHPAEQYVSKLKTFADLAAHNQTFLKKLRNQITHTVSVFSERTETLKSGCVDTEEADIYLLIDGSGSTQATDFHEMKTFLSEVVGMFNIAPHKVRVGAVQYADSWDLEFEINKYSNKQDLGKAIENIRQMGGNTNTGAALNFTLSLLQKAKKQRGNKVPCHLVVLTNGMSKDSILEPANRLREEHIRVYAIGIKEANQTQLREIAGEEKRVYYVHDFDALKDIRNQVVQEICTEEACKEMKADIMFLVDSSGSIGPENFSKMKTFMKNLVSKSQIGPDRVQIGVVQFSDINKEEFQLNRFMSQSDISNAIDQMAHIGQTTLTGSALSFVSQYFSPTKGARPNIRKFLILITDGEAQDIVKEPAVVLRQEGVIIYSVGVFGSNVTQLEEISGRPEMVFYVENFDILQRIEDDLVFGICSPREECKRIEVLDVVFVIDSSGSIDYDEYNIMKDFMIGLVKKADVGKNQVRFGALKYADDPEVLFYLDDFGTKLEVISVLQNDQAMGGSTYTAEALGFSDHMFTEARGSRLNKGVPQVLIVITDGESHDADKLNATAKALRDKGILVLAVGIDGANPVELLAMAGSSDKYFFVETFGGLKGIFSDVTASVCNSSKVDCEIDKVDLVFLMDGSTSIQPNDFKKMKEFLASVVQDFDVSLNRVRIGAAQFSDTYHPEFPLGTFIGEKEISFQIENIKQIFGNTHIGAALREVEHYFRPDMGSRINTGTPQVLLVLTDGQSQDEVAQAAEALRHRGIDIYSVGIGDVDDQQLIQITGTAEKKLTVHNFDELKKVNKRIVRNICTTAGESNCFVDVVVGFDVSTQEKGQTLLEGQPWMETYLQDILRAISSLNGVSCEVGTETQVSVAFQVTNAMEKYSPKFEIYSENILNSLKDITVKGPSLLNANLLDSLWDTFQNKSAARGKVVLLFSDGLDDDVEKLEQKSDELRKEGLNALITVALDGPADSSDLADLPYIEFGKGFEYRTQLSIGMRELGSRLSKQLVNVAERTCCCLFCKCIGGDGTMGDPGPPGKRGPPGFKGSEGYLGEEGIAGERGAPGPVGEQGTKGCYGTKGPKGNRGLNGQEGEVGENGIDGLNGEQGDNGLPGRKGEKGDEGSQGSPGKRGTPGDRGAKGLRGDPGAPGVDSSIEGPTGLKGERGRQGRRGWPGPPGTPGSRRKTAAHGRRGHTGPQGTAGIPGPDGLEGSLGLKGPQGPRGEAGVKGEKGGVGSKGPQGPPGPGGEAGNQGRLGSQGNKGEPGDLGEKGAVGFPGPRGLQGNDGSPGYGSVGRKGAKGQEGFPGESGPKGEIGDPGGPGETGLKGARGKMISAGLPGEMGSPGEPGPPGRKGVKGAKGLASFSTCELIQYVRDRSPGRHGKPECPVHPTELVFALDHSRDVTEQEFERMKEMMAFLVRDIKVRENSCPVGAHIAILSYNSHARHLVRFSDAYKKSQLLREIETIPYERSSASREIGRAMRFISRNVFKRTLPGAHTRKIATFFSSGQSADAHSITTAAMEFGALEIIPVVITFSNVPSVRRAFAIDDTGTFQVIVVPSGADYIPALERLQRCTFCYDVCKPDASCDQARPPPVQSYMDAAFLLDASRNMGSAEFEDIRAFLGALLDHFEITPEPETSVTGDRVALLSHAPPDFLPNTQKSPVRAEFNLTTYRSKRLMKRHVHESVKQLNGDAFIGHALQWTLDNVFLSTPNLRRNKVIFVISAGETSHLDGEILKKESLRAKCQGYALFVFSLGPIWDDKELEDLASHPLDHHLVQLGRIHKPDHSYGVKFVKSFINSIRRAINKYPPINLKIKCNRLNSIDPKQPPRPFRSFVPGPLKATLKEDVLQKAKFFQDKKYLSRVARSGRDDAIQNFMRSTSHTFKNGRMIESAPKQHD

SEQ ID NO: 7569 - protein, 1385 aa, Homo sapiens
MELSDSDRPVSFGSTSSSASSRDSHGSFGSRMTLVSNSHMGLFNQDKEVGAIKLELIPARPFSSSELQRDNPATGQQNADEGSERPPRAQWRVDSNGAPKTIADSATSPKLLYVDRVVQEILETERTYVQDLKSIVEDYLDCIRDQTKLPLGTEERSALFGNIQDIYHFNSELLQDLENCENDPVAIAECFVSKSEEFHIYTQYCTNYPRSVAVLTECMRNKILAKFFRERQETLKHSLPLGSYLLKPVQRILKYHLLLHEIENHLDKDTEGYDVVLDAIDTMQRVAWHINDMKRKHEHAVRLQEIQSLLTNWKGPDLTSYGELVLEGTFRIQRAKNERTLFLFDKLLLITKKRDDTFTYKAHILCGNLMLVEVIPKEPLSFSVFHYKNPKLQHTVQAKSQQDKRLWVLHLKRLILENHAAKIPAKAKQAILEMDAIHHPGFCYSPEGGTKALFGSKEGSAPYRLRRKSEPSSRSHKVLKTSETAQDIQKVSREEGSPQLSSARPSPAQRNSQPSSSTMISVLRAGGALRNIWTDHQIRQALFPSRRSPQENEDDEDDYQMFVPSFSSSDLNSTRLCEDSTSSRPCSWHMGQMESTETSSSGHRIVRRASSAGESNTCPPEIGTSDRTRELQNSPKTEGQEEMTPFGSSIELTIDDIDHVYDNISYEDLKLMVAKREEAESTPSKSARDSVRPKSTPELAFTKRQAGHSKGSLYAQTDGTLSGGEASSQSTHELQAVEENIYDTIGLPDPPSLGFKCSSLKRAKRSTFLGLEADFVCCDSLRPFVSQDSLQLSEDEAPYHQATPDHGYLSLLYDSPSGNLSMPHKPVSDKLSEEVDEIWNDLENYIKKNEDKARDRLLAAFPVSKDDVPDRLHAESTPELSRDVGRSVSTLSLPESQALLTPVKSRAGRASRANCPFEEDLISKEGSFMSLNRLSLASEMPLMDNPYDLANSGLSQTDPENPDLGMEATDKTKSRVFMMARQYSQKIKKANQLLKVKSLELEQPPASQHQKSMHKDLAAILEEKKQGGPAIGARIAEYSQLYDQIVFRESPLKIQKDGWASPQESSLLRSVSPSQVHHGSGDWLLHSTYSNGELADFCLPPEQDLRSRYPTFEINTKSTPRQLSAACSVPSLQTSDPLPGSVQRCSVVVSQPNKENWCQDHLYNSLGRKGISAKSQPYHRSQSSSSVLINKSMDSINYPSDVGKQQLLSLHRSSRCESHQDLLPDIADSHQQGTEKLSDLTLQDSQKVVVVNRNLPLNAQIATQNYFSNFKETDGDEDDYVEIKSEEDESELELSHNRRRKSDSKFVDADFSDNVCSGNTLHSLNSPRTPKKPVNSKLGLSPYLTPYNDSDKLNDYLWRGPSPNQQNIVQSLREKFQCLSSSSFA

SEQ ID NO: 7570 - protein, 690 aa, Homo sapiens
MKLSMKNNIINTQQSFVTMPNVIVPDIEKEIRRMENGACSSFSEDDDSASTSEESENENPHARGSFSYKSLRKGGPSQREQYLPGAIALFNVNNSSNKDQEPEEKKKKKKEKKSKSDDKNENKNDPEKKKKKKDKEKKKKEEKSKDKKEEEKKEVVVIDPSGNTYYNWLFCITLPVMYNWTMVIARACFDELQSDYLEYWLILDYVSDIVYLIDMFVRTRTGYLEQGLLVKEELKLINKYKSNLQFKLDVLSLIPTDLLYFKLGWNYPEIRLNRLLRFSRMFEFFQRTETRTNYPNIFRISNLVMYIVIIIHWNACVFYSISKAIGFGNDTWVYPDINDPEFGRLARKYVYSLYWSTLTLTTIGETPPPVRDSEYVFVVVDFLIGVLIFATIVGNIGSMISNMNAARAEFQARIDAIKQYMHFRNVSKDMEKRVIKWFDYLWTNKKTVDEKEVLKYLPDKLRAEIAINVHLDTLKKVRIFADCEAGLLVELVLKLQPQVYSPGDYICKKGDIGREMYIIKEGKLAVVADDGVTQFVVLSDGSYFGEISILNIKGSKAGNRRTANIKSIGYSDLFCLSKDDLMEALTEYPDAKTMLEEKGKQILMKDGLLDLNIANAGSDPKDLEEKVTRMEGSVDLLQTRFARILAEYESMQQKLKQRLTKVEKFLKPLIDTEFSSIEGPGAESGPIDST

SEQ ID NO: 7571 - protein, 852 aa, Homo sapiens
MRQVCCSALPPPPLEKGRCSSYSDSSSSSSERSSSSSSSSSESGSSSRSSSNNSSISRPAAPPEPRPQQQPQPRSPAARRAAARSRAAAAGGMRRDPAPGFSMLLFGVSLACYSPSLKSVQDQAYKAPVVVEGKVQGLVPAGGSSSNSTREPPASGRVALVKVLDKWPLRSGGLQREQVISVGSCVPLERNQRYIFFLEPTEQPLVFKTAFAPLDTNGKNLKKEVGKILCTDCATRPKLKKMKSQTGQVGEKQSLKCEAAAGNPQPSYRWFKDGKELNRSRDIRIKYGNGRKNSRLQFNKVKVEDAGEYVCEAENILGKDTVRGRLYVNSVSTTLSSWSGHARKCNETAKSYCVNGGVCYYIEGINQLSCKCPVGYTGDRCQQFAMVNFSKHLGFELKEAEELYQKRVLTITGICVALLVVGIVCVVAYCKTKKQRKQMHNHLRQNMCPAHQNRSLANGPSHPRLDPEEIQMADYISKNVPATDHVIRRETETTFSGSHSCSPSHHCSTATPTSSHRHESHTWSLERSESLTSDSQSGIMLSSVGTSKCNSPACVEARARRAAAYNLEERRRATAPPYHDSVDSLRDSPHSERYVSALTTPARLSPVDFHYSLATQVPTFEITSPNSAHAVSLPPAAPISYRLAEQQPLLRHPAPPGPGPGPGPGPGPGADMQRSYDSYYYPAAGPGPRRGTCALGGSLGSLPASPFRIPEDDEYETTQECAPPPPPRPRARGASRRTSAGPRRWRRSRLNGLAAQRARAARDSLSLSSGSGGGSASASDDDADDADGALAAESTPFLGLRGAHDALRSDSPPLCPAADSRTYYSLDSHSTRASSRHSRGPPPRAKQDSAPL

SEQ ID NO: 7572 - protein, 466 aa, Homo sapiens
MLENYRNLVSLGLTVSKPELISRLEQRQEPWNVKRHETIAKPPAMSSHYTEDLLPEQCMQDSFQKVILRRYGSCGLEDLHLRKDGENVGECKDQKEIYNGLNQCLSTLPSKIFPYNKCVKVFSKSSNLNRENIRHTTEKLFKCMQCGKVFKSHSGLSYHKIIHTEEKLCICEECGKTFKWFSYLTKHKRIHTGEKPYKCEECGKAFNWCSSLTKHKRIHTGEKPYKCEECGKAFHWCSPFVRHKKIHTGEKPYTCEDCGRAFNRHSHLTKHKTIHTGKKPYKCKECGKAFNHCSLLTIHERTHTGEKPYKCEECGKAFNSSSILTEHKVIHSGEKPYKCEKCDKVFKRFSYLTKHKRIHTGEKPYKCEECGKAFNWSSILTEHKRIHTGEKPYNCEECGKAFNRCSHLTRHKKIHTAVKRYKCEECGKAFKRCSHLNEHKRVQRGEKSCKYKKCGEAFNHCSNLTT

SEQ ID NO: 7573 - protein, 954 aa, Homo sapiens
MHSPGADGTQVSPGAHYCSPTGAGCPRPCADTPGPQPQPMDLRVGQRPPVEPPPEPTLLALQRPQRLHHHLFLAGLQQQRSVEPMRLSMDTPMPELQVGPQEQELRQLLHKDKSKRSAVASSVVKQKLAEVILKKQQAALERTVHPNSPGIPYRTLEPLETEGATRSMLSSFLPPVPSLPSDPPEHFPLRKTVSEPNLKLRYKPKKSLERRKNPLLRKESAPPSLRRRPAETLGDSSPSSSSTPASGCSSPNDSEHGPNPILGSEADSDRRTHPTLGPRGPILGSPHTPLFLPHGLEPEAGGTLPSRLQPILLLDPSGSHAPLLTVPGLGPLPFHFAQSLMTTERLSGSGLHWPLSRTRSEPLPPSATAPPPPGPMQPRLEQLKTHVQVIKRSAKPSEKPRLRQIPSAEDLETDGGGPGQVVDDGLEHRELGHGQPEARGPAPLQQHPQVLLWEQQRLAGRLPRGSTGDTVLLPLAQGGHRPLSRAQSSPAAPASLSAPEPASQARVLSSSETPARTLPFTTGLIYDSVMLKHQCSCGDNSRHPEHAGRIQSIWSRLQERGLRSQCECLRGRKASLEELQSVHSERHVLLYGTNPLSRLKLDNGKLAGLLAQRMFVMLPCGGVGVDTDTIWNELHSSNAARWAAGSVTDLAFKVASRELKNGFAVVRPPGHHADHSTAMGFCFFNSVAIACRQLQQQSKASKILIVDWDVHHGNGTQQTFYQDPSVLYISLHRHDDGNFFPGSGAVDEVGAGSGEGFNVNVAWAGGLDPPMGDPEYLAAFRIVVMPIAREFSPDLVLVSAGFDAAEGHPAPLGGYHVSAKCFGYMTQQLMNLAGGAVVLALEGGHDLTAICDASEACVAALLGNRVDPLSEEGWKQKPNLNAIRSLEAVIRVHSKYWGCMQRLASCPDSWVPRVPGADKEEVEAVTALASLSVGILAEDRPSEQLVEEEEPMNL

SEQ ID NO: 7574 - protein, 854 aa, Homo sapiens
MMAYSDTTMMSDDIDWLRSHRGVCKVDLYNPEGQQDQDRKVICFVDVSTLNVEDKDYKDAASSSSEGNLNLGSLEEKEIIVIKDTEKKDQSKTEGSVCLFKQAPSDPVSVLNWLLSDLQKYALGFQHALSPSTSTCKHKVGDTEGEYHRASSENCYSVYADQVNIDYLMNRPQNLRLEMTAAKNTNNNQSPSAPPAKPPSTQRAVISPDGECSIDDLSFYVNRLSSLVIQMAHKEIKEKLEGKSKCLHHSICPSPGNKERISPRTPASKIASEMAYEAVELTAAEMRGTGEESREGGQKSFLYSELSNKSKSGDKQMSQRESKEFADSISKGLMVYANQVASDMMVSLMKTLKVHSSGKPIPASVVLKRVLLRHTKEIVSDLIDSCMKNLHNITGVLMTDSDFVSAVKRNLFNQWKQNATDIMEAMLKRLVSALIGEEKETKSQSLSYASLKAGSHDPKCRNQSLEFSTMKAEMKERDKGKMKSDPCKSLTSAEKVGEHILKEGLTIWNQKQGNSCKVATKACSNKDEKGEKINASTDSLAKDLIVSALKLIQYHLTQQTKGKDTCEEDCPGSTMGYMAQSTQYEKCGGGQSAKALSVKQLESHRAPGPSTCQKENQHLDSQKMDMSNIVLMLIQKLLNENPFKCEDPCEGENKCSEPRASKAASMSNRSDKAEEQCQEHQELDCTSGMKQANGQFIDKLVESVMKLCLIMAKYSNDGAALAELEEQAASANKPNFRGTRCIHSGAMPQNYQDSLGHEVIVNNQCSTNSLQKQLQAVLQWIAASQFNVPMLYFMGDKDGQLEKLPQVSAKAAEKGYSVGGLLQEVMKFAKERQPDEAVGKVARKQLLDWLLANL

SEQ ID NO: 7575 - protein, 798 aa, Homo sapiens
MSFDPNLLHNNGHNGYPNGTSAALRETGVIEKLLTSYGFIQCSERQARLFFHCSQYNGNLQDLKVGDDVEFEVSSDRRTGKPIAVKLVKIKQEILPEERMNGQVVCAVPHNLESKSPAAPGQSPTGSVCYERNGEVFYLTYTPEDVEGNVQLETGDKINFVIDNNKHTGAVSARNIMLLKKKQARCQGVVCAMKEAFGFIERGDVVKEIFFHYSEFKGDLETLQPGDDVEFTIKDRNGKEVATDVRLLPQGTVIFEDISIEHFEGTVTKVIPKVPSKNQNDPLPGRIKVDFVIPKELPFGDKDTKSKVTLLEGDHVRFNISTDRRDKLERATNIEVLSNTFQFTNEAREMGVIAAMRDGFGFIKCVDRDVRMFFHFSEILDGNQLHIADEVEFTVVPDMLSAQRNHAIRIKKLPKGTVSFHSHSDHRFLGTVEKEATFSNPKTTSPNKGKEKEAEDGIIAYDDCGVKLTIAFQAKDVEGSTSPQIGDKVEFSISDKQRPGQQVATCVRLLGRNSNSKRLLGYVATLKDNFGFIETANHDKEIFFHYSEFSGDVDSLELGDMVEYSLSKGKGNKVSAEKVNKTHSVNGITEEADPTIYSGKVIRPLRSVDPTQTEYQGMIEIVEEGDMKGEVYPFGIVGMANKGDCLQKGESVKFQLCVLGQNAQTMAYNITPLRRATVECVKDQFGFINYEVGDSKKLFFHVKEVQDGIELQAGDEVEFSVILNQRTGKCSACNVWRVCEGPKAVAAPRPDRLVNRLKNITLDDASAPRLMVLRQPRGPDNSMGFGAERKIRQAGVID

SEQ ID NO: 7576 - protein, 494 aa, Homo sapiens
MATEAQSEGEVPARESGRSDAICSFVICNDSSLRGQPIIFNPDFFVEKLRHEKPEIFTELVVSNITRLIDLPGTELAQLMGEVDLKLPGGAGPASGFFRSLMSLKRKEKGVIFGSPLTEEGIAQIYQLIEYLHKNLRVEGLFRVPGNSVRQQILRDALNNGTDIDLESGEFHSNDVATLLKMFLGELPEPLLTHKHFNAHLKIADLMQFDDKGNKTNIPDKDRQIEALQLLFLILPPPNRNLLKLLLDLLYQTAKKQDKNKMSAYNLALMFAPHVLWPKNVTANDLQENITKLNSGMAFMIKHSQKLFKAPAYIRECARLHYLGSRTQASKDDLDLIASCHTKSFQLAKSQKRNRVDSCPHQEETQHHTEEALRELFQHVHDMPESAKKKQLIRQFNKQSLTQTPGREPSTSQVQKRARSRSFSGLIKRKVLGNQMMSEKKKKNPTPESVAIGELKGTSKENRNLLFSGSPAVTMTPTRLKWSEGKKEGKKGFL

SEQ ID NO: 7577 - protein, 2578 aa, Homo sapiens
MPVTEKDLAEDAPWKKIQQNTFTRWCNEHLKCVNKRIGNLQTDLSDGLRLIALLEVLSQKRMYRKYHQRPTFRQMQLENVSVALEFLDRESIKLVSIDSKAIVDGNLKLILGLVWTLILHYSISMPVWEDEGDDDAKKQTPKQRLLGWIQNKIPYLPITNFNQNWQDGKALGALVDSCAPGLCPDWESWDPQKPVDNAREAMQQADDWLGVPQVITPEEIIHPDVDEHSVMTYLSQFPKAKLKPGAPLKPKLNPKKARAYGRGIEPTGNMVKQPAKFTVDTISAGQGDVMVFVEDPEGNKEEAQVTPDSDKNKTYSVEYLPKVTGLHKVTVLFAGQHISKSPFEVSVDKAQGDASKVTAKGPGLEAVGNIANKPTYFDIYTAGAGVGDIGVEVEDPQGKNTVELLVEDKGNQVYRCVYKPMQPGPHVVKIFFAGDTIPKSPFVVQVGEACNPNACRASGRGLQPKGVRIRETTDFKVDTKAAGSGELGVTMKGPKGLEELVKQKDFLDGVYAFEYYPSTPGRYSIAITWGGHHIPKSPFEVQVGPEAGMQKVRAWGPGLHGGIVGRSADFVVESIGSEVGSLGFAIEGPSQAKIEYNDQNDGSCDVKYWPKEPGEYAVHIMCDDEDIKDSPYMAFIHPATGGYNPDLVRAYGPGLEKSGCIVNNLAEFTVDPKDAGKAPLKIFAQDGEGQRIDIQMKNRMDGTYACSYTPVKAIKHTIAVVWGGVNIPHSPYRVNIGQGSHPQKVKVFGPGVERSGLKANEPTHFTVDCTEAGEGDVSVGIKCDARVLSEDEEDVDFDIIHNANDTFTVKYVPPAAGRYTIKVLFASQEIPASPFRVKVDPSHDASKVKAEGPGLSKAGVENGKPTHFTVYTKGAGKAPLNVQFNSPLPGDAVKDLDIIDNYDYSHTVKYTPTQQGNMQVLVTYGGDPIPKSPFTVGVAAPLDLSKIKLNGLENRVEVGKDQEFTVDTRGAGGQGKLDVTILSPSRKVVPCLVTPVTGRENSTAKFIPREEGLYAVDVTYDGHPVPGSPYTVEASLPPDPSKVKAHGPGLEGGLVGKPAEFTIDTKGAGTGGLGLTVEGPCEAKIECSDNGDGTCSVSYLPTKPGEYFVNILFEEVHIPGSPFKADIEMPFDPSKVVASGPGLEHGKVGEAGLLSVDCSEAGPGALGLEAVSDSGTKAEVSIQNNKDGTYAVTYVPLTAGMYTLTMKYGGELVPHFPARVKVEPAVDTSRIKVFGPGIEGKDVFREATTDFTVDSRPLTQVGGDHIKAHIANPSGASTECFVTDNADGTYQVEYTPFEKGLHVVEVTYDDVPIPNSPFKVAVTEGCQPSRVQAQGPGLKEAFTNKPNVFTVVTRGAGIGGLGITVEGPSESKINCRDNKDGSCSAEYIPFAPGDYDVNITYGGAHIPGSPFRVPVKDVVDPSKVKIAGPGLGSGVRARVLQSFTVDSSKAGLAPLEVRVLGPRGLVEPVNVVDNGDGTHTVTYTPSQEGPYMVSVKYADEEIPRSPFKVKVLPTYDASKVTASGPGLSSYGVPASLPVDFAIDARDAGEGLLAVQITDQEGKPKRAIVHDNKDGTYAVTYIPDKTGRYMIGVTYGGDDIPLSPYRIRATQTGDASKCLATGPGIASTVKTGEEVGFVVDAKTAGKGKVTCTVLTPDGTEAEADVIENEDGTYDIFYTAAKPGTYVIYVRFGGVDIPNSPFTVMVTEEAYVPVSDMNGLGFKPFDLVIPFAVRKGEITGEVHMPSGKTATPEIVDNKDGTVTVRYAPTEVGLHEMHIKYMGSHIPESPLQFYVNYPNSGSVSAYGPGLVYGVANKTATFTIVTEDAGEGGLDLAIEGPSKAEISCIDNKDGTCTVTYLPTLPGDYSILVKYNDKHIPGSPFTAKITDDSRRCSQVKLGSAADFLLDISETDLSSLTASIKAPSGRDEPCLLKRLPNNHIGISFIPREVGEHLVSIKKNGNHVANSPVSIMVVQSEIGDARRAKVYGRGLSEGRTFEMSDFIVDTRDAGYGGISLAVEGPSKVDIQTEDLEDGTCKVSYFPTVPGVYIVSTKFADEHVPGSPFTVKISGEGRVKESITRTSRAPSVATVGSICDLNLKIPEINSSDMSAHVTSPSGRVTEAEIVPMGKNSHCVRFVPQEMGVHTVSVKYRGQHVTGSPFQFTVGPLGEGGAHKVRAGGPGLERGEAGVPAEFSIWTREAGAGGLSIAVEGPSKAEITFDDHKNGSCGVSYIAQEPGNYEVSIKFNDEHIPESPYLVPVIAPSDDARRLTVMSLQESGLKVNQPASFAIRLNGAKGKIDAKVHSPSGAVEECHVSELEPDKYAVRFIPHENGVHTIDVKFNGSHVVGSPFKVRVGEPGQAGNPALVSAYGTGLEGGTTGIQSEFFINTTRAGPGTLSVTIEGPSKVKMDCQETPEGYKVMYTPMAPGNYLISVKYGGPNHIVGSPFKAKVTGQRLVSPGSANETSSILVESVTRSSTETCYSAIPKASSDASKVTSKGAGLSKAFVGQKSSFLVDCSKAGSNMLLIGVHGPTTPCEEVSMKHVGNQQYNVTYVVKERGDYVLAVKWGEEHIPGSPFHVTVP

SEQ ID NO: 7578 - protein, 4022 aa, Homo sapiens
MLESYVTPILMSYVNRYIKNLKPSDLQLSLWGGDVVLSKLELKLDVLEQELKLPFTFLSGHIHELRIHVPWTKLGSEPVVITINTMECILKLKDGIQDDHESCGSNSTNRSTAESTKSSIKPRRMQQAAPTDPDLPPGYVQSLIRRVVNNVNIVINNLILKYVEDDIVLSVNITSAECYTVGELWDRAFMDISATDLVLRKVINFSDCTVCLDKRNASGKIEFYQDPLLYKCSFRTRLHFTYENLNSKMPSVIKIHTLVESLKLSITDQQLPMFIRIMQLGIALYYGEIGNFKEGEIEDLTCHNKDMLGNITGSEDETRIDMQYPAQHKGQELYSQQDEEQPQGWVSWAWSFVPAIVSYDDGEEDFVGNDPASTMHQQKAQTLKDPIVSIGFYCTKATVTFKLTEMQVESSYYSPQKVKSKEVLCWEQEGTTVEALMMGEPFFDCQIGFVGCRAMCLKGIMGVKDFEENMNRSETEACFFICGDNLSTKGFTYLTNSLFDYRSPENNGTRAEFILDSTHHKETYTEIAGMQRFGAFYMDYLYTMENTSGKGSTNQQDFSSGKSEDLGTVQEKSTKSLVIGPLDFRLDSSAVHRILKMIVCALEHEYEPYSRLKSDIKDENETILNPEEVALLEEYIPTRHTSVTLLKCTCTISMAEFNLLDHLLPVIMGEKNSSNFMNTTNFQSLRPLPSIRILVDKINLEHSVPMYAEQLVHVVSSLTQPSDNLLHYCYVHCYLKIFGFQAGLTSLDCSGSYCLPVPVIPSFSTALYGKLLKLPTCWTKRSQIAITEGIFELPNLTIQATRAQTLLLQAIYQSWSHLGNVSSSAVIEALINEIFLSIGVKSKNPLPTLEGSIQNVELKYCSTSLVKCASGTMGSIKICAKAPVDSGKEKLIPLLQGPSDTKDLHSTKWLNESRKPESLLAPDLMAFTIQVPQYIDYCHNSGAVLLCSIQGLAVNIDPILYTWLIYQPQKRTSRHMQQQPVVAVPLVMPVCRRKEDEVSIGSAPLAKQQSYQASEYASSPVKTKTVTESRPLSVPVKAMLNISESCRSPEERMKEFIGIVWNAVKHLTLQLEVQSCCVFIPNDSLPSPSTIVSGDIPGTVRSWYHGQTSMPGTLVLCLPQIKIISAGHKYMEPLQEIPFVIPRPILEEGDAFPWTISLHNFSIYTLLGKQVTLCLVEPMGCTSTLAVTSQKLLATGPDTRHSFVVCLHVDLESLEIKCSNPQVQLFYELTDIMNKVWNKIQKRGNLNLSPTSPETMAGPVPTSPVRSSIGTAPPDTSTCSPSADIGTTTEGDSIQAGEESPFSDSVTLEQTTSNIGGTSGRVSLWMQWVLPKITIKLFAPDPENKGTEVCMVSELEDLSASIDVQDVYTKVKCKIESFNIDHYRSSLGEECWSLGQCGGVFLSCTDKLNRRTLLVRPISKQDPFSNCSGFFPSTTTKLLDGTHQQHGFLSLTYTKAVTKNVRHKLTSRNERRSFHKLSEGLMDGSPHFLHEILLSAQAFDIVLYFPLLNAIASIFQAKLPKTQKEKRKSPGQPMRTHTLTSRNLPLIYVNTSVIRIFIPKTEEMQPTVEANQAAKEDTVVLKIGSVAMAPQADNPLGRSVLRKDIYQRALNLGILRDPGSEIEDRQYQIDLQSINIGTAQWHQLKPEKESVSGGVVTETERNSQNPALEWNMASSIRRHQERRAILTPVLTDFSVRITGAPAVIFTKVVSPENLHTEEILVCGHSLEVNITTNLDFFLSVAQVQLLHQLIVANMTGLEPSNKAAEISKQEQKKVDIFDGGMAETSSRYSGAQDSGIGSDSVKIRIVQIEQHSGASQHRIARPSRQSSIVKNLNFIPFDIFITASRISLMTYSCMALSKSKSQEQKNNEKTDKSSLNLPEVDSDVAKPNQACISTVTAEDLLRSSISFPSGKKIGVLSLESLHASTRSSARQALGITIVRQPGRRGTGDLQLEPFLYFIVSQPSLLLSCHHRKQRVEVSIFDAVLKGVASDYKCIDPGKTLPEALDYCTVWLQTVPGEIDSKSGIPPSFITLQIKDFLNGPADVNLDISKPLKANLSFTKLDQINLFLKKIKNAHSLAHSEETSAMSNTMVNKDDLPVSKYYRGKLSKPKIHGDGVQKISAQENMWRAVSCFQKISVQTTQIVISMETVPHTSKPCLLASLSNLNGSLSVKATQKVPGIILGSSFLLSINDFLLKTSLKERSRILIGPCCATANLEAKWCKHSGNPGPEQSIPKISIDLRGGLLQVFWGQEHLNCLVLLHELLNGYLNEEGNFEVQVSEPVPQMSSPVEKNQTFKSEQSSDDLRTGLFQYVQDAESLKLPGVYEVLFYNETEDCPGMMLWRYPEPRVLTLVRITPVPFNTTEDPDISTADLGDVLQVPCSLEYWDELQKVFVAFREFNLSESKVCELQLPDINLVNDQKKLVSSDLWRIVLNSSQNGADDQSSASESGSQSTCDPLVTPTALAACTRVDSCFTPWFVPSLCVSFQFAHLEFHLCHHLDQLGTAAPQYLQPFVSDRNMPSELEYMIVSFREPHMYLRQWNNGSVCQEIQFLAQADCKLLECRNVTMQSVVKPFSIFGQMAVSSDVVEKLLDCTVIVDSVFVNLGQHVVHSLNTAIQAWQQNKCPEVEELVFSHFVICNDTQETLRFGQVDTDENILLASLHSHQYSWRSHKSPQLLHICIEGWGNWRWSEPFSVDHAGTFIRTIQYRGRTASLIIKVQQLNGVQKQIIICGRQIICSYLSQSIELKVVQHYIGQDGQAVVREHFDCLTAKQKLPSYILENNELTELCVKAKGDEDWSRDVCLESKAPEYSIVIQVPSSNSSIIYVWCTVLTLEPNSQVQQRMIVFSPLFIMRSHLPDPIIIHLEKRSLGLSETQIIPGKGQEKPLQNIEPDLVHHLTFQAREEYDPSDCAVPISTSLIKQIATKVHPGGTVNQILDEFYGPEKSLQPIWPYNKKDSDRNEQLSQWDSPMRVKLSIWKPYVRTLLIELLPWALLINESKWDLWLFEGEKIVLQVPAGKIIIPPNFQEAFQIGIYWANTNTVHKSVAIKLVHNLTSPKWKDGGNGEVVTLDEEAFVDTEIRLGAFPGHQKLCQFCISSMVQQGIQIIQIEDKTTIINNTPYQIFYKPQLSVCNPHSGKEYFRVPDSATFSICPGGEQPAMKSSSLPCWDLMPDISQSVLDASLLQKQIMLGFSPAPGADSSQCWSLPAIVRPEFPRQSVAVPLGNFRENGFCTRAIVLTYQEHLGVTYLTLSEDPSPRVIIHNRCPVKMLIKENIKDIPKFEVYCKKIPSECSIHHELYHQISSYPDCKTKDLLPSLLLRVEPLDEVTTEWSDAIDINSQGTQVVFLTGFGYVYVDVVHQCGTVFITVAPEGKAGPILTNTNRAPEKIVTFKMFITQLSLAVFDDLTHHKASAELLRLTLDNIFLCVAPGAGPLPGEEPVAALFELYCVEICCGDLQLDNQLYNKSNFHFAVLVCQGEKAEPIQCSKMQSLLISNKELEEYKEKCFIKLCITLNEGKSILCDINEFSFELKPARLYVEDTFVYYIKTLFDTYLPNSRLAGHSTHLSGGKQVLPMQVTQHARALVNPVKLRKLVIQPVNLLVSIHASLKLYIASDHTPLSFSVFERGPIFTTARQLVHALAMHYAAGALFRAGWVVGSLDILGSPASLVRSIGNGVADFFRLPYEGLTRGPGAFVSGVSRGTTSFVKHISKGTLTSITNLATSLARNMDRLSLDEEHYNRQEEWRRQLPESLGEGLRQGLSRLGISLLGAIAGIVDQPMQNFQKTSEAQASAGHKAKGVISGVGKGIMGVFTKPIGGAAELVSQTGYGILHGAGLSQLPKQRHQPSDLHADQAPNSHVKYVWKMLQSLGRPEVHMALDVVLVRGSGQEHEGCLLLTSEVLFVVSVSEDTQQQAFPVTEIDCAQDSKQNNLLTVQLKQPRVACDVEVDGVRERLSEQQYNRLVDYITKTSCHLAPSCSSMQIPCPVVAAEPPPSTVKTYHYLVDPHFAQVFLSKFTMVKNKALRKGFP

SEQ ID NO: 7579 - protein, 1782 aa, Homo sapiens
MTSLKRSQTERPLATDRASVVGTDGTPKVHTDDFYMRRFRSQNGSLGSSVMAPVGPPRSEGSHHITSTPGVPKMGVRARIADWPPRKENIKESSRSSQEIETSSCLDSLSSKSSPVSQGSSVSLNSNDSAMLKSIQNTLKNKTRPSENMDSRFLMPEAYPSSPRKALRRIRQRSNSDITISELDVDSFDECISPTYKTGPSLHREYGSTSSIDKQGTSGESFFDLLKGYKDDKSDRGPTPTKLSDFLITGGGKGSGFSLDVIDGPISQRENLRLFKEREKPLKRRSKSETGDSSIFRKLRNAKGEELGKSSDLEDNRSEDSVRPWTCPKCFAHYDVQSILFDLNEAIMNRHNVIKRRNTTTGASAAAVASLVSGPLSHSASFSSPMGSTEDLNSKGSLSMDQGDDKSNELVMSCPYFRNEIGGEGERKISLSKSNSGSFSGCESASFESTLSSHCTNAGVAVLEVPKENLVLHLDRVKRYIVEHVDLGAYYYRKFFYQKEHWNYFGADENLGPVAVSIRREKPDEMKENGSPYNYRIIFRTSELMTLRGSVLEDAIPSTAKHSTARGLPLKEVLEHVVPELNVQCLRLAFNTPKVTEQLMKLDEQGLNYQQKVGIMYCKAGQSTEEEMYNNESAGPAFEEFLQLLGERVRLKGFEKYRAQLDTKTDSTGTHSLYTTYKDYEIMFHVSTMLPYTPNNKQQLLRKRHIGNDIVTIVFQEPGAQPFSPKNIRSHFQHVFVIVRVHNPCSDSVCYSVAVTRSRDVPSFGPPIPKGVTFPKSNVFRDFLLAKVINAENAAHKSEKFRAMATRTRQEYLKDLAEKNVTNTPIDPSGKFPFISLASKKKEKSKPYPGAELSSMGAIVWAVRAEDYNKAMELDCLLGISNEFIVLIEQETKSVVFNCSCRDVIGWTSTDTSLKIFYERGECVSVGSFINIEEIKEIVKRLQFVSKGCESVEMTLRRNGLGQLGFHVNYEGIVADVEPYGYAWQAGLRQGSRLVEICKVAVATLSHEQMIDLLRTSVTVKVVIIPPHDDCTPRRSCSETYRMPVMEYKMNEGVSYEFKFPFRNNNKWQRNASKGPHSPQVPSQVQSPMTSRLNAGKGDGKMPPPERAANIPRSISSDGRPLERRLSPGSDIYVTVSSMALARSQCRNSPSNLSSSSDTGSVGGTYRQKSMPEGFGVSRRSPASIDRQNTQSDIGGSGKSTPSWQRSEDSIADQMEPTCHLPAVSKVLPAFRESPSGRLMRQDPVVHLSPNKQGHSDSHYSSHSSSNTLSSNASSAHSDEKWYDGDRTESELNSYNYLQGTSADSGIDTTSYGPSHGSTASLGAATSSPRSGPGKEKVAPLWHSSSEVISMADRTLETESHGLDRKTESSLSLDIHSKSQAGSTPLTRENSTFSINDAASHTSTMSSRHSASPVVFTSARSSPKEELHPAAPSQLAPSFSSSSSSSSGPRSFYPRQGATSKYLIGWKKPEGTINSVGFMDTRKRHQSDGNEIAHTRLRASTRDLRASPKPTSKSTIEEDLKKLIDLESPTPESQKSFKFHALSSPQSPFPSTPTSRRALHRTLSDESIYNSQREHFFTSRASLLDQALPNDVLFSSTYPSLPKSLPLRRPSYTLGMKSLHGEFSASDSSLTDIQETRRQPMPDPGLMPLPDTAADLDWSNLVDAAKAYEVQRASFFAASDENHRPLSAASNSDQLEDQALAQMKPYSSKDSSPTLASKVDQLEGMLKMLREDLKKEKEDKAHLQAEVQHLREDNLRLQEESQNASDKLKKFTEWVFNTIDMS

SEQ ID NO: 7580 - protein, 203 aa, Homo sapiens
MPKAPKGKSAGREKKVIHPYSRKAAQITREAHKQEKKEKLKNEKALRLNLVGEKLQWFQNHLDPQKKRYSKKDACELIERYLNRFSSELEQIELHNSIRDRQGRRHCSRETVIKQTMERERQQFEGYGLEIPDILNASNLKTFREWDFDLKKLPNIKMRKICANDAIPKTCKRKTIITVDQDLGELELNDESSDSDEEMTAVA

SEQ ID NO: 7581 - protein, 981 aa, Homo sapiens
MASPTSTNPAHAHFESFLQAQLCQDVLSSFQELCGALGLEPGGGLPQYHKIKDQLNYWSAKSLWTKLDKRAGQPVYQQGRACTSTKCLVVGAGPCGLRVAVELALLGARVVLVEKRTKFSRHNVLHLWPFTIHDLRALGAKKFYGRFCTGTLDHISIRQLQLLLLKVALLLGVEIHWGVTFTGLQPPPRKGSGWRAQLQPNPPAQLANYEFDVLISAAGGKFVPEGFKVREMRGKLAIGITANFVNGRTVEETQVPEISGVARIYNQSFFQSLLKATGIDLENIVYYKDDTHYFVMTAKKQCLLRLGVLRQPFWPLGTGVARGFLAAFDAAWMVKRWAEGAESLEVLAERESLYQLLSQTSPENMHRNVAQYGLDPATRYPNLNLRAVTPNQVRDLYDVLAKEPVQRNNDKTDTGMPATGSAGTQEELLRWCQEQTAGYPGVHVSDLSSSWADGLALCALVYRLQPGLLEPSELQGLGALEATAWALKVAENELGITPVVSAQAVVAGSDPLGLIAYLSHFHSAFKSMAHSPGPVSQASPGTSSAVLFLSKLQRTLQRSRAKENAEDAGGKKLRLEMEAETPSTEVPPDPEPGVPLTPPSQHQEAGAGDLCALCGEHLYVLERLCVNGHFFHRSCFRCHTCEATLWPGGYEQHPGDGHFYCLQHLPQTDHKAEGSDRGPESPELPTPSENSMPPGLSTPTASQEGAGPVPDPSQPTRRQIRLSSPERQRLSSLNLTPDPEMEPPPKPPRSCSALARHALESSFVGWGLPVQSPQALVAMEKEEKESPFSSEEEEEDVPLDSDVEQALQTFAKTSGTMNNYPTWRRTLLRRAKEEEMKRFCKAQTIQRRLNEIEAALRELEAEGVKLELALRRQSSSPEQQKKLWVGQLLQLVDKKNSLVAEEAELMITVQELNLEEKQWQLDQELRGYMNREENLKTAADRQAEDQVLRKLVDLVNQRDALIRFQEERRLSELALGTGAQG

SEQ ID NO: 7582 - protein, 327 aa, Homo sapiens
MQRNAMYLKNVAETACNFQLTQYQISHANQKPYECQICGKPFRKRAHLTQHNRIHTGGKPYECKECGKVFICCSTLIQHKRTHTSEKPYECLECRKTFRRSAHLIRHQRIHTGEKPYKCKQCWKAFASVSDLIDIGKFTLMRDFTNVQNVGRHLTIAQLLFSIREFTLVRSPLNVRNVAKHSIIAQHLLNTRELILMRNLMNVRNVKRLLGKVHILLNIKEFILVRNHMSVSNVGRLSLVFLILIDIREFTLVKNPMNVKNVVELLTIVQLLFNTREFTLVRRLMNISSVGRFLSPVQHLFNIREHILMKNLMNVSNARRPSSIMHI

SEQ ID NO: 7583 - protein, 2347 aa, Homo sapiens
MTEGARAADEVRVPLGAPPPGPAALVGASPESPGAPGREAERGSELGVSPSESPAAERGAELGADEEQRVPYPALAATVFFCLGQTTRPRSWCLRLVCNPWFEHVSMLVIMLNCVTLGMFRPCEDVECGSERCNILEAFDAFIFAFFAVEMVIKMVALGLFGQKCYLGDTWNRLDFFIVVAGMMEYSLDGHNVSLSAIRTVRVLRPLRAINRVPSMRILVTLLLDTLPMLGNVLLLCFFVFFIFGIVGVQLWAGLLRNRCFLDSAFVRNNNLTFLRPYYQTEEGEENPFICSSRRDNGMQKCSHIPGRRELRMPCTLGWEAYTQPQAEGVGAARNACINWNQYYNVCRSGDSNPHNGAINFDNIGYAWIAIFQVITLEGWVDIMYYVMDAHSFYNFIYFILLIIVGSFFMINLCLVVIATQFSETKQRESQLMREQRARHLSNDSTLASFSEPGSCYEELLKYVGHIFRKVKRRSLRLYARWQSRWRKKVDPSAVQGQGPGHRQRRAGRHTASVHHLVYHHHHHHHHHYHFSHGSPRRPGPEPGACDTRLVRAGAPPSPPSPGRGPPDAESVHSIYHADCHIEGPQERARVAHAAATAAASLRLATGLGTMNYPTILPSGVGSGKGSTSPGPKGKWAGGPPGTGGHGPLSLNSPDPYEKIPHVVGEHGLGQAPGHLSGLSVPCPLPSPPAGTLTCELKSCPYCTRALEDPEGELSGSESGDSDGRGVYEFTQDVRHGDRWDPTRPPRATDTPGPGPGSPQRRAQQRAAPGEPGWMGRLWVTFSGKLRRIVDSKYFSRGIMMAILVNTLSMGVEYHEQPEELTNALEISNIVFTSMFALEMLLKLLACGPLGYIRNPYNIFDGIIVVISVWEIVGQADGGLSVLRTFRLLRVLKLVRFLPALRRQLVVLVKTMDNVATFCTLLMLFIFIFSILGMHLFGCKFSLKTDTGDTVPDRKNFDSLLWAIVTVFQILTQEDWNVVLYNGMASTSSWAALYFVALMTFGNYVLFNLLVAILVEGFQAEGDANRSDTDEDKTSVHFEEDFHKLRELQTTELKMCSLAVTPNGHLEGRGSLSPPLIMCTAATPMPTPKSSPFLDAAPSLPDSRRGSSSSGDPPLGDQKPPASLRSSPCAPWGPSGAWSSRRSSWSSLGRAPSLKRRGQCGERESLLSGEGKGSTDDEAEDGRAAPGPRATPLRRAESLDPRPLRPAALPPTKCRDRDGQVVALPSDFFLRIDSHREDAAELDDDSEDSCCLRLHKVLEPYKPQWCRSREAWALYLFSPQNRFRVSCQKVITHKMFDHVVLVFIFLNCVTIALERPDIDPGSTERVFLSVSNYIFTAIFVAEMMVKVVALGLLSGEHAYLQSSWNLLDGLLVLVSLVDIVVAMASAGGAKILGVLRVLRLLRTLRPLRVISRAPGLKLVVETLISSLRPIGNIVLICCAFFIIFGILGVQLFKGKFYYCEGPDTRNISTKAQCRAAHYRWVRRKYNFDNLGQALMSLFVLSSKDGWVNIMYDGLDAVGVDQQPVQNHNPWMLLYFISFLLIVSFFVLNMFVGVVVENFHKCRQHQEAEEARRREEKRLRRLERRRRKAQRRPYYADYSPTRRSIHSLCTSHYLDLFITFIICVNVITMSMEHYNQPKSLDEALKYCNYVFTIVFVFEAALKLVAFGFRRFFKDRWNQLDLAIVLLSLMGITLEEIEMSAALPINPTIIRIMRVLRIARVLKLLKMATGMRALLDTVVQALPQVGNLGLLFMLLFFIYAALGVELFGRLECSEDNPCEGLSRHATFSNFGMAFLTLFRVSTGDNWNGIMKDTLRECSREDKHCLSYLPALSPVYFVTFVLVAQFVLVNVVVAVLMKHLEESNKEAREDAELDAEIELEMAQGPGSARRVDADRPPLPQESPGARDAPNLVARKVSVSRMLSLPNDSYMFRPVVPASAPHPRPLQEVEMETYGAGTPLGSVASVHSPPAESCASLQIPLAVSSPARSGEPLHALSPRGTARSPSLSRLLCRQEAVHTDSLEGKIDSPRDTLDPAEPGEKTPVRPVTQGGSLQSPPRSPRPASVRTRKHTFGQRCVSSRPAAPGGEEAEASDPADEEVSHITSSACPWQPTAEPHGPEASPVAGGERDLRRLYSVDAQGFLDKPGRADEQWRPSAELGSGEPGEAKAWGPEAEPALGARRKKKMSPPCISVEPPAEDEGSARPSAAEGGSTTLRRRTPSCEATPHRDSLEPTEGSGAGGDPAAKGERWGQASCRAEHLTVPSFAFEPLDLGVPSGDPFLDGSHSVTPESRASSSGAIVPLEPPESEPPMPVGDPPEKRRGLYLTVPQCPLEKPGSPSATPAPGGGADDPV

SEQ ID NO: 7584 - protein, 789 aa, Homo sapiens
MAATTANPEMTSDVPSLGPAIASGNSGPGIQGGGAIVQRAIKRRPGLDFDDDGEGNSKFLRCDDDQMSNDKERFARSDDEQSSADKERLARENHSEIERRRRNKMTAYITELSDMVPTCSALARKPDKLTILRMAVSHMKSLRGTGNTSTDGSYKPSFLTDQELKHLILEAADGFLFIVSCETGRVVYVSDSVTPVLNQPQSEWFGSTLYDQVHPDDVDKLREQLSTSENALTGRILDLKTGTVKKEGQQSSMRMCMGSRRSFICRMRCGSSSVDPVSVNRLSFVRNRCRNGLGSVKDGEPHFVVVHCTGYIKAWPPAGVSLPDDDPEAGQGSKFCLVAIGRLQVTSSPNCTDMSNVCQPTEFISRHNIEGIFTFVDHRCVATVGYQPQELLGKNIVEFCHPEDQQLLRDSFQQVVKLKGQVLSVMFRFRSKNQEWLWMRTSSFTFQNPYSDEIEYIICTNTNVKNSSQEPRPTLSNTIQRPQLGPTANLPLEMGSGQLAPRQQQQQTELDMVPGRDGLASYNHSQVVQPVTTTGPEHSKPLEKSDGLFAQDRDPRFSEIYHNINADQSKGISSSTVPATQQLFSQGNTFPPTPRPAENFRNSGLAPPVTIVQPSASAGQMLAQISRHSNPTQGATPTWTPTTRSGFSAQQVATQATAKTRTSQFGVGSFQTPSSFSSMSLPGAPTASPGAAAYPSLTNRGSNFAPETGQTAGQFQTRTAEGVGVWPQWQGQQPHHRSSSSEQHVQQPPAQQPGQPEVFQEMLSMLGDQSNSYNNEEFPDLTMFPPFSE

SEQ ID NO: 7585 - protein, 742 aa, Homo sapiens
MGGRVFLAFCVWLTLPGAETQDSRGCARWCPQNSSCVNATACRCNPGFSSFSEIITTPTETCDDINECATPSKVSCGKFSDCWNTEGSYDCVCSPGYEPVSGAKTFKNESENTCQDVDECSSGQHQCDSSTVCFNTVGSYSCRCRPGWKPRHGIPNNQKDTVCEDMTFSTWTPPPGVHSQTLSRFFDKVQDLGRDSKTSSAEVTIQNVIKLVDELMEAPGDVEALAPPVRHLIATQLLSNLEDIMRILAKSLPKGPFTYISPSNTELTLMIQERGDKNVTMGQSSARMKLNWAVAAGAEDPGPAVAGILSIQNMTTLLANASLNLHSKKQAELEEIYESSIRGVQLRRLSAVNSIFLSHNNTKELNSPILFAFSHLESSDGEAGRDPPAKDVMPGPRQELLCAFWKSDSDRGGHWATEGCQVLGSKNGSTTCQCSHLSSFAILMAHYDVEDWKLTLITRVGLALSLFCLLLCILTFLLVRPIQGSRTTIHLHLCICLFVGSTIFLAGIENEGGQVGLRCRLVAGLLHYCFLAAFCWMSLEGLELYFLVVRVFQGQGLSTRWLCLIGYGVPLLIVGVSAAIYSKGYGRPRYCWLDFEQGFLWSFLGPVTFIILCNAVIFVTTVWKLTQKFSEINPDMKKLKKARALTITAIAQLFLLGCTWVFGLFIFDDRSLVLTYVFTILNCLQGAFLYLLHCLLNKKVREEYRKWACLVAGGSKYSEFTSTTSGTGHNQTRALRASESGI

SEQ ID NO: 7586 - protein, 2603 aa, Homo sapiens
MEKATVPVAAATAAEGEGSPPAVAAVAGPPAAAEVGGGVGGSSRARSASSPRGMVRVCDLLLKKKPPQQQHHKAKRNRTCRPPSSSESSSDSDNSGGGGGGGGGGGGGGGTSSNNSEEEEDDDDEEEEVSEVESFILDQDDLENPMLETASKLLLSGTADGADLRTVDPETQARLEALLEAAGIGKLSTADGKAFADPEVLRRLTSSVSCALDEAAAALTRMRAESTANAGQSDNRSLAEACSEGDVNAVRKLLIEGRSVNEHTEEGESLLCLACSAGYYELAQVLLAMHANVEDRGIKGDITPLMAAANGGHVKIVKLLLAHKADVNAQSSTGNTALTYACAGGYVDVVKVLLESGASIEDHNENGHTPLMEAGSAGHVEVARLLLENGAGINTHSNEFKESALTLACYKGHLEMVRFLLEAGADQEHKTDEMHTALMEACMDGHVEVARLLLDSGAQVNMPADSFESPLTLAACGGHVELAALLIERGASLEEVNDEGYTPLMEAAREGHEEMVALLLGQGANINAQTEETQETALTLACCGGFLEVADFLIKAGADIELGCSTPLMEAAQEGHLELVKYLLAAGANVHATTATGDTALTYACENGHTDVADVLLQAGADLEHESEGGRTPLMKAARAGHVCTVQFLISKGANVNRTTANNDHTVLSLACAGGHLAVVELLLAHGADPTHRLKDGSTMLIEAAKGGHTSVVCYLLDYPNNLLSAPPPDVTQLTPPSHDLNRAPRVPVQALPMVVPPQEPDKPPANVATTLPIRNKAASKQKSSSHLPANSQDVQGYITNQSPESIVEEAQGKLTELEQRIKEAIEKNAQLQSLELAHADQLTKEKIEELNKTREEQIQKKQKILEELQKVERELQLKTQQQLKKQYLEVKAQRIQLQQQQQQSCQHLGLLTPVGVGEQLSEGDYARLQQVDPVLLKDEPQQTAAQMGFAPIQPLAMPQALPLAAGPLPPGSIANLTELQGVIVGQPVLGQAQLAGLGQGILTETQQGLMVASPAQTLNDTLDDIMAAVSGRASAMSNTPTHSIAASISQPQTPTPSPIISPSAMLPIYPAIDIDAQTESNHDTALTLACAGGHEELVQTLLERGASIEHRDKKGFTPLILAATAGHVGVVEILLDNGADIEAQSERTKDTPLSLACSGGRQEVVELLLARGANKEHRNVSDYTPLSLAASGGYVNIIKILLNAGAEINSRTGSKLGISPLMLAAMNGHTAAVKLLLDMGSDINAQIETNRNTALTLACFQGRTEVVSLLLDRKANVEHRAKTGLTPLMEAASGGYAEVGRVLLDKGADVNAPPVPSSRDTALTIAADKGHYKFCELLIGRGAHIDVRNKKGNTPLWLAANGGHLDVVQLLVQAGADVDAADNRKITPLMAAFRKGHVKVVRYLVKEVNQFPSDSECMRYIATITDKEMLKKCHLCMESIVQAKDRQAAEANKNASILLEELDLEKLREESRRLALAAKREKRKEKRRKKKEEQRRKLEEIEAKNKENFELQAAQEKEKLKVEDEPEVLTEPPSATTTTTIGISATWTTLAGSHGKRNNTITTTSSKRKNRKNKITPENVQIIFDDPLPISYSQPEKVNGESKSSSTSESGDSDNMRISSCSDESSNSNSSRKSDNHSPAVVTTTVSSKKQPSVLVTFPKEERKSVSGKASIKLSETISEGTSNSLSTCTKSGPSPLSSPNGKLTVASPKRGQKREEGWKEVVRRSKKVSVPSTVISRVIGRGGCNINAIREFTGAHIDIDKQKDKTGDRIITIRGGTESTRQATQLINALIKDPDKEIDELIPKNRLKSSSANSKIGSSAPTTTAANTSLMGIKMTTVALSSTSQTATALTVPAISSASTHKTIKNPVNNVRPGFPVSLPLAYPPPQFAHALLAAQTFQQIRPPRLPMTHFGGTFPPAQSTWGPFPVRPLSPARATNSPKPHMVPRHSNQNSSGSQVNSAGSLTSSPTTTTSSSASTVPGTSTNGSPSSPSVRRQLFVTVVKTSNATTTTVTTTASNNNTAPTNATYPMPTAKEHYPVSSPSSPSPPAQPGGVSRNSPLDCGSASPNKVASSSEQEAGSPPVVETTNTRPPNSSSSSGSSSAHSNQQQPPGSVSQEPRPPLQQSQVPPPEVRMTVPPLATSSAPVAVPSTAPVTYPMPQTPMGCPQPTPKMETPAIRPPPHGTTAPHKNSASVQNSSVAVLSVNHIKRPHSVPSSVQLPSTLSTQSACQNSVHPANKPIAPNFSAPLPFGPFSTLFENSPTSAHAFWGGSVVSSQSTPESMLSGKSSYLPNSDPLHQSDTSKAPGFRPPLQRPAPSPSGIVNMDSPYGSVTPSSTHLGNFASNISGGQMYGPGAPLGGAPAAANFNRQHFSPLSLLTPCSSASNDSSAQSVSSGVRAPSPAPSSVPLGSEKPSNVSQDRKVPVPIGTERSARIRQTGTSAPSVIGSNLSTSVGHSGIWSFEGIGGNQDKVDWCNPGMGNPMIHRPMSDPGVFSQHQAMERDSTGIVTPSGTFHQHVPAGYMDFPKVGGMPFSVYGNAMIPPVAPIPDGAGGPIFNGPHAADPSWNSLIKMVSSSTENNGPQTVWTGPWAPHMNSVHMNQLG

SEQ ID NO: 7587 - protein, 78 aa, Homo sapiens
MYGKIIFVLLLSGIVSISASSTTGVAMHTSTSSSVTKSYISSQTNGITLINWWAMARVIFEVMLVVVGMIILISYCIR

SEQ ID NO: 7588 - protein, 363 aa, Homo sapiens
MAPEATKNFLPLLDAVSRDFVSVLHRRIKKAGSGNYSGDISDDLFRFAFESITNVIFGERQGMLEEVVNPEAQRFIDAIYQMFHTSVPMLNLPPDLFRLFRTKTWKDHVAAWDVIFSKADIYTQNFYWELRQKGSVHHDYRGILYRLLGDSKMSFEDIKANVTEMLAGGVDTTSMTLQWHLYEMARNLKVQDMLRAEVLAARHQAQGDMATMLQLVPLLKASIKETLRLHPISVTLQRYLVNDLVLRDYMIPAKTLVQVAIYALGREPTFFFDPENFDPTRWLSKDKNITYFRNLGFGWGVRQCLGRRIAELEMTIFLINMLENFRVEIQHLSDVGTTFNLILMPEKPISFTFWPFNQEATQQ

SEQ ID NO: 7589 - protein, 309 aa, Homo sapiens
MDISEGNKTLVTEFVLTGLTDRPWLHVLFFVVFLVVYLITMVGNLGLIVLIWNDPHLHMPMYLFLGGLAFSDACTSTSITPRMLVNFLDKTAMISLAECITQFYFFASSATTECFLLVMMAYDRYVAICNPLLYPVMMSNKLSAQLLSISYVIGFLHPLVHVSLLLRLTFCRFNIIHYFYCEILQLFKISCNGPSINALMIFIFGAFIQIPTLMTIIISYTRVLFDILKKKSEKGRSKAFSTCGAHLLSVSLYYGTLIFMYVRPASGLAEDQDKVYSLFYTIIIPLLNPFIYSLRNKKVMHALRRVIRK

SEQ ID NO: 7590 - protein, 1330 aa, Homo sapiens
MEDGGLTAFEEDQRCLSQSLPLPVSAEGPAAQTTAEPSRSFSSAHRHLSRRNGLSRLCQSRTALSEDRWSSYCLSSLAAQNICTSKLHCPAAPEHTDPSEPRGSVSCCSLLRGLSSGWSSPLLPAPVCNPNKAIFTVDAKTTEILVANDKACGLLGYSSQDLIGQKLTQFFLRSDSDVVEALSEEHMEADGHAAVVFGTVVDIISRSGEKIPVSVWMKRMRQERRLCCVVVLEPVERVSTWVAFQSDGTVTSCDSLFAHLHGYVSGEDVAGQHITDLIPSVQLPPSGQHIPKNLKIQRSVGRARDGTTFPLSLKLKSQPSSEEATTGEAAPVSGYRASVWVFCTISGLITLLPDGTIHGINHSFALTLFGYGKTELLGKNITFLIPGFYSYMDLAYNSSLQLPDLASCLDVGNESGCGERTLDPWQGQDPAEGGQDPRINVVLAGGHVVPRDEIRKLMESQDIFTGTQTELIAGGQLLSCLSPQPAPGVDNVPEGSLPVHGEQALPKDQQITALGREEPVAIESPGQDLLGESRSEPVDVKPFASCEDSEAPVPAEDGGSDAGMCGLCQKAQLERMGVSGPSGSDLWAGAAVAKPQAKGQLAGGSLLMHCPCYGSEWGLWWRSQDLAPSPSGMAGLSFGTPTLDEPWLGVENDREELQTCLIKEQLSQLSLAGALDVPHAELVPTECQAVTAPVSSCDLGGRDLCGGCTGSSSACYALATDLPGGLEAVEAQEVDVNSFSWNLKELFFSDQTDQTSSNCSCATSELRETPSSLAVGSDPDVGSLQEQGSCVLDDRELLLLTGTCVDLGQGRRFRESCVGHDPTEPLEVCLVSSEHYAASDRESPGHVPSTLDAGPEDTCPSAEEPRLNVQVTSTPVIVMRGAAGLQREIQEGAYSGSCYHRDGLRLSIQFEVRRVELQGPTPLFCCWLVKDLLHSQRDSAARTRLFLASLPGSTHSTAAELTGPSLVEVLRARPWFEEPPKAVELEGLAACEGEYSQKYSTMSPLGSGAFGFVWTAVDKEKNKEVVVKFIKKEKVLEDCWIEDPKLGKVTLEIAILSRVEHANIIKVLDIFENQGFFQLVMEKHGSGLDLFAFIDRHPRLDEPLASYIFRQVRAGQSRLVSAVGYLRLKDIIHRDIKDENIVIAEDFTIKLIDFGSAAYLERGKLFYTFCGTIEYCAPEVLMGNPYRGPELEMWSLGVTLYTLVFEENPFCELEETVEAAIHPPYLVSKELMSLVSGLLQPVPERRTTLEKLVTDPWVTQPVNLADYTWEEVFRVNKPESGVLSAASLEMGNRSLSDVAQAQELCGGPVPGEAPNGQGCLHPGDPRLLTS

SEQ ID NO: 7591 - protein, 911 aa, Homo sapiens
MKKASRSVGSVPKVSAISKTQTAEKIKPENSSSASTGGKLVKPGTAASLSKTKSSDDLLAGMAGGVTVTNGVKGKKSTCPSAAPSASAPAMTTVENKSKISTGTASSTKRSTSTGNKESSSTRERLRERTRLNQSKKLPSAGQGANDMALAKRSRSRTATECDVRMSKSKSDNQISDRAALEAKVKDLLTLAKTKDVEILHLRNELRDMRAQLGINEDHSEGDEKSEKETIMAHQPTDVESTLLQLQEQNTAIREELNQLKNENRMLKDRLNALGFSLEQRLDNSEKLFGYQSLSPEITPGNQSDGGGTLTSSVEGSAPGSVEDLLSQDENTLMDHQHSNSMDNLDSECSEVYQPLTSSDDALDAPSSSESEGIPSIERSRKGSSGNASEVSVACLTERIHQMEENQHSTSEELQATLQELADLQQITQELNSENERLGEEKVILMESLCQQSDKLEHFSRQIEYFRSLLDEHHISYVIDEDVKSGRYMELEQRYMDLAENARFEREQLLGVQQHLSNTLKMAEQDNKEAQEMIGALKERSHHMERIIESEQKGKAALAATLEEYKATVASDQIEMNRLKAQLENEKQKVAELYSIHNSGDKSDIQDLLESVRLDKEKAETLASSLQEDLAHTRNDANRLQDAIAKVEDEYRAFQEEAKKQIEDLNMTLEKLRSDLDEKETERSDMKETIFELEDEVEQHRAVKLHDNLIISDLENTVKKLQDQKHDMEREIKTLHRRLREESAEWRQFQADLQTAVVIANDIKSEAQEEIGDLKRRLHEAQEKNEKLTKELEEIKSRKQEEERGRVYNYMNAVERDLAALRQGMGLSRRSSTSSEPTPTVKTLIKSFDSASQVPNPAAAAIPRTPLSPSPMKTPPAAAVSPMQMESSSVAHAGMQWRDLGSLQPLPPGFK

SEQ ID NO: 7592 - protein, 1040 aa, Homo sapiens
MPLGRQSHRHHRTHGQKHRRRGRGKGASQGEEGLEALAHDTPSQRVQFILGTEEDEEHVPHELFTELDEICMKEGEDAEWKETARWLKFEEDVEDGGERWSKPYVATLSLHSLFELRSCLINGTVLLDMHANSIEEISDLILDQQELSSDLNDSMRVKVREALLKKHHHQNEKKRNNLIPIVRSFAEVGKKQSDPHLMDKHGQTVSPQSVPTTNLEVKNGVNCEHSPVDLSKVDLHFMKKIPTGAEASNVLVGEVDILDRPIVAFVRLSPAVLLSGLTEVPIPTRFLFILLGPVGKGQQYHEIGRSMATIMTDEIFHDVAYKAKERDDLLAGIDEFLDQVTVLPPGEWDPSIRIEPPKNVPSQEKRKMPGVPNGNVCHIEQEPHGGHSGPELQRTGRLFGGLVLDIKRKAPWYWSDYRDALSLQCLASFLFLYCACMSPVITFGGLLGEATEGRISAIESLFGASMTGIAYSLFAGQALTILGSTGPVLVFEKILFKFCKDYALSYLSLRACIGLWTAFLCIVLVATDASSLVCYITRFTEEAFASLICIIFIYEAIEKLIHLAETYPIHMHSQLDHLSLYYCRCTLPENPNNHTLQYWKDHNIVTAEVHWANLTVSECQEMHGEFMGSACGHHGPYTPDVLFWSCILFFTTFILSSTLKTFKTSRYFPTRVRSMVSDFAVFLTIFTMVIIDFLIGVPSPKLQVPSVFKPTRDDRGWIINPIGPNPWWTVIAAIIPALLCTILIFMDQQITAVIINRKEHKLKKGCGYHLDLLMVAIMLGVCSIMGLPWFVAATVLSITHVNSLKLESECSAPGEQPKFLGIREQRVTGLMIFVLMGCSVFMTAILKFIPMPVLYGVFLYMGVSSLQGIQFFDRLKLFGMPAKHQPDFIYLRHVPLRKVHLFTLIQLTCLVLLWVIKASPAAIVFPMMVLALVFVRKVMDLCFSKRELSWLDDLMPESKKKKLDDAKKKAKEEEEAEKMLEIGGDKFPLESRKLLSSPGKNISCRCDPSEINISDEMPKTTVWKALSMNSGNAKEKSLFN

SEQ ID NO: 7593 - protein, 793 aa, Homo sapiens
MLRGGRRGQLGWHSWAAGPGSLLAWLILASAGAAPCPDACCPHGSSGLRCTRDGALDSLHHLPGAENLTELYIENQQHLQHLELRDLRGLGELRNLTIVKSGLRFVAPDAFHFTPRLSRLNLSFNALESLSWKTVQGLSLQELVLSGNPLHCSCALRWLQRWEEEGLGGVPEQKLQCHGQGPLAHMPNASCGVPTLKVQVPNASVDVGDDVLLRCQVEGRGLEQAGWILTELEQSATVMKSGGLPSLGLTLANVTSDLNRKNVTCWAENDVGRAEVSVQVNVSFPASVQLHTAVEMHHWCIPFSVDGQPAPSLRWLFNGSVLNETSFIFTEFLEPAANETVRHGCLRLNQPTHVNNGNYTLLAANPFGQASASIMAAFMDNPFEFNPEDPIPDTNSTSGDPVEKKDETPFGVSVAVGLAVFACLFLSTLLLVLNKCGRRNKFGINRPAVLAPEDGLAMSLHFMTLGGSSLSPTEGKGSGLQGHIIENPQYFSDASPSGVHHIKRRDIVLKWELGEGAFGKVFLAECHNLLPEQDKMLVAVKALKEASESARQDFQREAELLTMLQHQHIVRFFGVCTEGRPLLMVFEYMRHGDLNRFLRSHGPDAKLLAGGEDVAPGPLGLGQLLAVASQVAAGMVYLAGLHFVHRDLATRNCLVGQGLVVKIGDFGMSRDIYSTDYYRVGGRTMLPIRWMPPESILYRKFTTESDVWSFGVVLWEIFTYGKQPWYQLSNTEAIDCITQGRELERPRACPPEVYAIMRGCWQREPQQRHSIKDVHARLQALAQAPPVYLDVLG

SEQ ID NO: 7594 - protein, 305 aa, Homo sapiens
MGYKLQDLTDVQIMARLQEESLRQDYASTSASVSRHSSSVSLSSGKKGTCSDQEYDQYSLEDEEEFDHLPPPQPRLPRCSPFQRGIPHSQTFSSIRECRRSPSSQYFPSNNYQQQQYYSPQAQTPDQQPNRTNGDKLRRSMPNLARMPSTTAISSNISSPVTVRNSQSFDSSLHGAGNGISRIQSCIPSPGQLQHRVHSVGHFPVSIRQPLKATAYVSPTVQGSSNMPLSNGLQLYSNTGIPTPNKAAASGIMGRSALPRPSLAINGSNLPRSKIAQPVRSFLQPPKPLSSLSTLRDGNWRDGCY

SEQ ID NO: 7595 - protein, 1019 aa, Homo sapiens
MKVKEEKAGVGKLDHTNHRRRFPDQKGSPAAEQLQDILGEEDEAPNPTLFTEMDTLQHDGDQMEWKESARWIKFEEKVEEGGERWSKPHVSTLSLHSLFELRTCLQTGTVLLDLDSGSLPQIIDDVIEKQIEDGLLRPELRERVSYVLLRRHRHQTKKPIHRSLADIGKSVSTTNRSPARSPGAGPSLHHSTEDLRMRQSANYGRLCHAQSRSMNDISLTPNTDQRKNKFMKKIPKDSEASNVLVGEVDFLDQPFIAFVRLIQSAMLGGVTEVPVPTRFLFILLGPSGRAKSYNEIGRAIATLMVDDLFSDVAYKARNREDLIAGIDEFLDEVIVLPPGEWDPNIRIEPPKKVPSADKRKSVFSLAELGQMNGSVGGGGGAPGGGNGGGGGGGSGGGAGSGGAGGTSSGDDGEMPAMHEIGEELIWTGRFFGGLCLDIKRKLPWFPSDFYDGFHIQSISAILFIYLGCITNAITFGGLLGDATDNYQGVMESFLGTAMAGSLFCLFSGQPLIILSSTGPILIFEKLLFDFSKGNGLDYMEFRLWIGLHSAVQCLILVATDASFIIKYITRFTEEGFSTLISFIFIYDAIKKMIGAFKYYPINMDFKPNFITTYKCECVAPDTVNTTVFNASAPLAPDTNASLYNLLNLTALDWSLLSKKECLSYGGRLLGNSCKFIPDLALMSFILFFGTYSMTLTLKKFKFSRYFPTKPTRPDRGWFVAPFGKNPWWVYPASILPALLVTILIFMDQQITAVIVNRKENKLKKAAGYHLDLFWVGILMALCSFMGLPWYVAATVISIAHIDSLKMETETSAPGEQPQFLGVREQRVTGIIVFILTGISVFLAPILKCIPLPVLYGVFLYMGVASLNGIQFWERCKLFLMPAKHQPDHAFLRHVPLRRIHLFTLVQILCLAVLWILKSTVAAIIFPVMILGLIIVRRLLDFIFSQHDLAWIDNILPEKEKKETDKKRKRKKGAHEDCDEEPQFPPPSVIKIPMESVQSDPQNGIHCIARKRSSSWSYSL

SEQ ID NO: 7596 - protein, 1942 aa, Homo sapiens
MEDRRAEKSCEQACESLKRQDYEMALKHCTEALLSLGQYSMADFTGPCPLEIERIKIESLLYRIASFLQLKNYVQADEDCRHVLGEGLAKGEDAFRAVLCCMQLKGKLQPVSTILAKSLTGESLNGMVTKDLTRLKTLLSETETATSNALSGYHVEDLDEGSCNGWHFRPPPRGITSSEEYTLCKRFLEQGICRYGAQCTSAHSQEELAEWQKRYASRLIKLKQQNENKQLSGSYMETLIEKWMNSLSPEKVLSECIEGVKVEHNPDLSVTVSTKKSHQTWTFALTCKPARMLYRVALLYDAHRPHFSIIAISAGDSTTQVSQEVPENCQEWIGGKMAQNGLDHYVYKVGIAFNTEIFGTFRQTIVFDFGLEPVLMQRVMIDAASTEDLEYLMHAKQQLVTTAKRWDSSSKTIIDFEPNETTDLEKSLLIRYQIPLSADQLFTQSVLDKSLTKSNYQSRLHDLLYIEEIAQYKEISKFNLKVQLQILASFMLTGVSGGAKYAQNGQLFGRFKLTETLSEDTLAGRLVMTKVNAVYLLPVPKQKLVQTQGTKEKVYEATIEEKTKEYIFLRLSRECCEELNLRPDCDTQVELQFQLNRLPLCEMHYALDRIKDNGVLFPDISMTPTIPWSPNRQWDEQLDPRLNAKQKEAVLAITTPLAIQLPPVLIIGPYGTGKTFTLAQAVKHILQQQETRILICTHSNSAADLYIKDYLHPYVEAGNPQARPLRVYFRNRWVKTVHPVVHQYCLISSAHSTFQMPQKEDILKHRVVVVTLNTSQYLCQLDLEPGFFTHILLDEAAQAMECETIMPLALATQNTRIVLAGDHMQLSPFVYSEFARERNLHVSLLDRLYEHYPAEFPCRILLCENYRSHEAIINYTSELFYEGKLMASGKQPAHKDFYPLTFFTARGEDVQEKNSTAFYNNAEVFEVVERVEELRRKWPVAWGKLDDGSIGVVTPYADQVFRIRAELRKKRLSDVNVERVLNVQGKQFRVLFLSTVRTRHTCKHKQTPIKKKEQLLEDSTEDLDYGFLSNYKLLNTAITRAQSLVAVVGDPIALCSIGRCRKFWERFIALCHENSSLHGITFEQIKAQLEALELKKTYVLNPLAPEFIPRALRLQHSGSTNKQQQSPPKGKSLHHTQNDHFQNDGIVQPNPSVLIGNPIRAYTPPPPLGPHPNLGKSPSPVQRIDPHTGTSILYVPAVYGGNVVMSVPLPVPWTGYQGRFAVDPRIITHQAAMAYNMNLLQTHGRGSPIPYGLGHHPPVTIGQPQNQHQEKDQHEQNRNGKSDTNNSGPEINKIRTPEKKPTEPKQVDLESNPQNRSPESRPSVVYPSTKFPRKDNLNPRHINLPLPAPHAQYAIPNRHFHPLPQLPRPPFPIPQQHTLLNQQQNNLPEQPNQIPPQPNQVVQQQSQLNQQPQQPPPQLSPAYQAGPNNAFFNSAVAHRPQSPPAEAVIPEQQPPPMLQEGHSPLRAIAQPGPILPSHLNSFIDENPSGLPIGEALDRIHGSVALETLRQQQARFQQWSEHHAFLSQGSAPYPHHHHPHLQHLPQPPLGLHQPPVRADWKLTSSAEDEVETTYSRFQDLIRELSHRDQSETRELAEMPPPQSRLLQYRQVQSRSPPAVPSPPSSTDHSSHFSNFNDNSRDIEVASNPAFPQRLPPQIFNSPFSLPSEHLAPPPLKYLAPDGAWTFANLQQNHLMGPGFPYGLPPLPHRPPQNPFVQIQNHQHAIGQEPFHPLSSRTVSSSSLPSLEEYEPRGPGRPLYQRRISSSSVQPCSEEVSTPQDSLAQCKELQDHSNQSSFNFSSPESWVNTTSSTPYQNIPCNGSSRTAQPRELIAPPKTVKPPEDQLKSENLEVSSSFNYSVLQHLGQFPPLMPNKQIAESANSSSPQSSAGGKPAMSYASALRAPPKPRPPPEQAKKSSDPLSLFQELSLGSSSGSNGFYSYFK

SEQ ID NO: 7597 - protein, 933 aa, Homo sapiens
MDDSEVESTASILASVKEQEAQFEKLTRALEEERRHVSAQLERVRVSPQDANPLMANGTLTRRHQNGRFVGDADLERQKFSDLKLNGPQDHSHLLYSTIPRMQEPGQIVETYTEEDPEGAMSVVSVETSDDGTTRRTETTVKKVVKTVTTRTVQPVAMGPDGLPVDASSVSNNYIQTLGRDFRKNGNGGPGPYVGQAGTATLPRNFHYPPDGYSRHYEDGYPGGSDNYGSLSRVTRIEERYRPSMEGYRAPSRQDVYGPQPQVRVGGSSVDLHRFHPEPYGLEDDQRSMGYDDLDYGMMSDYGTARRTGTPSDPRRRLRSYEDMIGEEVPSDQYYWAPLAQHERGSLASLDSLRKGGPPPPNWRQPELPEVIAMLGFRLDAVKSNAAAYLQHLCYRNDKVKTDVRKLKGIPVLVGLLDHPKKEVHLGACGALKNISFGRDQDNKIAIKNCDGVPALVRLLRKARDMDLTEVITGTLWNLSSHDSIKMEIVDHALHALTDEVIIPHSGWEREPNEDCKPRHIEWESVLTNTAGCLRNVSSERSEARRKLRECDGLVDALIFIVQAEIGQKDSDSKLVENCVCLLRNLSYQVHREIPQAERYQEAAPNVANNTGPHAASCFGAKKGKGKKPIEDPANDTVDFPKRTSPARGYELLFQPEVVRIYISLLKESKTPAILEASAGAIQNLCAGRWTYGRYIRSALRQEKALSAIADLLTNEHERVVKAASGALRNLAVDARNKELIGKHAIPNLVKNLPGGQQNSSWNFSEDTVISILNTINEVIAENLEAAKKLRETQGIEKLVLINKSGNRSEKEVRAAALVLQTIWGYKELRKPLEKEGWKKSDFQVNLNNASRSQSSHSYDDSTLPLIDRNQKSDKKPDREEIQMSNMGSNTKSLDNNYSTPNERGDHNRTLDRSGDLGDMEPLKGTTPLMQKI

SEQ ID NO: 7598 - protein, 799 aa, Homo sapiens
MEIPKLLPARGTLQGGGGGGIPAGGGRVHRGPDSPAGQVPTRRLLLPRGPQDGGPGRRREEASTASRGPGPSLFAPRPHQPSGGGDDFFLVLLDPVGGDVETAGSGQAAGPVLREEAKAGPGLQGDESGANPAGCSAQGPHCLSAVPTPAPISAPGPAAAFAGTVTIHNQDLLLRFENGVLTLATPPPHAWEPGAAPAQQPRCLIAPQAGFPQAAHPGDCPELRSDLLLAEPAEPAPAPAPQEEAEGLAAALGPRGLLGSGPGVVLYLCPEALCGQTFAKKHQLKMHLLTHSSSQGQRPFKCPLGGCGWTFTTSYKLKRHLQSHDKLRPFGCPAEGCGKSFTTVYNLKAHMKGHEQENSFKCEVCEESFPTQAKLGAHQRSHFEPERPYQCAFSGCKKTFITVSALFSHNRAHFREQELFSCSFPGCSKQYDKACRLKIHLRSHTGERPFLCDFDGCGWNFTSMSKLLRHKRKHDDDRRFMCPVEGCGKSFTRAEHLKGHSITHLGTKPFVCPVAGCCARFSARSSLYIHSKKHLQDVDTWKSRCPISSCNKLFTSKHSMKTHMVKRHKVGQDLLAQLEAANSLTPSSELTSQRQNDLSDAEIVSLFSDVPDSTSAALLDTALVNSGILTIDVASVSSTLAGHLPANNNNSVGQAVDPPSLMATSDPPQSLDTSLFFGTAATGFQQSSLNMDEVSSVSVGPLGSLDSLAMKNSSPEPQALTPSSKLTVDTDTLTPSSTLCENSVSELLTPAKAEWSVHPNSDFFGQEGETQFGFPNAAGNHGSQKERNLITVTGSSFLV

SEQ ID NO: 7599 - protein, 531 aa, Homo sapiens
MCPKGYEDSMEFPDHSRHLLQCLSEQRHQGFLCDCTVLVGDAQFRAHRAVLASCSMYFHLFYKDQLDKRDIVHLNSDIVTAPAFALLLEFMYEGKLQFKDLPIEDVLAAASYLHMYDIVKVCKKKLKEKATTEADSTKKEEDASSCSDKVESLSDGSSHIAGDLPSDEDEGEDEKLNILPSKRDLAAEPGNMWMRLPSDSAGIPQAGGEAEPHATAAGKTVASPCSSTESLSQRSVTSVRDSADVDCVLDLSVKSSLSGVENLNSSYFSSQDVLRSNLVQVKVEKEASCDESDVGTNDYDMEHSTVKESVSTNNRVQYEPAHLAPLREDSVLRELDREDKASDDEMMTPESERVQVEGGMESSLLPYVSNILSPAGQIFMCPLCNKVFPSPHILQIHLSTHFREQDGIRSKPAADVNVPTCSLCGKTFSCMYTLKRHERTHSGEKPYTCTQCGKSFQYSHNLSRHAVVHTREKPHACKWCERRFTQSGDLYRHIRKFHCELVNSLSVKSEALSLPTVRDWTLEDSSQELWK

SEQ ID NO: 7600 - protein, 503 aa, Homo sapiens
MATTVTCTRFTDEYQLYEDIGKGAFSVVRRCVKLCTGHEYAAKIINTKKLSARDHQKLEREARICRLLKHSNIVRLHDSISEEGFHYLVFDLVTGGELFEDIVAREYYSEADASHCIQQILEAVLHCHQMGVVHRDLKPENLLLASKCKGAAVKLADFGLAIEVQGDQQAWFGFAGTPGYLSPEVLRKEAYGKPVDIWACGVILYILLVGYPPFWDEDQHKLYQQIKAGAYDFPSPEWDTVTPEAKNLINQMLTINPAKRITAHEALKHPWVCQRSTVASMMHRQETVECLKKFNARRKLKGAILTTMLATRNFSAAKSLLNKKADGVKPQTNSTKNSAAATSPKGTLPPAALESSDSANTTIEDEDAKARKQEIIKTTEQLIEAVNNGDFEAYAKICDPGLTSFEPEALGNLVEGMDFHRFYFENLLAKNSKPIHTTILNPHVHVIGEDAACIAYIRLTQYIDGQGRPRTSQSEETRVWHRRDGKWQNVHFHCSGAPVAPLQ

SEQ ID NO: 7601 - protein, 419 aa, Homo sapiens
MAAPPARADADPSPTSPPTARDTPGRQAEKSETACEDRSNAESLDRLLPPVGTGRSPRKRTTSQCKSEPPLLRTSKRTIYTAGRPPWYNEHGTQSKEAFAIGLGGGSASGKTTVARMIIEALDVPWVVLLSMDSFYKVLTEQQQEQAAHNNFNFDHPDAFDFDLIISTLKKLKQGKSVKVPIYDFTTHSRKKDWKTLYGANVIIFEGIMAFADKTLLELLDMKIFVDTDSDIRLVRRLRRDISERGRDIEGVIKQYNKFVKPSFDQYIQPTMRLADIVVPRGSGNTVAIDLIVQHVHSQLEEGCAGLGTPVPPAAPDAERPEEHAAGTGHAHHHQVRAHLGTGRPRARAPAQLLAPQGQGDQSRRVHLLLQETDAAAHRARALLPALSGLRRTDPAGAGLCGQVLCGEADHRCVHSARR

SEQ ID NO: 7602 - protein, 633 aa, Homo sapiens
MTEEACRTRSQKRALERDPTEDDVESKKIKMERGLLASDLNTDGDMRVTPEPGAGPTQGLLRATEATAMAMGRGEGLVGDGPVDMRTSHSDMKSERRPPSPDVIVLSDNEQPSSPRVNGLTTVALKETSTEALMKSSPEERERMIKQLKEELRLEEAKLVLLKKLRQSQIQKEATAQKPTGSVGSTVTTPPPLVRGTQNIPAGKPSLQTSSARMPGSVIPPPLVRGGQQASSKLGPQASSQVVMPPLVRGAQQIHSIRQHSSTGPPPLLLAPRASVPSVQIQGQRIIQQGLIRVANVPNTSLLVNIPQPTPASLKGTTATSAQANSTPTSVASVVTSAESPASRQAAAKLALRKQLEKTLLEIPPPKPPAPEMNFLPSAANNEFIYLVGLEEVVQNLLETQGRMSAATVLSREPYMCAQCKTDFTCRWREEKSGAIMCENCMTTNQKKALKVEHTSRLKAAFVKALQQEQEIEQRLLQQGTAPAQAKAEPTAAPHPVLKQVIKPRRKLAFRSGEARDWSNGAVLQASSQLSRGSATTPRGVLHTFSPSPKLQNSASATALVSRTGRHSERTVSAGKGSATSNWKKTPLSTGGTLAFVSPSLAVHKSSSAVDRQREYLLDMIPPRSIPQSATWK

SEQ ID NO: 7603 - protein, 724 aa, Homo sapiens
MSFPKAPLKRFNDPSGCAPSPGAYDVKTLEVLKGPVSFQKSQRFKQQKESKQNLNVDKDTTLPASARKVKSSESKESQKNDKDLKILEKEIRVLLQERGAQDRRIQDLETELEKMEARLNAALREKTSLSANNATLEKQLIELTRTNELLKSKFSENGNQKNLRILSLELMKLRNKRETKMRGMMAKQEGMEMKLQVTQRSLEESQGKIAQLEGKLVSIEKEKIDEKSETEKLLEYIEEISCASDQVEKYKLDIAQLEENLKEKNDEILSLKQSLEENIVILSKQVEDLNVKCQLLEKEKEDHVNRNREHNENLNAEMQNLKQKFILEQQEREKLQQKELQIDSLLQQEKELSSSLHQKLCSFQEEMVKEKNLFEEELKQTLDELDKLQQKEEQAERLVKQLEEEAKSRAEELKLLEEKLKGKEAELEKSSAAHTQATLLLQEKYDSMVQSLEDVTAQFESYKALTASEIEDLKLENSSLQEKAAKAGKNAEDVQHQILATESSNQEYVRMLLDLQTKSALKETEIKEITVSFLQKITDLQNQLKQQEEDFRKQLEDEEGRKAEKENTTAELTEEINKWRLLYEELYNKTKPFQLQLDAFEVEKQALLNEHGAAQEQLNKIRDSYAKLLGHQNLKQKIKHVVKLKDENSQLKSEVSKLRCQLAKKKQSETKLQEELNKVLGIKHFDPSKAFHHESKENFALKTPLKEGNTNCYRAPMECQESWK

SEQ ID NO: 7604 - protein, 1524 aa, Homo sapiens
MPLLHRKPFVRQKPPADLRPDEEVFYCKVTNEIFRHYDDFFERTILCNSLVWSCAVTGRPGLTYQEALESEKKARQNLQSFPEPLIIPVLYLTSLTHRSRLHEICDDIFAYVKDRYFVEETVEVIRNNGARLQCRILEVLPPSHQNGFANGHVNSVDGETIIISDSDDSETQSCSFQNGKKKDAIDPLLFKYKVQPTKKELHESAIVKATQISRRKHLFSRDKLKLFLKQHCEPQDGVIKIKASSLSTYKIAEQDFSYFFPDDPPTFIFSPANRRRGRPPKRIHISQEDNVANKQTLASYRSKATKERDKLLKQEEMKSLAFEKAKLKREKADALEAKKKEKEDKEKKREELKKIVEEERLKKKEEKERLKVEREKEREKLREEKRKYVEYLKQWSKPREDMECDDLKELPEPTPVKTRLPPEIFGDALMVLEFLNAFGELFDLQDEFPDGVTLEVLEEALVGNDSEGPLCELLFFFLTAIFQAIAEEEEEVAKEQLTDADTKGCSLKSLDLDSCTLSEILRLHILASGADVTSANAKYRYQKRGGFDATDDACMELRLSNPSLVKKLSSTSVYDLTPGEKMKILHALCGKLLTLVSTRDFIEDYVDILRQAKQEFRELKAEQHRKEREEAAARIRKRKEEKLKEQEQKMKEKQEKLKEDEQRNSTADISIGEEEREDFDTSIESKDTEQKELDQDMVTEDEDDPGSHKRGRRGKRGQNGFKEFTRQEQINCVTREPLTADEEEALKQEHQRKEKELLEKIQSAIACTNIFPLGRDRMYRRYWIFPSIPGLFIEEDYSGLTEDMLLPRPSSFQNNVQSQDPQVSTKTGEPLMSESTSNIDQGPRDHSVQLPKPVHKPNRWCFYSSCEQLDQLIEALNSRGHRESALKETLLQEKSRICAQLARFSEEKFHFSDKPQPDSKPTYSRGRSSNAYDPSQMCAEKQLELRLRDFLLDIEDRIYQGTLGAIKVTDRHIWRSALESGRYELLSEENKENGIIKTVNEDVEEMEIDEQTKVIVKDRLLGIKTETPSTVSTNASTPQSVSSVVHYLAMALFQIEQGIERRFLKAPLDASDSGRSYKTVLDRWRESLLSSASLSQVFLHLSTLDRSVIWSKSILNARCKICRKKGDAENMVLCDGCDRGHHTYCVRPKLKTVPEGDWFCPECRPKQRSRRLSSRQRPSLESDEDVEDSMGGEDDEVDGDEEEGQSEEEEYEVEQDEDDSQEEEEVSLPKRGRPQVRLPVKTRGKLSSSFSSRGQQQEPGRYPSRSQQSTPKTTVSSKTGRSLRKINSAPPTETKSLRIASRSTRHSHGPLQADVFVELLSPRRKRRGRKSANNTPENSPNFPNFRVIATKSSEQSRSVNIASKLSLQESESKRRCRKRQSPEPSPVTLGRRSSGRQGGVHELSAFEQLVVELVRHDDSWPFLKLVSKIQVPDYYDIIKKPIALNIIREKVNKCEYKLASEFIDDIELMFSNCFEYNPRNTSEAKAGTRLQAFFHIQAQKLGLHVTPSNVDQVSTPPAAKKSRI

SEQ ID NO: 7605 - protein, 2624 aa, Homo sapiens
MFRRARLSVKPNVRPGVGARGSTASNPQRGRESPRPPDPATDSASKPAEPTDVPTVDFGGAEPQEKAPRSSTEKTGGDNDVEESSRSSSTVSQRRKRISSTSSLVKSSVSVPSESHPLSTINQEAPQPTATSTKEKQPCSDRYRIYKAQKLREMLKEELRKEKKQWKNKYAINESQRPPDRSKMTMRDFIYYLPDNNPMTSSLEQEKKTEKPSTPVQTREQEGKSTPNAEDNEMEEETDDGPLLVPRVKVAEDGSIILDEESLTVEVLRTKGPCVVEENDPIFERGSTTTYSSFRKNYYSKPWSNKETDMFFLAISMVGTDFSMIGQLFPHRARIEIKNKFKREEKTNGWRIDKAFQEKRPFDFDFFAHLLQKVLAEEEKRKQKSVKNHSLKEKKSTKPRKNVKVKKVACEGVNNDPDESMSSRISDTERSQKDAQTVEEESLTLSREDAEQVALEVDLNQKKRRRKKQDGANELGVNNLLENATVQAGPSKGEKHKNKCQAIRPELKEGECSKEQMLSCTQNIDGIVGFASTEKVEKRTDPILSLSNQQDATSVATESSESSTSDLPSFEVGIRALCEVNNAEGSCIEERNVDLKNNSLEIDQTENVKPMLRGRFQRPKPNLSRAGKKSVLSQGKTESESKNSHSKTSVEKNHVEKDKMNTLDILRMETTERENPEAETVSVLGEKNCLQEGSQLKALRPVQVRGRLQKPKPNAGKAAERKEILISQEEIGANVEKNENESCADRDTPQHMEDQSRKDFEEEDVILQPEKNDSFQNVQPDEPKVLNECLSVQENNKANKLNQVPILRTRFQKPKPNIGRGTGRREISSKEEVLEKILVSGEMAAALRETVRLDTSPKEMVPAEINTKEMQSDLKETGRRAISPREKILDVIDDTIEMETGLKAMGREICLREKTPEVIDATEEIDKDLEEAGRREISPQKNGPEEVKPLGEVETDLKATGNESSPREKTPEVTDATEEIDKNLEETGRRKISPRENGPEEVKPVDEMETDLNATGRESSPREKTPEVIDATEEIDLEETEREVSPQENGLEEVKPLGEMETDLKATGRDSFPRGKTPEVIDAIEEIEIDLEETEREISPQENGLEEVKPLGEMQTDLKATGREISPREKTPEVIDATEEIDKDLEETGRREISPEENGPEEVKPVDEMETDLKTTGREGSSREKTREVIDAAEVIETDLEETEREISPQENGPEEVKPVGKMETDLKEIREEISQREKVLAEFSAIREKEIDLKETGKRDIPIMEKVSGKMAVVEEMEADLKETGKENFRERGSEEICVTEEKVAELKQTGKTDISPRENELEETSTSRQTDTHLMQSGSNDFSAVPSLDIQNISSEVLSMMHTPVEEKRNSEKEVSSHFSHFKISSQTHESDKTEVQGIQSPDVPEQFSDINLSKSLPQEQKPLEIKPAPFVRSRFKRPKPNLARAALKRETTESEKYIYEKKSETKKMETIVMQENNEQTDTLPSQHDEASLMISREKDTLGHRNEEAVILPCTQTERNLSPSNSCEPKEESQSAPVQKNDSVVSVGTNNVNTFQQEMKESVIQTARQVRGRLQRPRPNIRKTGQRQIVDKGEAKGIIKEGRTILPKDETEKKVLTVSNSQIETEIEVPSSAVPEHRMYENQSQVVLVENLHVNKTNETIRHENKPYVPSSAQMTRRKFQKAKPNLGRAHSKKEEPVLEKVTTDQSKEGKPEDHLLQKGASNTQLLLKEKAELLTSLEVSARKDCVGSKESALAKIDAELEEVGPSRRVGEETVGDNSPSSVVEEQYLNKLTSCPQPLNETSYSKIALDGKTTISSTSEYERNRGERRSHKKFKPNVTRGRGSKRVRGKTSKKEPRASKAMLVTLRASQEEDDDADDFESDYEEESYHLAPEEVNKAPVFVPVGLRSPEPVSAQIEETMEELEITVNVPDVGCIAVVEHELPNTDVTTEEMKQEENLSVPFEMTTSEHIQDEPGTNDGSTEAAITLLTMGDLVLQSEISSEQGDVGVCIIPHVHSKDKSHIPSSLDNVNHKIVHECQELSSPVITTSPASFEENKIVLEEQSSREEISLMEKVKENATPTRNTISKVTSNLRIRSRLAKPKPNLEKTLGTNRLDDYQEVSSLCVTKGAEMETQRETEKNASKATELENKNLGPVTTAENKDQSKLACVHGIKGTSISSEVNLTERNENQEESSQEVHMLSVAPVASSETGPCTLGLDRGLGENSVEEPQIKDSKGDSVLTLPVPEYTPTSIPEVQQENIINPQDLTVNLVANVPQDGEDEQAFILTLVEIPANAVEEFTDATAQFMPNPLLPAPILVKSVNTEERGDMSICLPATSVGQDAMGLSISGRDNSKKPPDNLDLVSRKRFQCRLDKNDHIPPAKKRSLTLRDDCQEYTTEVHSKELTNVFEETGESHKGQDIFLTSGSTLTTPEPQRQQVEAAFQSRGSRSPDACMDKNVPQLPQDEMIVSDKEERTDAAPKSQQMDSRTSSSKASLSRPGRRPLGFLSLICSKNSLESDEPMQVHSKKRLKPLIPGLRKKLKRSNPFNESQEKNRESSDLLPSPSVITTQSENISSSATQVSCDQPLLKEGYKSAQKRAPQGEATTVSEYFFNDIFIEVDETE

SEQ ID NO: 7606 - protein, 848 aa, Homo sapiens
MWLRLGPPSLSLSPKPTVGRSLCLTLWFLSLALRASTQAPAPTVNTHFGKLRGARVPLPSEILGPVDQYLGVPYAAPPIGEKRFLPPEPPPSWSGIRNATHFPPVCPQNIHTAVPEVMLPVWFTANLDIVATYIQEPNEDCLYLNVYVPTEDVKRISKECARKPNKKICRKGGSGAKKQGEDLADNDGDEDEDIRDSGAKPVMVYIHGGSYMEGTGNMIDGSILASYGNVIVITLNYRVGVLGFLSTGDQAAKGNYGLLDQIQALRWVSENIAFFGGDPRRITVFGSGIGASCVSLLTLSHHSEGLFQRAIIQSGSALSSWAVNYQPVKYTSLLADKVGCNVLDTVDMVDCLRQKSAKELVEQDIQPARYHVAFGPVIDGDVIPDDPEILMEQGEFLNYDIMLGVNQGEGLKFVEGVVDPEDGVSGTDFDYSVSNFVDNLYGYPEGKDTLRETIKFMYTDWADRDNPETRRKTLVALFTDHQWVEPSVVTADLHARYGSPTYFYAFYHHCQSLMKPAWSDAAHGDEVPYVFGVPMVGPTDLFPCNFSKNDVMLSAVVMTYWTNFAKTGDPNKPVPQDTKFIHTKANRFEEVAWSKYNPRDQLYLHIGLKPRVRDHYRATKVAFWKHLVPHLYNLHDMFHYTSTTTKVPPPDTTHSSHITRRPNGKTWSTKRPAISPAYSNENAQGSWNGDQDAGPLLVENPRDYSTELSVTIAVGASLLFLNVLAFAALYYRKDKRRQEPLRQPSPQRGAGAPELGAAPEEELAALQLGPTHHECEAGPPHDTLRLTALPDYTLTLRRSPDDIPLMTPNTITMIPNSLVGLQTLHPYNTFAAGFNSTGLPHSHSTTRV

SEQ ID NO: 7607 - protein, 940 aa, Homo sapiens
MADEALAGLDEGALRKLLEVTADLAERRRIRSAIRELQRQELEREEEALASKRFRAERQDNKENWLHSQQREAEQRAALARLAGQLESMNDVEELTALLRSAGEYEERKLIRAAIRRVRAQEIEAATLAGRLYSGRPNSGSREDSKGLAAHRLEQCEVPEREEQEQQAEVSKPTPTPEGTSQDVTTVTLLLRAPPGSTSSSPASPSSSPTPASPEPPLEPAEAQCLTAEVPGSPEPPPSPPKTTSPEPQESPTLPSTEGQVVNKLLSGPKETPAAQSPTRGPSDTKRADVAGPRPCQRSLSVLSPRQPAQNRESTPLASGPSSFQRAGSVRDRVHKFTSDSPMAARLQDGTPQAALSPLTPARLLGPSLTSTTPASSSSGSSSRGPSDTSSRFSKEQRGVAQPLAQLRSCPQEEGPRGRGLAARPLENRAGGPVARSEEPGAPLPVAVGTAEPGGSMKTTFTIEIKDGRGQASTGRVLLPTGNQRAELTLGLRAPPTLLSTSSGGKSTITRVNSPGTLARLGSVTHVTSFSHAPPSSRGGCSIKMEAEPAEPLAAAVEAANGAEQTRVNKAPEGRSPLSAEELMTIEDEGVLDKMLDQSTDFEERKLIRAALRELRQRKRDQRDKERERRLQEARGRPGEGRGNTATETTTRHSQRAADGSAVSTVTKTERLVHSNDGTRTARTTTVESSFVRRSENGSGSTMMQTKTFSSSSSSKKMGSIFDREDQASPRAGSLAALEKRQAEKKKELMKAQSLPKTSASQARKAMIEKLEKEGAAGSPGGPRAAVQRSTSFGVPNANSIKQMLLDWCRAKTRGYEHVDIQNFSSSWSDGMAFCALVHNFFPEAFDYGQLSPQNRRQNFEVAFSSAETHADCPQLLDTEDMVRLREPDWKMLVDCVPLVEVDDMMIMGKKPDPKCVFTYVQSLYNHLRRHELRLRGKNV

SEQ ID NO: 7608 - protein, 1564 aa, Homo sapiens
MSSKEVKTALKSARDAIRNKEYKEALKHCKTVLKQEKNNYNAWVFIGVAAAELEQPDQAQSAYKKAAELEPDQLLAWQGLANLYEKYNHINAKDDLPGVYQKLLDLYESVDKQKWCDVCKKLVDLYYQEKKHLEVARTWHKLIKTRQEQGAENEELHQLWRKLTQFLAESTEDQNNETQQLLFTAFENALGLSDKIPSEDHQVLYRHFIQSLSKFPHESARLKKACEGMINIYPTVQYPLEVLCLHLIESGNLTDEGQQYCCRLVEMDSKSGPGLIGLGIKALQDKKYEDAVRNLTEGLKESPVCTSGWYHLAEAQVKMHRPKEAVLSCSQALKIVDNLGASGNSLYQRNLCLHLKAEALIKLSDYDSSEEAIRTLDQISDADNIPGLLVLKSLAYRNKGSFDEAAKIMEDLLSSYPDLAEVHALEALIHFTKKDYLQAEKCFQRALEKDTEVAEYHYQLGLTYWFMGEETRKDKTKALTHFLKAARLDTYMGKVFCYLGHYYRDVVGDKNRARGCYRKAFELDDTDAESGAAAVDLSVELEDMEMALAILTTVTQKASAGTAKWAWLRRGLYYLKAGQHSQAVADLQAALRADPKDFNCWESLGEAYLSRGGYTTALKSFTKASELNPESIYSVFKVAAIQQILGKYKEAVAQYQMIIKKKEDYVPALKGLGECHLMMAKAALVDYLDGKAVDYIEKALEYFTCALQHRADVSCLWKLAGDACTCLYAVAPSKVNVHVLGVLLGQKEGKQVLKKNELLHLGGRCYGRALKLMSTSNTWCDLGINYYRQAQHLAETGSNMNDLKELLEKSLHCLKKAVRLDSNNHLYWNALGVVACYSGIGNYALAQHCFIKSIQSEQINAVAWTNLGVLYLTNENIEQAHEAFKMAQSLDPSYLMCWIGQALIAEAVGSYDTMDLFRHTTELNMHTEGALGYAYWVCTTLQDKSNRETELYQYNILQMNAIPAAQVILNKYVERIQNYAPAFTMLGYLNEHLQLKKEAANAYQRAILLLQTAEDQDTYNVAIRNYGRLLCSTGEYDKAIQAFKSTPLEVLEDIIGFALALFMKGLYKESSKAYERALSIVESEQDKAHILTALAITEYKQGKTDVAKTLLFKCSILKEPTTESLQALCALGLAMQDATLSKAALNELLKHIKHKDSNYQRCLLTSAIYALQGRSVAVQKQISKAVHSNPGDPALWSLLSRVVAQYAQRNAKGGVVAGNVAHILDSNHGKKALLYTAVNQLAMGSSSAEDEKNTALKTIQKAALLSPGDPAIWAGLMAACHADDKLALVNNTQPKRIDLYLALLSAVSASIKDEKFFENYNQSLEKWSLSQAVTGLIDTGRISEAETLCTKNLKSNPDQPAVILLLRQVQCKPLLESQKPLPDAVLEELQKTVMSNSTSVPAWQWLAHVYQSQGMMRAAEMCYRKSLQLASQRGSWSGKLSSLLRLALLALKVCMANISNDHWPSLVQEATTEALKLCFCPLAVLLQALLQFKRKMGARETRRLLERVVYQPGYPKSIASTARWYLLRHLYAKDDYELIDVLVNNAKTHGDTRALELNQRLSSQ

SEQ ID NO: 7609 - protein, 738 aa, Homo sapiens
MDLRRRDYHMERPLLNQEHLEELGRWGSAPRTHQWRTWLQCSRARAYALLLQHLPVLVWLPRYPVRDWLLGDLLSGLSVAIMQLPQGLAYALLAGLPPVFGLYSSFYPVFIYFLFGTSRHISVGTFAVMSVMVGSVTESLAPQALNDSMINETARDAARVQVASTLSVLVGLFQVGLGLIHFGFVVTYLSEPLVRGYTTAAAVQVFVSQLKYVFGLHLSSHSGPLSLIYTVLEVCWKLPQSKVGTVVTAAVAGVVLVVVKLLNDKLQQQLPMPIPGELLTLIGATGISYGMGLKHRFEVDVVGNIPAGLVPPVAPNTQLFSKLVGSAFTIAVVGFAIAISLGKIFALRHGYRVDSNQELVALGLSNLIGGIFQCFPVSCSMSRSLVQESTGGNSQVAGAISSLFILLIIVKLGELFHDLPKAVLAAIIIVNLKGMLRQLSDMRSLWKANRADLLIWLVTFTATILLNLDLGLVVAVIFSLLLVVVRTQMPHYSVLGQVPDTDIYRDVAEYSEAKEVRGVKVFRSSATVYFANAEFYSDALKQRCGVDVDFLISQKKKLLKKQEQLKLKQLQKEEKLRKQAASPKGASVSINVNTSLEDMRSNNVEDCKMMQVSSGDKMEDATANGQEDSKAPDGSTLKALGLPQPDFHSLILDLGALSFVDTVCLKSLKNIFHDFREIEVEVYMAACHSPVVSQLEAGHFFDASITKKHLFASVHDAVTFALQHPRPVPDSPVSVTRL

SEQ ID NO: 7610 - protein, 420 aa, Homo sapiens
MNEKWDTNSSENWHPIWNVNDTKHHLYSDINITYVNYYLHQPQVAAIFIISYFLIFFLCMMGNTVVCFIVMRNKHMHTVTNLFILNLAISDLLVGIFCMPITLLDNIIAGWPFGNTMCKISGLVQGISVAASVFTLVAIAVDRFQCVVYPFKPKLTIKTAFVIIMIIWVLAITIMSPSAVMLHVQEEKYYRVRLNSQNKTSPVYWCREDWPNQEMRKIYTTVLFANIYLAPLSLIVIMYGRIGISLFRAAVPHTGRKNQEQWHVVSRKKQKIIKMLLIVALLFILSWLPLWTLMMLSDYADLSPNELQIINIYIYPFAHWLAFGNSSVNPIIYGFFNENFRRGFQEAFQLQLCQKRAKPMEAYALKAKSHVLINTSNQLVQESTFQNPHGETLLYRKSAEKPQQELVMEELKETTNSSEI

SEQ ID NO: 7611 - protein, 706 aa, Homo sapiens
MEMFTFLLTCIFLPLLRGHSLFTCEPITVPRCMKMAYNMTFFPNLMGHYDQSIAAVEMEHFLPLANLECSPNIETFLCKAFVPTCIEQIHVVPPCRKLCEKVYSDCKKLIDTFGIRWPEELECDRLQYCDETVPVTFDPHTEFLGPQKKTEQVQRDIGFWCPRHLKTSGGQGYKFLGIDQCAPPCPNMYFKSDELEFAKSFIGTVSIFCLCATLFTFLTFLIDVRRFRYPERPIIYYSVCYSIVSLMYFIGFLLGDSTACNKADEKLELGDTVVLGSQNKACTVLFMLLYFFTMAGTVWWVILTITWFLAAGRKWSCEAIEQKAVWFHAVAWGTPGFLTVMLLAMNKVEGDNISGVCFVGLYDLDASRYFVLLPLCLCVFVGLSLLLAGIISLNHVRQVIQHDGRNQEKLKKFMIRIGVFSGLYLVPLVTLLGCYVYEQVNRITWEITWVSDHCRQYHIPCPYQAKAKARPELALFMIKYLMTLIVGISAVFWVGSKKTCTEWAGFFKRNRKRDPISESRRVLQESCEFFLKHNSKVKHKKKHYKPSSHKLKVISKSMGTSTGATANHGTSAVAITSHDYLGQETLTEIQTSPETSMREVKADGASTPRLREQDCGEPASPAASISRLSGEQVDGKGQAGSVSESARSEGRISPKSDITDTGLAQSNNLQVPSSSEPSSLKGSTSLLVHPVSGVRKEQGGGCHSDT

SEQ ID NO: 7612 - protein, 340 aa, Homo sapiens
MAASSSEISEMKGVEESPKVPGEGPGHSEAETGPPQVLAGVPDQPEAPQPGPNTTAAPVDSGPKAGLAPETTETPAGASETAQATDLSLSPGGESKANCSPEDPCQETVSKPEVSKEATADQGSRLESAAPPEPAPEPAPQPDPRPDSQPTPKPALQPELPTQEDPTPEILSESVGEKQENGAVVPLQAGDGEEGPAPEPHSPPSKKSPPANGAPPRVLQQLVEEDRMRRAHSGHPGSPRGSLSRHPSSQLAGPGVEGGEGTQKPRDYIILAILSCFCPMWPVNIVAFAYAVMSRNSLQQGDVDGAQRLGRVAKLLSIVALVGGVLIIIASCVINLGVYK

SEQ ID NO: 7613 - protein, 621 aa, Homo sapiens
MTKAMKVKTPLRALKSLWDYDFLIYDGVIDNTAPDFLAFKEHFSLAWGGIFSLLEHVEKFLRNYAIPEVKIKGNNLVALLPEFELTNKLTRYDLLSVLEDPAHVQMLINLPGQRYKGQDGNSEAAMKIQATWKCYKARKFFLFYRQQKWASGVIAIAWLLYCHKTRLKKILKESRQRHLENFRIRAKHLAANWNRIRTSRRTIIHIPSLGYSQPVREHIADFNTQQNMQLGRLCDILDANVNVIYICSHHMNDELVLYYKKILSLHAAVKSGNLEDRSDLQDRFKIITPEAVNIFPMIEQLSQLITDHLQIQRWLFKMDSEFRGNGTAFCDIPSYLKCYKWVLKESSRYGLEDWRKKWAQEPALVKISEELAGILAQHAQPVNEKRFPTWRKFLQTFLSQGGVIEAFPPADNVTNLTVDMLIEPNGKISVLSTGDQLHAESPFISSGTTVPQTSVDPQVLTYLCLQIGKACRMRDVVGYFSIDLVTFIDPSTLEQQVWATGLNLAYSDQLALTQLTLYLTNGHLDCSLSTLEVPRFVPKERKKTKCMSALSMPMLATSRYAVMTTQLRHSNLSLVFHYVFLQICRAHGIGYDVENNRRGSPGGPHDLCSPSLHHPSRNIST

SEQ ID NO: 7614 - protein, 1143 aa, Homo sapiens
MKVTVCFGRTGIVVPCKEGQLRVGELTQQALQRYLKTREKGPGYWVKIHHLEYTDGGILDPDDVLADVVEDKDKLIAVFEEQEPLHKIESPSGNPADRQSPDAFETEVAAQLAAFKPIGGEIEVTPSALKLGTPLLVRRSSDPVPGPPADTQPSASHPGGQSLKLVVPDSTQNLEDREVLNGVQTELLTSPRTKDTLSDMTRTVEISGEGGPLGIHVVPFFSSLSGRILGLFIRGIEDNSRSKREGLFHENECIVKINNVDLVDKTFAQAQDVFRQAMKSPSVLLHVLPPQNREQYEKSVIGSLNIFGNNDGVLKTKVPPPVHGKSGLKTANLTGTDSPETDASASLQQNKSPRVPRLGGKPSSPSLSPLMGFGSNKNAKKIKIDLKKGPEGLGFTVVTRDSSIHGPGPIFVKNILPKGAAIKDGRLQSGDRILEVNGRDVTGRTQEELVAMLRSTKQGETASLVIARQEGHFLPRELDGRLRMNDQLIAVNGESLLGKSNHEAMETLRRSMSMEGNIRGMIQLVILRRPERPMEDPAECGAFSKPCFENCQNAVTTSRRNDNSILHPLGTCSPQDKQKGLLLPNDGWAESEVPPSPTPHSALGLGLEDYSHSSGVDSAVYFPDQHINFRSVTPARQPESINLKASKSMDLVPDESKVHSLAGQKSESPSKDFGPTLGLKKSSSLESLQTAVAEVRKNDLPFHRPRPHMVRGRGCNESFRAAIDKSYDGPEEIEADGLSDKSSHSGQGALNCESAPQGNSELEDMENKARKVKKTKEKEKKKEKGKLKVKEKKRKEENEDPERKIKKKGFGAMLRFGKKKEDKGGKAEQKGTLKHGGLREEELEKMKEERERIGAKHQELREKQARGLLDYATGAIGSVYDMDDDEMDPNYARVNHFREPCTSANVFRSPSPPRAGPFGYPRDGHPLSPERDHLEGLYAKVNKPYHPLVPADSGRPTGGSTDRIQKLRKEYYQARREGFPLYEDDEGRARPSEYDLLWVPGRGPDGNAHNLRFEGMERQYASLPRGGPADPVDYLPAAPRGLYKERELPYYPGAHPMHPPKGSYPRPTELRVADLRYPQHYPPPPAPQHKGPFRQDVPPSPPQHQRMPAYQETGRPGPRGGSPDQYPYRTQDSRQKNPMTAAV

SEQ ID NO: 7615 - protein, 770 aa, Homo sapiens
MGDEKDSWKVKTLDEILQEKKRRKEQEEKAEIKRLKNSDDRDSKRDSLEEGELRDHCMEITIRNSPYRREDSMEDRGEEDDSLAIKPPQQMSRKEKVHHRKDEKRKEKWKHARVKEREHERRKRHREEQDKARREWERQKRREMAREHSRRERDRLEQLERKRERERKMREQQKEQREQKERERRAEERRKEREARREVSAHHRTMREDYSDKVKASHWSRSPPRPPRERFELGDGRKPVKEEKMEERDLLSDLQDISDSERKTSSAESSSAESGSGSEEEEEEEEEEEEEGSTSEESEEEEEEEEEEEEETGSNSEEASEQSAEEVSEEEMSEDEERENENHLLVVPESRFDRDSGESEEAEEEVGEGTPQSSALTEGDYVPDSPALLPIELKQELPKYLPALQGCRSVEEFQCLNRIEEGTYGVVYRAKDKKTDEIVALKRLKMEKEKEGFPITSLREINTILKAQHPNIVTVREIVVGSNMDKIYIVMNYVEHDLKSLMETMKQPFLPGEVKTLMIQLLRGVKHLHDNWILHRDLKTSNLLLSHAGILKVGDFGLAREYGSPLKAYTPVVVTQWYRAPELLLGAKEYSTAVDMWSVGCIFGELLTQKPLFPGNSEIDQINKVFKELGTPSEKIWPGYSELPVVKKMTFSEHPYNNLRKRFGALLSDQGFDLMNKFLTYFPGRRISAEDGLKHEYFRETPLPIDPSMFPTWPAKSEQQRVKRGTSPRPPEGGLGYSQLGDDDLKETGFHLTTTNQGASAAGPGFSLKF

SEQ ID NO: 7616 - protein, 590 aa, Homo sapiens
MESGSPMGEVEISRTIRTNGRGQRGYDWQCKRPIRVAEVRSSLHSWSLRWVNELKEKGNKALSVGNIDDALQCYSEAIKLDPHNHVLYSNRSAAYAKKGDYQKAYEDGCKTVDLKPDWGKGYSRKAAALEFLNRFEEAKRTYEEGLKHEANNPQLKEGLQNMEARLAERKFMNPFNMPNLYQKLESDPRTRTLLSDPTYRELIEQLRNKPSDLGTKLQDPRIMTTLSVLLGVDLGSMDEEEEIATPPPPPPPKKETKPEPMEEDLPENKKQALKEKELGNDAYKKKDFDTALKHYDKAKELDPTNMTYITNQAAVYFEKGDYNKCRELCEKAIEVGRENREDYRQIAKAYARIGNSYFKEEKYKDAIHFYNKSLAEHRTPDVLKKCQQAEKILKEQERLAYINPDLALEEKNKGNECFQKGDYPQAMKHYTEAIKRNPKDAKLYSNRAACYTKLLEFQLALKDCEECIQLEPTFIKGYTRKAAALEAMKDYTKAMDVYQKALDLDSSCKEAADGYQRCMMAQYNRHDSPEDVKRRAMADPEVQQIMSDPAMRLILEQMQKDPQALSEHLKNPVIAQKIQKLMDVGLIAIR

SEQ ID NO: 7617 - protein, 1067 aa, Homo sapiens [sequence omitted]

SEQ ID NO: 7618 - protein, 1478 aa, Homo sapiens
MGDAADPREMRKTFIVPAIKPFDHYDFSRAKIACNLAWLVAKAFGTENVPEELQEPFYTDQYDQEHIKPPVVNLLLSAELYCRAGSLILKSDAAKPLLGHDAVIQALAQKGLYVTDQEKLVTERDLHKKPIQMSAHLAMIDTLMMAYTVEMVSIEKVIACAQQYSAFFQATDLPYDIEDAVMYWINKVNEHLKDIMEQEQKLKEHHTVEAPGGQKARYRKEQTLLKQLPCIPLVENLLKDGTDGCALAALIHFYCPDVVRLEDICLKETMSLADSLYNLQLIQEFCQEYLNQCCHFTLEDMLYAASSIKSNYLVFMAELFWWFEVVKPSFVQPRVVRPQGAEPVKDMPSIPVLNAAKRNVLDSSSDFPSSGEGATFTQSHHHLPSRYSRPQAHSSASGGIRRSSSMSYVDGFIGTWPKEKRSSVHGVSFDISFDKEDSVQRSTPNRGITRSISNEGLTLNNSHVSKHIRKNLSFKPINGEEEAESIEEELNIDSHSDLKSCVPLNTNELNSNENIHYKLPNGALQNRILLDEFGNQIETPSIEEALQIIHDTEKSPHTPQPDQIANGFFLHSQEMSILNSNIKLNQSSPDNVTDTKGALSPITDNTEVDTGIHVPSEDIPETMDEDSSLRDYTVSLDSDMDDASKFLQDYDIRTGNTREALSPCPSTVSTKSQPGSSASSSSGVKMTSFAEQKFRKLNHTDGKSSGSSSQKTTPEGSELNIPHVVAWAQIPEETGLPQGRDTTQLLASEMVHLRMKLEEKRRAIEAQKKKMEAAFTKQRQKMGRTAFLTVVKKKGDGISPLREEAAGAEDEKVYTDRAKEKESQKTDGQRSKSLADIKESMENPQAKWLKSPTTPIDPEKQWNLASPSEETLNEGEILEYTKSIEKLNSSLHFLQQEMQRLSLQQEMLMQMREQQSWVISPPQPSPQKQIRDFKPSKQAGLSSAIAPFSSDSPRPTHPSPQSSNRKSASFSVKSQRTPRPNELKITPLNRTLTPPRSVDSLPRLRRFSPSQVPIQTRSFVCFGDDGEPQLKESKPKEEVKKEELESKGTLEQRGHNPEEKEIKPFESTVSEVLSLPVTETVCLTPNEDQLNQPTEPPPKPVFPPTAPKNVNLIEVSLSDLKPPEKADVPVEKYDGESDKEQFDDDQKVCCGFFFKDDQKAENDMAMKRAALLEKRLRREKETQLRKQQLEAEMEHKKEETRRKTEEERQKKEDERARREFIRQEYMRRKQLKLMEDMDTVIKPRPQVVKQKKQRPKSIHRDHIESPKTPIKGPPVSSLSLASLNTGDNESVHSGKRTPRSESVEGFLSPSRCGSRNGEKDWENASTTSSVASGTEYTGPKLYKEPSAKSNKHIIQNALAHCCLAGKVNEGQKKKILEEMEKSDANNFLILFRDSGCQFRSLYTYCPETEEINKLTGIGPKSITKKMIEGLYKYNSDRKQFSHIPAKTLSASVDAITIHSHLWQTKRPVTPKKLLPTKA

SEQ ID NO: 7619 - protein, 3130 aa, Homo sapiens
MFSVRIVTADYYMASPLQGLDTCQSPLTQAPVKKVPVVRVFGATPAGQKTCLHLHGIFPYLYVPYDGYGQQPESYLSQMAFSIDRALNVALGNPSSTAQHVFKVSLVSGMPFYGYHEKERHFMKIYLYNPTMVKRICELLQSGAIMNKFYQPHEAHIPYLLQLFIDYNLYGMNLINLAAVKFRKARRKSNTLHATGSCKNHLSGNSLADTLFRWEQDEIPSSLILEGVEPQSTCELEVDAVAADILNRLDIEAQIGGNPGLQAIWEDEKQRRRNRNETSQMSQPESQDHRFVPATESEKKFQKRLQEILKQNDFSVTLSGSVDYSDGSQEFSAELTLHSEVLSPEMLQCTPANMVEVHKDKESSKGHTRHKVEEALINEEAILNLMENSQTFQPLTQRLSESPVFMDSSPDEALVHLLAGLESDGYRGERNRMPSPCRSFGNNKYPQNSDDEENEPQIEKEEMELSLVMSQRWDSNIEEHCAKKRSLCRNTHRSSTEDDDSSSGEEMEWSDNSLLLASLSIPQLDGTADENSDNPLNNENSRTHSSVIATSKLSVKPSIFHKDAATLEPSSSAKITFQCKHTSALSSHVLNKEDLIEDLSQTNKNTEKGLDNSVTSFTNESTYSMKYPGSLSSTVHSENSHKENSKKEILPVSSCESSIFDYEEDIPSVTRQVPSRKYTNIRKIEKDSPFIHMHRHPNENTLGKNSFNFSDLNHSKNKVSSEGNEKGNSTALSSLFPSSFTENCELLSCSGENRTMVHSLNSTADESGLNKLKIRYEEFQEHKTEKPSLSQQAAHYMFFPSVVLSNCLTRPQKLSPVTYKLQPGNKPSRLKLNKRKLAGHQETSTKSSETGSTKDNFIQNNPCNSNPEKDNALASDLTKTTRGAFENKTPTDGFIDCHFGDGTLETEQSFGLYGNKYTLRAKRKVNYETEDSESSFVTHNSKISLPHPMEIGESLDGTLKSRKRRKMSKKLPPVIIKYIIINRFRGRKNMLVKLGKIDSKEKQVILTEEKMELYKKLAPLKDFWPKVPDSPATKYPIYPLTPKKSHRRKSKHKSAKKKTGKQQRTNNENIKRTLSFRKKRSHAILSPPSPSYNAETEDCDLNYSDVMSKLGFLSERSTSPINSSPPRCWSPTDPRAEEIMAAAEKEAMLFKGPNVYKKTVNSRIGKTSRARAQIKKSKAKLANPSIVTKKRNKRNQTNKLVDDGKKKPRAKQKTNEKGTSRKHTTLKDEKIKSQSGAEVKFVLKHQNVSEFASSSGGSQLLFKQKDMPLMGSAVDHPLSASLPTGINAQQKLSGCFSSFLESKKSVDLQTFPSSRDDLHPSVVCNSIGPGVSKINVQRPHNQSAMFTLKESTLIQKNIFDLSNHLSQVAQNTQISSGMSSKIEDNANNIQRNYLSSIGKLSEYRNSLESKLDQAYTPNFLHCKDSQQQIVCIAEQSKHSETCSPGNTASEESQMPNNCFVTSLRSPIKQIAWEQKQRGFILDMSNFKPERVKPRSLSEAISQTKALSQCKNRNVSTPSAFGEGQSGLAVLKELLQKRQQKAQNANTTQDPLSNKHQPNKNISGSLEHNKANKRTRSVTSPRKPRTPRSTKQKEKIPKLLKVDSLNLQNSSQLDNSVSDDSPIFFSDPGFESCYSLEDSLSPEHNYNFDINTIGQTGFCSFYSGSQFVPADQNLPQKFLSDAVQDLFPGQAIEKNEFLSHDNQKCDEDKHHTTDSASWIRSGTLSPEIFEKSTIDSNENRRHNQWKNSFHPLTTRSNSIMDSFCVQQAEDCLSEKSRLNRSSVSKEVFLSLPQPNNSDWIQGHTRKEMGQSLDSANTSFTAILSSPDGELVDVACEDLELYVSRNNDMLTPTPDSSPRSTSSPSQSKNGSFTPRTANILKPLMSPPSREEIMATLLDHDLSETIYQEPFCSNPSDVPEKPREIGGRLLMVETRLANDLAEFEGDFSLEGLRLWKTAFSAMTQNPRPGSPLRSGQGVVNKGSSNSPKMVEDKKIVIMPCKCAPSRQLVQVWLQAKEEYERSKKLPKTKPTGVVKSAENFSSSVNPDDKPVVPPKMDVSPCILPTTAHTKEDVDNSQIALQAPTTGCSQTASESQMLPPVASASDPEKDEDDDDNYYISYSSPDSPVIPPWQQPISPDSKALNGDDRPSSPVEELPSLAFENFLKPIKDGIQKSPCSEPQEPLVISPINTRARTGKCESLCFHSTPIIQRKLLERLPEAPGLSPLSTEPKTQKLSNKKGSNTDTLRRVLLTQAKNQFAAVNTPQKETSQIDGPSLNNTYGFKVSIQNLQEAKALHEIQNLTLISVELHARTRRDLEPDPEFDPICALFYCISSDTPLPDTEKTELTGVIVIDKDKTVFSQDIRYQTPLLIRSGITGLEVTYAADEKALFHEIANIIKRYDPDILLGYEIQMHSWGYLLQRAAALSIDLCRMISRVPDDKIENRFAAERDEYGSYTMSEINIVGRITLNLWRIMRNEVALTNYTFENVSFHVLHQRFPLFTFRVLSDWFDNKTDLYRWKMVDHYVSRVRGNLQMLEQLDLIGKTSEMARLFGIQFLHVLTRGSQYRVESMMLRIAKPMNYIPVTPSVQQRSQMRAPQCVPLIMEPESRFYSNSVLVLDFQSLYPSIVIAYNYCFSTCLGHVENLGKYDEFKFGCTSLRVPPDLLYQVRHDITVSPNGVAFVKPSVRKGVLPRMLEEILKTRFMVKQSMKAYKQDRALSRMLDARQLGLKLIANVTFGYTSANFSGRMPCIEVGDSIVHKARETLERAIKLVNDTKKWGARVVYGDTDSMFVLLKGATKEQSFKIGQEIAEAVTATNPKPVKLKFEKVYLPCVLQTKKRYVGYMYETLDQKDPVFDAKGIETVRRDSCPAVSKILERSLKLLFETRDISLIKQYVQRQCMKLLEGKASIQDFIFAKEYRGSFSYKPGACVPALELTRKMLTYDRRSEPQVGERVPYVIIYGTPGVPLIQLVRRPVEVLQDPTLRLNATYYITKQILPPLARIFSLIGIDVFSWYHELPRIHKATSSSRSEPEGRKGTISQYFTTLHCPVCDDLTQHGICSKCRSQPQHVAVILNQEIRELERQQEQLVKICKNCTGCFDRHIPCVSLNCPVLFKLSRVNRELSKAPYLRQLLDQF

SEQ ID NO: 7620 - protein, 553 aa, Homo sapiens
MAAPKTAAVGPLVGAVVQGTNSTRFLVFNSKTAELLSHHKVELTQEFPKEGWVEQDPKEILQSVYECIARTCEKLDELNIDISNIKAVGVSNQRETTVIWDKLTGEPLYNAVVWLDLRTQTTVEDLSKKIPGNSNFVKSKTGLPLSTYFSAVKLRWMLDNVRNVQKAVEEGRALFGTIDSWLIWSLTGGVNGGVHCTDVTNASRTMLFNIHSLEWDKELCDFFEIPMDLLPNVFSSSEIYGLIKTGALEGVPISGCLGDQCAALVGQMCFQEGQAKNTYGTGCFLLCNTGRKCVFSEHGLLTTVAYKLGREKPAYYALEGSVAIAGAVIRWLRDNLGIIETSGDIERLAKEVGTSYGCYFVPAFSGLYAPYWEPSARGILCGLTQFTNKCHIAFAALEAVCFQTREILEAMNRDCGIPLRHLQVDGGMTNNKVLMQLQADILHIPVIKPFMPETTALGAAMAAGAAEGVSVWSLEPQALSVLRMERFEPQIQATESEIRYATWKKAVMKSMGWVTSQSPEGGDPSIFSSLPLGFFIVSSMVMLIGARYISGVP

SEQ ID NO: 7621 - protein, 1099 aa, Homo sapiens
MSVLNKTKWKGGTLQIQLAKESFLHRLAQEREAAKAKKEESTTGNANLLEKTGGVDFHMKAVPGTEVPGHKNWVVSKFGRVLPVLHLKNQHKRKIIKYDPSKYCHNLKKIGEDFSNTIPISSLTWELEGGNDPMSKKRRGEFSDFHGPPKKIIKVQKDESSTGSLAMSTRPRRVIERPPLTQQQAAQKRTCDSITPSKSSPVPVSDTQKLKNLPFKTSGLETAKKRNSISDDDTDSEDELRMMIAKEENLQRTTQPSINESESDPFEVVRDDFKSGVHKLHSLIGLGIKNRVSCHDSDDDIMRNDREYDSGDTDEIIAMKKNVAKVKNSTEFSQMEKSTKKTSFKNRENCELSDHCIKLQKRKSNVESALSHGLKSLNRKSPSHSSSSEDADSASELADSEGGEEYNAMMKNCLRVNLTLADLEQLAGSDLKVPNEDTKSDGPETTTQCKFDRGSKSPKTPTGLRRGRQCIRPAEIVASLLEGEENTCGKQKPKENNLKPKFQAFKGVGCLYEKESMKKSLKDSVASNNKDQNSMKHEDPSIISMEDGSPYVNGSLGEVTPCQHAKKANGPNYIQPQKRQTTFESQDRKAVSPSSSEKRSKNPISRPLEGKKSLSLSAKTHNIGFDKDSCHSTTKTEASQEERSDSSGLTSLKKSPKVSSKDTREIKTDFSLSISNSSDVSAKDKHAEDNEKRLAALEARQKAKEVQKKLVHNALANLDGHPEDKPTHIIFGSDSECETEETSTQEQSHPGEEWVKESMGKTSGKLFDSSDDDESDSEDDSNRFKIKPQFEGRAGQKLMDLQSHFGTDDRFRMDSRFLETDSEEEQEEVNEKKTAEEEELAEEKKKALNVVQSVLQINLSNSTNRGSVAAKKFKDIIHYDPTKQDHATYERKRDDKPKESKAKRKKKREEAEKLPEVSKEMYYNIAMDLKEIFQTTKYTSEKEEGTPWNEDCGKEKPEEIQDPAALTSDAEQPSGFTFSFFDSDTKDIKEETYRVETVKPGKIVWQEDPRLQDSSSEEEDVTEETDHRNSSPGEASLLEKETTRFFFFSKNDERLQGSDLFWRGVGSNMSRNSWEARTTNLRMDCRKKHKDAKRKMKPK

SEQ ID NO: 7622 - protein, 406 aa, Homo sapiens
MTQTLDTREDPLNLGGGGGGGCGCGWAHSASLSSWSSCHRRRPGAPAYNRPHRYSPKTEYGPPRKQPKQQHGPGFWFQPPVCSNWGCWGGPWRPPPPGFWKFPCPVQVFRVYGLHPLCFCCCSCWSGSWNPGWVKPPGRKKRWGRRGRGLRHHPRHSYPRSPPADVSTLPRPVKLYEWREPGMRAPPNTTQFIMNQIYEDMRQQEKVERQQEALRAQKATVSGEASPARSSGNDAPPGGSKETWGLQETLYGFVQNPSLAFSPNPEENQSLAPLLVEEEEEKKNDDEEEYDQEVCDAKEASEEEEEVEDEEEEVEDEEEEEVEEAEYVEEGEEELEEEELEEEEEVLEENEQRGEEFHLPLEMPLSIFVEAEEKRENFISCTFLNPEQIIPKVPQESLFMAQDFNC

SEQ ID NO: 7623 - protein, 906 aa, Homo sapiens
MSHQVKGLKEEARGGVKGRVKSGSPHTGDRLGRRSSSKRALKAEGTPGRRGAQRSQKERAGGSPSPGSPRRKQTGRRRHREELGEQERGEAERTCEGRRKRDERASFQERTAAPKREKEIPRREEKSKRQKKPRSSSLASSASGGESLSEEELAQILEQVEEKKKLIATMRSKPWPMAKKLTELREAQEFVEKYEGALGKGKGKQLYAYKMLMAKKWVKFKRDFDNFKTQCIPWEMKIKDIESHFGSSVASYFIFLRWMYGVNLVLFGLIFGLVIIPEVLMGMPYGSIPRKTVPRAEEEKAMDFSVLWDFEGYIKYSALFYGYYNNQRTIGWLRYRLPMAYFMVGVSVFGYSLIIVIRSMASNTQGSTGEGESDNFTFSFKMFTSWDYLIGNSETADNKYASITTSFKESIVDEQESNKEENIHLTRFLRVLANFLIICCLCGSGYLIYFVVKRSQQFSKMQNVSWYERNEVEIVMSLLGMFCPPLFETIAALENYHPRTGLKWQLGRIFALFLGNLYTFLLALMDDVHLKLANEETIKNITHWTLFNYYNSSGWNESVPRPPLHPADVPRGSCWETAVGIEFMRLTVSDMLVTYITILLGDFLRACFVRFMNYCWCWDLEAGFPSYAEFDISGNVLGLIFNQGMIWMGSFYAPGLVGINVLRLLTSMYFQCWAVMSSNVPHERVFKASRSNNFYMGLLLLVLFLSLLPVAYTIMSLPPSFDCGPFSGKNRMYDVLQETIENDFPTFLGKIFAFLANPGLIIPAILLMFLAIYYLNSVSKSLSRANAQLRKKIQVLREVEKSHKSVKGKATARDSEDTPKSSSKNATQLQLTKEETTPPSASQSQAMDKKAQGPGTSNSASRTTLPASGHLPISRPPGIGPDSGHAPSQTHPWRSASGKSAQRPPH

SEQ ID NO: 7624 - protein, 563 aa, Homo sapiens
MSDDAGDTLATGDKAEVTEMPNSDSLPEDAEVHCDSAAVSHEPTPADPRGEGHENAAVQGAGAAAIGPPVQPQDANALEPPLNGDVTEDTLAECIDSVSLEAEPRSEIPLQEQNYLAVDSPPSGGGWAGWGSWGKSLLSSASATVGHGLTAVKEKAGATLRIHGVNSGSSEGAQPNTENGVPEITDAATDQGPAESPPTSPSSASRGMLSAITNVVQNTGKSVLTGGLDALEFIGKKTMNVLAESDPGFKRTKTLMERTVSLSQMLREAKEKEKQRLAQQLTMERTAHYGMLFDEYQGLSHLEALEILSNESESKVQSFLASLDGEKLELLKNDLISIKDIFAAKELENEENQEEQGLEEKGEEFARMLTELLFELHVAATPDKLNKAMKRAHDWVEEDQTVVSVDVAKVSEEETKKEEKEEKSQDPQEDKKEEKKTKTIEEVYMSSIESLAEVTARCIEQLHKVAELILHGQEEEKPAQDQAKVLIKLTTAMCNEVASLSKKFTNSLTTVGSNKKAEVLNPMISSVLLEGCNSTTYIQDAFQLLLPVLQVSHIQTSCLKAQP

SEQ ID NO: 7625 - protein, 327 aa, Homo sapiens
MYLVMELCEDGELKEILDRKGHFSENETRWIIQSLASAIAYLHNNDIVHRDLKLENIMVKSSLIDDNNEINLNIKVTDFGLAVKKQSRSEAMLQATCGTPIYMAPEVISAHDYSQQCDIWSIGVVMYMLLRGEPPFLASSEEKLFELIRKGELHFENAVWNSISDCAKSVLKQLMKVDPAHRITAKELLDNQWLTGNKLSSVRPTNVLEMMKEWKNNPESVEENTTEEKNKPSTEEKLKSYQPWGNVPDANYTSDEEEEKQSTAYEKQFPATSKDNFDMCSSSFTSSKLLPAEIKGEMEKTPVTPSQGTATKYPAKSGALSRTKKKL

SEQ ID NO: 7626 - protein, 364 aa, Homo sapiens
MAAISTSIPVISQPQFTAMNEPQCFYNESIAFFYNRSGKHLATEWNTVSKLVMGLGITVCIFIMLANLLVMVAIYVNRRFHFPIYYLMANLAAADFFAGLAYFYLMFNTGPNTRRLTVSTWLLRQGLIDTSLTASVANLLAIAIERHITVFRMQLHTRMSNRRVVVVIVVIWTMAIVMGAIPSVGWNCICDIENCSNMAPLYSDSYLVFWAIFNLVTFVVMVVLYAHIFGYVRQRTMRMSRHSSGPRRNRDTMMSLLKTVVIVLGAFIICWTPGLVLLLLDVCCPQCDVLAYEKFFLLLAEFNSAMNPIIYSYRDKEMSATFRQILCCQRSENPTGPTEGSDRSASSLNHTILAGVHSNDHSVV

SEQ ID NO: 7627 - protein, 1284 aa, Homo sapiens
MSSGDPAHLGLCLWLWLGATLGREQVQASGLLRLAVLPEDRLQMKWRESEGSGLGYLVQVKPMAGDSEQEVILTTKTPKATVGGLSPSKGYTLQIFELTGSGRFLLARREFVIEDLKSSSLDRSSQRPLGSGAPEPTPSHTGSPDPEQASEPQVAFTPSQDPRTPAGPQFRCLPPVPADMVFLVDGSWSIGHSHFQQVKDFLASVIAPFEIGPDKVQVGLTQYSGDAQTEWDLNSLSTKEQVLAAVRRLRYKGGNTFTGLALTHVLGQNLQPAAGLRPEAAKVVILVTDGKSQDDVHTAARVLKDLGVNVFAVGVKNADEAELRLLASPPRDITVHSVLDFLQLGALAGLLSRLICQRLQGGSPRQGPAAAPALDTLPAPTSLVLSQVTSSSIRLSWTPAPRHPLKYLIVWRASRGGTPREVVVEGPAASTELHNLASRTEYLVSVFPIYEGGVGEGLRGLVTTAPLPPPRALTLAAVTPRTVHLTWQPSAGATHYLVRCSPASPKGEEEEREVQVGRPEVLLDGLEPGRDYEVSVQSLRGPEGSEARGIRARTPTLAPPRHLGFSDVSHDAARVFWEGAPRPVRLVRVTYVSSEGGHSGQTEAPGNATSATLGPLSSSTTYTVRVTCLYPGGGSSTLTGRVTTKKAPSPSQLSMTELPGDAVQLAWVAAAPSGVLVYQITWTPLGEGKAHEISVPGNLGTAVLPGLGRHTEYDVTILAYYRDGARSDPVSLRYTPSTVSRSPPSNLALASETPDSLQVSWTPPLGRVLHYWLTYAPASGLGPEKSVSVPGARSHVTLPDLQAATKYRVLVSAIYAAGRSEAVSATGQTACPALRPDGSLPGFDLMVAFSLVEKAYASIRGVAMEPSAFGGTPTFTLFKDAQLTRRVSDVYPAPLPPEHTIVFLVRLLPETPREAFALWQMTAEDFQPLLGVLLDAGKKSLTYFHRDPRAALQEATFDPQEVRKIFFGSFHKVHVAVGRSKVRLYVDCRKVAERPLGEMGSPPAAGFVTLGRLAKARGPRSSSAAFQLQMLQIVCSDTWADEDRCCELPASRDGETCPAFVSACSCSSETPGPPGPQGPPGLPGRNGTPGEQGFPGPRGPPGVKGEKGDHGLPGLQGHPGHQGIPGRVGLQGPKGMRGLEGTAGLPGPPGPRGFQGMAGARGTSGERGPPGTVGPTGLPGPKGERGEKGEPQSLATLYQLVSQASHVSKFDSFHENTRPPMPILEQKLEPGTEPLGSPGTRSKALVPGEWGRGGRHLEGRGEPGAVGQMGSPGQQGASTQGLWE

SEQ ID NO: 7628 - protein, 1412 aa, Homo sapiens
MKAYLKSAEGFFVLNKSTTIGRHENSDLVLQSPDIDNHHALIEYNEAECSFVLQDFNSRNGTFVNECHIQNVAVKLIPGDILRFGSAGLTYELVIENPPPVSFPWMRGPAPWPGPQPPRATQQPNQAPPPSHIPFHQGVQPAPMQRSWSQAFPRPTVVLPASHRRPVSANKEMFSFVVDDARKPPVIKQVWTNAMKLSEKSVAEGIPGAVPPAEIYVEEDLAQQDKDEIILLLGKEVSRLSDYEIESKYKDVIIANLQNEVAELSQKVSETTTSRQNEKEISQKCQVLDEDIDAKQKEIQSLKSQISALQKGYSKVLCQTLSERNSEITSLKNEGENLKRDNAITSGMVSSLQKDILAKDEQVQQLKEEVSHLKSQNKDKDHQLEALGSRCSVLKEELKQEDAHRELREAQEKELKLCKTQIQDMEKEMKKLRAELRKSCTEQSVISRTLREKSKVEEKLQEDSRRKLLQLQEMGNRESVIKINLERAVGQLEHFRSQVIKATYGRAKPFRDKPVTDQQLIEKITQVTEDNINFQQKKWTLQKETQLSNSKQEETTENIEKLRTSLDSCQACMKISCCSHDLKKEVDLLQHLQVSPPVSGLQKVVLDVLRHALSWLEEVEQLLRDLGILPSSPNKDQVQQFSGNSAVFTAGKAAGASGREGEAERGEARARGEAQSQNQATDGREGGKALEEYITQERNRAKETLEEERKRMQELESLLAQQKKALAKSITQEKNRVKEALEEEQTRVQELEERLARQKEVLESSIAHEKRKAKEALESEKRKVQDLENHLTQQKEISESNIAYEKRKAKEAMEKEKKKVQDLENRLTKQKEELELKEQKEDVLNNKLSDALAMVEETQKTKATESLKAESLALKLNETLAELETTKTKMIMVEERLILQQKMVKALQDEQESQRHGFEEEIMEYKEQIKQHAQTIVSLEEKLQKVTQHHKKIEGEIATLKDNDPAPKEERPQDPLVAPMTESSAKDMAYEHLIDDLLAAQKEILSQQEVIMKLRKDLTEAHSRMSDLRGELNEKQKMELEQNVVLVQQQSKELSVLKEKMAQMSSLVEKKDRELKALEEALRASQEKHRLQLNTEKEQKPRKKTQTCDTSVQIEPVHTEAFSSSQEQQSFSDLGVRCKGSRHEEVIQRQKKALSELRARIKELEKARSPDHKDHQNESFLDLKNLRMENNVQKILLDAKPDLPTLSRIEILAPQNGLCNARFGSAMEKSGKMDVAEALELSEKLYLDMSKTLGSLMNIKNMSGHVSMKYLSRQEREKVNQLRQRDLDLVFDKITQLKNQLGRKEELLRGYEKDVEQLRRSKVSIEMYQSQVAKLEDDIYKEAEEKALLKEALERMEHQLCQEKRINRAIRQQKVGTRKASLKMDQEREMLRKETSSKSSQSLLHSKPSGKY

SEQ ID NO: 7629 - protein, 806 aa, Homo sapiens
MASGADSKGDDLSTAILKQKNRPNRLIVDEAINEDNSVVSLSQPKMDELQLFRGDTVLLKGKKRREAVCIVLSDDTCSDEKIRMNRVVRNNLRVRLGDVISIQPCPDVKYGKRIHVLPIDDTVEGITGNLFEVYLKPYFLEAYRPIRKGDIFLVRGGMRAVEFKVVETDPSPYCIVAPDTVIHCEGEPIKREDEEESLNEVGYDDIGGCRKQLAQIKEMVELPLRHPALFKAIGVKPPRGILLYGPPGTGKTLIARAVANETGAFFFLINGPEIMSKLAGESESNLRKAFEEAEKNAPAIIFIDELDAIAPKREKTHGEVERRIVSQLLTLMDGLKQRAHVIVMAATNRPNSIDPALRRFGRFDREVDIGIPDATGRLEILQIHTKNMKLADDVDLEQVANETHGHVGADLAALCSEAALQAIRKKMDLIDLEDETIDAEVMNSLAVTMDDFRWALSQSNPSALRETVVEVPQVTWEDIGGLEDVKRELQELVQYPVEHPDKFLKFGMTPSKGVLFYGPPGCGKTLLAKAIANECQANFISIKGPELLTMWFGESEANVREIFDKARQAAPCVLFFDELDSIAKARGGNIGDGGGAADRVINQILTEMDGMSTKKNVFIIGATNRPDIIDPAILRPGRLDQLIYIPLPDEKSRVAILKANLRKSPVAKDVDLEFLAKMTNGFSGADLTEICQRACKLAIRESIESEIRRERERQTNPSAMEVEEDDPVPEIRRDHFEEAMRFARRSVSDNDIRKYEMFAQTLQQSRGFGSFRFPSGNQGGAGPSQGSGGGTGGSVYTEDNDDDLYG

SEQ ID NO: 7630 - protein, 1320 aa, Homo sapiens
MQDDSIEASTSISQLLRESYLAETRHRGNNERSRAEPSSNPCHFGSPSGAAEGGGGQDDLPDLSAFLSQEELDESVNLARLAINYDPLEKADETQARKRLSPDQMKHSPNLSFEPNFCQDNPRSPTSSKESPQEAKRPQYCSETQSKKVFLNKAADFIEELSSLFKSHSSKRIRPRACKNHKSKLESQNKVMQENSSSFSDLSERRERSSVPIPIPADTRDNEVNHALEQQEAKRREAEQAASEAAGGDTTPGSSPSSLYYEEPLGQPPRFTQKLRSREVPEGTRVQLDCIVVGIPPPQVRWYCEGKELENSPDIHIVQAGNLHSLTIAEAFEEDTGRYSCFASNIYGTDSTSAEIYIEGVSSSDSEGDPNKEEMNRIQKPNEVSSPPTTSAVIPPAVPQAQHLVAQPRVATIQQCQSPTNYLQGLDGKPIIAAPVFTKMLQNLSASEGQLVVFECRVKGAPSPKVEWYREGTLIEDSPDFRILQKKPRSMAEPEEICTLVIAEVFAEDSGCFTCTASNKYGTVSSIAQLHVRGNEDLSNNGSLHSANSTTNLAAIEPQPSPPHSEPPSVEQPPKPKLEGVLVNHNEPRSSSRIGLRVHFNLPEDDKGSEASSEAGVVTTRQTRPDSFQERFNGQATKTPEPSSPVKEPPPVLAKPKLDSTQLQQLHNQVLLEQHQLQNPPPSSPKEFPFSMTVLNSNAPPAVTTSSKQVKAPSSQTFSLARPKYFFPSTNTTAATVAPSSSPVFTLSSTPQTIQRTVSKESLLVSHPSVQTKSPGGLSIQNEPLPPGPTEPTPPPFTFSIPSGNQFQPRCVSPIPVSPTSRIQNPVAFLSSVLPSLPAIPPTNAMGLPRSAPSMPSQGLAKKNTKSPQPVNDDNIRETKNAVIRDLGKKITFSDVRPNQQEYKISSFEQRLMNEIEFRLERTPVDESDDEIQHDEIPTGKCIAPIFDKRLKHFRVTEGSPVTFTCKIVGIPVPKVYWFKDGKQISKRNEHCKMRREGDGTCSLHIESTTSDDDGNYTIMAANPQGRISCSGHLMVQSLPIRSRLTSAGQSHRGRSRVQERDKEPLQERFFRPHFLQAPGDMVAHEGRLCRLDCKVSGLPPPELTWLLNGQPVLPDASHKMLVRETGVHSLLIDPLTQRDAGTYKCIATNKTGQNSFSLELSVVAKEVKKAPVILEKLQNCGVPEGHPVRLECRVIGMPPPVFYWKKDNETIPCTRERISMHQDTTGYACLLIQPAKKSDAGWYTLSAKNEAGIVSCTARLDIYAQWHHQIPPPMSVRPSGSRYGSLTSKGLDIFSAFSSMESTMVYSCSSRSVVESDEL

SEQ ID NO: 7631 - protein, 752 aa, Homo sapiens
MLPGLALLLLAAWTARALEVPTDGNAGLLAEPQIAMFCGRLNMHMNVQNGKWDSDPSGTKTCIDTKEGILQYCQEVYPELQITNVVEANQPVTIQNWCKRGRKQCKTHPHFVIPYRCLVGEFVSDALLVPDKCKFLHQERMDVCETHLHWHTVAKETCSEKSTNLHDYGMLLPCGIDKFRGVEFVCCPLAEESDNVDSADAEEDDSDVWWGGADTDYADGSEDKVVEVAEEEEVAEVEEEEADDDEDDEDGDEVEEEAEEPYEEATERTTSIATTTTTTTESVEEVVREVCSEQAETGPCRAMISRWYFDVTEGKCAPFFYGGCGGNRNNFDTEEYCMAVCGSAMSQSLLKTTQEPLARDPVKLPTTAASTPDAVDKYLETPGDENEHAHFQKAKERLEAKHRERMSQVMREWEEAERQAKNLPKADKKAVIQHFQEKVESLEQEAANERQQLVETHMARVEAMLNDRRRLALENYITALQAVPPRPRHVFNMLKKYVRAEQKDRQHTLKHFEHVRMVDPKKAAQIRSQVMTHLRVIYERMNQSLSLLYNVPAVAEEIQDEVDELLQKEQNYSDDVLANMISEPRISYGNDALMPSLTETKTTVELLPVNGEFSLDDLQPWHSFGADSVPANTENEGSGLTNIKTEEISEVKMDAEFRHDSGYEVHHQKLVFFAEDVGSNKGAIIGLMVGGVVIATVIVITLVMLKKKQYTSIHHGVVEVDAAVTPEERHLSKMQQNGYENPTYKFFEQMQN

SEQ ID NO: 7632 - protein, 1091 aa, Homo sapiens
MCRKKPDTMILTQIEAKEACDWLRATGFPQYAQLYEDFLFPIDISLVKREHDFLDRDAIEALCRRLNTLNKCAVMKLEISPHRKRSDDSDEDEPCAISGKWTFQRDSKRWSRLEEFDVFSPKQDLVPGSPDDSHPKDGPSPGGTLMDLSERQEVSSVRSLSSTGSLPSHAPPSEDAATPRTNSVISVCSSSNLAGNDDSFGSLPSPKELSSFSFSMKGHEKTAKSKTRSLLKRMESLKLKSSHHSKHKAPSKLGLIISGPILQEGMDEEKLKQLNCVEISALNGNRINVPMVRKRSVSNSTQTSSSSSQSETSSAVSTPSPVTRTRSLSACNKRVGMYLEGFDPFNQSTFNNVVEQNFKNRESYPEDTVFYIPEDHKPGTFPKALTNGSFSPSGNNGSVNWRTGSFHGPGHISLRRENSSDSPKELKRRNSSSSMSSRLSIYDNVPGSILYSSSGDLADLENEDIFPELDDILYHVKGMQRIVNQWSEKFSDEGDSDSALDSVSPCPSSPKQIHLDVDNDRTTPSDLDSTGNSLNEPEEPSEIPERRDSGVGASLTRSNRHRLRWHSFQSSHRPSLNSVSLQINCQSVAQMNLLQKYSLLKLTALLEKYTPSNKHGFSWAVPKFMKRIKVPDYKDRSVFGVPLTVNVQRTGQPLPQSIQQAMRYLRNHCLDQVGLFRKSGVKSRIQALRQMNEGAIDCVNYEGQSAYDVADMLKQYFRDLPEPLMTNKLSETFLQIYQYVPKDQRLQAIKAAIMLLPDENREVLQTLLYFLSDVTAAVKENQMTPTNLAVCLAPSLFHLNTLKRENSSPRVMQRKQSLGKPDQKDLNENLAATQGLAHMIAECKKLFQVPEEMSRCRNSYTEQELKPLTLEALGHLGNDDSADYQHFLQDCVDGLFKEVKEKFKGWVSYSTSEQAELSYKKVSEGPPLRLWRSVIEVPAVPEEILKRLLKEQHLWDVDLLDSKVIEILDSQTEIYQYVQNSMAPHPARDYVVLRTWRTNLPKGACALLLTSVDHDRAPVVGVRVNVLLSRYLIEPCGPGKSKLTYMCRVDLRGHMPEWYTKSFGHLCAAEVVKIRDSFSNQNTETKDTKSR

SEQ ID NO: 7633 - protein, 786 aa, Homo sapiens
MAGLTAAAPRPGVLLLLLSILHPSRPGGVPGAIPGGVPGGVFYPGAGLGALGGGALGPGGKPLKPVPGGLAGAGLGAGLGAFPAVTFPGALVPGGVADAAAAYKAAKAGAGLGGVPGVGGLGVSAGAVVPQPGAGVKPGKVPGVGLPGVYPGGVLPGARFPGVGVLPGVPTGAGVKPKAPGVGGAFAGIPGVGPFGGPQPGVPLGYPIKAPKLPGGYGLPYTTGKLPYGYGPGGVAGAAGKAGYPTGTGVGPQAAAAAAAKAAAKFGAGAAGVLPGVGGAGVPGVPGAIPGIGGIAGVGTPAAAAAAAAAAKAAKYGAAAGLVPGGPGFGPGVVGVPGAGVPGVGVPGAGIPVVPGAGIPGAAVPGVVSPEAAAKAAAKAAKYGARPGVGVGGIPTYGVGAGGFPGFGVGVGGIPGVAGVPGVGGVPGVGGVPGVGISPEAQAAAAAKAAKYGAAGAGVLGGLVPGAPGAVPGVPGTGGVPGVGTPAAAAAKAAAKAAQFGLVPGVGVAPGVGVAPGVGVAPGVGLAPGVGVAPGVGVAPGVGVAPGIGPGGVAAAAKSAAKVAAKAQLRAAAGLGAGIPGLGVGVGVPGLGVGAGVPGLGVGAGVPGFGAGADEGVRRSLSPELREGDPSSSQHLPSTPSSPRVPGALAAAKAAKYGAAVPGVLGGLGALGGVGIPGGVVGAGPAAAAAAAKAAAKAAQFGLVGAAGLGGLGVGGLGVPGVGGLGGIPPAAAAKAAKYGAAGLGGVLGGAGQFPLGGVAARPGFGLSPIFPGGACLGKACGRKRK

SEQ ID NO: 7634 - protein, 1401 aa, Homo sapiens
MASCASIDIEDATQHLRDILKLDRPAGGPSAESPRPSSAYNGDLNGLLVPDPLCSGDSTSANKTGLRTMPPINLQEKQVICLSGDDSSTCIGILAKEVEIVASSDSSISSKARGSNKVKIQPVAKYDWEQKYYYGNLIAVSNSFLAYAIRAANNGSAMVRVISVSTSERTLLKGFTGSVADLAFAHLNSPQLACLDEAGNLFVWRLALVNGKIQEEILVHIRQPEGTPLNHFRRIIWCPFIPEESEDCCEESSPTVALLHEDRAEVWDLDMLRSSHSTWPVDVSQIKQGFIVVKGHSTCLSEGALSPDGTVLATASHDGYVKFWQIYIEGQDEPRCLHEWKPHDGRPLSCLLFCDNHKKQDPDVPFWRFLITGADQNRELKMWCTVSWTCLQTIRFSPDIFSSVSVPPSLKVCLDLSAEYLILSDVQRKVLYVMELLQNQEEGHACFSSISEFLLTHPVLSFGIQVVSRCRLRHTEVLPAEEENDSLGADGTHGAGAMESAAGVLIKLFCVHTKALQDVQIRFQPQLNPDVVAPLPTHTAHEDFTFGESRPELGSEGLGSAAHGSQPDLRRIVELPAPADFLSLSSETKPKLMTPDAFMTPSASLQQITASPSSSSSGSSSSSSSSSSSLTAVSAMSSTSAVDPSLTRPPEELTLSPKLQLDGSLTMSSSGSLQASPRGLLPGLLPAPADKLTPKGPGQVPTATSALSLELQEVEPLGLPQASPSRTRSPDVISSASTALSQDIPEIASEALSRGFGSSAPEGLEPDSMASAASALHLLSPRPRPGPELGPQLGLDGGPGDGDRHNTPSLLEAALTQEASTPDSQVWPTAPDITRETCSTLAESPRNGLQEKHKSLAFHRPPYHLLQQRDSQDASAEQSDHDDEVASLASASGGFGTKVPAPRLPAKDWKTKGSPRTSPKLKRKSKKDDGDAAMGSRLTEHQVAEPPEDWPALIWQQQRELAELRHSQEELLQRLCTQLEGLQSTVTGHVERALETRHEQEQRRLERALAEGQQRGGQLQEQLTQQLSQALSSAVAGRLERSIRDEIKKTVPPCVSRSLEPMAGQLSNSVATKLTAVEGSMKENISKLLKSKNLTDAIARAAADTLQGPMQAAYREAFQSVVLPAFEKSCQAMFQQINDSFRLGTQEYLQQLESHMKSRKAREQEAREPVLAQLRGLVSTLQSATEQMAATVAGSVRAEVQHQLHVAVGSLQESILAQVQRIVKGEVSVALKEQQAAVTSSIMQAMRSAAGTPVPSAHLDCQAQQAHILQLLQQGHLNQAFQQALTAADLNLVLYVCETVDPAQVFGQPPCPLSQPVLLSLIQQLASDLGTRTDLKLSYLEEAVMHLDHSDPITRDHMGSVMAQVRQKLFQFLQAEPHNSLGKAARRLSLMLHGLVTPSLP

SEQ ID NO: 7635 - protein, 1393 aa, Homo sapiens
MACSIVQFCYFQDLQAARDFLFPHLREEILSGALRRDPSKSTDWEDDGWGAWEENEPQEPEEEGNTCKTQKTSWLQDCVLSLSPTNDLMVIAREQKAVFLVPKWKYSDKGKEEMQFAVGWSGSLNVEEGECVTSALCIPLASQKRSSTGRPDWTCIVVGFTSGYVRFYTENGVLLLAQLLNEDPVLQLKCRTYEIPRHPGVTEQNEELSILYPAAIVTIDGFSLFQSLRACRNQVAKAAASGNENIQPPPLAYKKWGLQDIDTIIDHASVGIMTLSPFDQMKTASNIGGFNAAIKNSPPAMSQYITVGSNPFTGFFYALEGSTQPLLSHVALAVASKLTSALFNAASGWLGWKSKHEEEAVQKQKPKVEPATPLAVRFGLPDSRRHGESICLSPCNTLAAVTDDFGRVILLDVARGIAIRMWKGYRDAQIGWIQTVEDLHERVPEKADFSPFGNSQGPSRVAQFLVIYAPRRGILEVWSTQQGPRVGAFNVGKHCRLLYPGYKIMGLNNVTSQSWQPQTYQICLVDPVSGSVKTVNVPFHLALSDKKSERAKDMHLVKKLAALLKTKSPNLDLVETEIKELILDIKYPATKKQALESILASERLPFSCLRNITQTLMDTLKSQELESVDEGLLQFCANKLKLLQLYESVSQLNSLDFHLDTPFSDNDLALLLRLDEKELLKLQALLEKYKQENTRTNVRFSDDKDGVLPVKTFLEYLEYEKDVLNIKKISEEEYVALGSFFFWKCLHGESSTEDMCHTLESAGLSPQLLLSLLLSVWLSKEKDILDKPQSICCLHTMLSLLSKMKVAIDETWDSQSVSPWWQQMRTACIQSENNGAALLSAHVGHSVAAQISNNMTEKKFSQTVLGADSEALTDSWEALSLDTEYWKLLLKQLEDCLILQTLLHSKGNTQTSKVSSLQAEPLPRLSVKKLLEGGKGGIADSVAKWIFKQDFSPEVLKLANEERDAENPDEPKEGVNRSFLEVSEMEMDLGAIPDLLHLAYEQFPCSLELDVLHAHCCWEYVVQWNKDPEEARFFVRSIEHLKQIFNAHVQNGIALMMWNTFLVKRFSAATYLMDKVGKSPKDRLCRRDVGMSDTAMTSFLGSCLDLLQILMEADVSRDEIQVPVLDTEDAWLSVEGPISIVELALEQKHIHYPLVEHHSILCSILYAVMRFSLKTVKPLSLFDSKGKNAFFKDLTSIQLLPSGEMDPNFISVRQQFLLKVVSAAVQAQHSATKVKDPTEEATPTPFGKDQDWPALAVDLAHHLQVSEDVVRRHYVGELYNYGVDHLGEEAILQVHDKEVLASQLLVLTGQRLAHALLHTQTKEGMELLARLPPTLCTWLKAMDPQDLQNTEVPIATTAKLVNKVIELLPEKHGQYGLALHLIEAVEAISLPSL

SEQ ID NO: 7636 - protein, 732 aa, Homo sapiens
MLQVHRTGLGRLGVSLSKGLHHKAVLAVRREDVNAWERRAPLAPKHIKGITNLGYKVLIQPSNRRAIHDKDYVKAGGILQEDISEACLILGVKRPPEEKLMSRKTYAFFSHTIKAQEANMGLLDEILKQEIRLIDYEKMVDHRGVRVVAFGQWAGVAGMINILHGMGLRLLALGHHTPFMHIGMAHNYRNSSQAVQAVRDAGYEISLGLMPKSIGPLTFVFTGTGNVSKGAQAIFNELPCEYVEPHELKEVSQTGDLRKVYGTVLSRHHHLVRKTDAVYDPAEYDKHPERYISRFNTDIAPYTTCLINGIYWEQNTPRLLTRQDAQSLLAPGKFSPAGVEGCPALPHKLVAICDISADTGGSIEFMTECTTIEHPFCMYDADQHIIHDSVEGSGILMCSIDNLPAQLPIEATECFGDMLYPYVEEMILSDATQPLESQNFSPVVRDAVITSNGTLPDKYKYIQTLRESRERAQSLSMGTRRKVLVLGSGYISEPVLEYLSRDGNIEITVGSDMKNQIEQLGKKYNINPVSMDICKQEEKLGFLVAKQDLVISLLPYVLHPLVAKACITNKVNMVTASYITPALKELEKSVEDAGITIIGELGLDPGLDHMLAMETIDKAKEVGATIESYISYCGGLPAPEHSNNPLRYKFSWSPVGVLMNVMQSATYLLDGKVVNVAGGISFLDAVTSMDFFPGLNLEGYPNRDSTKYAEIYGISSAHTLLRGTLRYKGLEC

SEQ ID NO: 7637 - protein, 2101 aa, Homo sapiens
MTLHATRGAALLSWVNSLHVADPVEAVLQLQDCSIFIKIIDRIHGTEEGQQILKQPVSERLDFVCSFLQKNRKHPSSPECLVSAQKVLEGSELELAKMTMLLLYHSTMSSKSPRDWEQFEYKIQAELAVILKFVLDHEDGLNLNEDLENFLQKAPVPSTCSSTFPEELSPPSHQAKREIRFLELQKVASSSSGNNFLSGSPASPMGDILQTPQFQMRRLKKQLADERSNRDELELELAENRKLLTEKDAQIAMMQQRIDRLALLNEKQAASPLEPKELEELRDKNESLTMRLHETLKQCQDLKTEKSQMDRKINQLSEENGDLSFKLREFASHLQQLQDALNELTEEHSKATQEWLEKQAQLEKELSAALQDKKCLEEKNEILQGKLSQLEEHLSQLQDNPPQEKGEVLGDVLQLETLKQEAATLAANNTQLQARVEMLETERGQQEAKLLAERGHFEEEKQQLSSLITDLQSSISNLSQAKEELEQASQAHGARLTAQVASLTSELTTLNATIQQQDQELAGLKQQAKEKQAQLAQTLQQQEQASQGLRHQVEQLSSSLKQKEQQLKEVAEKQEATRQDHAQQLATAAEEREASLRERDAALKQLEALEKEKAAKLEILQQQLQVANEARDSAQTSVTQAQREKAELSRKVEELQACVETARQEQHEAQAQVAELELQLRSEQQKATEKERVAQEKDQLQEQLQALKESLKVTKGSLEEEKRRAADALEEQQRCISELKAETRSLVEQHKRERKELEEERAGRKGLEARLQQLGEAHQAETEVLRRELAEAMAAQHTAESECEQLVKEVAAWRERYEDSQQEEAQYGAMFQEQLMTLKEECEKARQELQEAKEKVAGIESHSELQISRQQNELAELHANLARALQQVQEKEVRAQKLADDLSTLQEKMAATSKEVARLETLVRKAGEQQETASRELVKEPARAGDRQPEWLEEQQGRQFCSTQAALQAMEREAEQMGNELERLRAALMESQGQQQEERGQQEREVARLTQERGRAQADLALEKAARAELEMRLQNALNEQRVEFATLQEALAHALTEKEGKDQELAKLRGLEAAQIKELEELRQTVKQLKEQLAKKEKEHASGSGAQSEAAGRTEPTGPKLEALRAEVSKLEQQCQKQQEQADSLERSLEAERASRAERDSALETLQGQLEEKAQELGHSQSALASAQRELAAFRTKVQDHSKAEDEWKAQVARGRQEAERKNSLISSLEEEVSILNRQVLEKEGESKELKRLVMAESEKSQKLEERLRLLQAETASNSARAAERSSALREEVQSLREEAEKQRVASENLRQELTSQAERAEELGQELKAWQEKFFQKEQALSTLQLEHTSTQALVSELLPAKHLCQQLQAEQAAAEKRHREELEQSKQAAGGLRAELLRAQRELGELIPLRQKVAEQERTAQQLRAEKASYAEQLSMLKKAHGLLAEENRGLGERANLGRQFLEVELDQAREKYVQELAAVRADAETRLAEVQREAQSTARELEVMTAKYEGAKVKVLEERQRFQEERQKLTAQVEELSKKLADSDQASKVQQQKLKAVQAQGGESQQEAQRLQAQLNELQAQLSQKEQAAEHYKLQMEKAKTHYDAKKQQNQELQEQLRSLEQLQKENKELRAEAERLGHELQQAGLKTKEAEQTCRHLTAQVRSLEAQVAHADQQLRDLGKFQVATDALKSREPQAKPQLDLSIDSLDLSCEEGTPLSITSKLPRTQPDGTSVPGEPASPISQRLPPKVESLESLYFTPIPARSQAPLESSLDSLGDVFLDSGRKTRSARRRTTQIINITMTKKLDVEEPDSANSSFYSTRSAPASQASLRATSSTQSLARLGSPDYGNSALLSLPGYRPTTRSSARRSQAGVSSGAPPGRNSFYMGTCQDEPEQLDDWNRIAELQQRNRVCPPHLKTCYPLESRPSLSLGTITDEEMKTGDPQETLRRASMQPIQIAEGTGITTRQQRKRVSLEPHQGPGTPESKKATSCFPRPMTPRDRHEGRKQSTTEAQKKAAPASTKQADRRQSMAFSILNTPKKLGNSLLRRGASKKALSKASPNTRSGTRRSPRIATTTASAATAAAIGATPRAKGKAKH

SEQ ID NO: 7638 - protein, 1392 aa, Homo sapiens
MKRLLAAAGKGVRGPEPPNPFSERVYTEKDYGTIYFGDLGKIHTAASRGQVQKLEKMTVGKKPVNLNKRDMKKRTALHWACVNGHAEVVTFLVDRKCQLNVLDGEGRTPLMKALQCEREACANILIDAGADLNYVDVYGNTALHYAVYSENLLMVATLLSYGAVIEVQNKASLTPLLLAIQKRSKQTVEFLLTKNANANAFNESKCTALMLAICEGSSEIVGMLLQQNVDVFAEDIHGITAERYAAACGVNYIHQQLLEHIRKLPKNPQNTNPEGTSTGTPDEAAPLAERTPDTAESLLEKTPDEAARLVEGTSAKIQCLGKATSGKFEQSTEETPRKILRPTKETSEKFSWPAKERSRKITWEEKETSVKTECVAGVTPNKTEVLEKGTSNMIACPTKETSTKASTNVDVSSVEPIFSLFGTRTIENSQCTKVEEDFNLATKIISKSAAQNYTCLPDATYQKDIKTINHKIEDQMFPSESKREEDEEYSWDSGSLFESSAKTQVCIPESMYQKVMEINREVEELPEKPSAFKPAVEMQKTVPNKAFELKNEQTLRAAQMFPSESKQKDDEENSWDSESPCETVSQKDVYLPKATHQKEFDTLSGKLEESPVKDGLLKPTCGRKVSLPNKALELKDRETFKAESPDKDGLLKPTCGRKVSLPNKALELKDRETLKAESPDNDGLLKPTCGRKVSLPNKALELKDRETFKAAQMFPSESKQKDDEENSWDFESFLETLLQNDVCLPKATHQKEFDTLSGKLEESPDKDGLLKPTCGMKISLPNKALELKDRETFKAEDVSSVESTFSLFGKPTTENSQSTKVEEDFNLTTKEGATKTVTGQQERDIGIIERAPQDQTNKMPTSELGRKEDTKSTSDSEIISVSDTQNYECLPEATYQKEIKTTNGKIEESPEKPSHFEPATEMQNSVPNKGLEWKNKQTLRADSTTLSKILDALPSCERGRELKKDNCEQITAKMEQTKNKFCVLQKELSEAKEIKSQLENQKAKWEQELCSVRLTLNQEEEKRRNVDILKEKIRPEEQLRKKLEVKQQLEQTLRIQDIELKSVTSNLNQVSHTHESENDLFHENCMLKKEIAMLKLEVATLKHQHQVKENKYFEDIKILQEKNAELQMTLKLKQKTVTKRASQYREQLKVLTAENTMLTSKLKEKQDKEILETEIESHHPRLASALQDHDQSVTSRKNQELAFHSAGDAPLQGIMNVDVSNTIYNNEVLHQPLYEAQRKSKSPKINLNYAGDDLRENALVSEHAQRDRCETQCQMKKAEHMYQNEQDNVDKHTEQQESLEQKLFQLESKNRWLRQQLVYAHKKVNKSKVTINIQFPEMKMQRHLNEKNEEVFNYGNHLKERIDQYEKEKAEREVSIKKYKYFSNFLKESGLG

SEQ ID NO: 7639 - protein, 495 aa, Homo sapiens
MAANWTLSWGQGGPCNSPGSDTPRSVASPETQLGNHDRNPETWHMNFRMFSCPEESDPIQALRKLTELCHLWLRPDLHTKEQILDMLVMEQFMISMPQELQVLVKVNGVQSCKDLEDLLRNNRRPKKWSIVNLLGKEYLMLNSDVEMAEAPASVRDDPRDVSSQWASSVNQMHPGTGQARREQQILPRVAALSRRQGEDFLLHKSIDVTGDPNSPRPKQTLEKDLKENREENPGLSSPEPQLPKSPNLVRAKEGKEPQKRASVENVDADTPSACVVEREALTHSGNRGDALNLSSPKRSKPDASSISQEEPQGEATPVGNRESPGQAEINPVHSPGPAGPVSHPDGQEAKALPPFACDVCNKSFKYFSQLSIHRRSHTGDRPFQCDLCRKRFLQPSDLRVHQRVHTGERPYMCDVCQKRFAHESTLQGHKRIHTGERPFKCKYCSKVFSHKGNLNVHQRTHSGEKPYKCPTCQKAFRQLGTFKRHLKTHRETTSQ

SEQ ID NO: 7640 - protein, 2063 aa, Homo sapiens
MVLDDLPNLEDIYTSLCSSTMEDSEMDFDSGLEDDDTKSDSILEDSTIFVAFKGNIDDKDFKWKLDAILKNVPNLLHMESSKLKVQKVEPWNSVRVTFNIPREAAERLRILAQSNNQQLRDLGILSVQIEGEGAINLALAQNRSQDVRMNGPMGAGNSVRMEAGFPMASGPGIIRMNNPATVMIPPGGNVSSSMMAPGPNPELQPRTPRPASQSDAMDPLLSGLHIQQQSHPSGSLAPPHHPMQPVSVNRQMNPANFPQLQQQQQQQQQQQQQQQQQQQQQQQQQLQARPPQQHQQQQPQGIRPQFTAPTQVPVPPGWNQLPSGALQPPPAQGSLGTMTANQGWKKAPLPGPMQQQLQARPSLATVQTPSHPPPPYPFGSQQASQAHTNFPQMSNPGQFTAPQMKSLQGGPSRVPTPLQQPHLTNKSPASSPSSFQQGSPASSPTVNQTQQQMGPRPPQNNPLPQGFQQPVSSPGRNPMVQQGNVPPNFMVMQQQPPNQGPQSLHPGLGGMPKRLPPGFSAGQANPNFMQGQVPSTTATTPGNSGAPQLQANQNVQHAGGQGAGPPQNQMQVSHGPPNMMQPSLMGIHGNMNNQQAGTSGVPQVNLSNMQGQPQQGPPSQLMGMHQQIVPSQGQMVQQQGTLNPQNPMILSRAQLMPQGQMMVNPPSQNLGPSPQRMTPPKQMLSQQGPQMMAPHNQMMGPQGQVLLQQNPMIEQIMTNQMQGNKQQFNTQNQSNVMPGPAQIMRGPTPNMQGNMVQFTGQMSGQMLPQQGPVNNSPSQVMGIQGQVLRPPGPSPHMAQQHGDPATTANNDVSLSQMMPDVSIQQTNMVPPHVQAMQGNSASGNHFSGHGMSFNAPFSGAPNGNQMSCGQNPGFPVNKDVTLTSPLLVNLLQSDISAGHFGVNNKQNNTNANKPKKKKPPRKKKNSQQDLNTPDTRPAGLEEADQPPLPGEQGINLDNSGPKLPEFSNRPPGYPSQPVEQRPLQQMPPQLMQHVAPPPQPPQQQPQPQLPQQQQPPPPSQPQSQQQQQQQQQMMMMLMMQQDPKSVRLPVSQNVHPPRGPLNPDSQRMPMQQSGSVPVMVSLQGPASVPPSPDKQRMPMPVNTPLGSNSRKMVYQESPQNPSSSPLAEMASLPEASGSEAPSVPGGPNNMPSHVVLPQNQLMMTGPKPGPSPLSATQGATPQQPPVNSLPSSHGHHFPNVAAPTQTSRPKTPNRASPRPYYPQTPNNRPPSTEPSEISLSPERLNASIAGLFPPQINIPLPPRPNLNRGFDQQGLNPTTLKAIGQAPSNLTMNPSNFATPQTHKLDSVVVNSGKQSNSGATKRASPSNSRRSSPGSSRKTTPSPGRQNSKAPKLTLASQTNAALLQNVELPRNVLVSPTPLANPPVPGSFPNNSGLNPQNSTVSVAAVGGVVEDNKESLNVPQDSDCQNSQSRKEQVNIELKAVPAQEVKMVVPEDQSKKDGQPSDPNKLPSVEENKNLVSPAMREAPTSLSQLLDNSGAPNVTIKPPGLTDLEVTPPVVSGEDLKKASVIPTLQDLSSSKEPSNSLNLPHSNELCSSLVHPELSEVSSNVAPSIPPVMSRPVSSSSISTPLPPNQITVFVTSNPITTSANTSAALPTHLQSALMSTVVTMPNAGSKVMVSEGQSAAQSNARPQFITPVFINSSSIIQVMKGSQPSTIPAAPLTTNSGLMPPSVAVVGPLHIPQNIKFSSAPVPPNALSSSPAPNIQTGRPLVLSSRATPVQLPSPPCTSSPVVPSHPPVQQVKELNPDEASPQVNTSADQNTLPSSQSTTMVSPLLTNSPGSSGNRRSPVSSSKGKGKVDKIGQILLTKACKKVTGSLEKGEEQYGADGETEGQGLDTTAPGLMGTEQLSTELDSKTPTPPAPTLLKMTSSPVGPGTASAGPSLPGGALPTSVRSIVTTLVPSELISAVPTTKSNHGGIASESLAGGLVEEKVGSHPELLPSIAPSQNLVSKETSTTALQASVARPELEVNAAIVSGQSSEPKEIVEKSKIPGRRNSRTEEPTVASESVENGHRKRSSRPASASSSTKDITSAVQSKRRKSK

SEQ ID NO: 7641 - protein, 285 aa, Homo sapiens
MVLLTSRMKPLTSRIISIIIILAGAIALIIGFGISGRHSITVTTVASAGNIGEDGILSCTFEPDIKLSDIVIQWLKEGVLGLVHEFKEGKDELSEQDEMFRGRTAVFADQVIVGNASLRLKNVQLTDAGTYKCYIITSKGKGNANLEYKTGAFSMPEVNVDYNASSETLRCEAPRWFPQPTVVWASQVDQGANFSEVSNTSFELNSENVTMKVVSVLYNVTINNTYSCMIENDIAKATGDIKVTESEIKRRSHLQLLNSKASLCVSSFFAISWALLPLSPYLMLK

SEQ ID NO: 7642 - protein, 592 aa, Homo sapiens
MGRGLLRGLWPLHIVLWTRIASTIPPHVQKSDVEMEAQKDEIICPSCNRTAHPLRHINNDMIVTDNNGAVKFPQLCKFCDVRFSTCDNQKSCMSNCSITSICEKPQEVCVAVWRKNDENITLETVCHDPKLPYHDFILEDAASPKCIMKEKKKPGETFFMCSCSSDECNDNIIFSEEYNTSNPDLLLVIFQVTGISLLPPLGVAISVIIIFYCYRVNRQQKLSSTWETGKTRKLMEFSEHCAIILEDDRSDISSTCANNINHNTELLPIELDTLVGKGRFAEVYKAKLKQNTSEQFETVAVKIFPYEEYASWKTEKDIFSDINLKHENILQFLTAEERKTELGKQYWLITAFHAKGNLQEYLTRHVISWEDLRKLGSSLARGIAHLHSDHTPCGRPKMPIVHRDLKSSNILVKNDLTCCLCDFGLSLRLDPTLSVDDLANSGQVGTARYMAPEVLESRMNLENVESFKQTDVYSMALVLWEMTSRCNAVGEVKDYEPPFGSKVREHPCVESMKDNVLRDRGRPEIPSFWLNHQGIQMVCETLTECWDHDPEARLTAQCVAERFSELEHLDRLSGRSCSEEKIPEDGSLNTTK

SEQ ID NO: 7643 - protein, 1374 aa, Homo sapiens
MSTEADEGITFSVPPFAPSGFCTIPEGGICRRGGAAAVGEGEEHQLPPPPPGSFWNVESAAAPGIGCPAATSSSSATRGRGSSVGGGSRRTTVAYVINEASQGQLVVAESEALQSLREACETVGATLETLHFGKLDFGETTVLDRFYNADIAVVEMSDAFRQPSLFYHLGVRESFSMANNIILYCDTNSDSLQSLKEIICQKNTMCTGNYTFVPYMITPHNKVYCCDSSFMKGLTELMQPNFELLLGPICLPLVDRFIQLLKVAQASSSQYFRESILNDIRKARNLYTGKELAAELARIRQRVDNIEVLTADIVINLLLSYRDIQDYDSIVKLVETLEKLPTFDLASHHHVKFHYAFALNRRNLPGDRAKALDIMIPMVQSEGQVASDMYCLVGRIYKDMFLDSNFTDTESRDHGASWFKKAFESEPTLQSGINYAVLLLAAGHQFESSFELRKVGVKLSSLLGKKGNLEKLQSYWEVGFFLGASVLANDHMRVIQASEKLFKLKTPAWYLKSIVETILIYKHFVKLTTEQPVAKQELVDFWMDFLVEATKTDVTVVRFPVLILEPTKIYQPSYLSINNEVEEKTISIWHVLPDDKKGIHEWNFSASSVRGVSISKFEERCCFLYVLHNSDDFQIYFCTELHCKKFFEMVNTITEEKGRSTEEGDCESDLLEYDYEYDENGDRVVLGKGTYGIVYAGRDLSNQVRIAIKEIPERDSRYSQPLHEEIALHKHLKHKNIVQYLGSFSENGFIKIFMEQVPGGSLSALLRSKWGPLKDNEQTIGFYTKQILEGLKYLHDNQIVHRDIKGDNVLINTYSGVLKISDFGTSKRLAGINPCTETFTGTLQYMAPEIIDKGPRGYGKAADIWSLGCTIIEMATGKPPFYELGEPQAAMFKVGMFKVHPEIPESMSAEAKAFILKCFEPDPDKRACANDLLVDEFLKVSSKKKKTQPKLSALSAGSNEYLRSISLPVPVLVEDTSSSSEYGSVSPDTELKVDPFSFKTRAKSCGERDVKGIRTLFLGIPDENFEDHSAPPSPEEKDSGFFMLRKDSERRATLHRILTEDQDKIVRNLMESLAQGAEEPKLKWEHITTLIASLREFVRSTDRKIIATTLSKLKLELDFDSHGISQVQVVLFGFQDAVNKVLRNHNIKPHWMFALDSIIRKAVQTAITILVPELRPHFSLASESDTADQEDLDVEDDHEEQPSNQTVRRPQAVIEDAVATSGVSTLSSTVSHDSQSAHRSLNVQLGRMKIETNRLLEELVRKEKELQALLHRAIEEKDQEIKHLKLKSQPIEIPELPVFHLNSSGTNTEDSELTDWLRVNGADEDTISRFLAEDYTLLDVLYYVTRDDLKCLRLRGGMLCTLWKAIIDFRNKQT

SEQ ID NO: 7644 - protein, 3910 aa, Homo sapiens
MEDEERQKKLEAGKAKVGEPEGYFLFSLAQFRQRKAQSDGQSPSKKQKKKRKTSSSKHDVSAHHDLNIDQSQCNEMYINSSQRVESTVIPESTIMRTLHSGEITSHEQGFSVELESEISTTADDCSSEVNGCSFVMRTGKPTNLLREEEFGVDDSYSEQGAQDSPTHLEMMESELAGKQHEIEELNRELEEMRVTYGTEGLQQLQEFEAAIKQRDGIITQLTANLQQARREKDETMREFLELTEQSQKLQIQFQQLQASETLRNSTHSSTAADLLQAKQQILTHQQQLEEQDHLLEDYQKKKEDFTMQISFLQEKIKVYEMEQDKKVENSNKEEIQEKETIIEELNTKIIEEEKKTLELKDKLTTADKLLGELQEQIVQKNQEIKNMKLELTNSKQKERQSSEEIKQLMGTVEELQKRNHKDSQFETDIVQRMEQETQRKLEQLRAELDEMYGQQIVQMKQELIRQHMAQMEEMKTRHKGEMENALRSYSNITVNEDQIKLMNVAINELNIKLQDTNSQKEKLKEELGLILEEKCALQRQLEDLVEELSFSREQIQRARQTIAEQESKLNEAHKSLSTVEDLKAEIVSASESRKELELKHEAEVTNYKIKLEMLEKEKNAVLDRMAESQEAELERLRTQLLFSHEEELSKLKEDLEIEHRINIEKLKDNLGIHYKQQIDGLQNEMSQKIETMQFEKDNLITKQNQLILEISKLKDLQQSLVNSKSEEMTLQINELQKEIEILRQEEKEKGTLEQEVQELQLKTELLEKQMKEKENDLQEKFAQLEAENSILKDEKKTLEDMLKIHTPVSQEERLIFLDSIKSKSKDSVWEKEIEILIEENEDLKQQCIQLNEEIEKQRNTFSFAEKNFEVNYQELQEEYACLLKVKDDLEDSKNKQELEYKSKLKALNEELHLQRINPTTVKMKSSVFDEDKTFVAETLEMGEVVEKDTTELMEKLEVTKREKLELSQRLSDLSEQLKQKHGEISFLNEEVKSLKQEKEQVSLRCRELEIIINHNRAENVQSCDTQVSSLLDGVVTMTSRGAEGSVSKVNKSFGEESKIMVEDKVSFENMTVGEESKQEQLILDHLPSVTKESSLRATQPSENDKLQKELNVLKSEQNDLRLQMEAQRICLSLVYSTHVDQVREYMENEKDKALCSLKEELIFAQEEKIKELQKIHQLELQTMKTQETGDEGKPLHLLIGKLQKAVSEECSYFLQTLCSVLGEYYTPALKCEVNAEDKENSGDYISENEDPELQDYRYEVQDFQENMHTLLNKVTEEYNKLLVLQTRLSKIWGQQTDGMKLEFGEENLPKEETEFLSIHSQMTNLEDIDVNHKSKLSSLQDLEKTKLEEQVQELESLISSLQQQLKETEQNYEAEIHCLQKRLQAVSESTVPPSLPVDSVVITESDAQRTMYPGSCVKKNIDGTIEFSGEFGVKEETNIVKLLEKQYQEQLEEEVAKVIVSMSIAFAQQTELSRISGGKENTASSKQAHAVCQQEQHYFNEMKLSQDQIGFQTFETVDVKFKEEFKPLSKELGEHGKEILLSNSDPHDIPESKDCVLTISEEMFSKDKTFIVRQSIHDEISVSSMDASRQLMLNEEQLEDMRQELVRQYQEHQQATELLRQAHMRQMERQREDQEQLQEEIKRLNRQLAQRSSIDNENLVSERERVLLEELEALKQLSLAGREKLCCELRNSSTQTQNGNENQGEVEEQTFKEKELDRKPEDVPPEILSNERYALQKANNRLLKILLEVVKTTAAVEETIGRHVLGILDRSSKSQSSASLIWRSEAEASVKSCVHEEHTRVTDESIPSYSGSDMPRNDINMWSKVTEEGTELSQRLVRSGFAGTEIDPENEELMLNISSRLQAAVEKLLEAISETSSQLEHAKVTQTELMRESFRQKQEATESLKCQEELRERLHEESRAREQLAVELSKAEGVIDGYADEKTLFERQIQEKTDIIDRLEQELLCASNRLQELEAEQQQIQEERELLSRQKEAMKAEAGPVEQQLLQETEKLMKEKLEVQCQAEKVRDDLQKQVKALEIDVEEQVSRFIELEQEKNTELMDLRQQNQALEKQLEKMRKFLDEQAIDREHERDVFQQEIQKLEQQLKVVPRFQPISEHQTREVEQLANHLKEKTDKCSELLLSKEQLQRDIQERNEEIEKLEFRVRELEQALLVSADTFQKVEDRKHFGAVEAKPELSLEVQLQAERDAIDRKEKEITNLEEQLEQFREELENKNEEVQQLHMQLEIQKKESTTRLQELEQENKLFKDDMEKLGLAIKESDAMSTQDQHVLFGKFAQIIQEKEVEIDQLNEQVTKLQQQLKITTDNKVIEEKNELIRDLETQIECLMSDQECVKRNREEEIEQLNEVIEKLQQELANIGQKTSMNAHSLSEEADSLKHQLDVVIAEKLALEQQVETANEEMTFMKNVLKETNFKMNQLTQELFSLKRERESVEKIQSIPENSVNVAIDHLSKDKPELEVVLTEDALKSLENQTYFKSFEENGKGSIINLETRLLQLESTVSAKDLELTQCYKQIKDMQEQGQFETEMLQKKIVNLQKIVEEKVAAALVSQIQLEAVQEYAKFCQDNQTISSEPERTNIQNLNQLREDELGSDISALTLRISELESQVVEMHTSLILEKEQVEIAEKNVLEKEKKLLELQKLLEGNEKKQREKEKKRSPQDVEVLKTTTELFHSNEESGFFNELEALRAESVATKAELASYKEKAEKLQEELLVKETNMTSLQKDLSQVRDHLAEAKEKLSILEKEDETEVQESKKACMFEPLPIKLSKSIASQTDGTLKISSSNQTPQILVKNAGIQINLQSECSSEEVTEIISQFTEKIEKMQELHAAEILDMESRHISETETLKREHYVAVQLLKEECGTLKAVIQCLRSKEVFGFYNMCFSTLCDSGSDWGQGIYLTHSQGFDIASEGRGEESESATDSFPKKIKGLLRAVHNEGMQVLSLTESPYSDGEDHSIQQVSEPWLEERKAYINTISSLKDLITKMQLQREAEVYDSSQSHESFSDWRGELLLALQQVFLEERSVLLAAFRTELTALGTTDAVGLLNCLEQRIQEQGVEYQAAMECLQKADRRSLLSEIQALHAQMNGRKITLKREQESEKPSQELLEYNIQQKQSQMLEMQVELSSMKDRATELQEQLSSEKMVVAELKSELAQTKLELETTLKAQHKHLKELEAFRLEVKDKTDEVHLLNDTLASEQKKSRELQWALEKEKAKLGRSEERDKEELEDLKFSLESQKQRNLQLNLLLEQQKQLLNESQQKIESQRMLYDAQLSEEQGRNLELQVLLESEKVRIREMSSTLDRERELHAQLQSSDGTGQSRPPLPSEDLLKELQKQLEEKHSRIVELLNETEKYKLDSLQTRQQMEKDRQVHRKTLQTEQEANTEGQKKMHELQSKVEDLQRQLEEKRQQVYKLDLEGQRLQGIMQEFQKQELEREEKRESRRILYQNLNEPTTWSLTSDRTRNWVLQQKIEGETKESNYAKLIEMNGGGTGCNHELEMIRQKLQCVASKLQVLPQKASERLQFETADDEDFIWVQENIDEIILQLQKLTGQQGEEPSLVSPSTSCGSLTERLLRQNAELTGHISQLTEEKNDLRNMVMKLEEQIRWYRQTGAGRDNSSRFSLNGGANIEAIIASEKEVWNREKLTLQKSLKRAEAEVYKLKAELRNDSLLQTLSPDSEHVTLKRIYGKYLRAESFRKALIYQKKYLLLLLGGFQECEDATLALLARMGGQPAFTDLEVITNRPKGFTRFRSAVRVSIAISRMKFLVRRWHRVTGSVSININRDGFGLNQGAEKTDSFYHSSGGLELYGEPRHTTYRSRSDLDYIRSPLPFQNRYPGTPADFNPGSLACSQLQNYDPDRALTDYITRLEALQRRLGTIQSGSTTQFHAGMRR

SEQ ID NO: 7645 - protein, 977 aa, Homo sapiens
MPAVSKGDGMRGLAVFISDIRNCKSKEAEIKRINKELANIRSKFKGDKALDGYSKKKYVCKLLFIFLLGHDIDFGHMEAVNLLSSNKYTEKQIGYLFISVLVNSNSELIRLINNAIKNDLASRNPTFMCLALHCIANVGSREMGEAFAADIPRILVAGDSMDSVKQSAALCLLRLYKASPDLVPMGEWTARVVHLLNDQHMGVVTAAVSLITCLCKKNPDDFKTCVSLAVSRLSRIVSSASTDLQDYTYYFVPAPWLSVKLLRLLQCYPPPEDAAVKGRLVECLETVLNKAQEPPKSKKVQHSNAKNAILFETISLIIHYDSEPNLLVRACNQLGQFLQHRETNLRYLALESMCTLASSEFSHEAVKTHIDTVINALKTERDVSVRQRAADLLYAMCDRSNAKQIVSEMLRYLETADYAIREEIVLKVAILAEKYAVDYSWYVDTILNLIRIAGDYVSEEVWYRVLQIVTNRDDVQGYAAKTVFEALQAPACHENMVKVGGYILGEFGNLIAGDPRSSPPVQFSLLHSKFHLCSVATRALLLSTYIKFINLFPETKATIQGVLRAGSQLRNADVELQQRAVEYLTLSSVASTDVLATVLEEMPPFPERESSILAKLKRKKGPGAGSALDDGRRDPSSNDINGGMEPTPSTVSTPSPSADLLGLRAAPPPAAPPASAGAGNLLVDVFDGPAAQPSLGPTPEEAFLSELEPPAPESPMALLADPAPAADPGPEDIGPPIPEADELLNKFVCKNNGVLFENQLLQIGVKSEFRQNLGRMYLFYGNKTSVQFQNFSPTVVHPGDLQTQLAVQTKRVAAQVDGGAQVQQVLNIECLRDFLTPPLLSVRFRYGGAPQALTLKLPVTINKFFQPTEMAAQDFFQRWKQLSLPQQEAQKIFKANHPMDAEVTKAKLLGFGSALLDNVDPNPENFVGAGIIQTKALQVGCLLRLEPNAQAQMYRLTLRTSKEPVSRHLCELLAQQF

SEQ ID NO: 7646 - protein, 446 aa, Homo sapiens
MGLEALVPLAVIVAIFLLLVDLMHRRQRWAARYPPGPLPLPGLGNLLHVDFQNTPYCFDQLRRRFGDVFSLQLAWTPVVVLNGLAAVREALVTHGEDTADRPPVPITQILGFGPRSQGRPFRPNGLLDKAVSNVIASLTCGRRFEYDDPRFLRLLDLAQEGLKEESGFLREVLNAVPVLLHIPALAGKVLRFQKAFLTQLDELLTEHRMTWDPAQPPRDLTEAFLAEMEKAKGNPESSFNDENLRIVVADLFSAGMVTTSTTLAWGLLLMILHPDVQRRVQQEIDDVIGQVRRPEMGDQAHMPYTTAVIHEVQRFGDIVPLGVTHMTSRDIEVQGFRIPKGTTLITNLSSVLKDEAVWEKPFRFHPEHFLDAQGHFVKPEAFLPFSAGRRACLGEPLARMELFLFFTSLLQHFSFSVPTGQPRPSHHGVFAFLVSPSPYELCAVPR

SEQ ID NO: 7647 - protein, 617 aa, Homo sapiens
MKVSLGNGEMGVSAHLQPCKAGTTRFFTSNTHSSVVLQGFDQLRIEGLLCDVTLVPGDGDEIFPVHRAMMASASDYFKAMFTGGMKEQDLMCIKLHGVNKVGLKKIIDFIYTAKLSLNMDNLQDTLEAASFLQILPVLDFCKVFLISGVSLDNCVEVGRIANTYNLIEVDKYVNNFILKNFPALLSTGEFLKLPFERLAFVLSSNSLKHCTELELFKAACRWLRLEDPRMDYAAKLMKNIRFPLMTPQDLINYVQTVDFMRTDNTCVNLLLEASNYQMMPYMQPVMQSDRTAIRSDSTHLVTLGGVLRQQLVVSKELRMYDERAQEWRSLAPMDAPRYQHGIAVIGNFLYVVGGQSNYDTKGKTAVDTVFRFDPRYNKWMQVASLNEKRTFFHLSALKGHLYAVGGRSAAGELATVECYNPRMNEWSYVAKMSEPHYGHAGTVYGGLMYISGGITHDTFQNELMCFDPDTDKWMQKAPMTTVRGLHCMCTVGDKLYVIGGNHFRGTSDYDDVLSCEYYSPTLDQWTPIAAMLRGQSDVGVAVFENKIYVVGGYSWNNRCMVEIVQKYDPEKDEWHKVFDLPESLGGIRACTLTVFPPEENPGSPSRESPLSAPSDHS

SEQ ID NO: 7648 - protein, 681 aa, Homo sapiens
MCIRQLKFFTTACVCECPQNILSPQPSCVNLGMMWTWALWMLPSLCKFSLAALPAKPENISCVYYYRKNLTCTWSPGKETSYTQYTVKRTYAFGEKHDNCTTNSSTSENRASCSFFLPRITIPDNYTIEVEAENGDGVIKSHMTYWRLENIAKTEPPKIFRVKPVLGIKRMIQIEWIKPELAPVSSDLKYTLRFRTVNSTSWMEVNFAKNRKDKNQTYNLTGLQPFTEYVIALRCAVKESKFWSDWSQEKMGMTEEEAPCGLELWRVLKPAEADGRRPVRLLWKKARGAPVLEKTLGYNIWYYPESNTNLTETMNTTNQQLELHLGGESFWVSMISYNSLGKSPVATLRIPAIQEKSFQCIEVMQACVAEDQLVVKWQSSALDVNTWMIEWFPDVDSEPTTLSWESVSQATNWTIQQDKLKPFWCYNISVYPMLHDKVGEPYSIQAYAKEGVPSEGPETKVENIGVKTVTITWKEIPKSERKGIICNYTIFYQAEGGKGFSKTVNSSILQYGLESLKRKTSYIVQVMASTSAGGTNGTSINFKTLSFSVFEIILITSLIGGGLLILIILTVAYGLKKPNKLTHLCWPTVPNPAESSIATWHGDDFKDKLNLKESDDSVNTEDRILKPCSTPSDKLVIDKLVVNFGNVLQEIFTDEARTGQENNLGGEKNGTRILSSCPTSI

SEQ ID NO: 7649 - protein, 896 aa, Homo sapiens
MTEESEETVLYIEHRYVCSECNQLYGSLEEVLMHQNSHVPQQHFELVGVADPGVTVATDTASGTGLYQTLVQESQYQCLECGQLLMSPSQLLEHQELHLKMMAPQEAVPAEPSPKAPPLSSSTIHYECVDCKALFASQELWLNHRQTHLRATPTKAPAPVVLGSPVVLGPPVGQARVAVEHSYRKAEEGGEGATVPSAAATTTEVVTEVELLLYKCSECSQLFQLPADFLEHQATHFPAPVPESQEPALQQEVQASSPAEVPVSQPDPLPASDHSYELRNGEAIGRDRRGRRARRNNSGEAGGAATQELFCSACDQLFLSPHQLQQHLRSHREGVFKCPLCSRVFPSPSSLDQHLGDHSSESHFLCVDCGLAFGTEALLLAHRRAHTPNPLHSCPCGKTFVNLTKFLYHRRTHGVGGVPLPTTPVPPEEPVIGFPEPAPAETGEPEAPEPPVSEETSAGPAAPGTYRCLLCSREFGKALQLTRHQRFVHRLERRHKCSICGKMFKKKSHVRNHLRTHTGERPFPCPDCSKPFNSPANLARHRLTHTGERPYRCGDCGKAFTQSSTLRQHRLVHAQHFPYRCQECGVRFHRPYRLLMHRYHHTGEYPYKCRECPRSFLLRRLLEVHQLVVHAGRQPHRCPSCGAAFPSSLRLREHRCAAAAAQAPRRFECGTCGKKVGSAARLQAHEAAHAAAGPGEVLAKEPPAPRAPRATRAPVASPAALGSTATASPAAPARRRGLECSECKKLFSTETSLQVHRRIHTGERPYPCPDCGKAFRQSTHLKDHRRLHTGERPFACEVCGKAFAISMRLAEHRRIHTGERPYSCPDCGKSYRSFSNLWKHRKTHQQQHQAAVRQQLAEAEAAVGLAVMETAVEALPLVEAIEIYPLAEAEGVQISG

SEQ ID NO: 7650 - protein, 1028 aa, Homo sapiens
MNLFNLDRFRFEKRNKIEEAPEATPQPSQPGPSSPISLSAEEENAEGEVSRANTPDSDITEKTEDSSVPETPDNERKASISYFKNQRGIQYIDLSSDSEDVVSPNCSNTVQEKTFNKDTVIIVSEPSEDEESQGLPTMARRNDDISELEDLSELEDLKDAKLQTLKELFPQRSDNDLLKLIESTSTMDGAIAAALLMFGDAGGGPRKRKLSSSSEPYEEDEFNDDQSIKKTRLDHGEESNESAESSSNWEKQESIVLKLQKEFPNFDKQELREVLKEHEWMYTEALESLKVFAEDQDMQYVSQSEVPNGKEVSSRSQNYPKNATKTKLKQKFSMKAQNGFNKKRKKNVFNPKRVVEDSEYDSGSDVGSSLDEDYSSGEEVMEDGYKGKILHFLQDASIGELTLIPQCSQKKAQKITELRPFNSWEALFTKMSKTNGLSEDLIWHCKTLIQERDVVIRLMNKCEDISNKLTKQVTMLTGNGGGWNIEQPSILNQSLSLKPYQKVGLNWLALVHKHGLNGILADEMGLGKTIQAIAFLAYLYQEGNNGPHLIVVPASTIDNWLREVNLWCPTLKVLCYYGSQEERKQIRFNIHSRYEDYNVIVTTYNCAISSSDDRSLFRRLKLNYAIFDEGHMLKNMGSIRYQHLMTINANNRLLLTGTPVQNNLLELMSLLNFVMPHMFSSSTSEIRRMFSSKTKSADEQSIYEKERIAHAKQIIKPFILRRVKEEVLKQLPPKKDRIELCAMSEKQEQLYLGLFNRLKKSINNLVTEKNTEMCNVMMQLRKMANHPLLHRQYYTAEKLKEMSQLMLKEPTHCEANPDLIFEDMEVMTDFELHVLCKQYRHINNFQLDMDLILDSGKFRVLGCILSELKQKGDRVVLFSQFTMMLDILEVLLKHHQHRYLRLDGKTQISERIHLIDEFNTDMDIFVFLLSTKAGGLGINLTSANVVILHDIDCNPYNDKQAEDRCHRVGQTKEVLVIKLISQGTIEESMLKINQQKLKLEQDMTTVDEGDEGSMPADIATLLKTSMGL

SEQ ID NO: 7651 - protein, 332 aa, Homo sapiens
MSDSKEPRVQQLGLLEEDPTTSGIRLFPRDFQFQQIHGHKSSTVPFLLGPVSKVPSSLSQEQSEQDAIYQNLTQLKAAVGELSEKSKLQEIYQELTQLKAAVGELPEKSKLQEIYQELTRLKAAVGELPEKSKLQEIYQELTRLKAAVGELPEKSKLQEIYQELTELKAAVGELPEKSKLQEIYQELTQLKAAVERLCRHCPKDWTFFQGNCYFMSNSQRNWHDSVTACQEVRAQLVVIKTAEEQNFLQLQTSRSNRFSWMGLSDLNQEGTWQWVDGSPLSPSFQRYWNSGEPNNSGNEDCAEFSGSGWNDNRCDVDNYWICKKPAACFRDE

SEQ ID NO: 7652 - protein, 1141 aa, Homo sapiens
MAVPGDAARVRDKPVHSGVSQAPTAGRDCHHRADPASPRDSGCRGCWGDLVLQPLRSSRKLSSALCAGSLSFLLALLVRLVRGEVGCDLEQCKEAAAAEEEEAAPGAEGGVFPGPRGGAPGGGARLSPWLQPSALLFSLLCAFFWMGLYLLRAGVRLPLAVALLAACCGGEALVQIGLGVGEDHLLSLPAAGVVLSCLAAATWLVLRLRLGVLMIALTSAVRTVSLISLERFKVAWRPYLAYLAGVLGILLARYVEQILPQSAEAAPREHLGSQLIAGTKEDIPVFKRRRRSSSVVSAEMSGCSSKSHRRTSLPCIPREQLMGHSEWDHKRGPRGSQSSGTSITVDIAVMGEAHGLITDLLADPSLPPNVCTSLRAVSNLLSTQLTFQAIHKPRVNPVTSLSENYTCSDSEESSEKDKLAIPKRLRRSLPPGLLRRVSSTWTTTTSATGLPTLEPAPVRRDRSTSIKLQEAPSSSPDSWNNPVMMTLTKSRSFTSSYAISAANHVKAKKQSRPGALAKISPLSSPCSSPLQGTPASSLVSKISAVQFPESADTTAKQSLGSHRALTYTQSAPDLSPQILTPPVICSSCGRPYSQGNPADEPLERSGVATRTPSRTDDTAQVTSDYETNNNSDSSDIVQNEDETECLREPLRKASACSTYAPETMMFLDKPILAPEPLVMDNLDSIMEQLNTWNFPIFDLVENIGRKCGRILSQVSYRLFEDMGLFEAFKIPIREFMNYFHALEIGYRDIPYHNRIHATDVLHAVWYLTTQPIPGLSTVINDHGSTSDSDSDSGFTHGHMGYVFSKTYNVTDDKYGCLSGNIPALELMALYVAAAMHDYDHPGRTNAFLVATSAPQAVLYNDRSVLENHHAAAAWNLFMSRPEYNFLINLDHVEFKHFRFLVIEAILATDLKKHFDFVAKFNGKVNDDVGIDWTNENDRLLVCQMCIKLADINGPAKCKELHLQWTDGIVNEFYEQGDEEASLGLPISPFMDRSAPQLANLQESFISHIVGPLCNSYDSAGLMPGKWVEDSDESGDTDDPEEEEEEAPAPNEEETCENNESPKKKTFKRRKIYCQITQHLLQNHKMWKKVIEEEQRLAGIENQSLDQTPQSHSSEQIQAIKEEEEEKGKPRGEEIPTQKPDQ

SEQ ID NO: 7653 - protein, 2152 aa, Homo sapiens
MTHSPATSEDEERHSASECPEGGSESDSSPDGPGRGPRGTRGQGSGAPGSLASVRGLQGRSMSVPDDAHFSMMVFRIGIPDLHQTKCLRFNPDATIWTAKQQVLCALSESLQDVLNYGLFQPATSGRDANFLEEERLLREYPQSFEKGVPYLEFRYKTRVYKQTNLDEKQLAKLHTKTGLKKFLEYVQLGTSDKVARLLDKGLDPNYHDSDSGETPLTLAAQTEGSVEVIRTLCLGGAHIDFRARDGMTALHKAACARHCLALTALLDLGGSPNYKDRRGLTPLFHTAMVGGDPRCCELLLFNRAQLGIADENGWQEIHQACQRGHSQHLEHLLFYGAEPGAQNASGNTALHICALYNKETCARILLYRGADKDVKNNNGQTPFQVAVIAGNFELGELIRNHREQDVVPFQESPKYAARRRGPPGTGLTVPPALLRANSDTSMALPDWMVFSAPGAASSGAPGPTSGSQGQSQPSAPTTKLSSGTLRSASSPRGARARSPSRGRHPEDAKRQPRGRPSSSGTPREGPAGGTGGSGGPGGSLGSRGRRRKLYSAVPGRSFMAVKSYQAQAEGEISLSKGEKIKVLSIGEGGFWEGQVKGRVGWFPSDCLEEVANRSQESKQESRSDKAKRLFRHYTVGSYDSFDAPSDYIIKEKTVLLQKKDSEGFGFVLRGAKAQTPIEEFTPTPAFPALQYLESVDEGGVAWRAGLRMGDFLIEVNGQNVVKVGHRQVVNMIRQGGNTLMVKVVMVTRHPDMDEAVHKKAPQQAKRLPPPTISLRSKSMTSELEEMEYEQQPAPVPSMEKKRTVYQMALNKLDEILAAAQQTISASESPGPGGLASLGKHRPKGFFATESSFDPHHRAQPSYERPSFLPPGPGLMLRQKSIGAAEDDRPYLAPPAMKFSRSLSVPGSEDIPPPPTTSPPEPPYSTPPVPSSSGRLTPSPRGGPFNPGSGGPLPASSPASFDGPSPPDTRVGSREKSLYHSGPLPPAHHHPPHHHHHHAPPPQPHHHHAHPPHPPEMETGGSPDDPPPRLALGPQPSLRGWRGGGPSPTPGAPSPSHHGSAGGGGGSSQGPALRYFQLPPRAASAAMYVPARSGRGRKGPLVKQTKVEGEPQKGGGLPPAPSPTSPASPQPPPAVAAPSEKNSIPIPTIIIKAPSTSSSGRSSQGSSTEAEPPTQPEPTGGGGGGGSSPSPAPAMSPVPPSPSPVPTPASPSGPATLDFTSQFGAALVGAARREGGWQNEARRRSTLFLSTDAGDEDGGDGGLGTGAAPGPRLRHSKSIDEGMFSAEPYLRLESAGSGAGYGGYGAGSRAYGGGGGSSAFTSFLPPRPLVHPLTGKALDPASPLGLALAARERALKESSEGGGAPQPPPRPPSPRYEAPPPTPHHHSPHAHHEPVLRLWGASPPDPARRELGYRAGLGSQEKSLPASPPAARRSLLHRLPPTAPGVGPLLLQLGTEPPAPHPGVSKPWRSAAPEEPERLPLHVRFLENCQPRAPVTSGRGPPSEDGPGVPPPSPRRSVPPSPTSPRASEENGLPLLVLPPPAPSVDVEDGEFLFVEPLPPPLEFSNSFEKPESPLTPGPPHPLPDTPAPATPLPPVPPPAVAAAPPTLDSTASSLTSYDSEVATLTQGASAAPGDPHPPGPPAPAAPAPAAPQPGPDPPPGTDSGIEEVDSRSSSDHPLETISSASTLSSLSAEGGGSAGGGGGAGAGVASGPELLDTYVAYLDGQAFGGSSTPGPPYPPQLMTPSKLRGRALGASGGLRPGPSGGLRDPVTPTSPTVSVTGAGTDGLLALRACSGPPTAGVAGGPVAVEPEVPPVPLPTASSLPRKLLPWEEGPGPPPPPLPGPLAQPQASALATVKASIISELSSKLQQFGGSSAAGGALPWARGGSGGGGDSHHGGASYVPERTSSLQRQRLSDDSQSSLLSKPVSSLFQNWPKPPLPPLPTGTGVSPTAAAAPGATSPSASSSSTSTRHLQGVEFEMRPPLLRRAPSPSLLPASEHKVSPAPRPSSLPILPSGPLYPGLFDIRGSPTGGAGGSADPFAPVFVPPHPGISGGLGGALSGASRSLSPTRLLSLPPDKPFGAKPLGFWTKFDVADWLEWLGLAEHRAQFLDHEIDGSHLPALTKEDYVDLGVTRVGHRMNIDRALKFFLER

SEQ ID NO: 7654 - protein, 537 aa, Homo sapiens
MAQLGKLLKEQKYDRQLRLWGDHGQEALESAHVCLINATATGTEILKNLVLPGNVGIGSFTIIDGNQVSGEDAGNNFFLQRSSIGKNRAEAAMEFLQELNSDVSGSFVEESPENLLDNDPSFFCRFTVVVATQLPESTSLRLADVLWNSQIPLLICRTYGLVGYMRIIIKEHPVIESHPDNALEDLRLDKPFPELREHFQSYDLDHMEKKDHSHTPWIVIIAKYLAQWYSETNGRIPKTYKEKEDFRDLIRQGILKNENGAPEDEENFEEAIKNVNTALNTTQIPSSIEDIFNDDRCINITKQTPSFWILARALKEFVAKEGQGNLPVRGTIPDMIADSGKYIKLQNVYREKAKKDAAAVGNHVAKLLQSIGQAPESISEKELKLLCSNSAFLRVVRCRSLAEEYGLDTINKDEIISSMDNPDNEIVLYLMLRAVDRFHKQQGRYPGVSNYQVEEDIGKLKSCLTGFLQEYGLSVMVKDDYVHEFCRYGAAEPHTIAAFLGGAAAQEVIKIITKQFVIFNNTYIYSGMSQTSATFQL

SEQ ID NO: 7655 - protein, 471 aa, Homo sapiens
MRSCLWRCRHLSQGVQWSLLLAVLVFFLFALPSFIKEPQTKPSRHQRTENIKERSLQSLAKPKSQAPTRARRTTIYAEPVPENNALNTQTQPKAHTTGDRGKEANQAPPEEQDKVPHTAQRAAWKSPEKEKTMVNTLSPRGQDAGMASGRTEAQSWKSQDTKTTQGNGGQTRKLTASRTVSEKHQGKAATTAKTLIPKSQHRMLAPTGAVSTRTRQKGVTTAVIPPKEKKPQATPPPAPFQSPTTQRNQRLKAANFKSEPRWDFEEKYSFEIGGLQTTCPDSVKIKASKSLWLQKLFLPNLTLFLDSRHFNQSEWDRLEHFAPPFGFMELNYSLVQKVVTRFPPVPQQQLLLASLPAGSLRCITCAVVGNGGILNNSHMGQEIDSHDYVFRLSGALIKGYEQDVGTRTSFYGFTAFSLTQSLLILGNRGFKNVPLGKAQTPGSFSGSPAHGQVPVAAPRLSPIHEEQVSEV

SEQ ID NO: 7656 - protein, 885 aa, Homo sapiens
MAWRCPRMGRVPLAWCLALCGWACMAPRGTQAEESPFVGNPGNITGARGLTGTLRCQLQVQGEPPEVHWLRDGQILELADSTQTQVPLGEDEQDDWIVVSQLRITSLQLSDTGQYQCLVFLGHQTFVSQPGYVGLEGLPYFLEEPEDRTVAANTPFNLSCQAQGPPEPVDLLWLQDAVPLATAPGHGPQRSLHVPGLNKTSSFSCEAHNAKGVTTSRTATITVLPQQPRNLHLVSRQPTELEVAWTPGLSGIYPLTHCTLQAVLSDDGMGIQAGEPDPPEEPLTSQASVPPHQLRLGSLHPHTPYHIRVACTSSQGPSSWTHWLPVETPEGVPLGPPENISATRNGSQAFVHWQEPRAPLQGTLLGYRLAYQGQDTPEVLMDIGLRQEVTLELQGDGSVSNLTVCVAAYTAAGDGPWSLPVPLEAWRPVKEPSTPAFSWPWWYVLLGAVVAAACVLILALFLVHRRKKETRYGEVFEPTVERGELVVRYRVRKSYSRRTTEATLNSLGISEELKEKLRDVMVDRHKVALGKTLGEGEFGAVMEGQLNQDDSILKVAVKTMKIAICTRSELEDFLSEAVCMKEFDHPNVMRLIGVCFQGSERESFPAPVVILPFMKHGDLHSFLLYSRLGDQPVYLPTQMLVKFMADIASGMEYLSTKRFIHRDLAARNCMLNENMSVCVADFGLSKKIYNGDYYRQGRIAKMPVKWIAIESLADRVYTSKSDVWSFGVTMWEIATRGQTPYPGVENSEIYDYLRQGNRLKQPADCLDGLYALMSRCWELNPQDRPSFTELREDLENTLKALPPAQEPDEILYVNMDEGGGYPEPPGAAGGADPPTQPDPKDSCSCLTAAEVHPAGRYVLCPSTTPSPAQPADRGSPAAPGQEDGA

SEQ ID NO: 7657 - protein, 2377 aa, Homo sapiens
MDEEEDGAGAEESGQPRSFMRLNDLSGAGGRPGPGSAEKDPGSADSEAEGLPYPALAPVVFFYLSQDSRPRSWCLRTVCNPWFERISMLVILLNCVTLGMFRPCEDIACDSQRCRILQAFDDFIFAFFAVEMVVKMVALGIFGKKCYLGDTWNRLDFFIVIAGMLEYSLDLQNVSFSAVRTVRVLRPLRAINRVPSMRILVTLLLDTLPMLGNVLLLCFFVFFIFGIVGVQLWAGLLRNRCFLPENFSLPLSVDLERYYQTENEDESPFICSQPRENGMRSCRSVPTLRGDGGGGPPCGLDYEAYNSSSNTTCVNWNQYYTNCSAGEHNPFKGAINFDNIGYAWIAIFQVITLEGWVDIMYFVMDAHSFYNFIYFILLIIVGSFFMINLCLVVIATQFSETKQRESQLMREQRVRFLSNASTLASFSEPGSCYEELLKYLVYILRKAARRLAQVSRAAGVRVGLLSSPAPLGGQETQPSSSCSRSHRRLSVHHLVHHHHHHHHHYHLGNGTLRAPRASPEIQDRDANGSRRLMLPPPSTPALSGAPPGGAESVHSFYHADCHLEPVRCQAPPPRSPSEASGRTVGSGKVYPTVHTSPPPETLKEKALVEVAASSGPPTLTSLNIPPGPYSSMHKLLETQSTGACQSSCKISSPCLKADSGACGPDSCPYCARAGAGEVELADREMPDSDSEAVYEFTQDAQHSDLRDPHSRRQRSLGPDAEPSSVLAFWRLICDTFRKIVDSKYFGRGIMIAILVNTLSMGIEYHEQPEELTNALEISNIVFTSLFALEMLLKLLVYGPFGYIKNPYNIFDGVIVVISVWEIVGQQGGGLSVLRTFRLMRVLKLVRFLPALQRQLVVLMKTMDNVATFCMLLMLFIFIFSILGMHLFGCKFASERDGDTLPDRKNFDSLLWAIVTVFQILTQEDWNKVLYNGMASTSSWAALYFIALMTFGNYVLFNLLVAILVEGFQAEEISKREDASGQLSCIQLPVDSQGGDANKSESEPDFFSPSLDGDGDRKKCLALVSLGEHPELRKSLLPPLIIHTAATPMSLPKSTSTGLGEALGPASRRTSSSGSAEPGAAHEMKSPPSARSSPHSPWSAASSWTSRRSSRNSLGRAPSLKRRSPSGERRSLLSGEGQESQDEEESSEEERASPAGSDHRHRGSLEREAKSSFDLPDTLQVPGLHRTASGRGSASEHQDCNGKSASGRLARALRPDDPPLDGDDADDEGNLSKGERVRAWIRARLPACCLERDSWSAYIFPPQSRFRLLCHRIITHKMFDHVVLVIIFLNCITIAMERPKIDPHSAERIFLTLSNYIFTAVFLAEMTVKVVALGWCFGEQAYLRSSWNVLDGLLVLISVIDILVSMVSDSGTKILGMLRVLRLLRTLRPLRVISRAQGLKLVVETLMSSLKPIGNIVVICCAFFIIFGILGVQLFKGKFFVCQGEDTRNITNKSDCAEASYRWVRHKYNFDNLGQALMSLFVLASKDGWVDIMYDGLDAVGVDQQPIMNHNPWMLLYFISFLLIVAFFVLNMFVGVVVENFHKCRQHQEEEEARRREEKRLRRLEKKRRNLMLDDVIASGSSASAASEAQCKPYYSDYSRFRLLVHHLCTSHYLDLFITGVIGLNVVTMAMEHYQQPQILDEALKICNYIFTVIFVLESVFKLVAFGFRRFFQDRWNQLDLAIVLLSIMGITLEEIEVNASLPINPTIIRIMRVLRIARVLKLLKMAVGMRALLDTVMQALPQVGNLGLLFMLLFFIFAALGVELFGDLECDETHPCEGLGRHATFRNFGMAFLTLFRVSTGDNWNGIMKDTLRDCDQESTCYNTVISPIYFVSFVLTAQFVLVNVVIAVLMKHLEESNKEAKEEAELEAELELEMKTLSPQPHSPLGSPFLWPGVEGPDSPDSPKPGALHPAAHARSASHFSLEHPTDRQLFDTISLLIQGSLEWELKLMDELAGPGGQPSAFPSAPSLGGSDPQIPLAEMEALSLTSEIVSEPSCSLALTDDSLPDDMHTLLLSALESNMQPHPTELPGPDLLTVRKSGVSRTHSLPNDSYMCRHGSTAEGPLGHRGWGLPKAQSGSVLSVHSQPADTSYILQLPKDAPHLLQPHSAPTWGTIPKLPPPGRSPLAQRPLRRQAAIRTDSLDVQGLGSREDLLAEVSGPSPPLARAYSFWGQSSTQAQQHSRSHSKISKHMTPPAPCPGPEPNWGKGPPETRSSLELDTELSWISGDLLPPGGQEEPPSPRDLKKCYSVEAQSCQRRPTSWLDEQRRHSIAVSCLDSGSQPHLGTDPSNLGGQPLGGPGSRPKKKLSPPSITIDPPESQGPRTPPSPGICLRRRAPSSDSKDPLASGPPDSMAASPSPKKDVLSLSGLSSDPADLDP

SEQ ID NO: 7658 - protein, 486 aa, Homo sapiens
MAAVKTLNPKAEVARAQAALAVNISAARGLQDVLRTNLGPKGTMKMLVSGAGDIKLTKDGNVLLHEMGLHPRIITEGFEAAKEKALQFLEEVKVSREMDRETLIDVARTSLRTKVHAELADVLTEAVVDSILAIKKQDEPIDLFMIEIMEMKHKSETDTSLIRGLVLDHGARHPDMKKRVEDAYILTCNVSLEYEKTEVNSGFFYKSAEEREKLVKAERKFIEDRVKKIIELKRKVCGDSDKGFVVINQKGIDPFSLDALSKEGIVALRRAKRRNMERLTLACGGVALNSFDDLSPDCLGHAGLVYEYTLGEEKFTFIEKCNNPRSVTLLIKGPNKHTLTQIKDAVRDGLRAVKNAIDDGCVVPGAGAVEVAMAEALIKHKPSVKGRAQLGVQAFADALLIIPKVLAQNSGFDLQETLVKIQAEHSESGQLVGVDLNTGEPMVAAEVGVWDNYCVKKQLLHSCTVIATNILLVDEIMRAGMSSLKG

SEQ ID NO: 7659 - protein, 729 aa, Homo sapiens
MDDLTLLDLLECPVCFEKLDVTAKVLPCQHTFCKPCLQRVFKAHKELRCPECRTPVFSNIEALPANLLLVRLLDGVRSGQSSGRGGSFRRPGTMTLQDGRKSRTNPRRLQASPFRLVPNVRIHMDGVPRAKALCNYRGQNPGDLRFNKGDIILLRRQLDENWYQGEINGISGNFPASSVEVIKQLPQPPPLCRALYNFDLRGKDKSENQDCLTFLKDDIITVISRVDENWAEGKLGDKVGIFPILFVEPNLTARHLLEKNKGRQSSRTKNLSLVSSSSRGNTSTLRRGPGSRRKVPGQFSITTALNTLNRMVHSPSGRHMVEISTPVLISSSNPSVITQPMEKADVPSSCVGQVSTYHPAPVSPGHSTAVVSLPGSQQHLSANMFVALHSYSAHGPDELDLQKGEGVRVLGKCQDGWLRGVSLVTGRVGIFPNNYVIPIFRKTSSFPDSRSPGLYTTWTLSTSSVSSQGSISEGDPRQSRPFKSVFVPTAIVNPVRSTAGPGTLGQGSLRKGRSSMRKNGSLQRPLQSGIPTLVVGSLRRSPTMVLRPQQFQFYQPQGIPSSPSAVVVEMGSKPALTGEPALTCISRGSEAWIHSAASSLIMEDKEIPIKSEPLPKPPASAPPSILVKPENSRNGIEKQVKTVRFQNYSPPPTKHYTSHPTSGKPEQPATLKASQPEAASLGPEMTVLFAHRSGCHSGQQTDLRRKSALGKATTLVSTASGTQTVFPSK

SEQ ID NO: 7660 - protein, 872 aa, Homo sapiens [sequence omitted]

SEQ ID NO: 7661 - protein, 1065 aa, Homo sapiens
MRKQEVRTGREAGQGHGTGSPAEQVKALMDLLAGKGSQGSQAPQALDRTPDAPLGPCSNDSRIQRHRKALLSKVGGGPELGGPWHRLASLLLVEGLTDLQLREHDFTQVEATRGGGHPARTVALDRLFLPLSRVSVPPRVSITIGVAGMGKTTLVRHFVRLWAHGQVGKDFSLVLPLTFRDLNTHEKLCADRLICSVFPHVGEPSLAVAVPARALLILDGLDECRTPLDFSNTVACTDPKKEIPVDHLITNIIRGNLFPEVSIWITSRPSASGQIPGGLVDRMTEIRGFNEEEIKVCLEQMFPEDQALLGWMLSQVQADRALYLMCTVPAFCRLTGMALGHLWRSRTGPQDAELWPPRTLCELYSWYFRMALSGEGQEKGKASPRIEQVAHGGRKMVGTLGRLAFHGLLKKKYVFYEQDMKAFGVDLALLQGAPCSCFLQREETLASSVAYCFTHLSLQEFVAAAYYYGASRRAIFDLFTESGVSWPRLGFLTHFRSAAQRAMQAEDGRLDVFLRFLSGLLSPRVNALLAGSLLAQGEHQAYRTQVAELLQGCLRPDAAVCARAINVLHCLHELQHTELARSVEEAMESGALARLTGPAHRAALAYLLQVSDACAQEANLSLSLSQGVLQSLLPQLLYCRKLRLDTNQFQDPVMELLGSVLSGKDCRIQKISLAENQISNKGAKALARSLLVNRSLTSLDLRGNSIGPQGAKALADALKINRTLTSLSLQGNTVRDDGARSMAEALASNRTLSMLHLQKNSIGPMGAQRMADALKQNRSLKELMFSSNSIGDGGAKALAEALKVNQGLESLDLQSNSISDAGVAALMGALCTNQTLLSLSLRENSISPEGAQAIAHALCANSTLKNLDLTANLLHDQGARAIAVAVRENRTLTSLHLQWNFIQAGAAQALGQALQLNRSLTSLDLQENAIGDDGACAVARALKVNTALTALYLQVASIGASGAQVLGEALAVNRTLEILDLRGNAIGVAGAKALANALKVNSSLRRLNLQENSLGMDGAICIATALSGNHRLQHINLQGNHIGDSGARMISEAIKTNAPTCTVEM

SEQ ID NO: 7662 - protein, 736 aa, Homo sapiens
MNVALQELGAGSNVGFQKGTRQLLGSRTQLELVLAGASLLLAALLLGCLVALGVQYHRDPSHSTCLTEACIRVAGKILESLDRGVSPCEDFYQFSCGGWIRRNPLPDGRSRWNTFNSLWDQNQAILKHLLENTTFNSSSEAEQKTQRFYLSCLQVERIEELGAQPLRDLIEKIGGWNITGPWDQDNFMEVLKAVAGTYRATPFFTVYISADSKSSNSNVIQVDQSGLFLPSRDYYLNRTANEKVLTAYLDYMEELGMLLGGRPTSTREQMQQVLELEIQLANITVPQDQRRDEEKIYHKMSISELQALAPSMDWLEFLSFLLSPLELSDSEPVVVYGMDYLQQVSELINRTEPSILNNYLIWNLVQKTTSSLDRRFESAQEKLLETLYGTKKSCVPRWQTCISNTDDALGFALGSLFVKATFDRQSKEIAEGMISEIRTAFEEALGQLVWMDEKTRQAAKEKADAIYDMIGFPDFILEPKELDDVYDGYEISEDSFFQNMLNLYNFSAKVMADQLRKPPSRDQWSMTPQTVNAYYLPTKNEIVFPAGILQAPFYARNHPKALNFGGIGVVMGHELTHAFDDQGREYDKEGNLRPWWQNESLAAFRNHTACMEEQYNQYQVNGERLNGRQTLGENIADNGGLKAAYNAYKAWLRKHGEEQQLPAVGLTNHQLFFVGFAQVWCSVRTPESSHEGLVTDPHSPARFRVLGTLSNSRDFLRHFGCPVGSPMNPGQLCEVW

SEQ ID NO: 7663 - protein, 1176 aa, Homo sapiens
MGDMANNSVAYSGVKNSLKEANHDGDFGITLAELRALMELRSTDALRKIQESYGDVYGICTKLKTSPNEGLSGNPADLERREAVFGKNFIPPKKPKTFLQLVWEALQDVTLIILEIAAIVSLGLSFYQPPEGDNALCGEVSVGEEEGEGETGWIEGAAILLSVVCVVLVTAFNDWSKEKQFRGLQSRIEQEQKFTVIRGGQVIQIPVADITVGDIAQVKYGDLLPADGILIQGNDLKIDESSLTGESDHVKKSLDKDPLLLSGTHVMEGSGRMVVTAVGVNSQTGIIFTLLGAGGEEEEKKDEKKKEKKNKKQDGAIENRNKAKAQDGAAMEMQPLKSEEGGDGDEKDKKKANLPKKEKSVLQGKLTKLAVQIGKAGLLMSAITVIILVLYFVIDTFWVQKRPWLAECTPIYIQYFVKFFIIGVTVLVVAVPEGLPLAVTISLAYSVKKMMKDNNLVRHLDACETMGNATAICSDKTGTLTMNRMTVVQAYINEKHYKKVPEPEAIPPNILSYLVTGISVNCAYTSKILPPEKEGGLPRHVGNKTECALLGLLLDLKRDYQDVRNEIPEEALYKVYTFNSVRKSMSTVLKNSDGSYRIFSKGASEIILKKCFKILSANGEAKVFRPRDRDDIVKTVIEPMASEGLRTICLAFRDFPAGEPEPEWDNENDIVTGLTCIAVVGIEDPVRPEVPDAIKKCQRAGITVRMVTGDNINTARAIATKCGILHPGEDFLCLEGKDFNRRIRNEKGEIEQERIDKIWPKLRVLARSSPTDKHTLVKGIIDSTVSDQRQVVAVTGDGTNDGPALKKADVGFAMGIAGTDVAKEASDIILTDDNFTSIVKAVMWGRNVYDSISKFLQFQLTVNVVAVIVAFTGACITQDSPLKAVQMLWVNLIMDTLASLALATEPPTESLLLRKPYGRNKPLISRTMMKNILGHAFYQLVVVFTLLFAGEKFFDIDSGRNAPLHAPPSEHYTIVFNTFVLMQLFNEINARKIHGERNVFEGIFNNAIFCTIVLGTFVVQIIIVQFGGKPFSCSELSIEQWLWSIFLGMGTLLWGQLISTIPTSRLKFLKEAGHGTQKEEIPEEELAEDVEEIDHAERELRRGQILWFRGLNRIQTQMDVVNAFQSGSSIQGALRRQPSIASQHHDVTNISTPTHVVFSSSTASTTVGYSSGECIS

SEQ ID NO: 7664 - protein, 1173 aa, Homo sapiens
MGDMANSSIEFHPKPQQQRDVPQAGGFGCTLAELRTLMELRGAEALQKIEEAYGDVSGLCRRLKTSPTEGLADNTNDLEKRRQIYGQNFIPPKQPKTFLQLVWEALQDVTLIILEVAAIVSLGLSFYAPPGEESEACGNVSGGAEDEGEAEAGWIEGAAILLSVICVVLVTAFNDWSKEKQFRGLQSRIEQEQKFTVIRNGQLLQVPVAALVVGDIAQVKYGDLLPADGVLIQANDLKIDESSLTGESDHVRKSADKDPMLLSGTHVMEGSGRMVVTAVGVNSQTGIIFTLLGAGGEEEEKKDKKGKQQDGAMESSQTKAKKQDGAVAMEMQPLKSAEGGEMEEREKKKANAPKKEKSVLQGKLTKLAVQIGKAGLVMSAITVIILVLYFVIETFVVEGRTWLAECTPVYVQYFVKFFIIGVTVLVVAVPEGLPLAVTISLAYSVKKMMKDNNLVRHLDACETMGNATAICSDKTGTLTTNRMTVVQSYLGDTHYKEIPAPSALTPKILDLLVHAISINSAYTTKILPPEKEGALPRQVGNKTECALLGFVLDLKRDFQPVREQIPEDKLYKVYTFNSVRKSMSTVIRMPDGGFRLFSKGASEILLKKCTNILNSNGELRGFRPRDRDDMVRKIIEPMACDGLRTICIAYRDFSAGQEPDWDNENEVVGDLTCIAVVGIEDPVRPEVPEAIRKCQRAGITVRMVTGDNINTARAIAAKCGIIQPGEDFLCLEGKEFNRRIRNEKGEIEQERLDKVWPKLRVLARSSPTDKHTLVKGIIDSTTGEQRQVVAVTGDGTNDGPALKKADVGFAMGIAGTDVAKEASDIILTDDNFTSIVKAVMWGRNVYDSISKFLQFQLTVNVVAVIVAFTGACITQDSPLKAVQMLWVNLIMDTFASLALATEPPTESLLLRKPYGRDKPLISRTMMKNILGHAVYQLAIIFTLLFVGELFFDIDSGRNAPLHSPPSEHYTIIFNTFVMMQLFNEINARKIHGERNVFDGIFSNPIFCTIVLGTFGIQIVIVQFGGKPFSCSPLSTEQWLWCLFVGVGELVWGQVIATIPTSQLKCLKEAGHGPGKDEMTDEELAEGEEEIDHAERELRRGQILWFRGLNRIQTQMEVVSTFKRSGSVQGAVRRRSSVLSQLHDVTNLSTPTHAILSAANPTSAAGNPGGESVP

SEQ ID NO: 7665 - protein, 870 aa, Homo sapiens
MASASSSRAGVALPFEKSQLTLKVVSAKPKVHNRQPRINSYVEVAVDGLPSETKKTGKRIGSSELLWNEIIILNVTAQSHLDLKVWSCHTLRNELLGTASVNLSNVLKNNGGKMENMQLTLNLQTENKGSVVSGGELTIFLDGPTVDLGNVPNGSALTDGSQLPSRDSSGTAVAPENRHQPPSTNCFGGRSRTHRHSGASARTTPATGEQSPGARSRHRQPVKNSGHSGLANGTVNDEPTTATDPEEPSVVGVTSPPAAPLSVTPNPNTTSLPAPATPAEGEEPSTSGTQQLPAAAQAPDALPAGWEQRELPNGRVYYVDHNTKTTTWERPLPPGWEKRTDPRGRFYYVDHNTRTTTWQRPTAEYVRNYEQWQSQRNQLQGAMQHFSQRFLYQSSSASTDHDPLGPLPPGWEKRQDNGRVYYVNHNTRTTQWEDPRTQGMIQEPALPPGWEMKYTSEGVRYFVDHNTRTTTFKDPRPGFESGTKQGSPGAYDRSFRWKYHQFRFLCHSNALPSHVKISVSRQTLFEDSFQQIMNMKPYDLRRRLYIIMRGEEGLDYGGIAREWFFLLSHEVLNPMYCLFEYAGKNNYCLQINPASSINPDHLTYFRFIGRFIAMALYHGKFIDTGFTLPFYKRMLNKRPTLKDLESIDPEFYNSIVWIKENNLEECGLELYFIQDMEILGKVTTHELKEGGESIRVTEENKEEYIMLLTDWRFTRGVEEQTKAFLDGFNEVAPLEWLRYFDEKELELMLCGMQEIDMSDWQKSTIYRHYTKNSKQIQWFWQVVKEMDNEKRIRLLQFVTGTCRLPVGGFAELIGSNGPQKFCIDKVGKETWLPRSHTCFNRLDLPPYKSYEQLREKLLYAIEETEGFGQE

SEQ ID NO: 7666 - protein, 1156 aa, Homo sapiens
MSKLRMVLLEDSGSADFRRHFVNLSPFTITVVLLLSACFVTSSLGGTDKELRLVDGENKCSGRVEVKVQEEWGTVCNNGWSMEAVSVICNQLGCPTAIKAPGWANSSAGSGRIWMDHVSCRGNESALWDCKHDGWGKHSNCTHQQDAGVTCSDGSNLEMRLTRGGNMCSGRIEIKFQGRWGTVCDDNFNIDHASVICRQLECGSAVSFSGSSNFGEGSGPIWFDDLICNGNESALWNCKHQGWGKHNCDHAEDAGVICSKGADLSLRLVDGVTECSGRLEVRFQGEWGTICDDGWDSYDAAVACKQLGCPTAVTAIGRVNASKGFGHIWLDSVSCQGHEPAIWQCKHHEWGKHYCNHNEDAGVTCSDGSDLELRLRGGGSRCAGTVEVEIQRLLGKVCDRGWGLKEADVVCRQLGCGSALKTSYQVYSKIQATNTWLFLSSCNGNETSLWDCKNWQWGGLTCDHYEEAKITCSAHREPRLVGGDIPCSGRVEVKHGDTWGSICDSDFSLEAASVLCRELQCGTVVSILGGAHFGEGNGQIWAEEFQCEGHESHLSLCPVAPRPEGTCSHSRDVGVVCSRYTEIRLVNGKTPCEGRVELKTLGAWGSLCNSHWDIEDAHVLCQQLKCGVALSTPGGARFGKGNGQIWRHMFHCTGTEQHMGDCPVTALGASLCPSEQVASVICSGNQSQTLSSCNSSSLGPTRPTIPEESAVACIESGQLRLVNGGGRCAGRVEIYHEGSWGTICDDSWDLSDAHVVCRQLGCGEAINATGSAHFGEGTGPIWLDEMKCNGKESRIWQCHSHGWGQQNCRHKEDAGVICSEFMSLRLTSEASREACAGRLEVFYNGAWGTVGKSSMSETTVGVVCRQLGCADKGKINPASLDKAMSIPMWVDNVQCPKGPDTLWQCPSSPWEKRLASPSEETWITCDNKIRLQEGPTSCSGRVEIWHGGSWGTVCDDSWDLDDAQVVCQQLGCGPALKAFKEAEFGQGTGPIWLNEVKCKGNESSLWDCPARRWGHSECGHKEDAAVNCTDISVQKTPQKATTGRSSRQSSFIAVGILGVVLLAIFVALFFLTKKRRQRQRLAVSSRGENLVHQIQYREMNSCLNADDLDLMNSSENSHESADFSAAELISVSKFLPISGMEKEAILSHTEKENGNL

SEQ ID NO: 7667 - protein, 435 aa, Homo sapiens
MSNKDRHIDSSCSSFIKTEPSSPASLTDSVNHHSPGGSSDASGSYSSTMNGHQNGLDSPPLYPSAPILGGSGPVRKLYDDCSSTIVEDPQTKCEYMLNSMPKRLCLVCGDIASGYHYGVASCEACKAFFKRTIQGNIEYSCPATNECEITKRRRKSCQACRFMKCLKVGMLKEGVRLDRVRGGRQKYKRRIDAENSPYLNPQLVQPAKKPYNKIVSHLLVAEPEKIYAMPDPTVPDSDIKALTTLCDLADRELVVIIGWAKHIPGFSTLSLADQMSLLQSAWMEILILGVVYRSLSFEDELVYADDYIMDEDQSKLAGLLDLNNAILQLVKKYKSMKLEKEEFVTLKAIALANSDSMHIEDVEAVQKLQDVLHEALQDYEAGQHMEDPRRAGKMLMTLPLLRQTSTKAVQHFYNIKLEGKVPMHKLFLEMLEAKV

SEQ ID NO: 7668 - protein, 1863 aa, Homo sapiens
MGDVKLVASSHISKTSLSVDPSRVDSMPLTEAPAFILPPRNLCIKEGATAKFEGRVRGYPEPQVTWHRNGQPITSGGRFLLDCGIRGTFSLVIHAVHEEDRGKYTCEATNGSGARQVTVELTVEGSFAKQLGQPVVSKTLGDRFSAPAVETRPSIWGECPPKFATKLGRVVVKEGQMGRFSCKITGRPQPQVTWLKGNVPLQPSARVSVSEKNGMQVLEIHGVNQDDVGVYTCLVVNGSGKASMSAELSIQGLDSANRSFVRETKATNSDVRKEVTNVISKESKLDSLEAAAKSKNCSSPQRGGSPPWAANSQPQPPRESKLESCKDSPRTAPQTPVLQKTSSSITLQAARVQPEPRAPGLGVLSPSGEERKRPAPPRPATFPTRQPGLGSQDVVSKAANRRIPMEGQRDSAFPKFESKPQSQEVKENQTVKFRCEVSGIPKPEVAWFLEGTPVRRQEGSIEVYEDAGSHYLCLLKARTRDSGTYSCTASNAQGQLSCSWTLQVERLAVMEVAPSFSSVLKDCAVIEGQDFVLQCSVRGTPVPRITWLLNGQPIQYARSTCEAGVAELHIQDALPEDHGTYTCLAENALGQVSCSAWVTVHEKKSSRKSEYLLPVAPSKPTAPIFLQGLSDLKVMDGSQVTMTVQVSGNPPPEVIWLHNGNEIQESEDFHFEQRGTQHSLCIQEVFPEDTGTYTCEAWNSAGEVRTQAVLTVQEPHDGTQPWFISKPRSVTASLGQSVLISCAIAGDPFPTVHWLRDGKALCKDTGHFEVLQNEDVFTLVLKKVQPWHAGQYEILLKNRVGECSCQVSLMLQNSSARALPRGREPASCEDLCGGGVGADGGGSDRYGSLRPGWPARGQGWLEEEDGEDVRGVLKRRVETRQHTEEAIRQQEVEQLDFRDLLGKKVSTKTLSEDDLKEIPAEQMDFRANLQRQVKPKTVSEEERKVHSPQQVDFRSVLAKKGTSKTPVPEKVPPPKPATPDFRSVLGGKKKLPAENGSSSAETLNAKAVESSKPLSNAQPSGPLKPVGNAKPAETLKPMGNAKPAETLKPMGNAKPDENLKSASKEELKKDVKNDVNCKRGHAGTTDNEKRSESQGTAPAFKQKLQDVHVAEGKKLLLQCQVSSDPPATIIWTLNGKTLKTTKFIILSQEGSLCSVSIEKALPEDRGLYKCVAKNDAGQAECSCQVTVDDAPASENTKAPEMKSRRPKSSLPPVLGTESDATVKKKPAPKTPPKAAMPPQIIQFPEDQKVRAGESVELFGKVTGTQPITCTWMKFRKQIQESEHMKVENSENGSKLTILAARQEHCGCYTLLVENKLGSRQAQVNLTVVDKPDPPAGTPCASDIRSSSLTLSWYGSSYDGGSAVQSYSIEIWDSANKTWKELATCRSTSFNVQDLLPDHEYKFRVRAINVYGTSEPSQESELTTVGEKPEEPKDEVEVSDDDEKEPEVDYRTVTINTEQKVSDFYDIEERLGSGKFGQVFRLVEKKTRKVWAGKFFKAYSAKEKENIRQEISIMNCLHHPKLVQCVDAFEEKANIVMVLEIVSGGELFERIIDEDFELTERECIKYMRQISEGVEYIHKQGIVHLDLKPENIMCVNKTGTRIKLIDFGLARRLENAGSLKVLFGTPEFVAPEVINYEPIGYATDMWSIGVICYILNRLDCTQCLQHPWLMKDTKNMEAKKLSKDRMKKYMARRKWQKTGNAVRAIGRLSSMAMISGLSGRKSSTGSPTSPLNAEKLESEEDVSQAFLEAVAEEKPHVKPYFSKTIRDLEVVEGSAARFDCKIEGYPDPEVVWFKDDQSIRESRHFQIDYDEDGNCSLIISDVCGDDDAKYTCKAVNSLGEATCTAELIVETMEEGEGEGEEEEE

SEQ ID NO: 7669 - protein, 1817 aa, Homo sapiens
MFNKSFGTPFGGGTGGFGTTSTFGQNTGFGTTSGGAFGTSAFGSSNNTGGLFGNSQTKPGGLFGTSSFSQPATSTSTGFGFGTSTGTANTLFGTASTGTSLFSSQNNAFAQNKPTGFGNFGTSTSSGGLFGTTNTTSNPFGSTSGSLFGPSSFTAAPTGTTIKFNPPTGTDTMVKAGVSTNISTKHQCITAMKEYESKSLEELRLEDYQANRKGPQNQVGAGTTTGLFGSSPATSSATGLFSSSTTNSGFAYGQNKTAFGTSTTGFGTNPGGLFGQQNQQTTSLFSKPFGQATTTQNTGFSFGNTSTIGQPSTNTMGLFGVTQASQPGGLFGTATNTSTGTAFGTGTGLFGQTNTGFGAVGSTLFGNNKLTTFGSSTTSAPSFGTTSGGLFGNKPTLTLGTNTNTSNFGFGTNTSGNSIFGSKPAPGTLGTGLGAGFGTALGAGQASLFGNNQPKIGGPLGTGAFGAPGFNTTTATLGFGAPQAPVALTDPNASAAQQAVLQQHINSLTYSPFGDSPLFRNPMSDPKKKEERLKPTNPAAQKALTTPTHYKLTPRPATRVRPKALQTTGTAKSHLFDGLDDDEPSLANGAFMPKKSIKKLVLKNLNNSNLFSPVNRDSENLASPSEYPENGERFSFLSKPVDENHQQDGDEDSLVSHFYTNPIAKPIPQTPESAGNKHSNSNSVDDTIVALNMRAALRNGLEGSSEETSFHDESLQDDREEIENNSYHMHPAGIILTKVGYYTIPSMDDLAKITNEKGECIVSDFTIGRKGYGSIYFEGDVNLTNLNLDDIVHIRRKEVVVYLDDNQKPPVGEGLNRKAEVTLDGVWPTDKTSRCLIKSPDRLADINYEGRLEAVSRKQGAQFKEYRPETGSWVFKVSHFSKYGLQDSDEEEEEHPSKTSTKKLKTAPLPPASQTTPLQMALNGKPAPPPQSQSPEVEQLGRVVELDSDMVDITQEPVLDTMLEESMPEDQEPVSASTHIASSLGINPHVLQIMKASLLTDEEDVDMALDQRFSRLPSKADTSQEICSPRLPISASHSSKTRSLVGGLLQSKFTSGAFLSPSVSVQECRTPRAASLMNIPSTSSWSVPPPLTSVFTMPSPAPEVPLKTVGTRRQLGLVPREKSVTYGKGKLLMDMALFMGRSFRVGWGPNWTLANSGEQLNGSHELENHQIADSMEFGFLPNPVAVKPLTESPFKVHLEKLSLRQRKPDEDMKLYQTPLELKLKHSTVHVDELCPLIVPNLGVAVIHDYADWVKEASGDLPEAQIVKHWSLTWTLCEALWGHLKELDSQLNEPREYIQILERRRAFSRWLSCTATPQIEEEVSLTQKNSPVEAVFSYLTGKRISEACSLAQQSGDHRLALLLSQFVGSQSVRELLTMQLVDWHQLQADSFIQDERLRIFALLAGKPVWQLSEKKQINVCSQLDWKRSLAIHLWYLLPPTASISRALSMYEEAFQNTSDSDRYACSPLPSYLEGSGCVIAEEQNSQTPLRDVCFHLLKLYSDRHYDLNQLLEPRSITADPLDYRLSWHLWEVLRALNYTHLSAQCEGVLQASYAGQLESEGLWEWAIFVLLHIDNSGIREKAVRELLTRHCQLLETPESWAKETFLTQKLRVPAKWIHEAKAVRAHMESDKHLEALCLFKAEHWNRCHKLIIRHLASDAIINENYDYLKGFLEDLAPPERSSLIQDWETSGLVYLDYIRVIEMLRHIQQVDCSGNDLEQLHIKVTSLCSRIEQIQCYSAKDRLAQSDMAKRVANLLRVVLSLHHPPDRTSDSTPDPQRVPLRLLAPHIGRLPMPEDYAMDELRSLTQSYLRELAVGSL

SEQ ID NO: 7670 - protein, 483 aa, Homo sapiens
MQEFTKFPTKTGRRSLSRSISQSSTDSYSSAASYTDSSDDEVSPREKQQTNSKGSSNFCVKNIKQAEFGRREIEIAEQDMSALISLRKRAQGEKPLAGAKIVGCTHITAQTAVLIETLCALGAQCRWSACNIYSTQNEVAAALAEAGVAVFAWKGESEDDFWWCIDRCVNMDGWQANMILDDGGDLTHWVYKKYPNVFKKIRGIVEESVTGVHRLYQLSKAGKLCVPAMNVNDSVTKQKFDNLYCCRESILDGLKRTTDVMFGGKQVVVCGYGEVGKGCCAALKALGAIVYITEIDPICALQACMDGFRVVKLNEVIRQVDVVITCTGNKNVVTREHLDRMKNSCIVCNMGHSNTEIDVTSLRTPELTWERVRSQVDHVIWPDGKRVVLLAEGRLLNLSCSTVPTFVLSITATTQALALIELYNAPEGRYKQDVYLLPKKMDEYVASLHLPSFDAHLTELTDDQAKYLGLNKNGPFKPNYYRY

SEQ ID NO: 7671 - protein, 1083 aa, Homo sapiens
MSDSEDSNFSEEEDSERSSDGEEAEVDEERRSAAGSEKEEEPEDEEEEEEEEEYDEEEEEEDDDRPPKKPRHGGFILDEADVDDEYEDEDQWEDGAEDILEKASNIDNVVLDEDRSGARRLQNLWRDQREEELGEYYMKKYAKSSVGETVYGGSDELSDDITQQQLLPGVKDPNLWTVKCKIGEERATAISLMRKFIAYQFTDTPLQIKSVVAPEHVKGYIYVEAYKQTHVKQAIEGVGNLRLGYWNQQMVPIKEMTDVLKVVKEVANLKPKSWVRLKRGIYKDDIAQVDYVEPSQNTISLKMIPRIDYDRIKARMSLKDWFAKRKKFKRPPQRLFDAEKIRSLGGDVASDGDFLIFEGNRYSRKGFLFKSFAMSAVITEGVKPTLSELEKFEDQPEGIDLEVVTESTGKEREHNFQPGDNVEVCEGELINLQGKILSVDGNKITIMPKHEDLKDMLEFPAQELRKYFKMGDHVKVIAGRFEGDTGLIVRVEENFVILFSDLTMHELKVLPRDLQLCSETASGVDVGGQHEWGELVQLDPQTVGVIVRLERETFQVLNMYGKVVTVRHQAVTRKKDNRFAVALDSEQNNIHVKDIVKVIDGPHSGREGEIRHLFRSFAFLHCKKLVENGGMFVCKTRHLVLAGGSKPRDVTNFTVGGFAPMSPRISSPMHPSAGGQRGGFGSPGGGSGGMSRGRGRRDNELIGQTVRISQGPYKGYIGVVKDATESTARVELHSTCQTISVDRQRLTTVGSRRPGGMTSTYGRTPMYGSQTPMYGSGSRTPMYGSQTPLQDGSRTPHYGSQTPLHDGSRTPAQSGAWDPNNPNTPSRAEEEYEYAFDDEPTPSPQAYGGTPNPQTPGYPDPSSPQVNPQYNPQTPGTPAMYNTDQFSPYAAPSPQGSYQPSPSPQSYHQVAPSPAGYQNTHSPASYHPTPSPMAYQASPSPSPVGYSPMTPGAPSPGGYNPHTPGSGIEQNSSDWVTTDIQVKVRDTYLDTQVVGQTGVIRSVTGGMCSVYLKDSEKVVSISSEHLEPITPTKNNKVKVILGEDREATGVLLSIDGEDGIVRMDLDEQLKILNLRFLGKLLEA

SEQ ID NO: 7672 - protein, 1102 aa, Homo sapiens
MELENYKQPVVLREDNCRRRRRMKPRSAAASLSSMELIPIEFVLPTSQRKCKSPETALLHVAGHGNVEQMKAQVWLRALETSVAADFYHRLGPHHFLLLYQKKGQWYEIYDKYQVVQTLDCLRYWKATHRSPGQIHLVQRHPPSEESQAFQRQLTALIGYDVTDVSNVHDDELEFTRRGLVTPRMAEVASRDPKLYAMHPWVTSKPLPEYLWKKIANNCIFIVIHRSTTSQTIKVSPDDTPGAILQSFFTKMAKKKSLMDIPESQSEQDFVLRVCGRDEYLVGETPIKNFQWVRHCLKNGEEIHVVLDTPPDPALDEVRKEEWPLVDDCTGVTGYHEQLTIHGKDHESVFTVSLWDCDRKFRVKIRGIDIPVLPRNTDLTVFVEANIQHGQQVLCQRRTSPKPFTEEVLWNVWLEFSIKIKDLPKGALLNLQIYCGKAPALSSKASAESPSSESKGKVQLLYYVNLLLIDHRFLLRRGEYVLHMWQISGKGEDQGSFNADKLTSATNPDKENSMSISILLDNYCHPIALPKHQPTPDPEGDRVRAEMPNQLRKQLEAIIATDPLNPLTAEDKELLWHFRYESLKHPKAYPKLFSSVKWGQQEIVAKTYQLLARREVWDQSALDVGLTMQLLDCNFSDENVRAIAVQKLESLEDDDVLHYLLQLVQAVKFEPYHDSALARFLLKRGLRNKRIGHFLFWFLRSEIAQSRHYQQRFAVILEAYLRGCGTAMLHDFTQQVQVIEMLQKVTLDIKSLSAEKYDVSSQVISQLKQKLENLQNSQLPESFRVPYDPGLKAGALAIEKCKVMASKKKPLWLEFKCADPTALSNETIGIIFKHGDDLRQDMLILQILRIMESIWETESLDLCLLPYGCISTGDKIGMIEIVKDATTIAKIQQSTVGNTGAFKDEVLNHWLKEKSPTEEKFQAAVERFVYSCAGYCVATFVLGIGDRHNDNIMITETGNLFHIDFGHILGNYKSFLGINKERVPFVLTPDFLFVMGTSGKKTSPHFQKFQDICVKAYLALRHHTNLLIILFSMMLMTGMPQLTSKEDIEYIRDALTVGKNEEDAKKYFLDQIEVCRDKGWTVQFNWFLHLVLGIKQGEKHSA

SEQ ID NO: 7673 - protein, 477 aa, Homo sapiens
MDADEGQDMSQVSGKESPPVSDTPDEGDEPMPIPEDLSTTSGGQQSSKSDRVVASNVKVETQSDEENGRACEMNGEECAEDLRMLDASGEKMNGSHRDQGSSALSGVGGIRLPNGKLKCDICGIICIGPNVLMVHKRSHTGERPFQCNQCGASFTQKGNLLRHIKLHSGEKPFKCHLCNYACRRRDALTGHLRTHSVIKEETNHSEMAEDLCKIGSERSLVLDRLASNVAKRKSSMPQKFLGDKGLSDTPYDSSASYEKENEMMKSHVMDQAINNAINYLGAESLRPLVQTPPGGSEVVPVISPMYQLHKPLAEGTPRSNHSAQDSAVENLLLLSKAKLVPSEREASPSNSCQDSTDTESNNEEQRSGLIYLTNHIAPHARNGLSLKEEHRAYDLLRAASENSQDALRVVSTSGEQMKVYKCEHCRVLFLDHVMYTIHMGCHGFRDPFECNMCGYHSQDRYEFSSHITRGEHRFHMS

SEQ ID NO: 7674 - protein, 739 aa, Homo sapiens
MGFSNMEDDGPEEEERVAEPQANFNTPQALRFEELLANLLNEQHQIAKELFEQLKMKKPSAKQQKEVEKVKPQCKEVHQTLILDPAQRKRLQQQMQQHVQLLTQIHLLATCNPNLNPEASSTRICLKELGTFAQSSIALHHQYNPKFQTLFQPCNLMGAMQLIEDFSTHVSIDCSPHKTVKKTANEFPCLPKQVAWILATSKVFMYPELLPVCSLKAKNPQDKILFTKAEDNLLALGLKHFEGTEFLNPLISKYLLTCKTARQLTVRIKNLNMNRAPDNIIKFYKKTKQLPVLGKCCEEIQPHQWKPPIEREEHRLPFWLKASLPSIQEELRHMADGAREVGNMTGTTEINSDQGLEKDNSELGSETRYPLLLPKGVVLKLKPVADRFPKKAWRQKRSSVLKPLLIQPSPSLQPSFNPGKTPAQSTHSEAPPSKMVLRIPHPIQPATVLQTVPGVPPLGVSGGESFESPAALPAMPPEARTSFPLSESQTLLSSAPVPKVMMPSPASSMFRKPYVRRRPSKRRGARAFRCIKPAPVIHPASVIFTVPATTVKIVSLGGGCNMIQPVNAAVAQSPQTIPIATLLVNPTSFPCPLNQPLVASSVSPLIVSGNSVNLPIPSTPEDKAHMNVDIACAVADGENAFQGLEPKLEPQELSPLSATVFPKVEHSPGPPPVDKQCQEGLSENSAYRWTVVKTEEGRQALEPLPQGIQESLNNSSPGDLEEVVKMEPEDATEEISGFL

SEQ ID NO: 7675 - protein, 1279 aa, Homo sapiens
MDLEAAKNGTAWRPTSAEGDFELGISSKQKRKKTKTVKMIGVLTLFRYSDWQDKLFMSLGTIMAIAHGSGLPLMMIVFGEMTDKFVDTAGNFSFPVNFSLSLLNPGKILEEEMTRYAYYYSGLGAGVLVAAYIQVSFWTLAAGRQIRKIRQKFFHAILRQEIGWFDINDTTELNTRLTDDISKISEGIGDKVGMFFQAVATFFAGFIVGFIRGWKLTLVIMAISPILGLSAAVWAKILSAFSDKELAAYAKAGAVAEEALGAIRTVIAFGGQNKELERYQKHLENAKEIGIKKAISANISMGIAFLLIYASYALAFWYGSTLVISKEYTIGNAMTVFFSILIGAFSVGQAAPCIDAFANARGAAYVIFDIIDNNPKIDSFSERGHKPDSIKGNLEFNDVHFSYPSRANVKILKGLNLKVQSGQTVALVGSSGCGKSTTVQLIQRLYDPDEGTINIDGQDIRNFNVNYLREIIGVVSQEPVLFSTTIAENICYGRGNVTMDEIKKAVKEANAYEFIMKLPQKFDTLVGERGAQLSGGQKQRIAIARALVRNPKILLLDEATSALDTESEAEVQAALDKAREGRTTIVIAHRLSTVRNADVIAGFEDGVIVEQGSHSELMKKEGVYFKLVNMQTSGSQIQSEEFELNDEKAATRMAPNGWKSRLFRHSTQKNLKNSQMCQKSLDVETDGLEANVPPVSFLKVLKLNKTEWPYFVVGTVCAIANGGLQPAFSVIFSEIIAIFGPGDDAVKQQKCNIFSLIFLFLGIISFFTFFLQGFTFGKAGEILTRRLRSMAFKAMLRQDMSWFDDHKNSTGALSTRLATDAAQVQGATGTRLALIAQNIANLGTGIIISFIYGWQLTLLLLAVVPIIAVSGIVEMKLLAGNAKRDKKELEAAGKIATEAIENIRTVVSLTQERKFESMYVEKLYGPYRNSVQKAHIYGITFSISQAFMYFSYAGCFRFGAYLIVNGHMRFRDVILVFSAIVFGAVALGHASSFAPDYAKAKLSAAHLFMLFERQPLIDSYSEEGLKPDKFEGNITFNEVVFNYPTRANVPVLQGLSLEVKKGQTLALVGSSGCGKSTVVQLLERFYDPLAGTVLLDGQEAKKLNVQWLRAQLGIVSQEPILFDCSIAENIAYGDNSRVVSQDEIVSAAKAANIHPFIETLPHKYETRVGDKGTQLSGGQKQRIAIARALIRQPQILLLDEATSALDTESEKVVQEALDKAREGRTCIVIAHRLSTIQNADLIVVFQNGRVKEHGTHQQLLAQKGIYFSMVSVQAGTQNL

SEQ ID NO: 7676 - protein, 601 aa, Homo sapiens
MVVTRSARAKASIQAASAESSGQKSFAANGIQAHPESSTGSDARTTAESQTTGKQSLIPRTPKARKRKSRTTGSLPKGTEPSTDGETSEAESNYSVSEHHDTILRVTRRRQILIACSPVSSVRKKPKVTPTKESYTEEIVSEAESHVSGISRIVLPTEKTTGARRSKAKSLTDPSQESHTEAISDAETSSSDISFSGIATRRTRSMQRKLKAQTEKKDSKIVPGNEKQIVGTPVNSEDSDTRQTSHLQARSLSEINKPNFYNNDFDDDFSHRSSENILTVHEQANVESLKETKQNCKDLDEDANGITDEGKEINEKSSQLKNLSELQDTSLQQLVSQRHSTPQNKNAVSVHSNLNSEAVMKSLTQTFATVEVGRWNNNKKSPIKASDLTKFGDCGGSDDEEESTVISVSEDMNSEGNVDFECDTKLYTSAPNTSQGKDNSVLLVLSSDESQQSENSENEEDTLCFVENSGQRESLSGDTGSLSCDNALFVIDTTPGMSADKNFYLEEEDKASEVAIEEEKEEEEDEKSEEDSSDHDENEDEFSDEEDFLNSTKAKLFCRKPSLHLILKKTTVFHHIVNQSINFRKNAEKNDKKQQGMAGLV

SEQ ID NO: 7677 - protein, 757 aa, Homo sapiens
MLSLLVWILTLSDTFSQGTQTRFSQEPADQTVVAGQRAVLPCVLLNYSGIVQWTKDGLALGMGQGLKAWPRYRVVGSADAGQYNLEITDAELSDDASYECQATEAALRSRRAKLTVLIPPEDTRIDGGPVILLQAGTPHNLTCRAFNAKPAATIIWFRDGTQQEGAVASTELLKDGKRETTVSQLLINPTDLDIGRVFTCRSMNEAIPSGKETSIELDVHHPPTVTLSIEPQTVQEGERVVFTCQATANPEILGYRWAKGGFLIEDAHESRYETNVDYSFFTEPVSCEVHNKVGSTNVSTLVNVHFAPRIVVDPKPTTTDIGSDVTLTCVWVGNPPLTLTWTKKDSNMVLSNSNQLLLKSVTQADAGTYTCRAIVPRIGVAEREVPLYVNGPPIISSEAVQYAVRGDGGKVECFIGSTPPPDRIAWAWKENFLEVGTLERYTVERTNSGSGVLSTLTINNVMEADFQTHYNCTAWNSFGPGTAIIQLEEREVLPVGIIAGATIGASILLIFFFIALVFFLYRRRKGSRKDVTLRKLDIKVETVNREPLTMHSDREDDTASVSTATRVMKAIYSSFKDDVDLKQDLRCDTIDTREEYEMKDPTNGYYNVRAHEDRPSSRAVLYADYRAPGPARFDGRPSSRLSHSSGYAQLNTYSRGPASDYGPEPTPPGPAAPAGTDTTSQLSYENYEKFNSHPFPGAAGYPTYRLGYPQAPPSGLERTPYEAYDPIGKYATATRFSYTSQHSDYGQRFQQRMQTHV

SEQ ID NO: 7678 - protein, 666 aa, Homo sapiens
MANEEDDPVVQEIDVYLAKSLAEKLYLFQYPVRPASMTYDDIPHLSAKIKPKQQKVELEMAIDTLNPNYCRSKGEQIALNVDGACADETSTYSSKLMDKQTFCSSQTTSNTSRYAAALYRQGELHLTPLHGILQLRPSFSYLDKADAKHREREAANEAGDSSQDEAEDDVKQITVRFSRPESEQARQRRVQSYEFLQKKHAEEPWVHLHYYGLRDSRSEHERQYLLCPGSSGVENTELVKSPSEYLMMLMPPSQEEEKDKPVAPSNVLSMAQLRTLPLADQIKILMKNVKVMPFANLMSLLGPSIDSVAVLRGIQKVAMLVQGNWVVKSDILYPKDSSSPHSGVPAEVLCRGRDFVMWKFTQSRWVVRKEVATVTKLCAEDVKDFLEHMAVVRINKGWEFILPYDGEFIKKHPDVVQRQHMLWTGIQAKLEKVYNLVKETMPKKPDAQSGPAGLVCGDQRIQVAKTKAQQNHALLERELQRRKEQLRVPAVPPGVRIKEEPVSEEGEEDEEQEAEEEPMDTSPSGLHSKLANGLPLGRAAGTDSFNGHPPQGCASTPVARELKAFVEATFQRQFVLTLSELKRLFNLHLASLPPGHTLFSGISDRMLQDTVLAAGCKQILVPFPPQTAASPDEQKVFALWESGDMSDQDCCVSYGGMWYLKGTVQS

SEQ ID NO: 7679 - protein, 27051 aa, Homo sapiens
MTTQAPTFTQPLQSVVVLEGSTATFEAHISGFPVPEVSWFRDGQVISTSTLPGVQISFSDGRAKLTIPAVTKANSGRYSLKATNGSGQATSTAELLVKAETAPPNFVQRLQSMTVRQGSQVRLQVRVTGIPTPVVKFYRDGAEIQSSLDFQISQEGDLYSLLIAEAYPEDSGTYSVNATNSVGRATSTAELLVQGEEEVPAKKTKTIVSTAQISESRQTRIEKKIEAHFDARSIATVEMVIDGAAGQQLPHKTPPRIPPKPKSRSPTPPSIAAKAQLARQQSPSPIRHSPSPVRHVRAPTPSPVRSVSPAARISTSPIRSVRSPLLMRKTQASTVATGPEVPPPWKQEGYVASSSEAEMRETTLTTSTQIRTEERWEGRYGVQEQVTISGAAGAAASVSASASYAAEAVATGAKEVKQDADKSAAVATVVAAVDMARVREPVISAVEQTAQRTTTTAVHIQPAQEQVRKEAEKTAVTKVVVAADKAKEQELKSRTKEVITTKQEQMHVTHEQIRKETEKTFVPKVVISAAKAKEQETRISEEITKKQKQVTQEAIMKETRKTVVPKVIVATPKVKEQDLVSRGREGITTKREQVQITQEKMRKEAEKTALSTIAVATAKAKEQETILRTRETMATRQEQIQVTHGKVDVGKKAEAVATVVAAVDQARVREPREPGHLEESYAQQTTLEYGYKERISAAKVAEPPQRPASEPHVVPKAVKPRVIQAPSETHIKTTDQKGMHISSQIKKTTDLTTERLVHVDKRPRTASPHFTVSKISVPKTEHGYEASIAGSAIATLQKELSATSSAQKITKSVKAPTVKPSETRVRAEPTPLPQFPFADTPDTYKSEAGVEVKKEVGVSITGTTVREERFEVLHGREAKVTETARVPAPVEIPVTPPTLVSGLKNVTVIEGESVTLECHISGYPSPTVTWYREDYQIESSIDFQITFQSGIARLMIREAFAEDSGRFTCSAVNEAGTVSTSCYLAVQVSEEFEKETTAVTEKFTTEEKRFVESRDVVMTDTSLTEEQAGPGEPAAPYFITKPVVQKLVEGGSVVFGCQVGGNPKPHVYWKKSGVPLTTGYRYKVSYNKQTGECKLVISMTFADDAGEYTIVVRNKHGETSASASLLEEADYELLMKSQQEMLYQTQVTAFVQEPKVGETAPGFVYSEYEKEYEKEQALIRKKMAKDTVVVRTYVEDQEFHISSFEERLIKEIEYRIIKTTLEELLEEDGEEKMAVDISESEAVESGFDSRIKNYRILEGMGVTFHCKMSGYPLPKIAWYKDGKRIKHGERYQMDFLQDGRASLRIPVVLPEDEGIYTAFASNIKGNAICSGKLYVEPAAPLGAPTYIPTLEPVSRIRSLSPRSVSRSPIRMSPARMSPARMSPARMSPARMSPGRRLEETDESQLERLYKPVFVLKPVSFKCLEGQTARFDLKVVGRPMPETFWFHDGQQIVNDYTHKVVIKEDGTQSLIIVPATPSDSGEWTVVAQNRAGRSSISVILTVEAVEHQVKPMFVEKLKNVNIKEGSRLEMKVRATGNPNPDIVWLKNSDIIVPHKYPKIRIEGTKGEAALKIDSTVSQDSAWYTATAINKAGRDTTRCKVNVEVEFAEPEPERKLIIPRGTYRAKEIAAPELEPLHLRYGQEQWEEGDLYDKEKQQKPFFKKKLTSLRLKRFGPAHFECRLTPIGDPTMVVEWLHDGKPLEAANRLRMINEFGYCSLDYGVAYSRDSGIITCRATNKYGTDHTSATLIVKDEKSLVEESQLPEGRKGLQRIEELERMAHEGALTGVTTDQKEKQKPDIVLYPEPVRVLEGETARFRCRVTGYPQPKVNWYLNGQLIRKSKRFRVRYDGIHYLDIVDCKSYDTGEVKVTAENPEGVIEHKVKLEIQQREDFRSVLRRAPEPRPEFHVHEPGKLQFEVQKVDRPVDTTETKEVVKLKRAERITHEKVPEESEELRSKFKRRTEEGYYEAITAVELKSRKKDESYEELLRKTKDELLHWTKELTEEEKKALAEEGKITIPTFKPDKIELSPSMEAPKIFERIQSQTVGQGSDAHFRVRVVGKPDPECEWYKNGVKIERSDRIYWYWPEDNVCELVIRDVTAEDSASIMVKAINIAGETSSHAFLLVQAKQLITFTQELQDVVAKEKDTMATFECETSEPFVKVKWYKDGMEVHEGDKYRMHSDRKVHFLSILTIDTSDAEDYSCVLVEDENVKTTAKLIVEGAVVEFVKELQDIEVPESYSGELECIVSPENIEGKWYHNDVELKSNGKYTITSRRGRQNLTVKDVTKEDQGEYSFVIDGKKTTCKLKMKPRPIAILQGLSDQKVCEGDIVQLEVKVSLESVEGVWMKDGQEVQPSDRVHIVIDKQSHMLLIEDMTKEDAGNYSFTIPALGLSTSGRVSVYSVDVITPLKDVNVIEGTKAVLECKVSVPDVTSVKWYLNDEQIKPDDRVQAIVKGTKQRLVINRTHASDEGPYKLIVGRVETNCNLSVEKIKIIRGLRDLTCTETQNVVFEVELSHSGIDVLWNFKDKEIKPSSKYKIEAHGKIYKLTVLNMMKDDEGKYTFYAGENMTSGKLTVAGGAISKPLTDQTVAESQEAVFECEVANPDSKGEWLRDGKHLPLTNNIRSESDGHKRRLIIAATKLDDIGEYTYKVATSKTSAKLKVEAVKIKKTLKNLTVTETQDAVFTVELTHPNVKGVQWIKNGVVLESNEKYAISVKGTIYSLRIKNCAIVDESVYGFRLGRLGASARLHVETVKIIKKPKDVTALENATVAFEVSVSHDTVPVKWFHKSVEIKPSDKHRLVSERKVHKLMLQNISPSDAGEYTAVVGQLECKAKLFVETLHITKTMKNIEVPETKTASFECEVSHFNVPSMWLKNGVEIEMSEKFKIVVQGKLHQLIIMNTSTEDSAEYTFVCGNDQVSATLTVTPIMITSMLKDINAEEKDTITFEVTVNYEGISYKWLKNGVEIKSTDKCQMRTKKLTHSLNIRNVHFGDAADYTFVAGKATSTATLYVEARHIEFRKHIKDIKVLEKKRAMFECEVSEPDITVQWMKDDQELQITDRIKIQKEKYVHRLLIPSTRMSDAGKYTVVAGGNVSTAKLFVEGRDVRIRSIKKEVQVIEKQRAVVEFEVNEDDVDAHWYKDGIEINFQVQERHKYVVERRIHRMFISETRQSDAGEYTFVAGRNRSSVTLYVNAPEPPQVLQELQPVTVQSGKPARFCAVISGRPQPKISWYKEEQLLSTGFKCKFLHDGQEYTLLLIEAFPEDAAVYTCEAKNDYGVATTSASLSVEVPEVVSPDQEMPVYPPAIITPLQDTVTSEGQPARFQCRVSGTDLKVSWYSKDKKIKPSRFFRMTQFEDTYQLEIAEAYPEDEGTYTFVASNAVGQVSSTANLSLEGFSKFEENTSNSQWHVSLSVSFKKEPLGQKPSFIQPLSSLRVHNGETVRFHARVSGIPKPEIQWFHNQQLILPTKDVVFHFEESTGMALMLIVDAYSEHAGQYSCKAANSAGEATCAATLTVTPKAPESILHERIEQEIEMEMKEFSSSFLSAEEEGLHSAELQLSKINETLELLSESPVYPTKFDSEKEGTGPIFIKEVSNADISMGDVATLSVTVIGIPKPKIQWFFNGVLLTPSADYKFVFDGDDHSLIILFTKLEDEGEYTCMASNDYGKTICSAYLKINSKGEGHKDTETESAVAKSLEKLGGPCPPHFLKELKPIRCAQGLPAIFEYTVVGEPAPTVTWFKENKQLCTSVYYTIIHNPNGSGTFIVNDPQREDSGLYICKAENMLGESTCAAELLVLLEDTDMTDTPCKAKSTPEAPEDFPQTPLKGPAVEALDSEQEIATFVKDTILKAALITEENQQLSYEHIAKANELSSQLPLGAQELQSILEQDKLTPESTREFLCINGSIHFQPLKEPSPNLQLQIVQSQKTFSKEGILMPEEPETQAVLSDTEKIFPSAMSIEQINSLTVEPLKTLLAEPEGNYPQSSIEPPMHSYLTSVAEEVLSPKEKTVSDTNREQRVTLQKQEAQSALILSQSLAEGHVESLQSPDVMISQVNYEPLVPSEHSCTEGGKILIESANPLENAGQDSAVRIEEGKSLRFPLALEEKQVLLKEEHSDNVVMPPDQIIESKREPVAIKKVQEVQGRDLLSKESLLSGIPEEQRLNLKIQICRALQAAVASEQPGLFSEWLRNIEKVEVEAVNITQEPRHIMCMYLVTSAKSVTEEVTIIIEDVDPQMANLKMELRDALCAIIYEEIDILTAEGPRIQQGAKTSLQEEMDSFSGSQKVEPITEPEVESKYLISTEEVSYFNVQSRVKYLDATPVTKGVASAVVSDEKQDESLKPSEEKEESSSESGTEEVATVKIQEAEGGLIKEDGPMIHTPLVDTVSEEGDIVHLTTSITNAKEVNWYFENKLVPSDEKFKCLQDQNTYTLVIDKVNTEDHQGEYVCEALNDSGKTATSAKLTVVKRAAPVIKRKIEPLEVALGHLAKFTCEIQSAPNVRFQWFKAGREIYESDKCSIRSSKYISSLEILRTQVVDCGEYTCKASNEYGSVSCTATLTVTVPGGEKKVRKLLPERKPEPKEEVVLKSVLRKRPEEEEPKVEPKKLEKVKKPAVPEPPPPKPVEEVEVPTVTKRERKIPEPTKVPEIKPAIPLPAPEPKPKPEAEVKTIKPPPVEPEPTPIAAPVTVPVVGKKAEAKAPKEEAAKPKGPIKGVPKKTPSPIEAERRKLRPGSGGEKPPDEAPFTYQLKAVPLKFVKEIKDIILTESEFVGSSAIFECLVSPSTAITTWMKDGSNIRESPKHRFIADGKDRKLHIIDVQLSDAGEYTCVLRLGNKEKTSTAKLVVEELPVRFVKTLEEEVTVVKGQPLYLSCELNKERDVVWRKDGKIVVEKPGRIVPGVIGLMRALTINDADDTDAGTYTVTVENANNLECSSCVKVVEVIRDWLVKPIRDQHVKPKGTAIFACDIAKDTPNIKWFKGYDEIPAEPNDKTEILRDGNHLYLKIKNAMPEDIAEYAVEIEGKRYPAKLTLGEREVELLKPIEDVTIYEKESASFDAEISEADIPGQWKLKGELLRPSPTCEIKAEGGKRFLTLHKVKLDQAGEVLYQALNAITTAILTVKEIELDFAVPLKDVTVPERRQARFECVLTREANVIWSKGPDIIKSSDKFDIIADGKKHILVINDSQFDDEGVYTAEVEGKKTSARLFVTGIRLKFMSPLEDQTVKEGETATFVCELSHEKMHVVWFKNDAKLHTSRTVLISSEGKTHKLEMKEVTLDDISQIKAQVKELSSTAQLKVLEADPYFTVKLHDKTAVEKDEITLKCEVSKDVPVKWFKDGEEIVPSPKYSIKADGLRRILKIKKADLKDKGEYVCDCGTDKTKANVTVEARLIKVEKPLYGVEVFVGETAHFEIELSEPDVHGQWKLKGQPLTASPDCEIIEDGKKHILILHNCQLGMTGEVSFQAANAKSAANLKVKELPLIFITPLSDVKVFEKDEAKFECEVSREPKTFRWLKGTQEITGDDRFELIKDGTKHSMVIKSAAFEDEAKYMFEAEDKHTSGKLIIEGIRLKFLTPLKDVTAKEKESAVFTVELSHDNIRVKWFKNDQRLHTTRSVSMQDEGKTHSITFKDLSIDDTSQIRVEAMGMSSEAKLTVLEGDPYFTGKLQDYTGVEKDEVILQCEISKADAPVKWFKDGKEIKPSKNAVIKADGKKRMLILKKALKSDIGQYTCDCGTDKTSGKLDIEDREIKLVRPLHSVEVMETETARFETEISEDDIHANWKLKGEALLQTPDCEIKEEGKIHSLVLHNCRLDQTGGVDFQAANVKSSAHLRVKPRVIGLLRPLKDVTVTAGETATFDCELSYEDIPVEWYLKGKKLEPSDKVVPRSEGKVHTLTLRDVKLEDAGEVQLTAKDFKTHANLFVKEPPVEFTKPLEDQTVEEGATAVLECEVSRENAKVKWFKNGTEILKSKKYEIVADGRVRKLVIHDCTPEDIKTYTCDAKDFKTSCNLNVVPPHVEFLRPLTDLQVREKEMARFECELSRENAKVKWFKDGAEIKKGKKYDIISKGAVRILVINKCLLDDEAEYSCEVRTARTSGMLTVLEEEAVFTKNLANIEVSETDTIKLVCEVSKPGAEVIWYKGDEEIIETGRYEILTEGRKRILVIQNAHLEDAGNYNCRLPSSRTDGKVKVHELAAEFISKPQNLEILEGEKAEFVCSISKESFPVQWKRDDKTLESGDKYDVIADGKKRVLVVKDATLQDMGTYVVMVGAARAAAHLTVIEKLRIVVPLKDTRVKEQQEVVFNCEVNTEGAKAKWFRNEEAIFDSSKYIILQKDLVYTLRIRDAHLDDQANYNVSLTNHRGENVKSAANLIVEEEDLRIVEPLKDIETMEKKSVTFWCKVNRLNVTLKWTKNGEEVPFDNRVSYRVDKYKHMLTIKDCGFPDEGEYIVTAGQDKSVAELLIIEAPTEFVEHLEDQTVTEFDDAVFSCQLSREKANVKWYRNGREIKEGKKYKFEKDGSIHRLIIKDCRLDDECEYACGVEDRKSRARLFVEEIPVEIIRPPQDILEAPGADVVFLAELNKDKVEVQWLRNNMVVVQGDKHQMMSEGKIHRLQICDIKPRDQGEYRFIAKDKEARAKLELAAAPKIKTADQDLVVDVGKPLTMVVPYDAYPKAEAEWFKENEPLSTKTIDTTAEQTSFRILEAKKGDKGRYKIVLQNKHGKAEGFINLKVIDVPGPVRNLEVTETFDGEVSLAWEEPLTDGGSKIIGYVVERRDIKRKTWVLATDRAESCEFTVTGLQKGGVEYLFRVSARNRVGTGEPVETDNPVEARSKYDVPGPPLNVTITDVNRFGVSLTWEPPEYDGGAEITNYVIELRDKTSIRWDTAMTVRAEDLSATVTDVVEGQEYSFRVRAQNRIGVGKPSAATPFVKVADPIERPSPPVNLTSSDQTQSSVQLKWEPPLKDGGSPILGYIIERCEEGKDNWIRCNMKLVPELTYKVTGLEKGNKYLYRVSAENKAGVSDPSEILGPLTADDAFVEPTMDLSAFKDGLEVIVPNPITILVPSTGYPRPTATWCFGDKVLETGDRVKMKTLSAYAELVISPSERSDKGIYTLKLENRVKTISGEIDVNVIARPSAPKELKFGDITKDSVHLTWEPPDDDGGSPLTGYVVEKREVSRKTWTKVMDFVTDLEFTVPDLVQGKEYLFKVCARNKCGPGEPAYVDEPVNMSTPATVPDPPENVKWRDRTANSIFLTWDPPKNDGGSRIKGYIVERCPRGSDKWVACGEPVAETKMEVTGLEEGKWYAYRVKALNRQGASKPSRPTEEIQAVDTQEAPEIFLDVKLLAGLTVKAGTKIELPATVTGKPEPKITWTKADMILKQDKRITIENVPKKSTVTIVDSKRSDTGTYIIEAVNVCGRATAVVEVNVLDKPGPPAAFDITDVTNESCLLTWNPPRDDGGSKITNYVVERRATDSEVWHKLSSTVKDTNFKATKLIPNKEYIFRVAAENMYGVGEPVQASPITAKYQFDPPGPPTRLEPSDITKDAVTLTWCEPDDDGGSPITGYWVERLDPDTDKWVRCNKMPVKDTTYRVKGLTNKKKYRFRVLAENLAGPGKPSKSTEPILIKDPIDPPWPPGKPTVKDVGKTSVRLNWTKPEHDGGAKIESYVIEMLKTGTDEWVRVAEGVPTTQHLLPGLMEGQEYSFRVRAVNKAGESEPSEPSDPVLCREKLYPPSPPRWLEVINITKNTADLKWTVPEKDGGSPITNYIVEKRDVRRKGWQTVDTTVKDTKCTVTPLTEGSLYVFRVAAENAIGQSDYTEIEDSVLAKDTFTTPGPPYALAVVDVTKRHVDLKWEPPKNDGGRPIQRYVIEKKERLGTRWVKAGKTAGPDCNFRVTDVIEGTEVQFQVRAENEAGVGHPSEPTEILSIEDPTSPPSPPLDLHVTDAGRKHIAIAWKPPEKNGGSPIIGYHVEMCPVGTEKWMRVNSRPIKDLKFKVEEGVVPDKEYVLRVRAVNAIGVSEPSEISENVVAKDPDCKPTIDLETHDIIVIEGEKLSIPVPFRAVPVPTVSWHKDGKEVKASDRLTMKNDHISAHLEVPKSVRADAGIYTITLENKLGSATASINVKVIGLPGPCKDIKASDITKSSCKLTWEPPEFDGGTPILHYVLERREAGRRTYIPVMSGENKLSWTVKDLIPNGEYFFRVKAVNKVGGGEYIELKNPVIAQDPKQPPDPPVDVEVHNPTAEAMTITWKPPLYDGGSKIMGYIIEKIAKGEERWKRCNEHLVPILTYTAKGLEEGKEYQFRVRAENAAGISEPSRATPPTKAVDPIDAPKVILRTSLEVKRGDEIALDASISGSPYPTITWIKDENVIVPEEIKKRAAPLVRRRKGEVQEEEPFVLPLTQRLSIDNSKKGESQLRVRDSLRPDHGLYMIKVENDHGIAKAPCTVSVLDTPGPPINFVFEDIRKTSVLCKWEPPLDDGGSEIINYTLEKKDKTKPDSEWIVVTSTLRHCKYSVTKLIEGKEYLFRVRAENRFGPGPPCVSKPLVAKDPFGPPDAPDKPIVEDVTSNSMLVKWNEPKDNGSPILGYWLEKREVNSTHWSRVNKSLLNALKANVDGLLEGLTYVFRVCAENAAGPGKFSPPSDPKTAHDPISPPGPPIPRVTDTSSTTIELEWEPPAFNGGGEIVGYFVDKQLVGTNEWSRCTEKMIKVRQYTVKEIREGADYKLRVSAVNAAGEGPPGETQPVTVAEPQEPPAVELDVSVKGGIQIMAGKTLRIPAVVTGRPVPTKVWTKEEGELDKDRVVIDNVGTKSELIIKDALRKDHGRYVITATNSCGSKFAAARVEVFDVPGPVLDLKPVVTNRKMCLLNWSDPEDDGGSEITGFIIERKDAKMHTWRQPIETERSKCDITGLLEGQEYKFRVIAKNKFGCGPPVEIGPILAVDPLGPPTSPERLTYTERTKSTITLDWKEPRSNGGSPIQGYIIEKRRHDKPDFERVNKRLCPTTSFLVENLDEHQMYEFRVKAVNEIGESEPSLPLNVVIQDDEVPPTIKLRLSVRGDTIKVKAGEPVHIPADVTGLPMPKIEWSKNETVIEKPTDALQITKEEVSRSEAKTELSIPKAVREDKGTYTVTASNRLGSVFRNVHVEVYDRPSPPRNLAVTDIKAESCYLTWDAPLDNGGSEITHYVIDKRDASRKKAEWEEVTNTAVEKRYGIWKLIPNGQYEFRVRAVNKYGISDECKSDKVVIQDPYRLPGPPGKPKVLARTKGSMLVSWTPPLDNGGSPITGYWLEKREEGSPYWSRVSRAPITKVGLKGVEFNVPRLLEGVKYQFRAMAINAAGIGPPSEPSDPEVAGDPIFPPGPPSCPEVKDKTKSSISLGWKPPAKDGGSPIKGYIVEMQEEGTTDWKRVNEPDKLITTCECVVPNLKELRKYRFRVKAVNEAGESEPSDTTGEIPATDIQEEPEVFIDIGAQDCLVCKAGSQIRIPAVIKGRPTPKSSWEFDGKAKKAMKDGVHDIPEDAQLETAENSSVIIIPECKRSHTGKYSITAKNKAGQKTANCRVKVMDVPGPPKDLKVSDITRGSCRLSWKMPDDDGGDRIKGYVIEKRTIDGKAWTKVNPDCGSTTFVVPDLLSEQQYFFRVRAENRFGIGPPVETIQRTTARDPIYPPDPPIKLKIGLITKNTVHLSWKPPKNDGGSPVTHYIVECLAWDPTGTKKEAWRQCNKRDVEELQFTVEDLVEGGEYEFRVKAVNAAGVSKPSATVGPVTVKDQTCPPSIDLKEFMEVEEGTNVNIVAKIKGVPFPTLTWFKAPPKKPDNKEPVLYDTHVNKLVVDDTCTLVIPQSRRSDTGLYTITAVNNLGTASKEMRLNVLGRPGPPVGPIKFESVSADQMTLSWFPPKDDGGSKITNYVIEKREANRKTWVHVSSEPKECTYTIPKLLEGHEYVFRIMAQNKYGIGEPLDSEPETARNLFSVPGAPDKPTVSSVTRNSMTVNWEEPEYDGGSPVTGYWLEMKDTTSKRWKRVNRDPIKAMTLGVSYKVTGLIEGSDYQFRVYAINAAGVGPASLPSDPATARDPIAPPGPPFPKVTDWTKSSADLEWSPPLKDGGSKVTGYIVEYKEEGKEEWEKGKDKEVRGTKLVVTGLKEGAFYKFRVRAVNIAGIGEPGEVTDVIEMKDRLVSPDLQLDASVRDRIVVHAGGVIRIIAYVSGKPPPTVTWNMNERTLPQEATIETTAISSSMVIKNCQRSHQGVYSLLAKNEAGERKKTIIVDVLDVPGPVGTPFLAHNLTNESCKLTWFSPEDDGGSPITNYVIEKRESDRRAWTPVTYTVTRQNATVQGLIQGKAYFFRIAAENSIGMGPFVETSEALVIREPITVPERPEDLEVKEVTKNTVTLTWNPPKYDGGSEIINYVLESRLIGTEKFHKVTNDNLLSRKYTVKGLKEGDTYEYRVSAVNIVGQGKPSFCTKPITCKDELAPPTLHLDFRDKLTIRVGEAFALTGRYSGKPKPKVSWFKDEADVLEDDRTHIKTTPATLALEKIKAKRSDSGKYCVVVENSTGSRKGFCQVNVVDRPGPPVGPVSFDEVTKDYMVISWKPPLDDGGSKITNYIIEKKEVGKDVWMPVTSASAKTTCKVSKLLEGKDYIFRIHAENLYGISDPLVSDSMKAKDRFRVPDAPDQPIVTEVTKDSALVTWNKPHDGGKPITNYILEKRETMSKRWARVTKDPIHPYTKFRVPDLLEGCQYEFRVSAENEIGIGDPSPPSKPVFAKDPIAKPSPPVNPEAIDTTCNSVDLTWQPPRHDGGSKILGYIVEYQKVGDEEWRRANHTPESCPETKYKVTGLRDGQTYKFRVLAVNAAGESDPAHVPEPVLVKDRLEPPELILDANMAREQHIKVGDTLRLSAIIKGVPFPKVTWKKEDRDAPTKARIDVTPVGSKLEIRNAAHEDGGIYSLTVENPAGSKTVSVKVLVLDKPGPPRDLEVSEIRKDSCYLTWKEPLDDGGSVITNYVVERRDVASAQWSPLSATSKKKSHFAKHLNEGNQYLFRVAAENQYGRGPFVETPKPIKALDPLHPPGPPKDLHHVDVDKTEVSLVWNKPDRDGGSPITGYLVEYQEEGTQDWIKFKTVTNLECVVTGLQQGKTYRFRVKAENIVGLGLPDTTIPIECQEKLVPPSVELDVKLIEGLVVKAGTTVRFPAIIRGVPVPTAKWTTDGSEIKTDEHYTVETDNFSSVLTIKNCLRRDTGEYQITVSNAAGSKTVAVHLTVLDVPGPPTGPINILDVTPEHMTISWQPPKDDGGSPVINYIVEKQDTRKDTWGVVSSGSSKTKLKIPHLQKGCEYVFRVRAENKIGVGPPLDSTPTVAKHKFSPPSPPGKPVVTDITENAATVSWTLPKSDGGSPITGYYMERREVTGKWVRVNKTPIADLKFRVTGLYEGNTYEFRVFAENLAGLSKPSPSSDPIKACRPIKPPGPPINPKLKDKSRETADLVWTKPLSDGGSPILGYVVECQKPGTAQWNRINKDELIRQCAFRVPGLIEGNEYRFRIKAANIVGEGEPRELAESVIAKDILHPPEVELDVTCRDVITVRVGQTIRILARVKGRPEPDITWTKEGKVLVREKRVDLIQDLPRVELQIKEAVRADHGKYIISAKNSSGHAQGSAIVNVLDRPGPCQNLKVTNVTKENCTISWENPLDNGGSEITNFIVEYRKPNQKGWSIVASDVTKRLIKANLLANNEYYFRVCAENKVGVGPTIETKTPILAINPIDRPGEPENLHIADKGKTFVYLKWRRPDYDGGSPNLSYHVERRLKGSDDWERVHKGSIKETHYMVDRCVENQIYEFRVQTKNEGGESDWVKTEEVVVKEDLQKPVLDLKLSGVLTVKAGDTIRLEAGVRGKPFPEVAWTKDKDATDLTRSPRVKIDTRADSSKFSLTKAKRSDGGKYVVTATNTAGSFVAYATVNVLDKPGPVRNLKIVDVSSDRCTVCWDPPEDDGGCEIQNYILEKCETKRMVWSTYSATVLTPGTTVTRLIEGNEYIFRVRAENKIGTGPPTESKPVIAKTKYDKPGRPDPPEVTKVSKEEMTVVWNPPEYDGGKSITGYFLEKKEKHSTRWVPVNKSAIPERRMKVQNLLPDHEYQFRVKAENEIGIGEPSLPSRPVVAKDPIEPPGPPTNFRVVDTTKHSITLGWGKPVYDGGAPIIGYVVEMRPKIADASPDEGWKRCNAAAQLVRKEFTVTSLDENQEYEFRVCAQNQVGIGRPAELKEAIKPKEILEPPEIDLDASMRKLVIVRAGCPIRLFAIVRGRPAPKVTWRKVGIDNVVRKGQVDLVDTMAFLVIPNSTRDDSGKYSLTLVNPAGEKAVFVNVRVLDTPGPVSDLKVSDVTKTSCHVSWAPPENDGGSQVTHYIVEKREADRKTWSTVTPEVKKTSFHVTNLVPGNEYYFRVTAVNEYGPGVPTDVPKPVLASDPLSEPDPPRKLEVTEMTKNSATLAWLPPLRDGGAKIDGYITSYREEEQPADRWTEYSVVKDLSLVVTGLKEGKKYKFRVAARNAVGVSLPREAEGVYEAKEQLLPPKILMPEQITIKAGKKLRIEAHVYGKPHPTCKWKKGEDEVVTSSHLAVHKADSSSILIIKDVTRKDSGYYSLTAENSSGTDTQKIKVVVMDAPGPPQPPFDISDIDADACSLSWHIPLEDGGSNITNYIVEKCDVSRGDWVTALASVTKTSCRVGKLIPGQEYIFRVRAENRFGISEPLTSPKMVAQFPFGVPSEPKNARVTKVNKDCIFVAWDRPDSDGGSPIIGYLIERKERNSLLWVKANDTLVRSTEYPCAGLVEGLEYSFRIYALNKAGSSPPSKPTEYVTARMPVDPPGKPEVIDVTKSTVSLIWARPKHDGGSKIIGYFVEACKLPGDKWVRCNTAPHQIPQEEYTATGLEEKAQYQFRAIARTAVNISPPSEPSDPVTILAENVPPRIDLSVAMKSLLTVKAGTNVCLDATVFGKPMPTVSWKKDGTLLKPAEGIKMAMQRNLCTLELFSVNRKDSGDYTITAENSSGSKSATIKLKVLDKPGPPASVKINKMYSDRAMLSWEPPLEDGGSEITNYIVDKRETSRPNWAQVSATVPITSCSVEKLIEGHEYQFRICAENKYGVGDPVFTEPAIAKNPYDPPGRCDPPVISNITKDHMTVSWKPPADDGGSPITGYLLEKRETQAVNWTKVNRKPIIERTLKATGLQEGTEYEFRVTAINKAGPGKPSDASKAAYARDPQYPPGPPAFPKVYDTTRSSVSLSWGKPAYDGGSPIIGYLVEVKRADSDNWVRCNLPQNLQKTRFEVTGLMEDTQYQFRVYAVNKIGYSDPSDVPDKHYPKDILIPPEGELDADLRKTLILRAGVTMRLYVPVKGRPPPKITWSKPNVNLRDRIGLDIKSTDFDTFLRCENVNKYDAGKYILTLENSCGKKEYTIVVKVLDTPGPPVNVTVKEISKDSAYVTWEPPIIDGGSPIINYVVQKRDAERKSWSTVTTECSKTSFRVANLEEGKSYFFRVFAENEYGIGDPGETRDAVKASQTPGPVVDLKVRSVSKSSCSIGWKKPHSDGGSRIIGYVVDFLTEENKWQRVMKSLSLQYSAKDLTEGKEYTFRVSAENENGEGTPSEITVVARDDVVAPDLDLKGLPDLCYLAKENSNFRLKIPIKGKPAPSVSWKKGEDPLATDTRVSVESSAVNTTLIVYDCQKSDAGKYTITLKNVAGTKEGTISIKVVGKPGIPTGPIKFDEVTAEAMTLKWAPPKDDGGSEITNYILEKRDSVNNKWVTCASAVQKTTFRVTRLHEGMEYTFRVSAENKYGVGEGLKSEPIVARHPFDVPDAPPPPNIVDVRHDSVSLTWTDPKKTGGSPITGYHLEFKERNSLLWKRANKTPIRMRDFKVTGLTEGLEYEFRVMAINLAGVGKPSLPSEPVVALDPIDPPGKPEVINITRNSVTLIWTEPKYDGGHKLTGYIVEKRDLPSKSWMKANHVNVPECAFTVTDLVEGGKYEFRIRAKNTAGAISAPSESTETIICKDEYEAPTIVLDPTIKDGLTIKAGDTIVLNAISILGKPLPKSSWSKAGKDIRPSDITQITSTPTSSMLTIKYATRKDAGEYTITATNPFGTKVEHVKVTVLDVPGPPGPVEISNVSAEKATLTWTPPLEDGGSPIKSYILEKRETSRLLWTVVSEDIQSCRHVATKLIQGNEYIFRVSAVNHYGKGEPVQSEPVKMVDRFGPPGPPEKPEVSNVTKNTATVSWKRPVDDGGSEITGYHVERREKKSLRWVRAIKTPVSDLRCKVTGLQEGSTYEFRVSAENRAGIGPPSEASDSVLMKDAAYPPGPPSNPHVTDTTKKSASLAWGKPHYDGGLEITGYVVEHQKVGDEAWIKDTTGTALRITQFVVPDLQTKEKYNFRISAINDAGVGEPAVIPDVEIVEREMAPDFELDAELRRTLVVRAGLSIRIFVPIKGRPAPEVTWTKDNINLKNRANIENTESFTLLIIPECNRYDTGKFVMTIENPAGKKSGFVNVRVLDTPGPVLNLRPTDITKDSVTLHWDLPLIDGGSRITNYIVEKREATRKSYSTATTKCHKCTYKVTGLSEGCEYFFRVMAENEYGIGEPTETTEPVKASEAPSPPDSLNIMDITKSTVSLAWPKPKHDGGSKITGYVIEAQRKGSDQWTHITTVKGLECVVRNLTEGEEYTFQVMAVNSAGRSAPRESRPVIVKEQTMLPELDLRGIYQKLVIAKAGDNIKVEIPVLGRPKPTVTWKKGDQILKQTQRVNFETTATSTILNINECVRSDSGPYPLTARNIVGEVGDVITIQVHDIPGPPTGPIKFDEVSSDFVTFSWDPPENDGGVPISNYVVEMRQTDSTTWVELATTVIRTTYKATRLTTGLEYQFRVKAQNRYGVGPGITSACIVANYPFKVPGPPGTPQVTAVTKDSMTISWHEPLSDGGSPILGYHVERKERNGILWQTVSKALVPGNIFKSSGLTDGIAYEFRVIAENMAGKSKPSKPSEPMLALDPIDPPGKPVPLNITRHTVTLKWAKPEYTGGFKITSYIVEKRDLPNGRWLKANFSNILENEFTVSGLTEDAAYEFRVIAKNAAGAISPPSEPSDAITCRDDVEAPKIKVDVKFKDTVILKAGEAFRLEADVSGRPPPTMEWSKDGKELEGTAKLEIKIADFSTNLVNKDSTRRDSGAYTLTATNPGGFAKHIFNVKVLDRPGPPEGPLAVTEVTSEKCVLSWFPPLDDGGAKIDHYIVQKRETSRLAWTNVASEVQVTKLKVTKLLKGNEYIFRVMAVNKYGVGEPLESEPVLAVNPYGPPDPPKNPEVTTITKDSMVVCWGHPDSDGGSEIINYIVERRDKAGQRWIKCNKKTLTDLRYKVSGLTEGHEYEFRIMAENAAGISAPSPTSPFYKACDTVFKPGPPGNPRVLDTSRSSISIAWNKPIYDGGSEITGYMVEIALPEEDEWQIVTPPAGLKATSYTITGLTENQEYKIRIYAMNSEGLGEPALVPGTPKAEDRMLPPEIELDADLRKVVTIRACCTLRLFVPIKGRPAPEVKWARDHGESLDKASIESTSSYTLLIVGNVNRFDSGKYILTVENSSGSKSAFVNVRVLDTPGPPQDLKVKEVTKTSVTLTWDPPLLDGGSKIKNYIVEKRESTRKAYSTVATNCHKTSWKVDQLQEGCSYYFRVLAENEYGIGLPAETAESVKASERPLPPGKITLMDVTRNSVSLSWEKPEHDGGSRILGYIVEMQTKGSDKWATCATVKVTEATITGLIQGEEYSFRVSAQNEKGISDPRQLSVPVIAKDLVIPPAFKLLFNTFTVLAGEDLKVDVPFIGRPTPAVTWHKDNVPLKQTTRVNAESTENNSLLTIKDACREDVGHYVVKLTNSAGEAIETLNVIVLDKPGPPTGPVKMDEVTADSITLSWGPPKYDGGSSINNYIVEKRDTSTTTWQIVSATVARTTIKACRLKTGCEYQFRIAAENRYGKSTYLNSEPTVAQYPFKVPGPPGTPVVTLSSRDSMEVQWNEPISDGGSRVIGYHLERKERNSILWVKLNKTPIPQTKFKTTGLEEGVEYEFRVSAENIVGIGKPSKVSECYVARDPCDPPGRPEAIIVTRNSVTLQWKKPTYDGGSKITGYIVEKKELPEGRWMKASFTNIIDTHFEVTGLVEDHRYEFRVIARNAAGVFSEPSESTGAITARDEVDPPRISMDPKYKDTIVVHAGESFKVDADIYGKPIPTIQWIKGDQELSNTARLEIKSTDFATSLSVKDAVRVDSGNYILKAKNVAGERSVTVNVKVLDRPGPPEGPVVISGVTAEKCTLAWKPPLQDGGSDIINYIVERRETSRLVWTVVDANVQTLSCKVTKLLEGNEYTFRIMAVNKYGVGEPLESEPVVAKNPFVVPDAPKAPEVTTVTKDSMIVVWERPASDGGSEILGYVLEKRDKEGIRWTRCHKRLIGELRLRVTGLIENHDYEFRVSAENAAGLSEPSPPSAYQKACDPIYKPGPPNNPKVIDITRSSVFLSWSKPIYDGGCEIQGYIVEKCDVSVGEWTMCTPPTGINKTNIEVEKLLEKHEYNFRICAINKAGVGEHADVPGPIIVEEKLEAPDIDLDLELRKIINIRAGGSLRLFVPIKGRPTPEVKWGKVDGEIRDAAIIDVTSSFTSLVLDNVNRYDSGKYTLTLENSSGTKSAFVTVRVLDTPSPPVNLKVTEITKDSVSITWEPPLLDGGSKIKNYIVEKREATRKSYAAVVTNCHKNSWKIDQLQEGCSYYFRVTAENEYGIGLPAQTADPIKVAEVPQPPGKITVDDVTRNSVSLSWTKPEHDGGSKIIQYIVEMQAKHSEKWSECARVKSLQAVITNLTQGEEYLFRVVAVNEKGRSDPRSLAVPIVAKDLVIEPDVKPAFSSYSVQVGQDLKIEVPISGRPKPTITWTKDGLPLKQTTRINVTDSLDLTTLSIKETHKDDGGQYGITVANVVGQKTASIEIVTLDKPDPPKGPVKFDDVSAESITLSWNPPLYTGGCQITNYIVQKRDTTTTVWDVVSATVARTTLKVTKLKTGTEYQFRIFAENRYGQSFALESDPIVAQYPYKEPGPPGTPFATAISKDSMVIQWHEPVNNGGSPVIGYHLERKERNSILWTKVNKTIIHDTQFKAQNLEEGIEYEFRVYAENIVGVGKASKNSECYVARDPCDPPGTPEPIMVKRNEITLQWTKPVYDGGSMITGYIVEKRDLPDGRWMKASFTNVIETQFTVSGLTEDQRYEFRVIAKNAAGAISKPSDSTGPITAKDEVELPRISMDPKFRDTIVVNAGETFRLEADVHGKPLPTIEWLRGDKEIEESARCEIKNTDFKALLIVKDAIRIDGGQYILRASNVAGSKSFPVNVKVLDRPGPPEGPVQVTGVTSEKCSLTWSPPLQDGGSDISHYVVEKRETSRLAWTVVASEVVTNSLKVTKLLEGNEYVFRIMAVNKYGVGEPLESAPVLMKNPFVLPGPPKSLEVTNIAKDSMTVCWNRPDSDGGSEIIGYIVEKRDRSGIRWIKCNKRRITDLRLRVTGLTEDHEYEFRVSAENAAGVGEPSPATVYYKACDPVFKPGPPTNAHIVDTTKNSITLAWGKPIYDGGSEILGYVVEICKADEEEWQIVTPQTGLRVTRFEISKLTEHQEYKIRVCALNKVGLGEATSVPGTVKPEDKLEAPELDLDSELRKGIVVRAGGSARIHIPFKGRPTPEITWSREEGEFTDKVQIEKGVNYTQLSIDNCDRNDAGKYILKLENSSGSKSAFVTVKVLDTPGPPQNLAVKEVRKDSAFLVWEPPIIDGGAKVKNYVIDKRESTRKAYANVSSKCSKTSFKVENLTEGAIYYFRVMAENEFGVGVPVETVDAVKAAEPPSPPGKVTLTDVSQTSASLMWEKPEHDGGSRVLGYVVEMQPKGTEKWSIVAESKVCNAVVTGLSSGQEYQFRVKAYNEKGKSDPRVLGVPVIAKDLTIQPSLKLPFNTYSIQAGEDLKIEIPVIGRPRPNISWVKDGEPLKQTTRVNVEETATSTVLHIKEGNKDDFGKYTVTATNSAGTATENLSVIVLEKPGPPVGPVRFDEVSADFVVISWEPPAYTGGCQISNYIVEKRDTTTTTWHMVSATVARTTIKITKLKTGTEYQFRIFAENRYGKSAPLDSKAVIVQYPFKEPGPPGTPFVTSISKDQMLVQWHEPVNDGGTKIIGYHLEQKEKNSILWVKLNKTPIQDTKFKTTGLDEGLEYEFKVSAENIVGIGKPSKVSECFVARDPCDPPGRPEAIVITRNNVTLKWKKPAYDGGSKITGYIVEKKDLPDGRWMKASFTNVLETEFTVSGLVEDQRYEFRVIARNAAGNFSEPSDSSGAITARDEIDAPNASLDPKYKDVIVVHAGETFVLEADIRGKPIPDVVWSKDGKELEETAARMEIKSTIQKTTLVVKDCIRTDGGQYILKLSNVGGTKSIPITVKVLDRPGPPEGPLKVTGVTAEKCYLAWNPPLQDGGANISHYIIEKRETSRLSWTQVSTEVQALNYKVTKLLPGNEYIFRVMAVNKYGIGEPLESGPVTACNPYKPPGPPSTPEVSAITKDSMVVTWARPVDDGGTEIEGYILEKRDKEGVRWTKCNKKTLTDLRLRVTGLTEGHSYEFRVAAENAAGVGEPSEPSVFYRACDALYPPGPPSNPKVTDTSRSSVSLAWSKPIYDGGAPVKGYVVEVKEAAADEWTTCTPPTGLQGKQFTVTKLKENTEYNFRICAINSEGVGEPATLPGSVVAQERIEPPEIELDADLRKVVVLRASATLRLFVTIKGRPEPEVKWEKAEGILTDRAQIEVTSSFTMLVIDNVTRFDSGRYNLTLENNSGSKTAFVNVRVLDSPSAPVNLTIREVKKDSVTLSWEPPLIDGGAKITNYIVEKRETTRKAYATITNNCTKTTFRIENLQEGCSYYFRVLASNEYGIGLPAETTEPVKVSEPPLPPGRVTLVDVTRNTATIKWEKPESDGGSKITGYVVEMQTKGSEKWSTCTQVKTLEATISGLTAGEEYVFRVAAVNEKGRSDPRQLGVPVIARDIEIKPSVELPFHTFNVKAREQLKIDVPFKGRPQATVNWRKDGQTLKETTRVNVSSSKTVTSLSIKEASKEDVGTYELCVSNSAGSITVPITIIVLDRPGPPGPIRIDEVSCDSITISWNPPEYDGGCQISNYIVEKKETTSTTWHIVSQAVARTSIKIVRLTTGSEYQFRVCAENRYGKSSYSESSAVVAEYPFSPPGPPGTPKVVHATKSTMLVTWQVPVNDGGSRVIGYHLEYKERSSILWSKANKILIADTQMKVSGLDEGLMYEYRVYAENIAGIGKCSKSCEPVPARDPCDPPGQPEVTNITRKSVSLKWSKPHYDGGAKITGYIVERRELPDGRWLKCNYTNIQETYFEVTELTEDQRYEFRVFARNAADSVSEPSESTGPIIVKDDVEPPRVMMDVKFRDVIVVKAGEVLKINADIAGRPLPVISWAKDGIEIEERARTEIISTDNHTLLTVKDCIRRDTGQYVLTLKNVAGTRSVAVNCKVLDKPGPPAGPLEINGLTAEKCSLSWGRPQEDGGADIDYYIVEKRETSHLAWTICEGELQMTSCKVTKLLKGNEYIFRVTGVNKYGVGEPLESVAIKALDPFTVPSPPTSLEITSVTKESMTLCWSRPESDGGSEISGYIIERREKNSLRWVRVNKKPVYDLRVKSTGLREGCEYEYRVYAENAAGLSLPSETSPLIRAEDPVFLPSPPSKPKIVDSGKTTITIAWVKPLFDGGAPITGYTVEYKKSDDTDWKTSIQSLRGTEYTISGLTTGAEYVFRVKSVNKVGASDPSDSSDPQIAKEREEEPLFDIDSEMRKTLIVKAGASFTMTVPFRGRPVPNVLWSKPDTDLRTRAYVDTTDSRTSLTIENANRNDSGKYTLTIQNVLSAASLTLVVKVLDTPGPPTNITVQDVTKESAVLSWDVPENDGGAPVKNYHIEKREASKKAWVSVTNNCNRLSYKVTNLQEGAIYYFRVSGENEFGVGIPAETKEGVKITEKPSPPEKLGVTSISKDSVSLTWLKPEHDGGSRIVHYVVEALEKGQKNWVKCAVAKSTHHVVSGLRENSEYFFRVFAENQAGLSDPRELLLPVLIKEQLEPPEIDMKNFPSHTVYVRAGSNLKVDIPISGKPLPKVTLSRDGVPLKATMRFNTEITAENLTINLKESVTADAGRYEITAANSSGTTKAFINIVVLDRPGPPTGPVVISDITEESVTLKWEPPKYDGGSQVTNYILLKRETSTAVWTEVSATVARTMMKVMKLTTGEEYQFRIKAENRFGISDHIDSACVTVKLPYTTPGPPSTPWVTNVTRESITVGWHEPVSNGGSAVVGYHLEMKDRNSILWQKANKLVIRTTHFKVTTISAGLIYEFRVYAENAAGVGKPSHPSEPVLAIDACEPPRNVRITDISKNSVSLSWQQPAFDGGSKITGYIVERRDLPDGRWTKASFTNVTETQFIISGLTQNSQYEFRVFARNAVGSISNPSEVVGPITCIDSYGGPVIDLPLEYTEVVKYRAGTSVKLRAGISGKPAPTIEWYKDDKELQTNALVCVENTTDLASILIKDADRLNSGCYELKLRNAMGSASATIRVQILDKPGPPGGPIEFKTVTAEKITLLWRPPADDGGAKITHYIVEKRETSRVVWSMVSEHLEECIITTTKIIKGNEYIFRVRAVNKYGIGEPLESDSVVAKNAFVTPGPPGIPEVTKITKNSMTVVWSRPIADGGSDISGYFLEKRDKKSLGWFKVLKETIRDTRQKVTGLTENSDYQYRVCAVNAAGQGPFSEPSEFYKAADPIDPPGPPAKIRIADSTKSSITLGWSKPVYDGGSAVTGYVVEIRQGEEEEWTTVSTKGEVRTTEYVVSNLKPGVNYYFRVSAVNCAGQGEPIEMNEPVQAKDILEAPEIDLDVALRTSVIAKAGEDVQVLIPFKGRPPPTVTWRKDEKNLGSDARYSIENTDSSSLLTIPQVTRNDTGKYILTIENGVGEPKSSTVSVKVLDTPAACQKLQVKHVSRGTVTLLWDPPLIDGGSPIINYVIEKRDATKRTWSVVSHKCSSTSFKLIDLSEKTPFFFRVLAENEIGIGEPCETTEPVKAAEVPAPIRDLSMKDSTKTSVILSWTKPDFDGGSVITEYVVERKGKGEQTWSHAGISKTCEIEVSQLKEQSVLEFRVFAKNEKGLSDPVTIGPITVKELIITPEVDLSDIPGAQVTVRIGHNVHLELPYKGKPKPSISWLKDGLPLKESEFVRFSKTENKITLSIKNAKKEHGGKYTVILDNAVCRIAVPITVITLGPPSKPKGPIRFDEIKADSVILSWDVPEDNGGGEITCYSIEKRETSQTNWKMVCSSVARTTFKVPNLVKDAEYQFRVRAENRYGVSQPLVSSIIVAKHQFRIPGPPGKPVIYNVTSDGMSLTWDAPVYDGGSEVTGFHVEKKERNSILWQKVNTSPISGREYRATGLVEGLDYQFRVYAENSAGLSSPSDPSKFTLAVSPVDPPGTPDYIDVTRETITLKWNPPLRDGGSKIVGYSIEKRQGNERWVRCNFTDVSECQYTVTGLSPGDRYEFRIIARNAVGTISPPSQSSGIIMTRDENVPPIVEFGPEYFDGLIIKSGESLRIKALVQGRPVPRVTWFKDGVEIEKRMNMEITDVLGSTSLFVRDATRDHRGVYTVEAKNASGSAKAEIKVKVQDTPGKVVGPIRFTNITGEKMTLWWDAPLNDGCAPITHYIIEKRETSRLAWALIEDKCEAQSYTAIKLINGNEYQFRVSAVNKFGVGRPLDSDPVVAQIQYTVPDAPGIPEPSNITGNSITLTWARPESDGGSEIQQYILERREKKSTRWVKVISKRPISETRFKVTGLTEGNEYEFHVMAENAAGVGPASGISRLIKCREPVNPPGPPTVVKVTDTSKTTVSLEWSKPVFDGGMEIIGYIIEMCKADLGDWHKVNAEACVKTRYTVTDLQAGEEYKFRVSAINGAGKGDSCEVTGTIKAVDRLTAPELDIDANFKQTHVVRAGASIRLFIAYQGRPTPTAVWSKPDSNLSLRADIHTTDSFSTLTVENCNRNDAGKYTLTVENNSGSKSITFTVKVLDTPGPPGPITFKDVTRGSATLMWDAPLLDGGARIHHYVVEKREASRRSWQVISEKCTRQIFKVNDLAEGVPYYFRVSAVNEYGVGEPYEMPEPIVATEQPAPPRRLDVVDTSKSSAVLAWLKPDHDGGSRITGYLLEMRQKGSDFWVEAGHTKQLTFTVERLVEKTEYEFRVKAKNDAGYSEPREAFSSVIIKEPQIEPTADLTGITNQLITCKAGSPFTIDVPISGRPAPKVTWKLEEMRLKETDRVSITTTKDRTTLTVKDSMRGDSGRYFLTLENTAGVKTFSVTVVVIGRPGPVTGPIEVSSVSAESCVLSWGEPKDGGGTEITNYIVEKRESGTTAWQLVNSSVKRTQIKVTHLTKYMEYSFRVSSENRFGVSKPLESAPIIAEHPFVPPSAPTRPEVYHVSANAMSIRWEEPYHDGGSKIIGYWVEKKERNTILWVKENKVPCLECNYKVTGLVEGLEYQFRTYALNAAGVSKASEASRPIMAQNPVDAPGRPEVTDVTRSTVSLIWSAPAYDGGSKVVGYIIERKPVSEVGDGRWLKCNYTIVSDNFFTVTALSEGDTYEFRVLAKNAAGVISKGSESTGPVTCRDEYAPPKAELDARLHGDLVTIRAGSDLVLDAAVGGKPEPKIIWTKGDKELDLCEKVSLQYTGKRATAVIKFCDRSDSGKYTLTVKNASGTKAVSVMVKVLDSPGPCGKLTVSRVTQEKCTLAWSLPQEDGGAEITHYIVERRETSRLNWVIVEGECPTLSYVVTRLIKNNEYIFRVRAVNKYGPGVPVESEPIVARNSFTIPSPPGIPEEVGTGKEHIIIQWTKPESDGGNEISNYLVDKREKKSLRWTRVNKDYVVYDTRLKVTSLMEGCDYQFRVTAVNAAGNSEPSEASNFISCREPSYTPGPPSAPRVVDTTKHSISLAWTKPMYDGGTDIVGYVLEMQEKDTDQWYRVHTNATIRNTEFTVPDLKMGQKYSFRVAAVNVKGMSEYSESIAEIEPVERIEIPDLELADDLKKTVTIRAGASLRLMVSVSGRPPPVITWSKQGIDLASRAIIDTTESYSLLIVDKVNRYDAGKYTIEAENQSGKKSATVLVKVYDTPGPCPSVKVKEVSRDSVTITWEIPTIDGGAPVNNYIVEKREAAMRAFKTVTTKCSKTLYRISGLVEGTMYYFRVLPENIYGIGEPCETSDAVLVSEVPLVPAKLEVVDVTKSTVTLAWEKPLYDGGSRLTGYVLEACKAGTERWMKVVTLKPTVLEHTVTSLNEGEQYLFRIRAQNEKGVSEPRETVTAVTVQDLRVLPTIDLSTMPQKTIHVPAGRPVELVIPIAGRPPPAASWFFAGSKLRESERVTVETHTKVAKLTIRETTIRDTGEYTLELKNVTGTTSETIKVIILDKPGPPTGPIKIDEIDATSITISWEPPELDGGAPLSGYVVEQRDAHRPGWLPVSESVTRSTFKFTRLTEGNEYVFRVAATNRFGIGSYLQSEVIECRSSIRIPGPPETLQIFDVSRDGMTLTWYPPEDDGGSQVTGYIVERKEVRADRWVRVNKVPVTMTRYRSTGLTEGLEYEHRVTAINARGSGKPSRPSKPIVAMDPIAPPGKPQNPRVTDTTRTSVSLAWSVPEDEGGSKVTGYLIEMQKVDQHEWTKCNTTPTKIREYTLTHLPQGAEYRFRVLACNAGGPGEPAEVPGTVKVTEMLEYPDYELDERYQEGIFVRQGGVIRLTIPIKGKPFPICKWTKEGQDISKRAMIATSETHTELVIKEADRGDSGTYDLVLENKCGKKAVYIKVRVIGSPNSPEGPLEYDDIQVRSVRVSWRPPADDGGADILGYILERREVPKAAWYTIDSRVRGTSLVVKGLKENVEYHFRVSAENQFGISKPLKSEEPVTPKTPLNPPEPPSNPPEVLDVTKSSVSLSWSRPKDDGGSRVTGYYIERKETSTDKWVRHNKTQITTTMYTVTGLVPDAEYQFRIIAQNDVGLSETSPASEPVVCKDPFDKPSQPGELEILSISKDSVTLQWEKPECDGGKEILGYWVEYRQSGDSAWKKSNKERIKDKQFTIGGLLEATEYEFRVFAENETGLSRPRRTAMSIKTKLTSGEAPGIRKEMKDVTTKLGEAAQLSCQIVGRPLPDIKWYRFGKELIQSRKYKMSSDGRTHTLTVMTEEQEDEGVYTCIATNEVGEVETSSKLLLQATPQFHPGYPLKEKYYGAVGSTLRLHVMYIGRPVPAMTWFHGQKLLQNSENITIENTEHYTHLVMKNVQRKTHAGKYKVQLSNVFGTVDAILDVEIQDKPDKPTGPIVIEALLKNSAVISWKPPADDGGSWITNYVVEKCEAKEGAEWQLVSSAISVTTCRIVNLTENAGYYFRVSAQNTFGISDPLEVSSVVIIKSPFEKPGAPGKPTITAVTKDSCVVAWKPPASDGGAKIRNYYLEKREKKQNKWISVTTEEIRETVFSVKNLIEGLEYEFRVKCENLGGESEWSEISEPITPKSDVPIQAPHFKEELRNLNVRYQSNATLVCKVTGHPKPIVKWYRQGKEIIADGLKYRIQEFKGGYHQLIIASVTDDDATVYQVRATNQGGSVSGTASLEVEVPAKIHLPKTLEGMGAVHALRGEVVSIKIPFSGKPDPVITWQKGQDLIDNNGHYQVIVTRSFTSLVFPNGVERKDAGFYVVCAKNRFGIDQKTVELDVADVPDPPRGVKVSDVSRDSVNLTWTEPASDGGSKITNYIVEKCATTAERWLRVGQARETRYTVINLFGKTSYQFRVIAENKFGLSKPSEPSEPTITKEDKTRAMNYDEEVDETREVSMTKASHSSTKELYEKYMIAEDLGRGEFGIVHRCVETSSKKTYMAKFVKVKGTDQVLVKKEISILNIARHRNILHLHESFESMEELVMIFEFISGLDIFERINTSAFELNEREIVSYVHQVCEALQFLHSHNIGHFDIRPENIIYQTRRSSTIKIIEFGQARQLKPGDNFRLLFTAPEYYAPEVHQHDVVSTATDMWSLGTLVYVLLSGINPFLAETNQQIIENIMNAEYTFDEEAFKEISIEAMDFVDRLLVKERKSRMTASEALQHPWLKQKIERVSTKVIRTLKHRRYYHTLIKKDLNMVVSAARISCGGAIRSQKGVSVAKVKVASIEIGPVSGQIMHAVGEEGGHVKYVCKIENYDQSTQVTWYFGVRQLENSEKYEITYEDGVAILYVKDITKLDDGTYRCKVVNDYGEDSSYAELFVKGVREVYDYYCRRTMKKIKRRTDTMRLLERPPEFTLPLYNKTAYVGENVRFGVTITVHPEPHVTWYKSGQKIKPGDNDKKYTFESDKGLYQLTINSVTTDDDAEYTVVARNKYGEDSCKAKLTVTLHPPPTDSTLRPMFKRLLANAECQEGQSVCFEIRVSGIPPPTLKWEKDGQPLSLGPNIEIIHEGLDYYALHIRDTLPEDTGYYRVTATNTAGSTSCQAHLQVERLRYKKQEFKSKEEHERHVQKQIDKTLRMAEILSGTESVPLTQVAKEALREAAVLYKPAVSTKTVKGEFRLEIEEKKEERKLRMPYDVPEPRKYKQTTIEEDQRIKQFVPMSDMKWYKKIRDQYEMPGKLDRVVQKRPKRIRLSRWEQFYVMPLPRITDQYRPKWRIPKLSQDDLEIVRPARRRTPSPDYDFYYRPRRRSLGDISDEELLLPIDDYLAMKRTEEERLRLEEELELGFSASPPSRSPPHFELSSLRYSSPQAHVKVEETRKDFRYSTYHIPTKAEASTSYAELRERHAQAAYRQPKQRQRIMAEREDEELLRPVTTTQHLSEYKSELDFMSKEEKSRKKSRRQREVTEITEIEEEYEISKHAQRESSSSASRLLRRRRSLSPTYIELMRPVSELIRSRPQPAEEYEDDTERRSPTPERTRPRSPSPVSSERSLSRFERSARFDIFSRYESMKAALKTQKTSERKYEVLSQQPFTLDHAPRITLRMRSHRVPCGQNTRFILNVQSKPTAEVKWYHNGVELQESSKIHYTNTSGVLTLEILDCHTDDSGTYRAVCTNYKGEASDYATLDVTGGDYTTYASQRRDEEVPRSVFPELTRTEAYAVSSFKKTSEMEASSSVREVKSQMTETRESLSSYEHSASAEMKSAALEEKSLEEKSTTRKIKTTLAARILTKPRSMTVYEGESARFSCDTDGEPVPTVTWLRKGQVLSTSARHQVTTTKYKSTFEISSVQASDEGNYSVVVENSEGKQEAEFTLTIQKARVTEKAVTSPPRVKSPEPRVKSPEAVKSPKRVKSPEPSHPKAVSPTETKPTPTEKVQHLPVSAPPKITQFLKAEASKEIAKLTCVVESSVLRAKEVTWYKDGKKLKENGHFQFHYSADGTYELKINNLTESDQGEYVCEISGEGGTSKTNLQFMGQAFKSIHEKVSKISETKKSDQKTTESTVTRKTEPKAPEPISSKPVIVTGLQDTTVSSDSVAKFAVKATGEPRPTAIWTKDGKAITQGGKYKLSEDKGGFFLEIHKTDTSDSGLYTCTVKNSAGSVSSSCKLTIKAIKDTEAQKVSTQKTSEITPQKKAVVQEEISQKALRSEEIKMSEAKSQEKLALKEEASKVLISEEVKKSAATSLEKSIVHEEITKTSQASEEVRTHAEIKAFSTQMSINEGQRLVLKANIAGATDVKWVLNGVELTNSEEYRYGVSGSDQTLTIKQASHRDEGILTCISKTKEGIVKCQYDLTLSKELSDAPAFISQPRSQNINEGQNVLFTCEISGEPSPEIEWFKNNLPISISSNVSISRSRNVYSLEIRNASVSDSGKYTIKAKNFRGQCSATASLMVLPLVEEPSREVVLRTSGDTSLQGSFSSQSVQMSASKQEASFSSFSSSSASSMTEMKFASMSAQSMSSMQESFVEMSSSSFMGISNMTQLESSTSKMLKAGIRGIPPKIEALPSDISIDEGKVLTVACAFTGEPTPEVTWSCGGRKIHSQEQGRFHIENTDDLTTLIIMDVQKQDGGLYTLSLGNEFGSDSATVNIHIRSI

SEQ ID NO: 7680 - protein, 820 aa, Homo sapiens
MKMLLLLHCLGVFLSCSGHIQDEHPQYHSPPDVVIPVRITGTTRGMTPPGWLSYILPFGGQKHIIHIKVKKLLFSKHLPVFTYTDQGAILEDQPFVQNNCYYHGYVEGDPESLVSLSTCFGGFQGILQINDFAYEIKPLAFSTTFEHLVYKMDSEEKQFSTMRSGFMQNEITCRMEFEEIDNSTQKQSSYVGWWIHFRIVEIVVVIDNYLYIRYERNDSKLLEDLYVIVNIVDSILDVIGVKVLLFGLEIWTNKNLIVVDDVRKSVHLYCKWKSENITPRMQHDTSHLFTTLGLRGLSGIGAFRGMCTPHRSCAIVTFMNKTLGTFSIAVAHHLGHNLGMNHDEDTCRCSQPRCIMHEGNPPITKFSNCSYGDFWEYTVERTKCLLETVHTKDIFNVKRCGNGVVEEGEECDCGPLKHCAKDPCCLSNCTLTDGSTCAFGLCCKDCKFLPSGKVCRKEVNECDLPEWCNGTSHKCPDDFYVEDGIPCKERGYCYEKSCHDRNEQCRRIFGAGANTASETCYKELNTLGDRVGHCGIKNATYIKCNISDVQCGRIQCENVTEIPNMSDHTTVHWARFNDIMCWSTDYHLGMKGPDIGEVKDGTECGIDHICIHRHCVHITILNSNCSPAFCNKRGICNNKHHCHCNYLWDPPNCLIKGYGGSVDSGPPPKRKKKKKFCYLCILLLIVLFILLCCLYRLCKKSKPIKKQQDVQTPSAKEEEKIQRRPHELPPQSQPWVMPSQSQPPVTPSQSHPQVMPSQSQPPVTPSQSQPRVMPSQSQPPVMPSQSHPQLTPSQSQPPVTPSQRQPQLMPSQSQPPVTPS

SEQ ID NO: 7681 - protein, 1096 aa, Homo sapiens
MATVPVYCVCRLPYDVTRFMIECDACKDWFHGSCVGVEEEEAPDIDIYHCPNCEKTHGKSTLKKKRTWHKHGPGQAPDVKPVQNGSQLFIKELRSRTFPSAEDVVARVPGSQLTLGYMEEHGFTEPILVPKKDGLGLAVPAPTFYVSDVENYVGPERSVDVTDVTKQKDCKMKLKEFVDYYYSTNRKRVLNVTNLEFSDTRMSSFVEPPDIVKKLSWVENYWPDDALLAKPKVTKYCLICVKDSYTDFHIDSGGASAWYHVLKGEKTFYLIRPASANISLYERWRSASNHSEMFFADQVDKCYKCIVKQGQTLFIPSGWIYATLTPVDCLAFAGHFLHSLSVEMQMRAYEVERRLKLGSLTQFPNFETACWYMGKHLLEAFKGSHKSGKQLPPHLVQGAKILNGAFRSWTKKQALAEHEDELPEHFKPSQLIKDLAKEIRLSENASKAVRPEVNTVASSDEVCDGDREKEEPPSPIEATPPQSLLEKVSKKKTPKTVKMPKPSKIPKPPKPPKPPRPPKTLKLKDGGKKKGKKSRESASPTIPNLDLLEAHTKEALTKMEPPKKGKATKSVLSVPNKDVVHMQNDVERLEIREQTKSKSEAKWKYKNSKPDSLLKMEEEQKLEKSPLAGNKDNKFSFSFSNKKLLGSKALRPPTSPGVFGALQNFKEDKPKPVRDEYEYVSDDGELKIDEFPIRRKKNAPKRDLSFLLDKKAVLPTPVTKPKLDSAAYKSDDSSDEGSLHIDTDTKPGRNARVKKESGSSAAGILDLLQASEEVGALEYNPSSQPPASPSTQEAIQGMLSMANLQASDSCLQTTWGAGQAKGSSLAAHGARKNGGGSGKSAGKRLLKRAAKNSVDLDDYEEEQDHLDACFKDSDYVYPSLESDEDNPIFKSRSKKRKGSDDAPYSPTARVGPSVPRQDRPVREGTRVASIETGLAAAAAKLSQQEEQKSKKKKSAKRKLTPNTTSPSTSTSISAGTTSTSTTPASTTPASTTPASTSTASSQASQEGSSPEPPPESHSSSLADHEYTAAGTFTGAQAGRTSQPMAPGVFLTQRRPSASSPNNNTAAKGKRTKKGMATAKQRLGKILKIHRNGKLLL

SEQ ID NO: 7682 - protein, 1422 aa, Homo sapiens
MATLACRVQFLDDTDPFNSTNFPEPSRPPLFTFREDLALGTQLAGVHRLLQAPHKLDDCTLQLSHNGAYLDLEATLAEQRDELEGFQDDAGRGKKHSIILRTQLSVRVHACIEKLYNSSGRDLRRALFSLKQIFQDDKDLVHEFVVAEGLTCLIKVGAEADQNYQNYILRALGQIMLYVDGMNGVINRNETIQWLYTLIGSKFRLVVKTALKLLLVFVEYSESNAPLLIQAVTAVDTKRGVKPWSNIMEILEEKDGVDTELLVYAMTLVNKTLSGLPDQDTFYDVVDCLEELGIAAVSQRHLNKKGTDLDLVEQLNIYEVALRHEDGDETTEPPPSGCRDRRRASVCSSGGGEHRGLDRRRSRRHSVQSIKSTLSAPTSPCSQSAPSFKPNQVRDLREKYSNFGNNSYHSSRPSSGSSVPTTPTSSVSPPQEARLERSSPSGLLTSSFRQHQESLAAERERRRQEREERLQRIEREERNKFRYKYLEQLAAEEHEKELRSRSVSRGRADLSLDLTSPAAPACLAPLSHSPSSSDSQEALTVSASSPGTPHHPQASAGDPEPESEAEPEAEAGAGQVADEAGQDIASAHEGAETEVEQALEQEPEERASLSEKERQNEGVNERDNCSASSVSSSSSTLEREEKEDKLSRDRTTGLWPAGVQDAGVNGQCGDILTNKRFMLDMLYAHNRKSPDDEEKGDGEAGRTQQEAEAVASLATRISTLQANSQTQDESVRRVDVGCLDNRGSVKAFAEKFNSGDLGRGSISPDAEPNDKVPETAPVQPKTESDYIWDQLMANPRELRIQDMDFTDLGEEDDIDVLDVDLGHREAPGPPPPPPPTFLGLPPPPPPPLLDSIPPPPVPGNLLVPPPPVFNAPQGLGWSQVPRGQPTFTKKKKTIRLFWNEVRPFDWPCKNNRRCREFLWSKLEPIKVDTSRLEHLFESKSKELSVSKKTAADGKRQEIIVLDSKRSNAINIGLTVLPPPRTIKIAILNFDEYALNKEGIEKILTMIPTDEEKQKIQEAQLANPEIPLGSAEQFLLTLSSISELSARLHLWAFKMDYETTEKEVAEPLLDLKEGIDQLENNKTLGFILSTLLAIGNFLNGTNAKAFELSYLEKVPEVKDTVHKQSLLHHVCTMVVENFPDSSDLYSEIGAITRSAKVDFDQLQDNLCQMERRCKASWDHLKAIAKHEMKPVLKQRMSEFLKDCAERIIILKIVHRRIINRFHSFLLFMGHPPYAIREVNINKFCRIISEFALEYRTTRERVLQQKQKRANHRERNKTRGKMITDSGKFSGSSPAPPSQPQGLSYAEDAAEHENMKAVLKTSSPSVEDATPALGVRTRSRASRGSTSSWTMGTDDSPNVTDDAADEIMDRIVKSATQVPSQRVVPRERKRSRANRKSLRRTLKSGLTPEEARALGLVGTSELQL

SEQ ID NO: 7683 - protein, 2061 aa, Homo sapiens
MLRVIVESASNIPKTKFGKPDPIVSVIFKDEKKKTKKVDNELNPVWNEILEFDLRGIPLDFSSSLGIIVKDFETIGQNKLIGTATVALKDLTGDQSRSLPYKLISLLNEKGQDTGATIDLVIGYDPPSAPHPNDLSGPSVPGMGGDGEEDEGDEDRLDNAVRGPGPKGPVGTVSEAQLARRLTKVKNSRRMLSNKPQDFQIRVRVIEGRQLSGNNIRPVVKVHVCGQTHRTRIKRGNNPFFDELFFYNVNMTPSELMDEIISIRVYNSHSLRADCLMGEFKIDVGFVYDEPGHAVMRKWLLLNDPEDTSSGSKGYMKVSMFVLGTGDEPPPERRDRDNDSDDVESNLLLPAGIALRWVTFLLKIYRAEDIPQMDDAFSQTVKEIFGGNADKKNLVDPFVEVSFAGKKVCTNIIEKNANPEWNQVVNLQIKFPSVCEKIKLTIYDWDRLTKNDVVGTTYLHLSKIAASGGEVEDFSSSGTGAASYTVNTGETEVGFVPTFGPCYLNLYGSPREYTGFPDPYDELNTGKGEGVAYRGRILVELATFLEKTPPDKKLEPISNDDLLVVEKYQRRRKYSLSAVFHSATMLQDVGEAIQFEVSIGNYGNKFDTTCKPLASTTQYSRAVFDGNYYYYLPWAHTKPVVTLTSYWEDISHRLDAVNTLLAMAERLQTNIEALKSGIQGKIPANQLAELWLKLIDEVIEDTRYTLPLTEGKANVTVLDTQIRKLRSRSLSQIHEAAVRMRSEATDVKSTLAEIEDWLDKLMQLTEEPQNSMPDIIIWMIRGEKRLAYARIPAHQVLYSTSGENASGKYCGKTQTIFLKYPQEKNNGPKVPVELRVNIWLGLSAVEKKFNSFAEGTFTVFAEMYENQALMFGKWGTSGLVGRHKFSDVTGKIKLKREFFLPPKGWEWEGEWIVDPERSLLTEADAGHTEFTDEVYQNESRYPGGDWKPAEDTYTDANGDKAASPSELTCPPGWEWEDDAWSYDINRAVDEKGWEYGITIPPDHKPKSWVAAEKMYHTHRRRRLVRKRKKDLTQTASSTARAMEELQDQEGWEYASLIGWKFHWKQRSSDTFRRRRWRRKMAPSETHGAAAIFKLEGALGADTTEDGDEKSLEKQKHSATTVFGANTPIVSCNFDRVYIYHLRCYVYQARNLLALDKDSFSDPYAHICFLHRSKTTEIIHSTLNPTWDQTIIFDEVEIYGEPQTVLQNPPKVIMELFDNDQVGKDEFLGRSIFSPVVKLNSEMDITPKLLWHPVMNGDKACGDVLVTAELILRGKDGSNLPILPPQRAPNLYMVPQGIRPVVQLTAIEILAWGLRNMKNFQMASITSPSLVVECGGERVESVVIKNLKKTPNFPSSVLFMKVFLPKEELYMPPLVIKVIDHRQFGRKPVVGQCTIERLDRFRCDPYAGKEDIVPQLKASLLSAPPCRDIVIEMEDTKPLLASKLTEKEEEIVDWWSKFYASSGEHEKCGQYIQKGYSKLKIYNCELENVAEFEGLTDFSDTFKLYRGKSDENEDPSVVGEFKGSFRIYPLPDDPSVPAPPRQFRELPDSVPQECTVRIYIVRGLELQPQDNNGLCDPYIKITLGKKVIEDRDHYIPNTLNPVFGRMYELSCYLPQEKDLKISVYDYDTFTRDEKVGETIIDLENRFLSRFGSHCGIPEEYCVSGVNTWRDQLRPTQLLQNVARFKGFPQPILSEDGSRIRYGGRDYSLDEFEANKILHQHLGAPEERLALHILRTQGLVPEHVETRTLHSTFQPNISQGKLQMWVDVFPKSLGPPGPPFNITPRKAKKYYLRVIIWNTKDVILDEKSITGEEMSDIYVKGWIPGNEENKQKTDVHYRSLDGEGNFNWRFVFPFDYLPAEQLCIVAKKEHFWSIDQTEFRIPPRLIIQIWDNDKFSLDDYLGFLELDLRHTIIPAKSPEKCRLDMIPDLKAMNPLKAKTASLFEQKSMKGWWPCYAEKDGARVMAGKVEMTLEILNEKEADERPAGKGRDEPNMNPKLDLPNRPETSFLWFTNPCKTMKFIVWRRFKWVIIGLLFLLILLLFVAVLLYSLPNYLSMKIVKPNV

SEQ ID NO: 7684 - protein, 541 aa, Homo sapiens
MGHSPPVLPLCASVSLLGGLTFGYELAVISGALLPLQLDFGLSCLEQEFLVGSLLLGALLASLVGGFLIDCYGRKQAILGSNLVLLAGSLTLGLAGSLAWLVLGRAVVGFAISLSSMACCIYVSELVGPRQRGVLVSLYEAGITVGILLSYALNYALAGTPWGWRHMFGWATAPAVLQSLSLLFLPAGTDETATHKDLIPLQGGEAPKLGPGRPRYSFLDLFRARDNMRGRTTVGLGLVLFQQLTGQPNVLCYASTIFSSVGFHGGSSAVLASVGLGAVKVAATLTAMGLVDRAGRRALLLAGCALMALSVSGIGLVSFAVPMDSGPSCLAVPNATGQTGLPGDSGLLQDSSLPPIPRTNEDQREPILSTAKKTKPHPRSGDPSAPPRLALSSALPGPPLPARGHALLRWTALLCLMVFVSAFSFGFGPVTWLVLSEIYPVEIRGRAFAFCNSFNWAANLFISLSFLDLIGTIGLSWTFLLYGLTAVLGLGFIYLFVPETKGQSLAEIDQQFQKRRFTLSFGHRQNSTGIPYSRIEISAAS

SEQ ID NO: 7685 - protein, 838 aa, Homo sapiens
MRLALLWALGLLGAGSPLPSWPLPNIGGTEEQQAESEKAPREPLEPQVLQDDLPISLKKVLQTSLPEPLRIKLELDGDSHILELLQNRELVPGRPTLVWYQPDGTRVVSEGHTLENCCYQGRVRGYAGSWVSICTCSGLRGLVVLTPERSYTLEQGPGDLQGPPIISRIQDLHLPGHTCALSWRESVHTQKPPEHPLGQRHIRRRRDVVTETKTVELVIVADHSEAQKYRDFQHLLNRTLEVALLLDTFFRPLNVRVALVGLEAWTQRDLVEISPNPAVTLENFLHWRRAHLLPRLPHDSAQLVTGTSFSGPTVGMAIQNSICSPDFSGGVNMDHSTSILGVASSIAHELGHSLGLDHDLPGNSCPCPGPAPAKTCIMEASTDFLPGLNFSNCSRRALEKALLDGMGSCLFERLPSLPPMAAFCGNMFVEPGEQCDCGFLDDCVDPCCDSLTCQLRPGAQCASDGPCCQNCQLRPSGWQCRPTRGDCDLPEFCPGDSSQCPPDVSLGDGEPCAGGQAVCMHGRCASYAQQCQSLWGPGAQPAAPLCLQTANTRGNAFGSCGRNPSGSYVSCTPRDAICGQLQCQTGRTQPLLGSIRDLLWETIDVNGTELNCSWVHLDLGSDVAQPLLTLPGTACGPGLVCIDHRCQRVDLLGAQECRSKCHGHGVCDSNRHCYCEEGWAPPDCTTQLKATSSLTTGLLLSLLVLLVLVMLGASYWYRARLHQRLCQLKGPTCQYRAAQSGPSERPGPPQRALLARGTKAELADRPNPPTRPLPADPVVRSPKSQGPAKPPPPRKPLPADPQGRCPSGDLPGPGAGIPPLVVPSRPAPPPPTVSSLYL

SEQ ID NO: 7686 - protein, 683 aa, Homo sapiens
MNGAPSPEDGASPSSPPLPPPPPPSWREFCESHARAAALDFARRFRLYLASHPQYAGPGAEAAFSRRFAELFLQHFEAEVARASGSLSPPILAPLSPGAEISPHDLSLESCRVGGPLAVLGPSRSSEDLAGPLPSSVSSSSTTSSKPKLKKRFSLRSVGRSVRGSVRGILQWRGTVDPPSSAGPLETSSGPPVLGGNSNSNSSGGAGTVGRGLVSDGTSPGERWTHRFERLRLSRGGGALKDGAGMVQREELLSFMGAEEAAPDPAGVGRGGGVAGPPSGGGGQPQWQKCRLLLRSEGEGGGGSRLEFFVPPKASRPRLSIPCSSITDVRTTTALEMPDRENTFVVKVEGPSEYIMETVDAQHVKAWVSDIQECLSPGPCPATSPRPMTLPLAPGTSFLTRENTDSLELSCLNHSESLPSQDLLLGPSESNDRLSQGAYGGLSDRPSASISPSSASIAASHFDSMELLPPELPPRIPIEEGPPTGTVHPLSAPYPPLDTPETATGSFLFQGEPEGGEGDQPLSGYPWFHGMLSRLKAAQLVLTGGTGSHGVFLVRQSETRRGEYVLTFNFQGKAKHLRLSLNEEGQCRVQHLWFQSIFDMLEHFRVHPIPLESGGSSDVVLVSYVPSSQRQQGEQSRSAGEEVPVHPRSEAGSRLGAMRGCAREMDATPMPPAPSCPSERVTV

SEQ ID NO: 7687 - protein, 324 aa, Homo sapiens
MFCGDYVQGTIFPAPNFNPIMDAQMLGGALQGFDCDKDMLINILTQRCNAQRMMIAEAYQSMYGRDLIGDMREQLSDHFKDVMAGLMYPPPLYDAHELWHAMKGVGTDENCLIEILASRTNGEIFQMREAYCLQYSNNLQEDIYSETSGHFRDTLMNLVQGTREEGYTDPAMAAQDAMVLWEACQQKTGEHKTMLQMILCNKSYQQLRLVFQEFQNISGQDMVDAINECYDGYFQELLVAIVLCVRDKPAYFAYRLYSAIHDFGFHNKTVIRILIARSEIDLLTIRKRYKERYGKSLFHDIRNFASGHYKKALLAICAGDAEDY

SEQ ID NO: 7688 - protein, 639 aa, Homo sapiens
MVDYIVEYDYDAVHDDELTIRVGEIIRNVKKLQEEGWLEGELNGRRGMFPDNFVKEIKRETEFKDDSLPIKRERHGNVASLVQRISTYGLPAGGIQPHPQTKNIKKKTKKRQCKVLFEYIPQNEDELELKVGDIIDINEEVEEGWWSGTLNNKLGLFPSNFVKELEVTDDGETHEAQDDSETVLAGPTSPIPSLGNVSETASGSVTQPKKIRGIGFGDIFKEGSVKLRTRTSSSETEEKKPEKPLILQSLGPKTQSVEITKTDTEGKIKAKEYCRTLFAYEGTNEDELTFKEGEIIHLISKETGEAGWWRGELNGKEGVFPDNFAVQINELDKDFPKPKKPPPPAKAPAPKPELIAAEKKYFSLKPEEKDEKSTLEQKPSKPAAPQVPPKKPTPPTKASNLLRSSGTVYPKRPEKPVPPPPPIAKINGEVSSISSKFETEPVSKLKLDSEQLPLRPKSVDFDSLTVRTSKETDVVNFDDIASSENLLHLTANRPKMPGRRLPGRFNGGHSPTHSPEKILKLPKEEDSANLKPSELKKDTCYSPKPSVYLSTPSSASKANTTAFLTPLEIKAKVETDDVKKNSLDELRAQIIELLCIVEALKKDHGKELEKLRKDLEEEKTMRSNLEMEIEKLKKAVLSS

SEQ ID NO: 7689 - protein, 290 aa, Homo sapiens
MAAVEKRRQAVPPPAGFTDSGRQSVSRAAGAAESEEDFLRQVGVTEMLRAALLKVLEARPEEPIAFLAHYFENMGLRSPVNGGAGEPPGQLLLQQQRLGRALWHLRLAHHSQRAAFNNNVSVAYECLSAGGRRKRPGLDGRTYSELLRRICRDGQAPEEVVAPLLRKVQCRDHEAVPLSVFRAGTLTCFVLLEFVARAGALFQLLEDSAAAVADRRVGQAVLDTLEGALQASDAAAPARFLEAGSRLGPDSLALALDRAVGGRRPSAPMTREEFLERAAALFIAKVKPVG

SEQ ID NO: 7690 - protein, 299 aa, Homo sapiens
MPLSGTPAPNKKRKSSKLIMELTGGGQESSGLNLGKKISVPRDVMLEELSLLTNRGSKMFKLRQMRVEKFIYENHPDVFSDSSMDHFQKFLPTVGGQLGTAGQGFSYSKSNGRGGSQAGGSGSAGQYGSDQQHHLGSGSGAGGTGGPAGQAGRGGAAGTAGVGETGSGDQAGGEGKHITVFKTYISPWERAMGVDPQQKMELGIDLLAYGAKAELPKYKSFNRTAMPYGGYEKASKRMTFQMPKFDLGPLLSEPLVLYNQNLSNRPSFNRTPIPWLSSGEPVDYNVDIGIPLDGETEEL

SEQ ID NO: 7691 - protein, 1838 aa, Homo sapiens
MALQLWALTLLGLLGAGASLRPRKLDFFRSEKELNHLAVDEASGVVYLGAVNALYQLDAKLQLEQQVATGPALDNKKCTPPIEASQCHEAEMTDNVNQLLLLDPPRKRLVECGSLFKGICALRALSNISLRLFYEDGSGEKSFVASNDEGVATVGLVSSTGPGGDRVLFVGKGNGPHDNGIIVSTRLLDRTDSREAFEAYTDHATYKAGYLSTNTQQFVAAFEDGPYVFFVFNQQDKHPARNRTLLARMCREDPNYYSYLEMDLQCRDPDIHAAAFGTCLAASVAAPGSGRVLYAVFSRDSRSSGGPGAGLCLFPLDKVHAKMEANRNACYTGTREARDIFYKPFHGDIQCGGHAPGSSKSFPCGSEHLPYPLGSRDGLRGTAVLQRGGLNLTAVTVAAENNHTVAFLGTSDGRILKVYLTPDGTSSEYDSILVEINKRVKRDLVLSGDLGSLYAMTQDKVFRLPVQECLSYPTCTQCRDSQDPYCGWCVVEGRCTRKAECPRAEEASHWLWSRSKSCVAVTSAQPQNMSRRAQGEVQLTVSPLPALSEEDELLCLFGESPPHPARVEGEAVICNSPSSIPVTPPGQDHVAVTIQLLLRRGNIFLTSYQYPFYDCRQAMSLEENLPCISCVSNRWTCQWDLRYHECREASPNPEDGIVRAHMEDSCPQFLGPSPLVIPMNHETDVNFQGKNLDTVKGSSLHVGSDLLKFMEPVTMQESGTFAFRTPKLSHDANETLPLHLYVKSYGKNIDSKLHVTLYNCSFGRSDCSLCRAANPDYRCAWCGGQSRCVYEALCNTTSECPPPVITRIQPETGPLGGGIRITILGSNLGVQAGDIQRISVAGRNCSFQPERYSVSTRIVCVIEAAETPFTGGVEVDVFGKLGRSPPNVQFTFQQPKPLSVEPQQGPQAGGTTLTIHGTHLDTGSQEDVRVTLNGVPCKVTKFGAQLQCVTGPQATRGQMLLEVSYGGSPVPNPGIFFTYRENPVLRAFEPLRSFASGGRSINVTGQGFSLIQRFAMVVIAEPLQSWQPPREAESLQPMTVVGTDYVFHNDTKVVFLSPAVPEEPEAYNLTVLIEMDGHRALLRTEAGAFEYVPDPTFENFTGGVKKQVNKLIHARGTNLNKAMTLQEAEAFVGAERCTMKTLTETDLYCEPPEVQPPPKRRQKRDTTHNLPEFIVKFGSREWVLGRVEYDTRVSDVPLSLILPLVIVPMVVVIAVSVYCYWRKSQQAEREYEKIKSQLEGLEESVRDRCKKEFTDLMIEMEDQTNDVHEAGIPVLDYKTYTDRVFFLPSKDGDKDVMITGKLDIPEPRRPVVEQALYQFSNLLNSKSFLINFIHTLENQREFSARAKVYFASLLTVALHGKLEYYTDIMHTLFLELLEQYVVAKNPKLMLRRSETVVERMLSNWMSICLYQYLKDSAGEPLYKLFKAIKHQVEKGPVDAVQKKAKYTLNDTGLLGDDVEYAPLTVSVIVQDEGVDAIPVKVLNCDTISQVKEKIIDQVYRGQPCSCWPRPDSVVLEWRPGSTAQILSDLDLTSQREGRWKRVNTLMHYNVRDGATLILSKVGVSQQPEDSQQDLPGERHALLEEENRVWHLVRPTDEVDEGKSKRGSVKEKERTKAITEIYLTRLLSVKGTLQQFVDNFFQSVLAPGHAVPPAVKYFFDFLDEQAEKHNIQDEDTIHIWKTNSLPLRFWVNILKNPHFIFDVHVHEVVDASLSVIAQTFMDACTRTEHKLSRDSPSNKLLYAKEISTYKKMVEDYYKGIRQMVQVSDQDMNTHLAEISRAHTDSLNTLVALHQLYQYTQKYYDEIINALEEDPAAQKMQLAFRLQQIAAALENKVTDL

SEQ ID NO: 7692 - protein, 312 aa, Homo sapiens
MSVLNNSEVKLFLLIGIPGLEHAHIWFSIPICLMYLLAIMGNCTILFIIKTEPSLHEPMYYFLAMLAVSDMGLSLSSLPTMLRVFLFNAMGISPNACFAQEFFIHGFTVMESSVLLIMSLDRFLAIHNPLRYSSILTSNRVAKMGLILAIRSILLVIPFPFTLRRLKYCQKNLLSHSYCLHQDTMKLACSDNKTNVIYGFFIALCTMLDLALIVLSYVLILKTILSIASLAERLKALNTCVSHICAVLTFYVPIITLAAMHHFAKHKSPLVVILIADMFLLVPPLMNPIVYCVKTRQIWEKILGKLLNVCGR

SEQ ID NO: 7693 - protein, 819 aa, Homo sapiens
MAEVEDQAARDMKRLEEKDKERKNVKGIRDDIEEEDDQEAYFRYMAENPTAGVVQEEEEDNLEYDSDGNPIAPTKKIIDPLPPIDHSEIDYPPFEKNFYNEHEEITNLTPQQLIDLRHKLNLRVSGAAPPRPGSSFAHFGFDEQLMHQIRKSEYTQPTPIQCQGVPVALSGRDMIGIAKTGSGKTAAFIWPMLIHIMDQKELEPGDGPIAVIVCPTRELCQQIHAECKRFGKAYNLRSVAVYGGGSMWEQAKALQEGAEIVVCTPGRLIDHVKKKATNLQRVSYLVFDEADRMFDMGFEYQVRSIASHVRPDRQTLLFSATFRKKIEKLARDILIDPIRVVQGDIGEANEDVTQIVEILHSGPSKWNWLTRRLVEFTSSGSVLLFVTKKANAEELANNLKQEGHNLGLLHGDMDQSERNKVISDFKKKDIPVLVATDVAARGLDIPSIKTVINYDVARDIDTHTHRIGRTGRAGEKGVAYTLLTPKDSNFAGDLVRNLEGANQHVSKELLDLAMQNAWFRKSRFKGGKGKKLNIGGGGLGYRERPGLGSENMDRGNNNVMSNYEAYKPSTGAMGDRLTAMKAAFQSQYKSHFVAASLSNQKAGSSAAGASGWTSAGSLNSVPTNSAQQGHNSPDSPVTSAAKGIPGFGNTGNISGAPVTYPSAGAQGVNNTASGNNSREGTGGSNGKRERYTENRGSSRHSHGETGNRHSDSPRHGDGGRHGDGYRHPESSSRHTDGHRHGENRHGGSAGRHGENRGANDGRNGESRKEAFNRESKMEPKMEPKVDSSKMDKVDSKTDKTADGFAVPEPPKRKKSRWDS

SEQ ID NO: 7694 - protein, 4490 aa, Homo sapiens
MMKLYIDNAAPDKLKGLCIFFVRCRNDVAINVKTIQEEALFTVLDASKGLLNGIRDMLANIFLPAVLATNNWGALNQSKQGESEKHIFTETINRYLSFLDGARISIEGTVKLKTIDNVNFSKLHTFEEVTAAASNSETVHQLEEVLMVWYKQIEQVLIESEQMRKEAGDSGPLTELEHWKRMSAKFNYIIEQIKGPSCKAVINVLNVAHSKLLKNWRDLDARITDTANESKDNVRYLYTLEKVCQPLYNHDLVSMAHGIQNLINAIRMIHGVSRYYNTSERMTSLFIKVTNQMVTACKAYITDGGLNHVWDQETPVVLKKIQDCIFLFKEYQASFHKTRKLISESSGEKSFEVSEMYIFGKFEAFCKRLEKITEMITVVQTYSTLSNSTIEGIDIMAIKFRNIYQGVKKKQYDILDPRRTEFDTDFLDFMTKINGLEVQIQAFMNSSFGKILSSQQALQLLQRFQKLNIPCLGLEINHTIERILQYYVAELDATKKLYHSQKDDPPLARNMPPIAGKILWVRQLYRRISEPINYFFKNSDILSSPDGKAVIRQYNKISYVLVEFEVVYHTAWIREISQLHYALQATLFVRHPETGKLLVNFDPKILEVVRETKCMIKMKLDVPEQAKRLLKLESKLKADKLYLQGLLQYYDELCQEVPSVFVNLMTPKMKKVESVLRQGLTVLTWSSLTLESFFQEVELVLDMFNQLLKKISDLCEMHIDTVLKEIAKTVLISLPESGATKVEDMLTLNETYTKEWADILNHKSKHVEEAVRELISIFEQIYEVKYTGKVGKQSEQRKHVVFGSETGEGENNDYEANIVNEFDTHDKEDEFKKECKEVFAFFSHQLLDSLQKATRLSLDTMKRRIFVASLYGRKQSEDIISFIKSEVHLAIPNVVMIPSLDDIQQAINRMIQLTLEVSRGVAHWGQQQIRPIKSVIPSPTTTDVTHQNTGKLLKKEERSFEEAIPARKLKNFYPGVAEHKDISKLVLLLSSSVNSLRKAAHEALQDFQKYKTLWTEDRDVKVKEFLANNPSLTEIRSEILHYATFEQEIDELKPIIVVGALELHTEPMKLALSIEAKAWKMLLCRYLNEEYKKKMSYMIAFINEYLKKLSRPIRDLDDVRFAMEALSCIRDNEIQMDMTLGPIEEAYAILNRFEVEVTKEESEAVDTLRYSFNKLQSKAVSVQEDLVQVQPKFKSNLLESVEVFREDVINFAEAYELEGPMVPNIPPQEASNRLQIFQASFDDLWRKFVTYSSGEQLFGLPVTDYEVLHKTRKELNLLQKLYGLYDTVMSSISGYYEILWGDVDIEKINAELLEFQNRCRKLPKGLKDWQAFLDLKKRIDDFSESCPLLEMMTNKAMKQRHWDRISELTGTPFDVESDSFCLRNIMEAPLLKHKDDIEDICISAIKEKDIEAKLTQVIENWTNQNLSFAAFKGKGELLLKGTESGEIITLMEDSLMVLGSLLSNRYNAPFKKNIQNWVYKLSTSSDIIEEWLVVQNLWVYLEAVFVGGDIAKQLPQEAKRFQNIDKSWIKIMQRAHENPNVINCCVGDETMGQLLPHLHEQLEVCQKSLTGYLEKKRLLFPRFFFVSDPVLLEILGQASDSHTIQPHLPAVSDNINEVTFHAKDYDRIMAVISREGEKIVLDNSVMAKGPVEIWLLDLLKMQMSSLHNIIRSAFYQISDSGFQLLPFLSHFPAQVGLLGIQMLWTHDSEEALRNAKDDRKIMQVTNQKFLDILNTLISQTTHDLSKFDRVKFETLITIHVHQRDIFDDLVKMHIKSPTDFEWLKQSRFYFKEDLDQTVVSITDVDFIYQNEFLGCTDRLVITPLTDRCYITLAQALGMNMGGAPAGPAGTGKTETTKDMGRCLGKYVVVFNCSDQMDFRGLGRIFKGLAQSGSWGCFDEFNRIELPVLSVAAQQIYIVLTARKERKKQFIFSDGDCVDLNPEFGIFLTMNPGYAGRQELPENLKIQFRTVAMMVPDRQIIMRVKLASCGFLENVILAQKFYVLYKLCEEQLTKQVHYDFGLRNILSVLRTLGSQKRARPEDSELSIVMRGLRDMNLSKLVDEDEPLFLSLINDLFPGLQLDSNTYAELQNAVAHQVQIEGLINHPPWNLKLVQLYETSLVRHGLMTLGPSGSGKTTVITILMKAQTECGRPHREMRMNPKAITAPQMFGRLDTATNDWTDGIFSTLWRKTLKAKKGENIFLILDGPVDAIWIENLNSVLDDNKTLTLANGDRIPMAPSCKLLFEVHNIENASPATVSRMGMVYISSSALSWRPILQAWLKKRTAQEAAVFLTLYEKVFEDTYTYMKLNLNPKMQLLECNYIVQSLNLLEGLIPSKEEGGVSCVEHLHKLFVFGLMWSLGALLELESREKLEAFLRQHESKLDLPEIPKGSNQTMYEFYVTDYGDWEHWNKKLQPYYYPTDSIPEYSSILVPNVDNIRTNFLIDTIAKQHKAVLLTGEQGTAKTVMVKAYLKKYDPEVQLSKSLNFSSATEPMMFQRTIESYVDKRIGSTYGPPGGRKMTVFIDDINMPVINEWGDQITNEIVRQMMEMEGMYSLDKPGDFTTIVDVQLIAAMIHPGGGRNDIPQRLKRQFTVFNCTLPSNASIDKIFGIIGCGYFDPCRSFKPQICEMIVNLVSVGRVLWQWTKVKMLPTPSKFHYIFNLRDLSRIWQGMLTIKAEECASIPTLLSLFKHECSRVIADRFITPEDEQWFNAHLTRAVEENIGSDAASCILPEPYFVDFLREMPEPTGDEPEDSVFEVPKIYELMPSFDFLAEKLQFYQRQFNEIIRGTSLDLVFFKDAMTHLIKISRIIRTSCGNALLVGVGGSGKQSLSRLASFIAGYQIFQITLTRSYNVTNLTDDLKALYKVAGADGKGITFIFTDSEIKDEAFLEYLNNLLSSGEISNLFARDEMDEITQGLISVMKRELPRHPPTFDNLYEYFISRSRKNLHVVLCFSPVGEKFRARSLKFPGLISGCTMDWFSRWPREALIAVASYFLSDYNIVCSSEIKRQVVETMGLFHDMVSESCESYFQRYRRRAHVTPKSYLSFINGYKNIYAEKVKFINEQAERMNIGLDKLMEASESVAKLSQDLAVKEKELAVASIKADEVLAEVTVSAQASAKIKNEVQEVKDKAQKIVDEIDSEKVKAESKLEAAKPALEEAEAALNTIKPNDIATVRKLAKPPHLIMRIMDCVLLLFQKKIDPVTMDPEKSCCKPSWGESLKLMSATGFLWSLQQFPKDTINEETVELLQPYFNMDDYTFESAKKVCGNVAGLLSWTLAMAIFYGINREVLPLKANLAKQEGRLAVANAELGKAQALLDEKQAELDKVQAKFDAAMNEKMDLLNDADTCRKKMQAASTLIDGLSGEKIRWTQQSKEFKAQINRLVGDILLCTGFLSYLGPFNQIFRNYLLKDQWEMELRARKIPFTENLNLISMLVDPPTIGEWGLQGLPGDDLSIQNGIIVTKATRYPLLIDPQTQGKTWIKSKEKENDLQVTSLNHKYFRTHLEDSLSLGRPLLIEDIHEELDPALDNVLEKNFIKSGTTFKVKVGDKECDIMDTFKLYITTKLPNPAFTPEINAKTSVIDFTVTMKGLENQLLRRVILTEKQELEAERVKLLEDVTFNKRKMKELEDNLLYKLSATKGSLVDDESLIGVLRTTKQTAAEVSEKLHVAAETEIKINAAQEEFRPAATRGSILYFLITEMSMVNIMYQTSLAQFLKLFDQSMARSEKSPLPQKRITNIIEYLTYEVFTYSVRGLYENHKFLFVLLMTLKIDLQRGTVKHREFQALIKGGAALDLKACPPKPYRWILDMTWLNLVELSKLPQFAEIMNQISRNEKGWKSWFDKDAPEEEIIPDGYNDSLDTCHKLLLIRSWCPDRTVFQARKYIADSLEEKYTEPVILNLEKTWEESDTRTPLICFLSMGSDPTNQIDALAKKLKLECRTISMGQGQEVHARKLIQMSMQQGGWVLLQNCHLGLEFMEELLETLITTEASDDSFRVWITTEPHDRFPITLLQTSLKFTNEPPQGVRAGLKRTFAGINQDLLDISNLPMWKPMLYTVAFLHSTVQERRKFGPLGWNIPYEFNSADFSASVQFIQNHLDECDIKKGVSWNTVRYMIGEVQYGGRVTDDFDKRLLNCFARVWFSEKMFEPSFCFYTGYKIPLCKTLDQYFEYIQSLPSLDNPEVFGLHPNADITYQSNTASAVLETITNIQPKESGGGVGETREAIVYRLSEDMLSKLPPDYIPHEVKSRLIKMGHLNSMNIFLRQEIDRMQRVISILRSSLSDLKLAIEGTIIMSENLRDALDNMYDARIPQLWKRVSWDSSTLGFWFTELLERNAQFSTWIFEGRPNVFWMTGFFNPQGFLTAMRQEVTRAHKGWALDTVTIHNEVLRQTKEEITSPPGEGVYIYGLYMDGAAWDRRNGKLMESTPKVLFTQLPVLHIFAINSTAPKDPKLYVCPIYKKPRRTDLTFITVVYLRTVLSPDHWILRGVALLCDIK

SEQ ID NO: 7695 - protein, 628 aa, Homo sapiens
MSRSGDRTSTFDPSHSDNLLHGLNLLWRKQLFCDVTLTAQGQQFHCHKAVLASCSQYFRSLFSSHPPLGGGVGGQDGLGAPKDQQQPPQQQPSQQQQPPPQEEPGTPSSSPDDKLLTSPRAINNLVLQGCSSIGLRLVLEYLYTANVTLSLDTVEEVLSVSKILHIPQVTKLCVQFLNDQISVQNYKQVCKIAALHGLEETKKLANKYLVEDVLLLNFEEMRALLDSLPPPVESELALFQMSVLWLEHDRETRMQYAPDLMKRLRFALIPAPELVERVQSVDFMRTDPVCQKLLLDAMNYHLMPFRQHCRQSLASRIRSNKKMLLLVGGLPPGPDRLPSNLVQYYDDEKKTWKILTIMPYNSAHHCVVEVENFLFVLGGEDQWNPNGKHSTNFVSRYDPRFNSWIQLPPMQERRASFYACRLDKHLYVIGGRNETGYLSSVECYNLETNEWRYVSSLPQPLAAHAGAVHNGKIYISGGVHNGEYVPWLYCYDPVMDVWARKQDMNTKRAIHTLAVMNDRLYAIGGNHLKGFSHLDVMLVECYDPKGDQWNILQTPILEGRSGPGCAVLDDSIYLVGGYSWSMGAYKSSTICYCPEKGTWTELEGDVAEPLAGPACVTVILPSCVPYNK

SEQ ID NO: 7696 - protein, 205 aa, Homo sapiens
MASPDDPLRADHMVKEPVEDTDPSTLSFNMSDKYPIQDTELPKAEECDTITLNCPRNSDMKNQGEENGFPDSTGDPLPEISKDNSCKENCTCSSCLLRAPTISDLLNDQDLLDVIRIKLDPCHPTVKNWRNFASKWGMSYDELCFLEQRPQSPTLEFLLRNSQRTVGQLMELCRLYHRADVEKVLRRWVDEEWPKRERGDPSRHF

SEQ ID NO: 7697 - protein, 340 aa, Homo sapiens
MSGEPELIELRELAPAGRAGKGRTRLERANALRIARGTACNPTRQLVPGRGHRFQPAGPATHTWCDLCGDFIWGVVRKGLQCAHCKFTCHYRCRALVCLDCCGPRDLGWEPAVERDTNVDEPVEWETPDLSQAEIEQKIKEYNAQINSNLFMSLNKDGSYTGFIKVQLKLVRPVSVPSSKKPPSLQDARRGPGRGTSVRRRTSFYLPKDAVKHLHVLSRTRAREVIEALLRKFLVVDDPRKFALFERAERHGQVYLRKLLDDEQPLRLRLLAGPSDKALSFVLKENDSGEVNWDAFSMPELHNFLRILQREEEEHLRQILQKYSYCRQKIQEALHACPLG

SEQ ID NO: 7698 - protein, 1439 aa, Homo sapiens
MAEAGDAALSVAEWLRALHLEQYTGLFEQHGLVWATECQGLSDTRLMDMGMLLPGHRRRILAGLLRAHTSPAPAPRPTPRPVPMKRHIFRSPPVPATPPEPLPTTTEDEGLPAAPPIPPRRSCLPPTCFTTPSTAAPDPVLPPLPAKRHLAELSVPPVPPRTGPPRLLVSLPTKEEESLLPSLSSPPQPQSEEPLSTLPQGPPQPPSPPPCPPEIPPKPVRLFPEFDDSDYDEVPEEGPGAPARVMTKKEEPPPSRVPRAVRVASLLSEGEELSGDDQGDEEEDDHAYEGVPNGGWHTSSLSLSLPSTIAAPHPMDGPPGGSTPVTPVIKAGWLDKNPPQGSYIYQKRWVRLDTDHLRYFDSNKDAYSKRFISVACISHVAAIGDQKFEVITNNRTFAFRAESDVERKEWMQALQQAMAEQRARARLSSAYLLGVPGSEQPDRAGSLELRGFKNKLYVAVVGDKVQLYKNLEEYHLGIGITFIDMSVGNVKEVDRRSFDLTTPYRIFSFSADSELEKEQWLEAMQGAIAEALSTSEVAERIWAAAPNRFCADCGAPQPDWASINLCVVICKRCAGEHRGLGAGVSKVRSLKMDRKVWTETLIELFLQLGNGAGNRFWAANVPPSEALQPSSSPSTRRCHLEAKYREGKYRRYHPLFGNQEELDKALCAAVTTTDLAETQALLGCGAGINCFSGDPEAPTPLALAEQAGQTLQMEFLRNNRTTEVPRLDSMKPLEKHYSVVLPTVSHSGFLYKTASAGKLLQDRRAREEFSRRWCVLGDGVLSYFENERAVTPNGEIRASEIVCLAVPPPDTHGFEHTFEVYTEGERLYLFGLESAEQAHEWVKCIAKAFVPPLAEDLLARDFERLGRLPYKAGLSLQRAQEGWFSLSGSELRAVFPEGPCEEPLQLRKLQELSIQGDSENQVLVLVERRRTLYIQGERRLDFMGWLGAIQKAAASMGDTLSEQQLGDSDIPVIVYRCVDYITQCGLTSEGIYRKCGQTSKTQRLLESLRQDARSVHLKEGEQHVDDVSSALKRFLRDLPDGLFTRAQRLTWLEASEIEDEEEKVSRYRELLVRLPPVNRATVKALISHLYCVQCFSDTNQMNVHNLAIVFGPTLFQTDGQDYKAGRVVEDLINHYVVVFSVDEEELRKQREEITAIVKMRVAGTASGTQHAGDFICTVYLEEKKAETEQHIKVPASMTAEELTLEILDRRNVGIREKDYWTCFEVNEREEAERPLHFAEKVLPILHGLGTDSHLVVKKHQAMEAMLLYLASRVGDTKHGMMKFREDRSLLGLGLPSGGFHDRYFILNSSCLRLYKEVRSHRPEKEWPIKSLKVYLGVKKKLRPPTCWGFTVVHETEKHEKQQWYLCCDTQMELREWFATFLFVQHDGLVWPSEPSRVSRAVPEVRLGSVSLIPLRGSENEMRRSVAAFTADPLSLLRNV

SEQ ID NO: 7699 - protein, 1252 aa, Homo sapiens
MSTTVNVDSLAEYEKSQIKRALELGTVMTVFSFRKSTPERRTVQVIMETRQVAWSKTADKIEGFLDIMEIKEIRPGKNSKDFERAKAVRQKEDCCFTILYGTQFVLSTLSLAADSKEDAVNWLSGLKILHQEAMNASTPTIIESWLRKQIYSVDQTRRNSISLRELKTILPLINFKVSSAKFLKDKFVEIGAHKDELSFEQFHLFYKKLMFEQQKSILDEFKKDSSVFILGNTDRPDASAVYLHDFQRFLIHEQQEHWAQDLNKVRERMTKFIDDTMRETAEPFLFVDEFLTYLFSRENSIWDEKYDAVDMQDMNNPLSHYWISSSHNTYLTGDQLRSESSPEAYIRCLRMGCRCIELDCWDGPDGKPVIYHGWTRTTKIKFDDVVQAIKDHAFVTSSFPVILSIEEHCSVEQQRHMAKAFKEVFGDLLLTKPTEASADQLPSPSQLREKIIIKHKKLGPRGDVDVNMEDKKDEHKQQGELYMWDSIDQKWTRHYCAIADAKLSFSDDIEQTMEEEVPQDIPPTELHFGEKWFHKKVEKRTSAEKLLQEYCMETGGKDGTFLVRESETFPNDYTLSFWRSGRVQHCRIRSTMEGGTLKYYLTDNLTFSSIYALIQHYRETHLRCAEFELRLTDPVPNPNPHESKPWYYDSLSRGEAEDMLMRIPRDGAFLIRKREGSDSYAITFRARGKVKHCRINRDGRHFVLGTSAYFESLVELVSYYEKHSLYRKMRLRYPVTPELLERYNMERDINSLYDVSRMYVDPSEINPSMPQRTVKALYDYKAKRSDELSFCRGALIHNVSKEPGGWWKGDYGTRIQQYFPSNYVEDISTADFEELEKQIIEDNPLGSLCRGILDLNTYNVVKAPQGKNQKSFVFILEPKQQGDPPVEFATDRVEELFEWFQSIREITWKIDTKENNMKYWEKNQSIAIELSDLVVYCKPTSKTKDNLENPDFREIRSFVETKADSIIRQKPVDLLKYNQKGLTRVYPKGQRVDSSNYDPFRLWLCGSQMVALNFQTADKYMQMNHALFSLNGRTGYVLQPESMRTEKYDPMPPESQRKILMTLTVKVLGARHLPKLGRSIACPFVEVEICGAEYDNNKFKTTVVNDNGLSPIWAPTQEKVTFEIYDPNLAFLRFVVYEEDMFSDPNFLAHATYPIKAVKSGFRSVPLKNGYSEDIELASLLVFCEMRPVLESEEELYSSCRQLRRRQEELNNQLFLYDTHQNLRNANRDALVKEFSVNENQSSCTRRNATRG

SEQ ID NO: 7700 - protein, 608 aa, Homo sapiens
MSDKSDLKAELERKKQRLAQIREEKKRKEEERKKKEADMQQKKEPVQDDSDLDRKRRETEALLQSIGISPEPPLVPTPMSPSSKSVSTPSEAGSQDSGDLGPLTRRRLHKLGVSKVTQVDFLPREVVSYSKETQTPLATHQSEEDEEDEEMVESKVGQDSELENQDKKQEVKEAPPRELTEEEKQQILHSEEFLIFFDRTIRVIERALAEDSDIFFDYSGRELEEKDGDVQAGANLSFNRQFYDEHWSKHRVVTCMDWSLQYPELMVASYNNNEDAPHEPDGVALVWNMKFKKTTPEYVFHCQSSVMSVCFARFHPNLVVGGTYSGQIVLWDNRSHRRTPVQRTPLSAAAHTHPVYCVNVVGTQNAHNLITVSTDGKMCSWSLDMLSTPQESMELVYNKSKPVAVTGMAFPTGDVNNFVVGSEEGTVYTACRHGSKAGIGEVFEGHQGPVTGINCHMAVGPIDFSHLFVTSSFDWTVKLWTTKHNKPLYSFEDNADYVYDVMWSPVHPALFACVDGMGRLDLWNLNNDTEVPTASVAIEGASALNRVRWAQAGKEVAVGDSEGRIWVYDVGELAVPHNDEWTRFARTLVEIRANRADSEEEGTVELSA

SEQ ID NO: 7701 - protein, 765 aa, Homo sapiens
TGPLQGDGGPALGGADVAPRLSPVRVWPRPQAPKEPALHPMGLSLPKEKGLILCLWSKFCRWFQRRESWAQSRDEQNLLQQKRIWESPLLLAAKDNDVQALNKLLKYEDCKVHQRGAMGETALHIAALYDNLEAAMVLMEAAPELVFEPMTSELYEGQTALHIAVVNQNMNLVRALLARRASVSARATGTAFRRSPCNLIYFGEHPLSFAACVNSEEIVRLLIEHGADIRAQDSLGNTVLHILILQPNKTFACQMYNLLLSYDRHGDHLQPLDLVPNHQGLTPFKLAGVEGNTVMFQHLMQKRKHTQWTYGPLTSTLYDLTEIDSSGDEQSLLELIITTKKREARQILDQTPVKELVSLKWKRYGRPYFCMLGAIYLLYIICFTMCCIYRPLKPRTNNRTSPRDNTLLQQKLLQEAYMTPKDDIRLVGELVTVIGAIIILLVEVPDIFRMGVTRFFGQTILGGPFHVLIITYAFMVLVTMVMRLISASGEVVPMSFALVLGWCNVMYFARGFQMLGPFTIMIQKMIFGDLMRFCWLMAVVILGFASAFYIIFQTEDPEELGHFYDYPMALFSTFELFLTIIDGPANYNVDLPFMYSITYAAFAIIATLLMLNLLIAMMGDTHWRVAHERDELWRAQIVATTVMLERKLPRCLWPRSGICGREYGLGDRWFLRVEDRQDLNRQRIQRYAQAFHTRGSEDLDKDSVEKLELGCPFSPHLSLPMPSVSRSTSRSSANWERLRQGTLRRDLRGIINRGLEDGESWEYQI

SEQ ID NO: 7702 - protein, 917 aa, Homo sapiens
MIAAQLLAYYFTELKDDQVKKIDKYLYAMRLSDETLIDIMTRFRKEMKNGLSRDFNPTATVKMLPTFVRSIPDGSEKGDFIALDLGGSSFRILRVQVNHEKNQNVHMESEVYDTPENIVHGSGSQLFDHVAECLGDFMEKRKIKDKKLPVGFTFSFPCQQSKIDEAILITWTKRFKASGVEGADVVKLLNKAIKKRGDYDANIVAVVNDTVGTMMTCGYDDQHCEVGLIIGTGTNACYMEELRHIDLVEGDEGRMCINTEWGAFGDDGSLEDIRTEFDREIDRGSLNPGKQLFEKMVSGMYLGELVRLILVKMAKEGLLFEGRITPELLTRGKFNTSDVSAIEKNKEGLHNAKEILTRLGVEPSDDDCVSVQHVCTIVSFRSANLVAATLGAILNRLRDNKGTPRLRTTVGVDGSLYKTHPQYSRRFHKTLRRLVPDSDVRFLLSESGSGKGAAMVTAVAYRLAEQHRQIEETLAHFHLTKDMLLEVKKRMRAEMELGLRKQTHNNAVVKMLPSFVRRTPDGTENGDFLALDLGGTNFRVLLVKIRSGKKRTVEMHNKIYAIPIEIMQGTGEELFDHIVSCISDFLDYMGIKGPRMPLGFTFSFPCQQTSLDAGILITWTKGFKATDCVGHDVVTLLRDAIKRREEFDLDVVAVVNDTVGTMMTCAYEEPTCEVGLIVGTGSNACYMEEMKNVEMVEGDQGQMCINMEWGAFGDNGCLDDIRTHYDRLVDEYSLNAGKQRYEKMISGMYLGEIVRNILIDFTKKGFLFRGQISETLKTRGIFETKFLSQIESDRLALLQVRAILQQLGLNSTCDDSILVKTVCGVVSRRAAQLCGAGMAAVVDKIRENRGLDRLNVTVGVDGTLYKLHPHFSRIMHQTVKELSPKCNVSFLLSEDGSGKGAALITAVGVRLRTEASS

SEQ ID NO: 7703 - protein, 2090 aa, Homo sapiens
MGDEMDAMIPEREMKDFQFRALKKVRIFDSPEELPKERSSLLAVSNKYGLVFAGGASGLQIFPTKNLLIQNKPGDDPNKIVDKVQGLLVPMKFPIHHLALSCDNLTLSACMMSSEYGSIIAFFDVRTFSNEAKQQKRPFAYHKLLKDAGGMVIDMKWNPTVPSMVAVCLADGSIAVLQVTETVKVCATLPSTVAVTSVCWSPKGKQLAVGKQNGTVVQYLPTLQEKKVIPCPPFYESDHPVRVLDVLWIGTYVFAIVYAAADGTLETSPDVVMALLPKKEEKHPEIFVNFMEPCYGSCTERQHHYYLSYIEEWDLVLAASAASTEVSILARQSDQINWESWLLEDSSRAELPVTDKSDDSLPMGVVVDYTNQVEITISDEKTLPPAPVLMLLSTDGVLCPFYMINQNPGVKSLIKTPERLSLEGERQPKSPGSTPTTPTSSQAPQKLDASAAAAPASLPPSSPAAPIATFSLLPAGGAPTVFSFGSSSLKSSATVTGEPPSYSSGSDSSKAAPGPGPSTFSFVPPSKASLAPTPAASPVAPSAASFSFGSSGFKPTLESTPVPSVSAPNIAMKPSFPPSTSAVKVNLSEKFTAAATSTPVSSSQSAPPMSPFSSASKPAASGPLSHPTPLSAPPSSVPLKSSVLPSPSGRSAQGSSSPVPSMVQKSPRITPPAAKPGSPQAKSLQPAVAEKQGHQWKDSDPVMAGIGEEIAHFQKELEELKARTSKACFQVGTSEEMKMLRTESDDLHTFLLEIKETTESLHGDISSLKTTLLEGFAGVEEAREQNERNRDSGYLHLLYKRPLDPKSEAQLQEIRRLHQYVKFAVQDVNDVLDLEWDQHLEQKKKQRHLLVPERETLFNTLANNREIINQQRKRLNHLVDSLQQLRLYKQTSLWSLSSAVPSQSSIHSFDSDLESLCNALLKTTIESHTKSLPKVPAKLSPMKQAQLRNFLAKRKTPPVRSTAPASLSRSAFLSQRYYEDLDEVSSTSSVSQSLESEDARTSCKDDEAVVQAPRHAPVVRTPSIQPSLLPHAAPFAKSHLVHGSSPGVMGTSVATSASKIIPQGADSTMLATKTVKHGAPSPSHPISAPQAAAAAALRRQMASQAPAVNTLTESTLKNVPQVVNVQELKNNPATPSTAMGSSVPYSTAKTPHPVLTPVAANQAKQGSLINSLKPSGPTPASGQLSSGDKASGTAKIETAVTSTPSASGQFSKPFSFSPSGTGFNFGIITPTPSSNFTAAQGATPSTKESSQPDAFSSGGGSKPSYEAIPESSPPSGITSASNTTPGEPAASSSRPVAPSGTALSTTSSKLETPPSKLGELLFPSSLAGETLGSFSGLRVGQADDSTKPTNKASSTSLTSTQPTKTSGVPSGFNFTAPPVLGKHTEPPVTSSATTTSVAPPAATSTSSTAVFGSLPVTSAGSSGVISFGGTSLSAGKTSFSFGSQQTNSTVPPSAPPPTTAATPLPTSFPTLSFGSLLSSATTPSLPMSAGRSTEEATSSALPEKPGDSEVSASAASLLEEQQSAQLPQAPPQTSDSVKKEPVLAQPAVSNSGTAASSTSLVALSAEATPATTGVPDARTEAVPPASSFSVPGQTAVTAAAISSAGPVAVETSSTPIASSTTSIVAPGPSAEAAAFGTVTSGSSVFAQPPAASSSSAFNQLTNNTATAPSATPVFGQVAASTAPSLFGQQTGSTASTAAATPQVSSSGFSSPAFGTTAPGVFGQTTFGQASVFGQSASSAASVFSFSQPGFSSVPAFGQPASSTPTSTSGSVFGAASSTSSSSSFSFGQSSPNTGGGLFGQSNAPAFGQSPGFGQGGSVFGGTSAATTTAATSGFSFCQASGFGSSNTGSVFGQAASTGGIVFGQQSSSSSGSVFGSGNTGRGGGFFSGLGGKPSQDAANKNPFSSASGGFGSTATSNTSNLFGNSGAKTFGGFASSSFGEQKPTGTFSSGGGSVASQGFGFSSPNKTGGFGAAPVFGSPPTFGGSPGFGGVPAFGSAPAFTSPLGSTGGKVFGEGTAAASAGGFGFGSSSNTTSFGTLASQNAPTFGSLSQQTSGFGTQSSGFSGFGSGTGGFSFGSNNSSVQGFGGWRS

SEQ ID NO: 7704 - protein, 228 aa, Homo sapiens
MASGCKIGPSILNSDLANLGAECLRMLDSGADYLHLDVMDGHFVPNITFGHPVVESLRKQLGQDPFFDMHMMVSKPEQWVKPMAVAGANQYTFHLEATENPGALIKDIRENGMKVGLAIKPGTSVEYLAPWANQIDMALVMTVEPGFGGQKFMEDMMPKVHWLRTQFPSLDIEVDGGVGPDTVHKCAEAGANMIVSGSAIMRSEDPRSVINLLRNVCSEAAQKRSLDR

SEQ ID NO: 7705 - protein, 1100 aa, Homo sapiens
MKTSKASQRYRGIRRNASQCYLYQESLLLSNLDDSFSADETGDSNDPEQIFQNIQFQKDLMANIRCRPWTMGQKLRALRQAKNIVLKFEGRLTRTRGYQAAGAELWRKFARLACNFVVIFIPWEMRIKKIESHFGSGVASYFIFLRWLFGINIVLTIMTGAFIVIPELIAGQPFGSTARKTIPKEQVSSAQDLDTVWSLGGYLQYSVLFYGYYGRERKIGRAGYRLPLAYFLVGMAVFAYSFIILLKKMAKNSRTSLASASNENYTFCWRVFCAWDYLIGNPEAAESKTAAIVNSIREAILEEQEKKKSKNLAVTICLRIIANILVLLSLAGSIYLIYFVVDRSQKLEQSKKELTLWEKNEVSVVVSLVTMIAPSAFDLIAALEMYHPRTTLRFQLARVLVLYLGNLYSLIIALLDKVNSMSIEEMATKNNTSHWIDSTTFFATRTAPEEEKWSTSRPGMGLRRNNTWALEETSISAYTMPLIKANKTSLHTQSPQDQCWETYVGQEMLKLSIIDMLFTVASILLIDFFRGLFVRYLSDYWCWDLESKFPEYGEFKIAENVLHLVYNQGMIWMGAFFSPCLPAFNVLKLIGLMYLRSWAVLTCNVPHQQVFRASRSNNFYLAMLLFMLFLCMLPTIFAIVRYKPSLNCGPFSGQEKIYDIVSETIEKDFPVWFGSVVGHISSPVVILPAVLLLFMLIYYLQSIARSLKLSNHQLKMQIQNARSEDKKKVAQMVEARIQTQEESTKKLPNDSDLTSQLSSAHSGTPQNNGNVAHFDSGSSKSGRIETVAQSMPQSPRPGDRAPSSPLPGVPKSRLEHETNRYLHGLCASTSDLHRNRSRTPMTFTTHIEDVHSEPLFRKDFQQINPPHRGPQASTLLAQGPRPHAPRYYVINECDSYKKKHLNVWPERHFKIDASGDIVELYPRNVRQYASRVPRQPPSPQLSEEEEETPSRDWIKRSLPPRSLIDLRRAPHFYIGERSESQTRDPEHQGRVHYKSWNEDFEGHLERPAYVPRKPRSRNFQYPQPPLKPRGKPRFEPSLTESDSVSAASSSDQQNSSADQYLQVTHSQGRFPRSVGQPSRRKAKSGQELTVDLDDLICSDV

SEQ ID NO: 7706 - protein, 1069 aa, Homo sapiens
MVLNSLDKMIQLQKNTANIRNICVLAHVDHGNEEYLINLIDSPGHVDFSSEVSTAVRICDGCIIVVDAVEGVCPQTQAVLRQAWLENIRPVLVINKIDRLIVELKFTPQEAYSHLKNILEQINALTGTLFTSKVLEERAERETESQVNPNSEQGEQVYDWSTGLEDTDDSHLYFSPEQGNVVFTSAIDGWGFGIEHFARIYSQKIGIKKEVLMKTLWGDYYINMKAKKIMKGDQAKGKKPLFVQLILENIWSLYDAVLKKDKDKIDKIVTSLGLKIGAREARHSDPKVQINAICSQWLPISHAVLAMVCQKLPSPLDITAERVERLMCTGSQTFDSFPPETQALKAAFMKCGSEDTAPVIIFVSKMFAVDAKALPQNKPRPLTQEEIAQRRERARQRHAEKLAAAQGQAPLEPTQDGSAIETCPKGEEPRGDEQQVESMTPKPVLQEENNQESFIAFARVFSGVARRGKKIFVLGPKYSPLEFLRRVPLGFSAPPDGLPQVPHMAYCALENLYLLMGRELEYLEEVPPGNVLGIGGLQDFVLKSATLCSLPSCPPFIPLNFEATPIVRVAVEPKHPSEMPQLVKGMKLLNQADPCVQILIQETGEHVLVTAGEVHLQRCLDDLKERFAKIHISVSEPIIPFRETITKPPKVDMVNEEIGKQQKVAVIHQMKEDQSKIPEGIQVDSDGLITITTPNKLATLSVRAMPLPEEVTQILEENSDLIRSMEQLTSSLNEGENTHMIHQKTQEKIWEFKGKLEQHLTGRRWRNIVDQIWSFGPRKCGPNILVNKSEDFQNSVWTGPADKASKEASRYRDLGNSIVSGFQLATLSGPMCEEPLMGVCFVLEKWDLSKFEEQGASDLAKEGQEENETCSGGNENQELQDGCSEAFEKRTSQKGESPLTDCYGPFSGQLIATMKEACRYALQVKPQRLMAAMYTCDIMATGDVLGRVYAVLSKREGRVLQEEMKEGTDMFIIKAVLPVAESFGFADEIRKRTSGLASPQLVFSHWEIIPSDPFWVPTTEEEYLHFGEKADSENQARKYMNAVRKRKGLYVEEKIVEHAEKQRTLSKNK

SEQ ID NO: 7707 - protein, 306 aa, Homo sapiens
MPEAGFQATNAFTECKFTCTSGKCLYLGSLVCNQQNDCGDNSDEENCLLVTEHPPPGIFNSELEFAQIIIIVVVVTVMVVVIVCLLNHYKVSTRSFINRPNQSRRREDGLPQEGCLWPSDSAAPRLGASEIMHAPRSRDRFTAPSFIQRDRFSRFQPTYPYVQHEIDLPPTISLSDGEEPPPYQGPCTLQLRDPEQQMELNRESVRAPPNRTIFDSDLIDIAMYSGGPCPPSSNSGISASTCSSNGRMEGPPPTYSEVMGHHPGASFLHHQRSNAHRGSRLQFQQNNAESTIVPIKGKDRKPGNLV

SEQ ID NO: 7708 - protein, 532 aa, Homo sapiens
MHLKHLRTLLSPQDGAAKVTCMAWSQNNAKFAVCTVDRVVLLYDEHGERRDKFSTKPADMKYGRKSYMVKGMAFSPDSTKIAIGQTDNIIYVYKIGEDWGDKKVICNKFIQTSAVTCLQWPAEYIIVFGLAEGKVRLANTKTNKSSTIYGTESYVVSLTTNCSGKGILSGHADGTIVRYFFDDEGSGESQGKLVNHPCPPYALAWATNSIVAAGCDRKIVAYGKEGHMLQTFDYSRDPQEREFTTAVSSPGGQSVVLGSYDRLRVFNWIPRRSIWEEAKPKEITNLYTITALAWKRDGSRLCVGTLCGGVEQFDCCLRRSIYKNKFELTYVGPSQVIVKNLSSGTRVVLKSHYGYEVEEVKILGKERYLVAHTSETLLLGDLNTNRLSEIAWQGSGGNEKYFFENENVCMIFNAGELTLVEYGNNDTLGSVRTEFMNPHLISVRINERCQRGTEDNKKLAYLIDIKTIAIVDLIGGYNIGTVSHESRVDWLELNETGHKLLFRDRKLRVRRATKALGIGWPTEGVRQAATRD

SEQ ID NO: 7709 - protein, 549 aa, Homo sapiens
MSPTISHKDSSRQRRPGNFSHSLDMKSGPLPPGGWDDSHLDSAGREGDREALLGDTGTGDFLKAPQSFRAELSSILLLLFLYVLQGIPLGLAGSIPLILQSKNVSYTDQAFFSFVFWPFSLKLLWAPLVDAVYVKNFGRRKSWLVPTQYILGLFMIYLSTQVDRLLGNTDDRTPDVIALTVAFFLFEFLAATQDIAVDGWALTMLSRENVGYASTCNSVGQTAGYFLGNVLFLALESADFCNKYLRFQPQPRGIVTLSDFLFFWGTVFLITTTLVALLKKENEVSVVKEETQGITDTYKLLFAIIKMPAVLTFCLLILTAKIGFSAADAVTGLKLVEEGVPKEHLALLAVPMVPLQIILPLIISKYTAGPQPLNTFYKAMPYRLLLGLEYALLVWWTPKVEHQGGFPIYYYIVVLLSYALHQVTVYSMYVSIMAFNAKVSDPLIGGTYMTLLNTVSNLGGNWPSTVALWLVDPLTVKECVGASNQNCRTPDAVELCKKLGGSCVTALDGYYVESIICVFIGFGWWFFLGPKFKKLQDEGSSSWKCKRNN

SEQ ID NO: 7710 - protein, 1960 aa, Homo sapiens [sequence omitted]

SEQ ID NO: 7711 - protein, 410 aa, Homo sapiens
MEGHEASPAQVGQGDRGKVRFLEQQNKVLETKWHLLQQQGLSGSQQGLEPVFEACLDQLRKQLEQLQGERGALDAELKACRDQEEEYKSKYEEEAHRRATLENDFVVLKKDVDGVFLSKMELEGKLEALREYLYFLKHLNEEELGQLQTQASDTSVVLSMDNNRYLDFSSIITEVRARYEEIARSSKAEAEALYQTKYQELQVSAQLHGDRMQETKVQISQLHQEIQRLQSQTENLKKQNASLQAAITDAEQRGELALKDAQAKVDELEAALRMAKQNLARLLCEYQELTSTKLSLDVEIATYRRLLEGEECRMSGECTSQVTISSVGGSAVMSGGVGGGLGSTCGLGSGKGSPGSCCTSIVTGGSNIILGSGKDPVLDSCSVSGSSAGSSCHTILKKTVESSLKTSITY

SEQ ID NO: 7712 - protein, 1411 aa, Homo sapiens
MASISEPVTFREFCPLYYLLNAIPTKIQKGFRSIVVYLTALDTNGDYIAVGSSIGMLYLYCRHLNQMRKYNFEGKTESITVVKLLSCFDDLVAAGTASGRVAVFQLVSSLPGRNKQLRRFDVTGIHKNSITALAWSPNGMKLFSGDDKGKIVYSSLDLDQGLCNSQLVLEEPSSIVQLDYSQKVLLVSTLQRSLLFYTEEKSVRQIGTQPRKSTGKFGACFIPGLCKQSDLTLYASRPGLRLWKADVHGTVQATFILKDAFAGGVKPFELHPRLESPNSGSCSLPERHLGLVSCFFQEGWVLSWNEYSIYLLDTVNQATVAGLEGSGDIVSVSCTENEIFFLKGDRNIIRISSRPEGLTSTVRDGLEMSGCSERVHVQQAEKLPGATVSETRLRGSSMASSVASEPRSRSSSLNSTDSGSGLLPPGLQATPELGKGSQPLSQRFNAISSEDFDQELVVKPIKVKRKKKKKKTEGGSRSTCHSSLESTPCSEFPGDSPQSLNTDLLSMTSSVLGSSVDQLSAESPDQESSFNGEVNGVPQENTDPETFNVLEVSGSMPDSLAEEDDIRTEMPHCHHAHGRELLNGAREDVGGSDVTGLGDEPCPADDGPNSTQLPFQEQDSSPGAHDGEDIQPIGPQSTFCEVPLLNSLTVPSSLSWAPSAEQWLPGTRADEGSPVEPSQEQDILTSMEASGHLSTNLWHAVTDDDTGQKEIPISERVLGSVGGQLTPVSALAASTHKPWLEQPPRDQTLTSSDEEDIYAHGLPSSSSETSVTELGPSCSQQDLSRLGAEDAGLLKPDQFAESWMGYSGPGYGILSLVVSEKYIWCLDYKGGLFCSALPGAGLRWQKFEDAVQQVAVSPSGALLWKIEQKSNRAFACGKVTIKGKRHWYEALPQAVFVALSDDTAWIIRTSGDLYLQTGLSVDRPCARAVKVDCPYPLSQITARNNVVWALTEQRALLYREGVSSFCPEGEQWKCDIVSERQALEPVCITLGDQQTLWALDIHGNLWFRTGIISKKPQGDDDHWWQVSITDYVVFDQCSLFQTIIHATHSVATAAQAPVEKVADKLRMAFWSQQLQCQPSLLGVNNSGVWISSGKNEFHVAKGSLIGTYWNHVVPRGTASATKWAFVLASAAPTKEGSFLWLCQSSKDLCSVSAQSAQSRPSTVQLPPEAEMRAYAACQDALWALDSLGQVFIRTLSKSCPTGMHWTRLDLSQLGAVKLTSLACGNQHIWACDSRGGVYFRVGTQPLNPSLMLPAWIMIEPPVQPAGVSLVSVHSSPNDQMLWVLDSRWNVHVRTGITEEMPVGTAWEHVPGLQACQLALSTRTVWARCPNGDLARRYGVTDKNPAGDYWKKIPGSVSCFTVTASDELWAVGPPGYLLQRLTKTFSHSHGTQKSSQAAMPHPEDLEDEWEVI

SEQ ID NO: 7713 - protein, 507 aa, Homo sapiens
MRIPVDPSTSRRFSPPSSSLQPGKMSDVSPVVAAQQQQQQQQQQQQQQQQQQQQQQQEAAAAAAAAAAAAAAAAAVPRLRPPHDNRTMVEIIADHPAELVRTDSPNFLCSVLPSHWRCNKTLPVAFKVVALGEVPDGTVVTVMAGNDENYSAELRNASAVMKNQVARFNDLRFVGRSGRGKSFTLTITVFTNPPQVATYHRAIKVTVDGPREPRRHRQKLDDSKPSLFSDRLSDLGRIPHPSMRVGVPPQNPRPSLNSAPSPFNPQGQSQITDPRQAQSSPPWSYDQSYPSYLSQMTSPSIHSTTPLSSTRGTGLPAITDVPRRISDDDTATSDFCLWPSTLSKKSQAGASELGPFSDPRQFPSISSLTESRFSNPRMHYPATFTYTPPVTSGMSLGMSATTHYHTYLPPPYPGSSQSQSGPFQTSSTPYLYYGTSSGSYQFPMVPGGDRSPSRMLPPCTTTSNGSTLLNPNLPNQNDGVDADGSHSSSPTVLNSSGRMDESVWRPY

SEQ ID NO: 7714 - protein, 1632 aa, Homo sapiens
MPARTAPARVPTLAVPAISLPDDVRRRLKDLERDSLTEKECVKEKLNLLHEFLQTEIKNQLCDLETKLRKEELSEEGYLAKVKSLLNKDLSLENGAHAYNREVNGRLENGNQARSEARRVGMADANSPPKPLSKPRTPRRSKSDGEAKRSRDPPASASQVTGIRAEPSPSPRITRKSTRQTTITSHFAKGPAKRKPQEESERAKSDESIKEEDKDQDEKRRRVTSRERVARPLPAEEPERAKSGTRTEKEEERDEKEEKRLRSQTKEPTPKQKLKEEPDREARAGVQADEDEDGDEKDEKKHRSQPKDLAAKRRPEEKEPEKVNPQISDEKDEDEKEEKRRKTTPKEPTEKKMARAKTVMNSKTHPPKCIQCGQYLDDPDLKYGQHPPDAVDEPQMLTNEKLSIFDANESGFESYEALPQHKLTCFSVYCKHGHLCPIDTGLIEKNIELFFSGSAKPIYDDDPSLEGGVNGKNLGPINEWWITGFDGGEKALIGFSTSFAEYILMDPSPEYAPIFGLMQEKIYISKIVVEFLQSNSDSTYEDLINKIETTVPPSGLNLNRFTEDSLLRHAQFVVEQVESYDEAGDSDEQPIFLTPCMRDLIKLAGVTLGQRRAQARRQTIRHSTREKDRGPTKATTTKLVYQIFDTFFAEQIEKDDREDKENAFKRRRCGVCEVCQQPECGKCKACKDMVKFGGSGRSKQACQERRCPNMAMKEADDDEEVDDNIPEMPSPKKMHQGKKKKQNKNRISWVGEAVKTDGKKSYYKKVCIDAETLEVGDCVSVIPDDSSKPLYLARVTALWEDSSNGQMFHAHWFCAGTDTVLGATSDPLELFLVDECEDMQLSYIHSKVKVIYKAPSENWAMEGGMDPESLLEGDDGKTYFYQLWYDQDYARFESPPKTQPTEDNKFKFCVSCARLAEMRQKEIPRVLEQLEDLDSRVLYYSATKNGILYRVGDGVYLPPEAFTFNIKLSSPVKRPRKEPVDEDLYPEHYRKYSDYIKGSNLDAPEPYRIGRIKEIFCPKKSNGRPNETDIKIRVNKFYRPENTHKSTPASYHADINLLYWSDEEAVVDFKAVQGRCTVEYGEDLPECVQVYSMGGPNRFYFLEAYNAKSKSFEDPPNHARSPGNKGKGKGKGKGKPKSQACEPSEPEIEIKLPKLRTLDVFSGCGGLSEGFHQAGISDTLWAIEMWDPAAQAFRLNNPGSTVFTEDCNILLKLVMAGETTNSRGQRLPQKGDVEMLCGGPPCQGFSGMNRFNSRTYSKFKNSLVVSFLSYCDYYRPRFFLLENVRNFVSFKRSMVLKLTLRCLVRMGYQCTFGVLQAGQYGVAQTRRRAIILAAAPGEKLPLFPEPLHVFAPRACQLSVVVDDKKFVSNITRLSSGPFRTITVRDTMSDLPEVRNGASALEISYNGEPQSWFQRQLRGAQYQPILRDHICKDMSALVAARMRHIPLAPGSDWRDLPNIEVRLSDGTMARKLRYTHHDRKNGRSSSGALRGVCSCVEAGKACDPAARQFNTLIPWCLPHTGNRHNHWAGLYGRLEWDGFFSTTVTNPEPMGKQGRVLHPEQHRVVSVRECARSQGFPDTYRLFGNILDKHRQVGNAVPPPLAKAIGLEIKLCMLAKARESASAKIKEEEAAKD

SEQ ID NO: 7715 - protein, 483 aa, Homo sapiens
MTKMDIRGAVDAAVPTNIIAAKAAEVRANKVNWQSYLQGQMISAEDCEFIQRFEMKRSPEEKQEMLQTEGSQCAKTFINLMTHICKEQTVQYILTMVDDMLQENHQRVSIFFDYARCSKNTAWPYFLPMLNRQDPFTVHMAARIIAKLAAWGKELMEGSDLNYYFNWIKTQLSSQKLRGSGVAVETGTVSSSDSSQYVQCVAGCLQLMLRVNEYRFAWVEADGVNCIMGVLSNKCGFQLQYQMIFSIWLLAFSPQMCEHLRRYNIIPVLSDILQESVKEKVTRIILAAFRNFLEKSTERETRQEYALAMIQCKVLKQLENLEQQKYDDEDISEDIKFLLEKLGESVQDLSSFDEYSSELKSGRLEWSPVHKSEKFWRENAVRLNEKNYELLKILTKLLEVSDDPQVLAVAAHDVGEYVRHYPRGKRVIEQLGGKQLVMNHMHHEDQQVRYNALLAVQKLMVHNWEYLGKQLQSEQPQTAAARS

SEQ ID NO: 7716 - protein, 499 aa, Homo sapiens
MVDRGPLLTSAIIFYLAIGAAIFEVLEEPHWKEAKKNYYTQKLHLLKEFPCLGQEGLDKILEVVSDAAGQGVAITGNQTFNNWNWPNAMIFAATVITTIGYGNVAPKTPAGRLFCVFYGLFGVPLCLTWISALGKFFGGRAKRLGQFLTKRGVSLRKAQITCTVIFIVWGVLVHLVIPPFVFMVTEGWNYIEGLYYSFITISTIGFGDFVAGVNPSANYHALYRYFVELWIYLGLAWLSLFVNWKVSMFVEVHKAIKKRRRRRKESFESSPHSRKALQVKGSTASKDVNIFSFLSKKEETYNDLIKQIGKKAMKTSGGGETGPGPGLGPQGGGLPALPPSLVPLVVYSKNRVPTLEEVSQTLRSKGHVSRSPDEEAVARAPEDSSPAPEVFMNQLDRISEECEPWDAQDYHPLIFQDASITFVNTEAGLSDEETSKSSLEDNLAGEESPQQGAEAKAPLNMGEFPSSSESTFTSTESELSVPYEQLMNEYNKANSPKGT

SEQ ID NO: 7717 - protein, 1227 aa, Homo sapiens
MVDPVGFAEAWKAQFPDSEPPRMELRSVGDIEQELERCKASIRRLEQEVNQERFRMIYLQTLLAKEKKSYDRQRWGFRRAAQAPDGASEPRASASRPQPAPADGADPPPAEEPEARPDGEGSPGKARPGTARRPGAAASGERDDRGPPASVAALRSNFERIRKGHGQPGADAEKPFYVNVEFHHERGLVKVNDKEVSDRISSLGSQAMQMERKKSQHGAGSSVGDASRPPYRGRSSESSCGVDGDYEDAELNPRFLKDNLIDANGGSRPPWPPLEYQPYQSIYVGGMMEGEGKGPLLRSQSTSEQEKRLTWPRRSYSPRSFEDCGGGYTPDCSSNENLTSSEEDFSSGQSSRVSPSPTTYRMFRDKSRSPSQNSQQSFDSSSPPTPQCHKRHRHCPVVVSEATIVGVRKTGQIWPNDGEGAFHGDADGSFGTPPGYGCAADRAEEQRRHQDGLPYIDDSPSSSPHLSSKGRGSRDALVSGALESTKASELDLEKGLEMRKWVLSGILASEETYLSHLEALLLPMKPLKAAATTSQPVLTSQQIETIFFKVPELYEIHKEFYDGLFPRVQQWSHQQRVGDLFQKLASQLGVYRAFVDNYGVAMEMAEKCCQANAQFAEISENLRARSNKDAKDPTTKNSLETLLYKPVDRVTRSTLVLHDLLKHTPASHPDHPLLQDALRISQNFLSSINEEITPRRQSMTVKKGEHRQLLKDSFMVELVEGARKLRHVFLFTDLLLCTKLKKQSGGKTQQYDCKWYIPLTDLSFQMVDELEAVPNIPLVPDEELDALKIKISQIKNDIQREKRANKGSKATERLKKKLSEQESLLLLMSPSMAFRVHSRNGKSYTFLISSDYERAEWRENIREQQKKCFRSFSLTSVELQMLTNSCVKLQTVHSIPLTINKEDDESPGLYGFLNVIVHSATGFKQSSNLYCTLEVDSFGYFVNKAKTRVYRDTAEPNWNELDPQALQDRDWQRTVIAMNGIEVKLSVKFNSREFSLKRMPSRKQTGVFGVKIAVVTKRERSKVPYIVRQCVEEIERRGMEEVGIYRVSGVATDIQALKAAFDVNNKDVSVMMSEMDVNAIAGTLKLYFRELPEPLFTDEFYPNFAEGIALSDPVAKESCMLNLLLSLPEANLLTFLFLLDHLKRVAEKEAVNKMSLHNLATVFGPTLLRPSEKESKLPANPSQPITMTDSWSLEVMSQVQVLLYFLQLEAIPAPDSKRQSILFSTEV

SEQ ID NO: 7718 - protein, 795 aa, Homo sapiens
MATMLEGRCQTQPRSSPSGREASLWSSGFGMKLEAVTPFLGKYRPFVGRCCQTCTPKSWESLFHRSITDLGFCNVILVKEENTRFRGWLVRRLCYFLWSLEQHIPPCQDVPQKIMESTGVQNLLSGRVPGGTGEGQVPDLVKKEVQRILGHIQAPPRPFLVRLFSWALLRFLNCLFLNVQLHKGQMKMVQKAAQAGLPLVLLSTHKTLLDGILLPFMLLSQGLGVLRVAWDSRACSPALRALLRKLGGLFLPPEASLSLDSSEGLLARAVVQAVIEQLLVSGQPLLIFLEEPPGALGPRLSALGQAWVGFVVQAVQVGIVPDALLVPVAVTYDLVPDAPCDIDHASAPLGLWTGALAVLRSLWSRWGCSHRICSRVHLAQPFSLQEYIVSARSCWGGRQTLEQLLQPIVLGQCTAVPDTEKEQEWTPITGPLLALKEEDQLLVRRLSCHVLSASVGSSAVMSTAIMATLLLFKHQKLLGEFSWLTEEILLRGFDVGFSGQLRSLLQHSLSLLRAHVALLRIRQGDLLVVPQPGPGLTHLAQLSAELLPVFLSEAVGACAVRGLLAGRVPPQGPWELQGILLLSQNELYRQILLLMHLLPQDLLLLKPCQSSYCYCQEVLDRLIQCGLLVAEETPGSRPACDTGRQRLSRKLLWKPSGDFTDSDSDDFGEADGRYFRLSQQSHCPDFFLFLCRLLSPLLKAFAQAAAFLRQGQLPDTELGYTEQLFQFLQATAQEEGIFECADPKLAISAVWTFRDLGVLQQTPSPAGPRLHLSPTFASLDNQEKLEQFIRQFICS

SEQ ID NO: 7719 - protein, 326 aa, Homo sapiens
MAPPAGGAAAAASDLGSAAVLLAVHAAVRPLGAGPDAEAQLRRLQLSADPERPGRFRLELLGAGPGAVNLEWPLESVSYTIRGPTQHELQPPPGGPGTLSLHFLNPQEAQRWAVLVRGATVEGQNGSKSNSPPALGPEACPVSLPSPPEASTLKGPPPEADLPRSPGNLTEREELAGSLARAIAGGDEKGAAQVAAVLAQHRVALSVQLQEACFPPGPIRLQVTLEDAASAASAASSAHVALQVHPHCTVAALQEQVFSELGFPPAVQRWVIGRCLCVPERSLASYGVRQDGDPAFLYLLSAPREAPAQLVLSFLHLHQCPRPPWL

SEQ ID NO: 7720 - protein, 508 aa, Homo sapiens
MQFSGEKISGQRDLQKSKMRFTFTSRCLALFLLLNHPTPILPAFSNQTYPTIEPKPFLYVVGRKKMMDAQYKCYDRMQQLPAYQGEGPYCNRTWDGWLCWDDTPAGVLSYQFCPDYFPDFDPSEKVTKYCDEKGVWFKHPENNRTWSNYTMCNAFTPEKLKNAYVLYYLAIVGHSLSIFTLVISLGIFVFFRKLTTIFPLNWKYRKALSLGCQRVTLHKNMFLTYILNSMIIIIHLVEVVPNGELVRRDPVSCKILHFFHQYMMACNYFWMLCEGIYLHTLIVVAVFTEKQRLRWYYLLGWGFPLVPTTIHAITRAVYFNDNCWLSVETHLLYIIHGPVMAALVVNFFFLLNIVRVLVTKMRETHEAESHMYLKAVKATMILVPLLGIQFVVFPWRPSNKMLGKIYDYVMHSLIHFQGFFVATIYCFCNNEVQTTVKRQWAQFKIQWNQRWGRRPSNRSARAAAAAAEAGDIPIYICHQELRNEPANNQGEESAEIIPLNIIEQESSA

SEQ ID NO: 7721 - protein, 640 aa, Homo sapiens
MNKLRQSFRRKKDVYVPEASRPHQWQTDEEGVRTGKCSFPVKYLGHVEVDESRGMHICEDAVKRLKATGKKAVKAVLWVSADGLRVVDEKTKDLIVDQTIEKVSFCAPDRNFDRAFSYICRDGTTRRWICHCFMAVKDTGERLSHAVGCAFAACLERKQKREKECGVTATFDASRTTFTREGSFRVTTATEQAEREEIMKQMQDAKKAETDKIVVGSSVAPGNTAPSPSSPTSPTSDATTSLEMNNPHAIPRRHAPIEQLARQGSFRGFPALSQKMSPFKRQLSLRINELPSTMQRKTDFPIKNAVPEVEGEAESISSLCSQITNAFSTPEDPFSSAPMTKPVTVVAPQSPTFQANGTDSAFHVLAKPAHTALAPVAMPVRETNPWAHAPDAANKEIAATCSGTEWGQSSGAASPGLFQAGHRRTPSEADRWLEEVSKSVRAQQPQASAAPLQPVLQPPPPTAISQPASPFQGNAFLTSQPVPVGVVPALQPAFVPAQSYPVANGMPYPAPNVPVVGITPSQMVANVFGTAGHPQAAHPHQSPSLVRQQTFPHYEASSATTSPFFKPPAQHLNGSAAFNGVDDGRLASADRHTEVPTGTCPVDPFEAQWAALENKSKQRTNPSPTNPFSSDLQKTFEIEL

SEQ ID NO: 7722 - protein, 3336 aa, Homo sapiens
MEVEQEQRRRKVEAGRTKLAHFRQRKTKGDSSHSEKKTAKRKGSAVDASVQEESPVTKEDSALCGGGDICKSTSCDDTPDGAGGAFAAQPEDCDGEKREDLEQLQQKQVNDHPPEQCGMFTVSDHPPEQHGMFTVGDHPPEQRGMFTVSDHPPEQHGMFTVSDHPPEQRGMFTISDHQPEQRGMFTVSDHTPEQRGIFTISDHPAEQRGMFTKECEQECELAITDLESGREDEAGLHQSQAVHGLELEALRLSLSNMHTAQLELTQANLQKEKETALTELREMLNSRRAQELALLQSRQQHELELLREQHAREKEEVVLRCGQEAAELKEKLQSEMEKNAQIVKTLKEDWESEKDLCLENLRKELSAKHQSEMEDLQNQFQKELAEQRAELEKIFQDKNQAERALRNLESHHQAAIEKLREDLQSEHGRCLEDLEFKFKESEKEKQLELENLQASYEDLKAQSQEEIRRLWSQLDSARTSRQELSELHEQLLARTSRVEDLEQLKQREKTQHESELEQLRIYFEKKLRDAEKTYQEDLTLLQQRLQGAREDALLDSVEVGLSCVGLEEKPEKGRKDHVDELEPERHKESLPRFQAELEESHRHQLEALESPLCIQHEGHVSDRCCVETSALGHEWRLEPSEGHSQELPWVHLQGVQDGDLEADTERAARVLGLETEHKVQLSLLQTELKEEIELLKIENRNLYGKLQHETRLKDDLEKVKHNLIEDHQKELNNAKQKTELMKQEFQRKETDWKVMKEELQREAEEKLTLMLLELREKAESEKQTIINKFELREAEMRQLQDQQAAQILDLERSLTEQQGRLQQLEQDLTSDDALHCSQCGREPPTAQDGELAALHVKEDCALQLMLARSRFLEERKEITEKFSAEQDAFLQEAQEQHARELQLLQERHQQQLLSVTAELEARHQAALGELTASLESKQGALLAARVAELQTKHAADLGALETRHLSSLDSLESCYLSEFQTIREEHRQALELLRADFEEQLWKKDSLHQTILTQELEKLKRKHEGELQSVRDHLRTEVSTELAGTVAHELQGVHQGEFGSEKKTALHEKEETLRLQSAQAQPFHQEEKESLSLQLQKKNHQVQQLKDQVLSLSHEIEECRSELEVLQQRRERENREGANLLSMLKADVNLSHSERGALQDALRRLLGLFGETLRAAVTLRSRIGERVGLCLDDAGAGLALSTAPALEETWSDVALPELDRTLSECAEMSSVAEISSHMRESFLMSPESVRECEQPIRRVFQSLSLAVDGLMEMALDSSRQLEEARQIHSRFEKEFSFKNEETAQVVRKHQELLECLKEESAAKAELALELHKTQGTLEGFKVETADLKEVLAGKEDSEHRLVLELESLRRQLQQAAQEQAALREECTRLWSRGEATATDAEAREAALRKEVEDLTKEQSETRKQAEKDRSALLSQMKILESELEEQLSQHRGCAKQAEAVTALEQQVASLDKHLRNQRQFMDEQAAEREHEREEFQQEIQRLEGQLRQAAKPQPWGPRDSQQAPLDGEVELLQQKLREKLDEFNELAIQKESADRQVLMQEEEIKRLEEMNINIRKKVAQLQEEVEKQKNIVKGLEQDKEVLKKQQMSSLLLASTLQSTLDAGRCPEPPSGSPPEGPEIQLEVTQRALLRRESEVLDLKEQLEKMKGDLESKNEEILHLNLKLDMQNSQTAVSLRELEEENTSLKVIYTRSSEIEELKATIENLQENQKRLQKEKAEEIEQLHEVIEKLQHELSLMGPVVHEVSDSQAGSLQSELLCSQAGGPRGQALQGELEAALEAKEALSRLLADQERRHSQALEALQQRLQGAEEAAELQLAELERNVALREAEVEDMASRIQEFEAALKAKEATIAERNLEIDALNQRKAAHSAELEAVLLALARIRRALEQQPLAAGAAPPELQWLRAQCARLSRQLQVLHQRFLRCQVELDRRQARRATAHTRVPGAHPQPRMDGGAKAQVTGDVEASHDAALEPVVPDPQGDLQPVLVTLKDAPLCKQEGVMSVLTVCQRQLQSELLLVKNEMRLSLEDGGKGKEKVLEDCQLPKVDLVAQVKQLQEKLNRLLYSMTFQNVDAADTKSLWPMASAHLLESSWSDDSCDGEEPDISPHIDTCDANTATGGVTDVIKNQAIDACDANTTPGGVTDVIKNWDSLIPDEMPDSPIQEKSECQDMSLSSPTSVLGGSRHQSHTAEAGPRKSPVGMLDLSSWSSPEVLRKDWTLEPWPSLPVTPHSGALSLCSADTSLGDRADTSLPQTQGPGLLCSPGVSAAALALQWAESPPADDHHVQRTAVEKDVEDFITTSFDSQETLSSPPPGLEGKADRSEKSDGSGFGARLSPGSGGPEAQTAGPVTPASISGRFQPLPEAMKEKEVRPKHVKALLQMVRDESHQILALSEGLAPPSGEPHPPRKEDEIQDISLHGGKTQEVPTACPDWRGDLLQVVQEAFEKEQEMQGVELQPRLSGSDLGGHSSLLERLEKIIREQGDLQEKSLEHLRLPDRSSLLSEIQALRAQLRMTHLQNQEKLQHLRTALTSAEARGSQQEHQLRRQVELLAYKVEQEKCIAGDLQKTLSEEQEKANSVQKLLAAEQTVVRDLKSDLCESRQKSEQLSRSLCEVQQEVLQLRSMLSSKENELKAALQELESEQGKGRALQSQLEEEQLRHLQRESQSAKALEELRASLETQRAQSSRLCVALKHEQTAKDNLQKELRIEHSRCEALLAQERSQLSELQKDLAAEKSRTLELSEALRHERLLTEQLSQRTQEACVHQDTQAHHALLQKLKEEKSRVVDLQAMLEKVQQQALHSQQQLEAEAQKHCEALRREKEVSATLKSTVEALHTQKRELRCSLEREREKPAWLQAELEQSHPRLKEQEGRKAARRSAEARQSPAAAEQWRKWQRDKEKLRELELQRQRDLHKIKQLQQTVRDLESKDEVPGSRLHLGSARRAAGSDADHLREQQRELEAMRQRLLSAARLLTSFTSQAVDRTVNDWTSSNEKAVMSLLHTLEELKSDLSRPTSSQKKMAAELQFQFVDVLLKDNVSLTKALSTVTQEKLELSRAVSKLEKLLKHHLQKGCSPSRSERSAWKPDETAPQSSLRRPDPGRLPPAASEEAHTSNVKMEKLYLHYLRAESFRKALIYQKKYLLLLIGGFQDSEQETLSMIAHLGVFPSKAERKITSRPFTRFRTAVRVVIAILRLRFLVKKWQEVDRKGALAQGKAPRPGPRARQPQSPPRTRESPPTRDVPSGHTRDPARGRRLAAAASPHSGGRATPSPNSRLERSLTASQDPEHSLTEYIHHLEVIQQRLGGVLPDSTSKKSCHPMIKQ

SEQ ID NO: 7723 - protein, 1188 aa, Homo sapiens
MVPCWNHGNITRSKAEELLSRTGKDGSFLVRASESISRAYALCVLYRNCVYTYRILPNEDDKFTVQASEGVSMRFFTKLDQLIEFYKKENMGLVTHLQYPVPLEEEDTGDDPEEDTESVVSPPELPPRNIPLTASSCEAKEVPFSNENPRATETSRPSLSETLFQRLQSMDTSGLPEEHLKAIQDYLSTQLAQDSEFVKTGSSSLPHLKKLTTLLCKELYGEVIRTLPSLESLQRLFDQQLSPGLRPRPQVPGEANPINMVSKLSQLTSLLSSIEDKVKALLHEGPESPHRPSLIPPVTFEVKAESLGIPQKMQLKVDVESGKLIIKKSKDGSEDKFYSHKKILQLIKSQKFLNKLVILVETEKEKILRKEYVFADSKKREGFCQLLQQMKNKHSEQPEPDMITIFIGTWNMGNAPPPKKITSWFLSKGQGKTRDDSADYIPHDIYVIGTQEDPLSEKEWLEILKHSLQEITSVTFKTVAIHTLWNIRIVVLAKPEHENRISHICTDNVKTGIANTLGNKGAVGVSFMFNGTSLGFVNSHLTSGSEKKLRRNQNYMNILRFLALGDKKLSPFNITHRFTHLFWFGDLNYRVDLPTWEAETIIQKIKQQQYADLLSHDQLLTERREQKVFLHFEEEEITFAPTYRFERLTRDKYAYTKQKATGMKYNLPSWCDRVLWKSYPLVHVVCQSYGSTSDIMTSDHSPVFATFEAGVTSQFVSKNGPGTVDSQGQIEFLRCYATLKTKSQTKFYLEFHSSCLESFVKSQEGENEEGSEGELVVKFGETLPKLKPIISDPEYLLDQHILISIKSSDSDESYGEGCIALRLEATETQLPIYTPLTHHGELTGHFQGEIKLQTSQGKTREKLYDFVKTERDESSGPKTLKSLTSHDPMKQWEVTSRAPPCSGSSITEIINPNYMGVGPFGPPMPLHVKQTLSPDQQPTAWSYDQPPKDSPLGPCRGESPPTPPGQPPISPKKFLPSTANRGLPPRTQESRPSDLGKNAGDTLPQEDLPLTKPEMFENPLYGSLSSFPKPAPRKDQESPKMPRKEPPPCPEPGILSPSIVLTKAQEADRGEGPGKQVPAPRLRSFTCSSSAEGRAAGGDKSQGKPKTPVSSQAPVPAKRPIKPSRSEINQQTPPTPTPRPPLPVKSPAVLHLQHSKGRDYRDNTELPHHGKHRPEEGPPGPLGRTAMQ

SEQ ID NO: 7724 - protein, 1515 aa, Homo sapiens
MEPRSMEYFCAQVQQKDVGGRLQVGQELLLYLGAPGAISDLEEDLGRLGKTVDALTGWVGSSNYRVSLMGLEILSAFVDRLSTRFKSYVAMVIVALIDRMGDAKDKVRDEAQTLILKLMDQVAPPMYIWEQLASGFKHKNFRSREGVCLCLIETLNIFGAQPLVISKLIPHLCILFGDSNSQVRDAAILAIVEIYRHVGEKVRMDLYKRGIPPARLEMIFAKFDEVQSSGGMILSVCKDKSFDDEESVDGNRPSSAASAFKVPAPKTSGNPANSARKPGSAGGPKVGAGASKEGGAGAVDEDDFIKAFTDVPSIQIYSSRELEETLNKIREILSDDKHDWDQRANALKKIRSLLVAGAAQYDCFFQHLRLLDGALKLSAKDLRSQVVREACITVAHLSTVLGNKFDHGAEAIVPTLFNLVPNSAKVMATSGCAAIRFIIRHTHVPRLIPLITSNCTSKSVPVRRRSFEFLDLLLQEWQTHSLERHAAVLVETIKKGIHDADAEARVEARKTYMGLRNHFPGEAETLYNSLEPSYQKSLQTYLKSSGSVASLPQSDRSSSSSQESLNRPFSSKWSTANPSTVAGRVSAGSSKASSLPGSLQRSRSDIDVNAAAGAKAHHAAGQSVRSGRLGAGALNAGSYASLEDTSDKLDGTASEDGRVRAKLSAPLAGMGNAKADSRGRSRTKMVSQSQPGSRSGSPGRVLTTTALSTVSSGVQRVLVNSASAQKRSKIPRSQGCSREASPSRLSVARSSRIPRPSVSQGCSREASRESSRDTSPVRSFQPLGPGYGISQSSRLSSSVSAMRVLNTGSDVEEAVADALLLGDIRTKKKPARRRYESYGMHSDDDANSDASSACSERSYSSRNGSIPTYMRQTEDVAEVLNRCASSNWSERKEGLLGLQNLLKNQRTLSRVELKRLCEIFTRMFADPHGKRVFSMFLETLVDFIQVHKDDLQDWLFVLLTQLLKKMGADLLGSVQAKVQKALDVTRESFPNDLQFNILMRFTVDQTQTPSLKVKVAILKYIETLAKQMDPGDFINSSETRLAVSRVITWTTEPKSSDVRKAAQSVLISLFELNTPEFTMLLGALPKTFQDGATKLLHNHLRNTGNGTQSSMGSPLTRPTPRSPANWSSPLTSPTNTSQNTLSPSAFDYDTENMNSEDIYSSLRGVTEAIQNFSFRSQEDMNEPLKRDSKKDDGDSMCGGPGMSDPRAGGDATDSSQTALDNKASLLHSMPTHSSPRSRDYNPYNYSDSISPFNKSALKEAMFDDDADQFPDDLSLDHSDLVAELLKELSNHNERVEERKIALYELMKLTQEESFSVWDEHFKTILLLLLETLGDKEPTIRALALKVLREILRHQPARFKNYAELTVMKTLEAHKDPHKEVVRSAEEAASVLATSISPEQCIKVLCPIIQTADYPINLAAIKMQTKVIERVSKETLNLLLPEIMPGLIQGYDNSESSVRKACVFCLVAVHAVIGDELKPHLSQLTGSKMKLLNLYIKRAQTGSGGADPTTDVSGQS

SEQ ID NO: 7725 - protein, 713 aa, Homo sapiens
MLLATLLLLLLGGALAHPDRIIFPNHACEDPPAVLLEVQGTLQRPLVRDSRTSPANCTWLILGSKEQTVTIRFQKLHLACGSERLTLRSPLQPLISLCEAPPSPLQLPGGNVTITYSYAGARAPMGQGFLLSYSQDWLMCLQEEFQCLNHRCVSAVQRCDGVDACGDGSDEAGCSSDPFPGLTPRPVPSLPCNVTLEDFYGVFSSPGYTHLASVSHPQSCHWLLDPHDGRRLAVRFTALDLGFGDAVHVYDGPGPPESSRLLRSLTHFSNGKAVTVETLSGQAVVSYHTVAWSNGRGFNATYHVRGYCLPWDRPCGLGSGLGAGEGLGERCYSEAQRCDGSWDCADGTDEEDCPGCPPGHFPCGAAGTSGATACYLPADRCNYQTFCADGADERRCRHCQPGNFRCRDEKCVYETWVCDGQPDCADGSDEWDCSYVLPRKVITAAVIGSLVCGLLLVIALGCTCKLYAIRTQEYSIFAPLSRMEAEIVQQQAPPSYGQLIAQGAIPPVEDFPTENPNDNSVLGNLRSLLQILRQDMTPGGGPGARRRQRGRLMRRLVRRLRRWGLLPRTNTPARASEARSQVTPSAAPLEALDGGTGPAREGGAVGGQDGEQAPPLPIKAPLPSASTSPAPTTVPEAPGPLPSLPLEPSLLSGVVQALRGRLLPSLGPPGPTRSPPGPHTAVLALEDEDDVLLVPLAEPGVWVAEAEDEPLLT

SEQ ID NO: 7726 - protein, 5038 aa, Homo sapiens
MGDAEGEDEVQFLRTDDEVVLQCSATVLKEQLKLCLAAEGFGNRLCFLEPTSNAQNVPPDLAICCFVLEQSLSVRALQEMLANTVEAGVESSQGGGHRTLLYGHAILLRHAHSRMYLSCLTTSRSMTDKLAFDVGLQEDATGEACWWTMHPASKQRSEGEKVRVGDDIILVSVSSERYLHLSTASGELQVDASFMQTLWNMNPICSRCEEGFVTGGHVLRLFHGHMDECLTISPADSDDQRRLVYYEGGAVCTHARSLWRLEPLRISWSGSHLRWGQPLRVRHVTTGQYLALTEDQGLVVVDASKAHTKATSFCFRISKEKLDVAPKRDVEGMGPPEIKYGESLCFVQHVASGLWLTYAAPDPKALRLGVLKKKAMLHQEGHMDDALSLTRCQQEESQAARMIHSTNGLYNQFIKSLDSFSGKPRGSGPPAGTALPIEGVILSLQDLIIYFEPPSEDLQHEEKQSKLRSLRNRQSLFQEEGMLSMVLNCIDRLNVYTTAAHFAEFAGEEAAESWKEIVNLLYELLASLIRGNRSNCALFSTNLDWLVSKLDRLEASSGILEVLYCVLIESPEVLNIIQENHIKSIISLLDKHGRNHKVLDVLCSLCVCNGVAVRSNQDLITENLLPGRELLLQTNLINYVTSIRPNIFVGRAEGTTQYSKWYFEVMVDEVTPFLTAQATHLRVGWALTEGYTPYPGAGEGWGGNGVGDDLYSYGFDGLHLWTGHVARPVTSPGQHLLAPEDVISCCLDLSVPSISFRINGCPVQGVFESFNLDGLFFPVVSFSAGVKVRFLLGGRHGEFKFLPPPGYAPCHEAVLPRERLHLEPIKEYRREGPRGPHLVGPSRCLSHTDFVPCPVDTVQIVLPPHLERIREKLAENIHELWALTRIEQGWTYGPVRDDNKRLHPCLVDFHSLPEPERNYNLQMSGETLKTLLALGCHVGMADEKAEDNLKKTKLPKTYMMSNGYKPAPLDLSHVRLTPAQTTLVDRLAENGHNVWARDRVGQGWSYSAVQDIPARRNPRLVPYRLLDEATKRSNRDSLCQAVRTLLGYGYNIEPPDQEPSQVENQSRCDRVRIFRAEKSYTVQSGRWYFEFEAVTTGEMRVGWARPELRPDVELGADELAYVFNGHRGQRWHLGSEPFGRPWQPGDVVGCMIDLTENTIIFTLNGEVLMSDSGSETAFREIEIGDGFLPVCSLGPGQVGHLNLGQDVSSLRFFAICGLQEGFEPFAINMQRPVTTWFSKGLPQFEPVPLEHPHYEVSRVDGTVDTPPCLRLTHRTWGSQNSLVEMLFLRLSLPVQFHQHFRCTAGATPLAPPGLQPPAEDEARAAEPDPDYENLRRSAGGWSEAENGKEGTAKEGAPGGTPQAGGEAQPARAENEKDATTEKNKKRGFLFKAKKVAMMTQPPATPTLPRLPHDVVPADNRDDPEIILNTTTYYYSVRVFAGQEPSCVWAGWVTPDYHQHDMSFDLSKVRVVTVTMGDEQGNVHSSLKCSNCYMVWGGDFVSPGQQGRISHTDLVIGCLVDLATGLMTFTANGKESNTFFQVEPNTKLFPAVFVLPTHQNVIQFELGKQKNIMPLSAAMFQSERKNPAPQCPPRLEMQMLMPVSWSRMPNHFLQVETRRAGERLGWAVQCQEPLTMMALHIPEENRCMDILELSERLDLQRFHSHTLRLYRAVCALGNNRVAHALCSHVDQAQLLHALEDAHLPGPLRAGYYDLLISIHLESACRSRRSMLSEYIVPLTPETRAITLFPPGRSTENGHPRHGLPGVGVTTSLRPPHHFSPPCFVAALPAAGAAEAPARLSPAIPLEALRDKALRMLGEAVRDGGQHARDPVGGSVEFQFVPVLKLVSTLLVMGIFGDEDVKQILKMIEPEVFTEEEEEEDEEEEGEEEDEEEKEEDEEETAQEKEDEEKEEEEAAEGEKEEGLEEGLLQMKLPESVKLQMCHLLEYFCDQELQHRVESLAAFAERYVDKLQANQRSRYGLLIKAFSMTAAETARRTREFRSPPQEQINMLLQFKDGTDEEDCPLPEEIRQDLLDFHQDLLAHCGIQLDGEEEEPEEETTLGSRLMSLLEKVRLVKKKEEKPEEERSAEESKPRSLQELVSHMVVRWAQEDFVQSPELVRAMFSLLHRQYDGLGELLRALPRAYTISPSSVEDTMSLLECLGQIRSLLIVQMGPQEENLMIQSIGNIMNNKVFYQHPNLMRALGMHETVMEVMVNVLGGGESKEIRFPKMVTSCCRFLCYFCRISRQNQRSMFDHLSYLLENSGIGLGMQGSTPLDVAAASVIDNNELALALQEQDLEKVVSYLAGCGLQSCPMLVAKGYPDIGWNPCGGERYLDFLRFAVFVNGESVEENANVVVRLLIRKPECFGPALRGEGGSGLLAAIEEAIRISEDPARDGPGIRRDRRREHFGEEPPEENRVHLGHAIMSFYAALIDLLGRCAPEMHLIQAGKGEALRIRAILRSLVPLEDLVGIISLPLQIPTLGKDGALVQPKMSASFVPDHKASMVLFLDRVYGIENQDFLLHVLDVGFLPDMRAAASLDTATFSTTEMALALNRYLCLAVLPLITKCAPLFAGTEHRAIMVDSMLHTVYRLSRGRSLTKAQRDVIEDCLMSLCRYIRPSMLQHLLRRLVFDVPILNEFAKMPLKLLTNHYERCWKYYCLPTGWANFGVTSEEELHLTRKLFWGIFDSLAHKKYDPELYRMAMPCLCAIAGALPPDYVDASYSSKAEKKATVDAEGNFDPRPVETLNVIIPEKLDSFINKFAEYTHEKWAFDKIQNNWSYGENIDEELKTHPMLRPYKTFSEKDKEIYRWPIKESLKAMIAWEWTIEKAREGEEEKTEKKKTRKISQSAQTYDPREGYNPQPPDLSAVTLSRELQAMAEQLAENYHNTWGRKKKQELEAKGGGTHPLLVPYDTLTAKEKARDREKAQELLKFLQMNGYAVTRGLKDMELDSSSIEKRFAFGFLQQLLRWMDISQEFIAHLEAVVSSGRVEKSPHEQEIKFFAKILLPLINQYFTNHCLYFLSTPAKVLGSGGHASNKEKEMITSLFCKLAALVRHRVSLFGTDAPAVVNCLHILARSLDARTVMKSGPEIVKAGLRSFFESASEDIEKMVENLRLGKVSQARTQVKGVGQNLTYTTVALLPVLTTLFQHIAQHQFGDDVILDDVQVSCYRTLCSIYSLGTTKNTYVEKLRPALGECLARLAAAMPVAFLEPQLNEYNACSVYTTKSPRERAILGLPNSVEEMCPDIPVLERLMADIGGLAESGARYTEMPHVIEITLPMLCSYLPRWWERGPEAPPSALPAGAPPPCTAVTSDHLNSLLGNILRIIVNNLGIDEASWMKRLAVFAQPIVSRARPELLQSHFIPTIGRLRKRAGKVVSEEEQLRLEAKAEAQEGELLVRDEFSVLCRDLYALYPLLIRYVDNNRAQWLTEPNPSAEELFRMVGEIFIYWSKSHNFKREEQNFVVQNEINNMSFLTADNKSKMAKAGDIQSGGSDQERTKKKRRGDRYSVQTSLIVATLKKMLPIGLNMCAPTDQDLITLAKTRYALKDTDEEVREFLHNNLHLQGKVEGSPSLRWQMALYRGVPGREEDADDPEKIVRRVQEVSAVLYYLDQTEHPYKSKKAVWHKLLSKQRRRAVVACFRMTPLYNLPTHRACNMFLESYKAAWILTEDHSFEDRMIDDLSKAGEQEEEEEEVEEKKPDPLHQLVLHFSRTALTEKSKLDEDYLYMAYADIMAKSCHLEEGGENGEAEEEVEVSFEEKQMEKQRLLYQQARLHTRGAAEMVLQMISACKGETGAMVSSTLKLGISILNGGNAEVQQKMLDYLKDKKEVGFFQSIQALMQTCSVLDLNAFERQNKAEGLGMVNEDGTVINRQNGEKVMADDEFTQDLFRFLQLLCEGHNNDFQNYLRTQTGNTTTINIIICTVDYLLRLQESISDFYWYYSGKDVIEEQGKRNFSKAMSVAKQVFNSLTEYIQGPCTGNQQSLAHSRLWDAVVGFLHVFAHMMMKLAQDSSQIELLKELLDLQKDMVVMLLSLLEGNVVNGMIARQMVDMLVESSSNVEMILKFFDMFLKLKDIVGSEAFQDYVTDPRGLISKKDFQKAMDSQKQFSGPEIQFLLSCSEADENEMINCEEFANRFQEPARDIGFNVAVLLTNLSEHVPHDPRLHNFLELAESILEYFRPYLGRIEIMGASRRIERIYFEISETNRAQWEMPQVKESKRQFIFDVVNEGGEAEKMELFVSFCEDTIFEMQIAAQISEPEGEPETDEDEGAGAAEAGAEGAEEGAAGLEGTAATAAAGATARVVAAAGRALRGLSYRSLRRRVRRLRRLTAREAATAVAALLWAAVTRAGAAGAGAAAGALGLLWGSLFGGGLVEGAKKVTVTELLAGMPDPTSDEVHGEQPAGPGGDADGEGASEGAGDAAEGAGDEEEAVHEAGPGGADGAVAVTDGGPFRPEGAGGLGDMGDTTPAEPPTPEGSPILKRKLGVDGVEEELPPEPEPEPEPELEPEKADAENGEKEEVPEPTPEPPKKQAPPSPPPKKEEAGGEFWGELEVQRVKFLNYLSRNFYTLRFLALFLAFAINFILLFYKVSDSPPGEDDMEGSAAGDVSGAGSGGSSGWGLGAGEEAEGDEDENMVYYFLEESTGYMEPALRCLSLLHTLVAFLCIIGYNCLKVPLVIFKREKELARKLEFDGLYITEQPEDDDVKGQWDRLVLNTPSFPSNYWDKFVKRKVLDKHGDIYGRERIAELLGMDLATLEITAHNERKPNPPPGLLTWLMSIDVKYQIWKFGVIFTDNSFLYLGWYMVMSLLGHYNNFFFAAHLLDIAMGVKTLRTILSSVTHNGKQLVMTVGLLAVVVYLYTVVAFNFFRKFYNKSEDEDEPDMKCDDMMTCYLFHMYVGVRAGGGIGDEIEDPAGDEYELYRVVFDITFFFFVIVILLAIIQGLIIDAFGELRDQQEQVKEDMETKCFICGIGSDYFDTTPHGFETHTLEEHNLANYMFFLMYLINKDETEHTGQESYVWKMYQERCWDFFPAGDCFRKQYEDQLS

SEQ ID NO: 7727 - protein, 343 aa, Homo sapiens
MEEPQSDPSVEPPLSQETFSDLWKLLPENNVLSPLPSQAMDDLMLSPDDIEQWFTEDPGPDEAPRMPEAAPPVAPAPAAPTPAAPAPAPSWPLSSSVPSQKTYQGSYGFRLGFLHSGTAKSVTCTYSPALNKMFCQLAKTCPVQLWVDSTPPPGTRVRAMAIYKQSQHMTEVVRRCPHHERCSDSDGLAPPQHLIRVEGNLRVEYLDDRNTFRHSVVVPYEPPEVGSDCTTIHYNYMCNSSCMGGMNRRPILTIITLEDSSGNLLGRNSFEVRVCACPGRDRRTEEENLRKKGEPHHELPPGSTKRALPNNTSSSPQPKKKPLDGEYFTLQKTFPARHGGSHL

SEQ ID NO: 7728 - protein, 1185 aa, Homo sapiens
MADGGEREELLSPSPVSPAKRQCSWPSPQAHHPRGSPGAAGGGAGGVGSSCLVLGARPHLQPDSLLDCAAKTVAEKWAYERVEERFERIPEPVQRRIVYWSFPRNEREICMYSSFQYRGGPGAGAAGGAAGASPAEEGPQPPPGAAAPAGSAPGGVAAGASPGLGAGAGAAGCGGEGLPFRRGIRLLDSGSVENVLQVGFHLSGTVTELATASEPAVTYKVAISFDRCKITSVTCGCGNKDIFYCAHVVALSLYRIRKPDQVKLRLPISETLFQMNRDQLQKFIQYLITAHHTEVLPTAQKLADEILSSNSEINQVNGAPDPTAGASIDDENCWHLDEEQVKEQVKLFLSQGGYCGSGKQLNSMFAKVREMLRMRDSNGARMLTLITEQFVADPRLTLWRQQGTNMTDKCRQLWDELGALWVCIILNPHCKLEEKSCWLQQLQKWSDLDVCPLEDGNYGHELPNITNALPQSAIHSPDSLSRPRRTVFTRAIEGRELHWQDSHLQRIISSDVYTAPACQRESERLLFNSQGQPLWLEHVPTACARVDALRSHGYPKEALRLTVAIINTLRLQQQRQLEIYKHQKKELLQRGTTTITNLEGWVGHPLDPIDCLFLTLTEACRLNDDGYLEMSDMNESRPPVYQHVPVAAGSPNSSESYLSLALEVALMGLGQQRLMPEGLYAQDKVCRNEEQLLSQLQELQLDDELVQTLQKQCILLLEGGPFSGLGEVIHRESVPMHTFAKYLFSALLPHDPDLSYKLALRAMRLPVLENSASAGDTSHPHHMVSVVPSRYPRWFTLGHLESQQCELASTMLTAAKGDTLRLRTILEAIQKHIHSSSLIFKLAQDAFKIATPTDSSTDSTLLNVALELGLQVMRMTLSTLNWRRREMVRWLVTCATEVGVRALVSILQSWYTLFTPTEATSIVAATAVSHTTILRLSLDYPQREELASCARTLALQCAMKDPQSCALSALTLCEKDHIAFEAAYQIAIDAAAGGMTHSQLFTIARYMELRGYPLRAFKLASLAMSHLNLAYNQDTHPAINDVLWACALSHSLGKNELAALIPLVVKSVHCATVLSDILRRCTVTAPGLAGIPGRRSSGKLMSTDKAPLRQLLDATINAYINTTHSRLTHISPRHYGEFIEFLSKARETFLLPQDGHLQFAQFIDNLKQIYKGKKKLMLLVRERFG

SEQ ID NO: 7729 - protein, 614 aa, Homo sapiens
MGFHHVGQARLELLTSGDLPALASQRAGITVGPEKRVPAMPGSPVEVKIQSRSSPPTMPPLPPINPGGPRPVSFTPTALSNGINHSPPTLNGAPSPPQRFSNGPASSTSSALTNQQLPATCGARQLSKLKRFLTTLQQFGNDISPEIGEKVRTLVLALVNSTVTIEEFHCKLQEATNFPLRPFVIPFLKANLPLLQRELLHCARAAKQTPSQYLAQHEHLLLNTSIASPADSSELLMEVHGNGKRPSPERREENSFDRDTIAPEPPAKRVCTISPAPRHSPALTVPLMNPGGQFHPTPPPLQHYTLEDIATSHLYREPNKMLEHREVRDRHHSLGLNGGYQDELVDHRLTEREWADEWKHLDHALNCIMEMVEKTRRSMAVLRRCQESDREELNYWKRRYNENTELRKTGTELVSRQHSPGSADSLSNDSQREFNSRPGTGYVPVEFWKKTEEAVNKVKIQAMSEVQKAVAEAEQKAFEVIATERARMEQTIADVKRQAAEDAFLVINEQEESTENCWNCGRKASETCSGCNIARYCGSFCQHKDWERHHRLCGQNLHGQSPHGQGRPLLPVGRGSSARSADCSVPSPALDKTSATTSRSSTPASVTAIDTNGL

SEQ ID NO: 7730 - protein, 324 aa, Homo sapiens
MESPNRTTIQEFIFSAFPYSWVKSVVCFVPLLFIYAFIVVGNLVIITVVQLNTHLHTPMYTFISALSFLEIWYTTATIPKMLSSLLSERSISFNGCLLQMYFFHSTGICEVCLLTVMAFDHYLAICSPLHYPSIMTPKLCTQLTLSCCVCGFITPLPEIAWISTLPFCGSNHLEHIFCDFLPVLRLACTDTRAIVMIQVVDVIHAVEIITAVMLIFMSYDGIVAVILRIHSAGGRRTAFSTCVSHFIVFSLFFGSVTLMYLRFSATYSLFWDIAIALAFAVLSPFFNPIIYSLRNKEIKEAIKKHIGQAKIFFSVRPGTSSKIF

SEQ ID NO: 7731 - protein, 129 aa, Homo sapiens
MAVSTVFSTSSLMLALSRHSLLSPLLSVTSFRRFYRGDSPTDSQKDMIEIPLPPWQERTDESIETKRARLLYESRKRGMLENCILLSLFAKEHLQHMTEKQLNLYDRLINEPSNDWDIYYWATGWSAMA

SEQ ID NO: 7732 - protein, 272 aa, Homo sapiens
MALVSGISLDPEAAIGVTKRPPPKWVDGVDEIQYDVGRIKQKMKELASLHDKHLNRPTLDDSSEEEHAIEITTQEITQLFHRCQRAVQALPSRARACSEQEGRLLGNVVASLAQALQELSTSFRHAQSGYLKRMKNREERSQHFFDTSVPLMDDGDDNTLYHRGFTEDQLVLVEQNTLMVEEREREIRQIVQSISDLNEIFRDLGAMIVEQGTVLDRIDYNVEQSCIKTEDGLKQLHKAEQYQKKNRKMLVILILFVIIIVLIVVLVGVKSR

SEQ ID NO: 7733 - protein, 326 aa, Homo sapiens
RLIHPQLCELCIEALERHVIQAVNTSPERGGEEALHAFLLVHSKLLAFYSSHSASSLRPADLLALILLVQDLYPSESTAEDDIQETDSFSLPEEYFTPAPSPGDQSSGSTIWLEGGTPPMDALQIAEDTLQTLVPHCPVPSGPRRIFLDANVKESYCPLVPHTMYCLPLWQGINLVLLTRSPSAPLALVLSQLMDGFSMLEKKLKEGPEPGASLRSQPLVGDLRQRMDKFVKNRGAQEIQSTWLEFKAKAFSKSEPGSSWELLQACGKLKRQLCAIYRLNFLTTAPSRGGPHLPQHLQDQVQRLMREKLTDWKDFLLVKSRRNITM

SEQ ID NO: 7734 - protein, 831 aa, Homo sapiens
MKVHMHTKFCLICLLTFIFHHCNHCHEEHDHGPEALHRQHRGMTELEPSKFSKQAAENEKKYYIEKLFERYGENGRLSFFGLEKLLTNLGLGERKVVEINHEDLGHDHVSHLDILAVQEGKHFHSHNHQHSHNHLNSENQTVTSVSTKRNHKCDPEKETVEVSVKSDDKHMHDHNHRLRHHHRLHHHLDHNNTHHFHNDSITPSERGEPSNEPSTETNKTQEQSDVKLPKGKRKKKGRKSNENSEVITPGFPPNHDQGEQYEHNRVHKPDRVHNPGHSHVHLPERNGHDPGRGHQDLDPDNEGELRHTRKREAPHVKNNAIISLRKDLNEDDHHHECLNVTQLLKYYGHGANSPISTDLFTYLCPALLYQIDSRLCIEHFDKLLVEDINKDKNLVPEDEANIGASAWICGIISITVISLLSLLGVILVPIINQGCFKFLLTFLVALAVGTMSGDALLHLLPHSQGGHDHSHQHAHGHGHSHGHESNKFLEEYDAVLKGLVALGGIYLLFIIEHCIRMFKHYKQQRGKQKWFMKQNTEESTIGRKLSDHKLNNTPDSDWLQLKPLAGTDDSVVSEDRLNETELTDLEGQQESPPKNYLCIEEEKIIDHSHSDGLHTIHEHDLHAAAHNHHGENKTVLRKHNHQWHHKHSHHSHGPCHSGSDLKETGIANIAWMVIMGDGIHNFSDGLAIGAAFSAGLTGGISTSIAVFCHELPHELGDFAVLLKAGMTVKQAIVYNLLSAMMAYIGMLIGTAVGQYANNITLWIFAVTAGMFLYVALVDMLPEMLHGDGDNEEHGFCPVGQFILQNLGLLFGFAIMLVIALYEDKIVFDIQF

SEQ ID NO: 7735 - protein, 385 aa, Homo sapiens
MRLLAKIICLMLWAICVAEDCNELPPRRNTEILTGSWSDQTYPEGTQAIYKCRPGYRSLGNVIMVCRKGEWVALNPLRKCQKRPCGHPGDTPFGTFTLTGGNVFEYGVKAVYTCNEGYQLLGEINYRECDTDGWTNDIPICEEISCKSPDVINGSPISQKIIYKENERFQYKCNMGYEYSERGDAVCTESGWRPLPSCEEKSCDNPYIPNGDYSPLRIKHRTGDEITYQCRNGFYPATRGNTAKCTSTGWIPAPRCTLKPCDYPDIKHGGLYHENMRRPYFPVAVGKYYSYYCDEHFETPSGSYWDHIHCTQDGWSPAVPCLRKCYFPYLENGYNQNHGRKFVQGKSIDVACHPGYALPKAQTTVTCMENGWSPTPRCIRVSFTL

SEQ ID NO: 7736 - protein, 949 aa, Homo sapiens
MKVARFQKIPNGENETMIPVLTSKKASELPVSEVASILQADLQNGLNKCEVSHRRAFHGWNEFDISEDEPLWKKYISQFKNPLIMLLLASAVISVLMHQFDDAVSITVAILIVVTVAFVQEYRSEKSLEELSKLVPPECHCVREGKLEHTLARDLVPGDTVCLSVGDRVPADLRLFEAVDLSIDESSLTGETTPCSKVTAPQPAATNGDLASRSNIAFMGTLVRCGKAKGVVIGTGENSEFGEVFKMMQAEEAPKTPLQKSMDLLGKQLSFYSFGIIGIIMLVGWLLGKDILEMFTISVSLAVAAIPEGLPIVVTVTLALGVMRMVKKRAIVKKLPIVETLGCCNVICSDKTGTLTKNEMTVTHIFTSDGLHAEVTGVGYNQFGEVIVDGDVVHGFYNPAVSRIVEAGCVCNDAVIRNNTLMGKPTEGALIALAMKMGLDGLQQDYIRKAEYPFSSEQKWMAVKCVHRTQQDRPEICFMKGAYEQVIKYCTTYQSKGQTLTLTQQQRDVYQQEKARMGSAGLRVLALASGPELGQLTFLGLVGIIDPPRTGVKEAVTTLIASGVSIKMITGDSQETAVAIASRLGLYSKTSQSVSGEEIDAMDVQQLSQIVPKVAVFYRASPRHKMKIIKSLQKNGSVVAMTGDGVNDAVALKAADIGVAMGQTGTDVCKEAADMILVDDDFQTIMSAIEEGKGIYNNIKNFVRFQLSTSIAALTLISLATLMNFPNPLNAMQILWINIIMDGPPAQSLGVEPVDKDVIRKPPRNWKDSILTKNLILKILVSSIIIVCGTLFVFWRELRDNVITPRDTTMTFTCFVFFDMFNALSSRSQTKSVFEIGLCSNRMFCYAVLGSIMGQLLVIYFPPLQKVFQTESLSILDLLFLLGLTSSVCIVAEIIKKVERSREKIQKHVSSTSSSFLEVWLWERSGQQLVEIHPHLETGLPLTEDVSCV

SEQ ID NO: 7737 - protein, 373 aa, Homo sapiens
MLPWLLVFSALGIQAWGDSSWNKTQAKQVSEGLQYLFENISQLTEKGLPTDVSTTVSRKAWGAEAVGCSIQLTTPVNVLVIHHVPGLECHDQTVCSQRLRELQAHHVHNNSGCDVAYNFLVGDDGRVYEGVGWNIQGVHTQGYNNISLGFAFFGTKKGHSPSPAALSAMENLITYAVQKGHLSSSYVQPLLGKGENCLAPRQKTSLKKACPGVVPRSVWGARETHCPRMTLPAKYGIIIHTAGRTCNISDECRLLVRDIQSFYIDRLKSCDIGYNFLVGQDGAIYEGVGWNVQGSSTPGYDDIALGITFMGTFTGIPPNAAALEAAQDLIQCAMVKGYLTPNYLLVGHSDVARTLSPGQALYNIISTWPHFKH

SEQ ID NO: 7738 - protein, 371 aa, Homo sapiens
MAATCEISNIFSNYFSAMYSSEDSTLASVPPAATFGADDLVLTLSNPQMSLEGTEKASWLGEQPQFWSKTQVLDWISYQVEKNKYDASAIDFSRCDMDGATLCNCALEELRLVFGPLGDQLHAQLRDLTSSSSDELSWIIELLEKDGMAFQEALDPGPFDQGSPFAQELLDDGQQASPYHPGSCGAGAPSPGSSDVSTAGTGASRSSHSSDSGGSDVDLDPTDGKLFPSDGFRDCKKGDPKHGKRKRGRPRKLSKEYWDCLEGKKSKHAPRGTHLWEFIRDILIHPELNEGLMKWENRHEGVFKFLRSEAVAQLWGQKKKNSNMTYEKLSRAMRYYYKREILERVDGRRLVYKFGKNSSGWKEEEVLQSRN

SEQ ID NO: 7739 - protein, 708 aa, Homo sapiens
MSERGIKWACEYCTYENWPSAIKCTMCRAQRPSGTIITEDPFKSGSSDVGRDWDPSSTEGGSSPLICPDSSARPRVKSSYSMENANKWSCHMCTYLNWPRAIRCTQCLSQRRTRSPTESPQSSGSGSRPVAFSVDPCEEYNDRNKLNTRTQHWTCSVCTYENWAKAKRCVVCDHPRPNNIEAIELAETEEASSIINEQDRARWRGSCSSGNSQRRSPPATKRDSEVKMDFQRIELAGAVGSKEELEVDFKKLKQIKNRMKKTDWLFLNACVGVVEGDLAAIEAYKSSGGDIARQLTADEVRLLNRPSAFDVGYTLVHLAIRFQRQDMLAILLTEVSQQAAKCIPAMVCPELTEQIRREIAASLHQRKGDFACYFLTDLVTFTLPADIEDLPPTVQEKLFDEVLDRDVQKELEEESPIINWSLELATRLDSRLYALWNRTAGDCLLDSVLQATWGIYDKDSVLRKALHDSLHDCSHWFYTRWKDWESWYSQSFGLHFSLREEQWQEDWAFILSLASQPGASLEQTHIFVLAHILRRPIIVYGVKYYKSFRGETLGYTRFQGVYLPLLWEQSFCWKSPIALGYTRGHFSALVAMENDGYGNRGAGANLNTDDDVTITFLPLVDSERKLLHVHFLSAQELGNEEQQEKLLREWLDCCVTEGGVLVAMQKSSRRRNHPLVTQMVEKWLDRYRQIRPCTSLSDGEEDEDDEDE

SEQ ID NO: 7740 - protein, 2386 aa, Homo sapiens
MLRGPGPGLLLLAVQCLGTAVPSTGASKSKRQAQQMVQPQSPVAVSQSKPGCYDNGKHYQINQQWERTYLGNALVCTCYGGSRGFNCESKPEAEETCFDKYTGNTYRVGDTYERPKDSMIWDCTCIGAGRGRISCTIANRCHEGGQSYKIGDTWRRPHETGGYMLECVCLGNGKGEWTCKPIAEKCFDHAAGTSYVVGETWEKPYQGWMMVDCTCLGEGSGRITCTSRNRCNDQDTRTSYRIGDTWSKKDNRGNLLQCICTGNGRGEWKCERHTSVQTTSSGSGPFTDVRAAVYQPQPHPQPPPYGHCVTDSGVVYSVGMQWLKTQGNKQMLCTCLGNGVSCQETAVTQTYGGNSNGEPCVLPFTYNGRTFYSCTTEGRQDGHLWCSTTSNYEQDQKYSFCTDHTVLVQTRGGNSNGALCHFPFLYNNHNYTDCTSEGRRDNMKWCGTTQNYDADQKFGFCPMAAHEEICTTNEGVMYRIGDQWDKQHDMGHMMRCTCVGNGRGEWTCIAYSQLRDQCIVDDITYNVNDTFHKRHEEGHMLNCTCFGQGRGRWKCDPVDQCQDSETGTFYQIGDSWEKYVHGVRYQCYCYGRGIGEWHCQPLQTYPSSSGPVEVFITETPSQPNSHPIQWNAPQPSHISKYILRWRPKNSVGRWKEATIPGHLNSYTIKGLKPGVVYEGQLISIQQYGHQEVTRFDFTTTSTSTPVTSNTVTGETTPFSPLVATSESVTEITASSFVVSWVSASDTVSGFRVEYELSEEGDEPQYLDLPSTATSVNIPDLLPGRKYIVNVYQISEDGEQSLILSTSQTTAPDAPPDTTVDQVDDTSIVVRWSRPQAPITGYRIVYSPSVEGSSTELNLPETANSVTLSDLQPGVQYNITIYAVEENQESTPVVIQQETTGTPRSDTVPSPRDLQFVEVTDVKVTIMWTPPESAVTGYRVDVIPVNLPGEHGQRLPISRNTFAEVTGLSPGVTYYFKVFAVSHGRESKPLTAQQTTKLDAPTNLQFVNETDSTVLVRWTPPRAQITGYRLTVGLTRRGQPRQYNVGPSVSKYPLRNLQPASEYTVSLVAIKGNQESPKATGVFTTLQPGSSIPPYNTEVTETTIVITWTPAPRIGFKLGVRPSQGGEAPREVTSDSGSIVVSGLTPGVEYVYTIQVLRDGQERDAPIVNKVVTPLSPPTNLHLEANPDTGVLTVSWERSTTPDITGYRITTTPTNGQQGNSLEEVVHADQSSCTFDNLSPGLEYNVSVYTVKDDKESVPISDTIIPAVPPPTDLRFTNIGPDTMRVTWAPPPSIDLTNFLVRYSPVKNEEDVAELSISPSDNAVVLTNLLPGTEYVVSVSSVYEQHESTPLRGRQKTGLDSPTGIDFSDITANSFTVHWIAPRATITGYRIRHHPEHFSGRPREDRVPHSRNSITLTNLTPGTEYVVSIVALNGREESPLLIGQQSTVSDVPRDLEVVAATPTSLLISWDAPAVTVRYYRITYGETGGNSPVQEFTVPGSKSTATISGLKPGVDYTITVYAVTGRGDSPASSKPISINYRTEIDKPSQMQVTDVQDNSISVKWLPSSSPVTGYRVTTTPKNGPGPTKTKTAGPDQTEMTIEGLQPTVEYVVSVYAQNPSGESQPLVQTAVTNIDRPKGLAFTDVDVDSIKIAWESPQGQVSRYRVTYSSPEDGIHELFPAPDGEEDTAELQGLRPGSEYTVSVVALHDDMESQPLIGTQSTAIPAPTDLKFTQVTPTSLSAQWTPPNVQLTGYRVRVTPKEKTGPMKEINLAPDSSSVVVSGLMVATKYEVSVYALKDTLTSRPAQGVVTTLENVSPPRRARVTDATETTITISWRTKTETITGFQVDAVPANGQTPIQRTIKPDVRSYTITGLQPGTDYKIYLYTLNDNARSSPVVIDASTAIDAPSNLRFLATTPNSLLVSWQPPRARITGYIIKYEKPGSPPREVVPRPRPGVTEATITGLEPGTEYTIYVIALKNNQKSEPLIGRKKTDELPQLVTLPHPNLHGPEILDVPSTVQKTPFVTHPGYDTGNGIQLPGTSGQQPSVGQQMIFEEHGFRRTTPPTTATPIRHRPRPYPPNVGEEIQIGHIPREDVDYHLYPHGPGLNPNASTGQEALSQTTISWAPFQDTSEYIISCHPVGTDEEPLQFRVPGTSTSATLTGLTRGATYNVIVEALKDQQRHKVREEVVTVGNSVNEGLNQPTDDSCFDPYTVSHYAVGDEWERMSESGFKLLCQCLGFGSGHFRCDSSRWCHDNGVNYKIGEKWDRQGENGQMMSCTCLGNGKGEFKCDPHEATCYDDGKTYHVGEQWQKEYLGAICSCTCFGGQRGWRCDNCRRPGGEPSPEGTTGQSYNQYSQRYHQRTNTNVNCPIECFMPLDVQADREDSRE

SEQ ID NO: 7741 - protein, 614 aa, Homo sapiens
MDGKVAVQECGPPAVSWVPEEGEKLDQEDEDQVKDRGQWTNKMEFVLSVAGEIIGLGNVWRFPYLCYKNGGGAFFIPYFIFFFVCGIPVFFLEVALGQYTSQGSVTAWRKICPLFQGIGLASVVIESYLNVYYIIILAWALFYLFSSFTSELPWTTCNNFWNTEHCTDFLNHSGAGTVTPFENFTSPVMEFWERRVLGITSGIHDLGSLRWELALCLLLAWVICYFCIWKGVKSTGKVVYFTATFPYLMLVILLIRGVTLPGAYQGIIYYLKPDLFRLKDPQVWMDAGTQIFFSFAICQGCLTALGSYNKYHNNCYKDCIALCFLNSATSFVAGFVVFSILGFMSQEQGVPISEVAESGPGLAFIAFPKAVTMMPLSQLWSCLFFIMLIFLGLDSQFVCVECLVTASIDMFPRQLRKSGRRELLILTIAVMCYLIGLFLVTEGGMYIFQLFDYYASSGICLLFLSLFEVVCISWVYGADRFYDNIEDMIGYRPWPLVKISWLFLTPGLCLATFLFSLSKYTPLKYNNVYVYPPWGYSIGWFLALSSMVCVPLFVVITLLKTRGPFRKRLRQLITPDSSLPQPKQHPCLDGSAGRNFGPSPTREGLIAGEKETHL

SEQ ID NO: 7742 - protein, 436 aa, Homo sapiens
MSDSTWMSADPHLASSLSPSQDERMRSPQNLHSQEDDDSSSESGSGNGSSTLNPSTSSSTQGDPAFPEMNGNGAVAPMDFTTAAEDQPINLCDKLPPATALGTASYPSDGCGADGLRSRVKYGVKTTPESPPYSSGSYDSIKTEVSGCPEDLTVGRAPTADDDDDDHDDHEDNDKMNDSEGMDPERLKAFNMFVRLFVDENLDRMVPISKQPKEKIQAIIESCSRQFPEFQERARKRIRTYLKSCRRMKKNGMEMTRPTPPHLTSAMAENILAAACESETRKAAKRMRLEIYQSSQDEPIALDKQHSRDSAAITHSTYSLPASSYSQDPVYANGGLNYSYRGYGALSSNLQPPASLQTGNHSNGPTDLSMKGGASTTSTTPTPTPSSTSTSRPVPTAQLSPTEISAVRQLIAGYRESAAFLLRSADELENLILQQN

SEQ ID NO: 7743 - protein, 347 aa, Homo sapiens
MAWENQTFNSDFILLGIFNHSPPHTFLFFLVLGIFLVAFMGNSVMVLLIYLDTQLHTPMYFLLSQLSLMDLMLICTTVPKMAFNYLSGSKSISMAGCVTQIFFYISLSGSECFLLAVMAYDRYIAICHPLRYTNLMNPKICGLMATFSWILGSTDGIIDAVATFSFSFCGSREIAHFFCEFPSLLILSCNDTSIFEEVIFICCIVMLVFPVAIIIASYARVILAVIHMGSGEGRCKAFTTCSSHLMVVGMYYGAALFMYIRPTSDHSPTQDKMVSVFYTILTPMLNPLIYSLRNKEVTRAFMKILGKGKSESELPHKLYVLLFAKFFFLISIFFYDVKILALIMYIA

SEQ ID NO: 7744 - protein, 898 aa, Homo sapiens
MSSDEKGISPAHKTSTPTHRSASSSTSSQRDSRQSIHILERTASSSTEPSVSRQLLEPEPVPLSKEADSWEIIEGLKIGQTNVQKPDKHEGFMLKKRKWPLKGWHKRFFVLDNGMLKYSKAPLDIQKGKVHGSIDVGLSVMSIKKKARRIDLDTEEHIYHLKVKSQDWFDAWVSKLRHHRLYRQNEIVRSPRDASFHIFPSTSTAESSPAANVSVMDGKMQPNSFPWQSPLPCSNSLPATCTTGQSKVAAWLQDSEEMDRCAEDLAHCQSNLVELSKLLQNLEILQRTQSAPNFTDMQANCVDISKKDKRVTRRWRTKSVSKDTKIQLQVPFSATMSPVRLHSSNPNLCADIEFQTPPSHLTDPLESSTDYTKLQEEFCLIAQKVHSLLKSAFNSIAIEKEKLKQMVSEQDHSKGHSTQMARLRQSLSQAGEQIHVSLPLSQQVANESRLSMSESVSEFFDAQEVLLSASSSENEASDDESYISDVSDNISEDNTSVADNISRQILNGELTGGAFRNGRRACLPAPCPDTSNINLWNILRNNIGKDLSKVSMPVELNEPLNTLQHLCEEMEYSELLDKASETDDPYERMVLVAAFAVSGYCSTYFRAGSKPFNPVLGETYECIREDKGFRFFSEQVSHHPPISACHCESKNFVFWQDIRWKNKFWGKSMEILPVGTLNVMLPKYGDYYVWNKVTTCIHNILSGRRWIEHYGEVTIRNTKSSVCICKLTFVKVNYWNSNMNEVQGVVIDQEGKAVYRLFGKWHEGLYCGVAPSAKCIWRPGSMPTNYELYYGFTRFAIELNELDPVLKDLLPPTDARFRPDQRFLEEGNLEAAASEKQRVEELQRSRRRYMEENNLEHIPKFFKKVIDANQREAWVSNDTYWELRKDPGFSKVDSPVLW

SEQ ID NO: 7745 - protein, 866 aa, Homo sapiens
MGNRGMEELIPLVNKLQDAFSSIGQSCHLDLPQIAVVGGQSAGKSSVLENFVGRDFLPRGSGIVTRRPLILQLIFSKTEHAEFLHCKSKKFTDFDEVRQEIEAETDRVTGTNKGISPVPINLRVYSPHVLNLTLIDLPGITKVPVGDQPPDIEYQIKDMILQFISRESSLILAVTPANMDLANSDALKLAKEVDPQGLRTIGVITKLDLMDEGTDARDVLENKLLPLRRGYIGVVNRSQKDIEGKKDIRAALAAERKFFLSHPAYRHMADRMGTPHLQKTLNQQLTNHIRESLPALRSKLQSQLLSLEKEVEEYKNFRPDDPTRKTKALLQMVQQFGVDFEKRIEGSGDQVDTLELSGGARINRIFHERFPFELVKMEFDEKDLRREISYAIKNIHGVRTGLFTPDLAFEAIVKKQVVKLKEPCLKCVDLVIQELINTVRQCTSKLSSYPRLREETERIVTTYIREREGRTKDQILLLIDIEQSYINTNHEDFIGFANAQQRSTQLNKKRAIPNQVIRRGWLTINNISLMKGGSKEYWFVLTAESLSWYKDEEEKEKKYMLPLDNLKIRDVEKGFMSNKHVFAIFNTEQRNVYKDLRQIELACDSQEDVDSWKASFLRAGVYPEKDQAENEDGAQENTFSMDPQLERQVETIRNLVDSYVAIINKSIRDLMPKTIMHLMINNTKAFIHHELLAYLYSSADQSSLMEESADQAQRRDDMLRMYHALKEALNIIGDISTSTVSTPVPPPVDDTWLQSASSHSPTPQRRPVSSIHPPGRPPAVRGPTPGPPLIPVPVGAAASFSAPPIPSRPGPQSVFANSDLFPAPPQIPSRPVRIPPGIPPGVPSRRPPAAPSRPTIIRPAEPSLLD

SEQ ID NO: 7746 - protein, 729 aa, Homo sapiens
MGKKYKNIVLLKGLEVINDYHFRMVKSLLSNDLKLNLKMREEYDKIQIADLMEEKFRGDAGLGKLIKIFEDIPTLEDLAETLKKEKLKVKGPALSRKRKKEVDATSPAPSTSSTVKTEGAEATPGAQNPKTVAKCQVTPRRNVLQKRPVIVKVLSTTKPFEYETPEMEKKIMFHATVATQTQFFHVKVLNTSLKEKFNGKKIIIISDYLEYDSLLEVNEESTVSEAGPNQTFEVPNKIINRAKETLKIDILHKQASGNIVYGVFMLHKKTVNQKTTIYEIQDDRGKMDVVGTGQCHNIPCEEGDKLQLFCFRLRKKNQMSKLISEMHSFIQIKKKTNPRNNDPKSMKLPQEQRQLPYPSEASTTFPESHLRTPQMPPTTPSSSFFTKKSEDTISKMNDFMRMQILKEGSHFPGPFMTSIGPAESHPHTPQMPPSTPSSSFLTTKSEDTISKMNDFMRMQILKEGSHFPGPFMTSIGPAESHPHTPQMPPSTPSSSFLTTLKPRLKTEPEEVSIEDSAQSDLKEVMVLNATESFVYEPKEQKKMFHATVATENEVFRVKVFNIDLKEKFTPKKIIAIANYVCRNGFLEVYPFTLVADVNADRNMEIPKGLIRSASVTPKINQLCSQTKGSFVNGVFEVHKKNVRGEFTYYEIQDNTGKMEVVVHGRLTTINCEEGDKLKLTCFELAPKSGNTGELRSVIHSHIKVIKTRKNKKDILNPDSSMETSPDFFF

SEQ ID NO: 7747 - protein, 660 aa, Homo sapiens
MFCGRLNMHMNVQNGKWDSDPSGTKTCIDTKEGILQYCQEVYPELQITNVVEANQPVTIQNWCKRGRKQCKTHPHFVIPYRCLVGEFVSDALLVPDKCKFLHQERMDVCETHLHWHTVAKETCSEKSTNLHDYGMLLPCGIDKFRGVEFVCCPLAEESDNVDSADAEEDDSDVWWGGADTDYADGSEDKVVEVAEEEEVAEVEEEEADDDEDDEDGDEVEEEAEEPYEEATERTTSIATTTTTTTESVEEVVRVPTTAASTPDAVDKYLETPGDENEHAHFQKAKERLEAKHRERMSQVMREWEEAERQAKNLPKADKKAVIQHFQEKVESLEQEAANERQQLVETHMARVEAMLNDRRRLALENYITALQAVPPRPRHVFNMLKKYVRAEQKDRQHTLKHFEHVRMVDPKKAAQIRSQVMTHLRVIYERMNQSLSLLYNVPAVAEEIQDEVDELLQKEQNYSDDVLANMISEPRISYGNDALMPSLTETKTTVELLPVNGEFSLDDLQPWHSFGADSVPANTENEVEPVDARPAADRGLTTRPGSGLTNIKTEEISEVKMDAEFRHDSGYEVHHQKLVFFAEDVGSNKGAIIGLMVGGVVIATVIVITLVMLKKKQYTSIHHGVVEVDAAVTPEERHLSKMQQNGYENPTYKFFEQMQN

SEQ ID NO: 7748 - protein, 341 aa, Homo sapiens
MSQGRGKYDFYIGLGLAMSSSIFIGGSFILKKKGLLRLARKGSMRAVGAGEVANFAAYAFAPATLVTPLGALSVLVSAILSSYFLNERLNLHGKIGCLLSILGSTVMVIHAPKEEEIETLNEMSHKLGDPGFVVFATLVVIVALILIFVVGPRHGQTNILVYITICSVIGAFSVSCVKGLGIAIKELFAGKPVLRHPLAWILLLSLIVCVSTQINYLNRALDIFNTSIVTPIYYVFFTTSVLTCSAILFKEWQDMPVDDVIGTLSGFFTIIVGIFLLHAFKDVSFSLASLPVSFRKDEKAMNGNLSNMYEVLNNNEESLTCGIEQHTGENVSRRNGNLTAF

SEQ ID NO: 7749 - protein, 1128 aa, Homo sapiens
MIAVSFKCRCQILRRLTKDESPYTKSASQTKPPDGALAVRRQSIPEEFKGSTVVELMKKEGTTLGLTVSGGIDKDGKPRVSNLRQGGIAARSDQLDVGDYIKAVNGINLAKFRHDEIISLLKNVGERVVLEVEYELPPVSVQGSSVIFRTVEVTLHKEGNTFGFVIRGGAHDDRNKSRPVVITCVRPGGPADREGTIKPGDRLLSVDGIRLLGTTHAEAMSILKQCGQEAALLIEYDVSVMDSVATASGPLLVEVAKTPGASLGVALTTSMCCNKQVIVIDKIKSASIADRCGALHVGDHILSIDGTSMEYCTLAEATQFLANTTDQVKLEILPHHQTRLALKGPDHVKIQRSDRQLTWDSWASNHSSLHTNHHYNTYHPDHCRVPALTFPKAPPPNSPPALVSSSFSPTSMSAYSLSSLNMGTLPRSLYSTSPRGTMMRRRLKKKDFKSSLSLASSTVGLAGQVVHTETTEVVLTADPVTGFGIQLQGSVFATETLSSPPLISYIEADSPAERCGVLQIGDRVMAINGIPTEDSTFEEASQLLRDSSITSKVTLEIEFDVAESVIPSSGTFHVKLPKKHNVELGITISSPSSRKPGDPLVISDIKKGSVAHRTGTLELGDKLLAIDNIRLDNCSMEDAVQILQQCEDLVKLKIRKDEDNSDEQESSGAIIYTVELKRYGGPLGITISGTEEPFDPIIISSLTKGGLAERTGAIHIGDRILAINSSSLKGKPLSEAIHLLQMAGETVTLKIKKQTDAQSASSPKKFPISSHLSDLGDVEEDSSPAQKPGKLSDMYPSTVPSVDSAVDSWDGSAIDTSYGTQGTSFQASGYNFNTYDWRSPKQRGSLSPVTKPRSQTYPDVGLSYEDWDRSTASGFAGAADSAETEQEENFWSQALEDLETCGQSGILRELEEKADRRVSLRNMTLLATIMSGSTMSLNHEAPTPRSQLGRQASFQERSSSRPHYSQTTRSNTLPSDVGRKSVTLRKMKQEIKEIMSPTPVELHKVTLYKDSDMEDFGFSVADGLLEKGVYVKNIRPAGPGDLGGLKPYDRLLQVNHVRTRDFDCCLVVPLIAESGNKLDLVISRNPLASQKSIDQQSLPGDWSEQNSAFFQQPSHGGNLETREPTNTL

SEQ ID NO: 7750 - protein, 241 aa, Homo sapiens
MKILLVFDFDNTIIDDNSDTWIVQCAPNKKLPIELRDSYRKGFWTEFMGRVFKYLGDKGVREHEMKRAVTSLPFTPGMVELFNFIRKNKDKFDCIIISDSNSVFIDWVLEAASFHDIFDKVFTNPAAFNSNGHLTVENYHTHSCNRCPKNLCKKVVLIEFVDKQLQQGVNYTQIVYIGDGGNDVCPVTFLKNDDVAMPRKGYTLQKTLSRMSQNLEPMEYSVVVWSSGVDIISHLQFLIKD

SEQ ID NO: 7751 - protein, 1059 aa, Homo sapiens
MDWLFFRNICLLIILMVVMEVNSEFIVEVKEFDIENGTTKWQTVRRQKREWIKFAAACREGEDNSKRNPIAKIRSDCESNQKITYRISGVGIDRPPYGVFTINPRTGEINITSVVDREITPLFLIYCRALNSRGEDLERPLELRVKVMDINDNAPVFSQSVYTASIEENSDANTLVVKLCATDADEENHLNSKIAYKIVSQEPSGAPMFILNRYTGEVCTMSSFLDREQHSMYNLVVRGSDRDGAADGLSSECDCRIKVLDVNDNFPTLEKTSYSASIEENCLSSELIRLQAIDLDEEGTDNWLAQYLILSGNDGNWFDIQTDPQTNEGILKVVKMLDYEQAPNIQLSIGVKNQADFHYSVASQFQMHPTPVRIQVVDVREGPAFHPSTMAFSVREGIKGSSLLNYVLGTYTAIDLDTGNPATDVRYIIGHDAGSWLKIDSRTGEIQFSREFDKKSKYIINGIYTAEILAIDDGSGKTATGTICIEVPDINDYCPNIFPERRTICIDSPSVLISVNEHSYGSPFTFCVVDEPPGIADMWDVRSTNATSAILTAKQVLSPGFYEIPILVKDSYNRACELAQMVQLYACDCDDNHMCLDSGAAGIYTEDITGDTYGPVTEDQAGVSNVGLGPAGIGMMVLGILLLILAPLLLLLCCCKQRQPEGLGTRFAPVPEGGEGVMQSWRIEGAHPEDRLFSAYALPGGGGTADGGGSVLGRCALQATPALLNQHPPFSEIYTNTYAAGGTVEGGVSGVELNTGMGTAVGLMAAGAAGASGAARKRSSTMGTLRDYADADINMAFLDSYFSEKAYAYADEDEGRPANDCLLIYDHEGVGSPVGSIGCCSWIVDDLDESCMETLDPKFRTLAEICLNTEIEPFPSHQACIPISTDLPLLGPNYFVNESSGLTPSEVEFQEEMAASEPVVHGDIIVTETYGNADPCVQPTTIIFDPQLAPNVVVTEAVMAPVYDIQGNICVPAELADYNNVIYAERVLASPGVPDMSNSSTTEGCMGPVMSGNILVGPEIQVMQMMSPDLPIGQTVGSTSPMTSRHRVTRYSNIHYTQQ

SEQ ID NO: 7752 - protein, 1677 aa, Homo sapiens
MVGQRDSEDVSKRDSDKEMATKSAVVHDITDDGQEETPEIIEQIPSSESNLEELTQPTESQANDIGFKKVFKFVGFKFTVKKDKTEKPDTVQLLTVKKDEGEGAAGAGDHKDPSLGAGEAASKESEPKQSTEKPEETLKREQSHAEISPPAESGQAVEECKEEGEEKQEKEPSKSAESPTSPVTSETGSTFKKFFTQGWAGWRKKTSFRKPKEDEVEASEKKKEQEPEKVDTEEDGKAEVASEKLTASEQAHPQEPAESAHEPRLSAEYEKVELPSEEQVSGSQGPSEEKPAPLATEVFDEKIEVHQEEVVAEVHVSTVEERTEEQKTEVEETAGSVPAEELVEMDAEPQEAEPAKELVKLKETCVSGEDPTQGADLSPDEKVLSKPPEGVVSEVEMLSSQERMKVQGSPLKKLFTSTGLKKLSGKKQKGKRGGGDEESGEHTQVPADSPDSQEEQKGESSASSPEEPEEITCLEKGLAEVQQDGEAEEGATSDGEKKREGVTPWASFKKMVTPKKRVRRPSESDKEDELDKVKSATLSSTESTASEMQEEMKGSVEEPKPEEPKRKVDTSVSWEALICVGSSKKRARRGSSSDEEGGPKAMGGDHQKADEAGKDKETGTDGILAGSQEHDPGQGSSSPEQAGSPTEGEGVSTWESFKRLVTPRKKSKSKLEEKSEDSIAGSGVEHSTPDTEPGKEESWVSIKKFIPGRRKKRPDGKQEQAPVEDAGPTGANEDDSDVPAVVPLSEYDAVEREKMEAQQAQKSAEQPEQKAATEVSKELSESQVHMMAAAVADGTRAATIIEERSPSWISASVTEPLEQVEAEAALLTEEVLEREVIAEEEPPTVTEPLPENREARGDTVVSEAELTPEAVTAAETAGPLGAEEGTEASAAEETTEMVSAVSQLTDSPDTTEEATPVQEVEGGVPDIEEQERRTQEVLQAVAEKVKEESQLPGTGGPEDVLQPVQRAEAERPEEQAEASGLKKETDVVLKVDAQEAKTEPFTQGKVVGQTTPESFEKAPQVTESIESSELVTTCQAETLAGVKSQEMVMEQAIPPDSVETPTDSETDGSTPVADFDAPGTTQKDEIVEIHEENEVASGTQSGGTEAEAVPAQKERPPAPSSFVFQEETKEQSKMEDTLEHTDKEVSVETVSILSKTEGTQEADQYADEKTKDVPFFEGLEGSIDTGITVSREKVTEVALKGEGTEEAECKKDDALELQSHAKSPPSPVEREMVVQVEREKTEAEPTHVNEEKLEHETAVTVSEEVSKQLLQTVNVPIIDGAKEVSSLEGSPPPCLGQEEAVCTKIQVQSSEASFTLTAAAEEEKVLGETANILETGETLEPAGAHLVLEEKSSEKNEDFAAHPGEDAVPTGPDCQAKSTPVIVSATTKKGLSSDLEGEKTTSLKWKSDEVDEQVACQEVKVSVAIEDLEPENGILELETKSSKLVQNIIQTAVDQFVRTEETATEMLTSELQTQAHVIKADSQDAGQETEKEGEEPQASAQDETPITSAKEESESTAVGQAHSDISKDMSEASEKTMTVEVEGSTVNDQQLEEVVLPSEEEGGGAGTKSVPEDDGHALLAERIEKSLVEPKEDEKGDDVDDPENQNSALADTDASGGLTKESPDTNGPKQKEKEDAQEVELQEGKVHSESDKAITPQAQEELQKQERESAKSELTES

SEQ ID NO: 7753 - protein, 1754 aa, Homo sapiens
MAPYPCGCHILLLLFCCLAAARANLLNLNWLWFNNEDTSHAATTIPEPQGPLPVQPTADTTTHVTPRNGSTEPATAPGSPEPPSELLEDGQDTPTSAESPDAPEENIAGVGAEILNVAKGIRSFVQLWNDTVPTESLARAETLVLETPVGPLALAGPSSTPQENGTTLWPSRGIPSSPGAHTTEAGTLPAPTPSPPSLGRPWAPLTGPSVPPPSSGRASLSSLLGGAPPWGSLQDPDSQGLSPAAAAPSQQLQRPDVRLRTPLLHPLVMGSLGKHAAPSAFSSGLPGALSQVAVTTLTRDSGAWVSHVANSVGPGLANNSALLGADPEAPAGRCLPLPPSLPVCGHLGISRFWLPNHLHHESGEQVRAGARAWGGLLQTHCHPFLAWFFCLLLVPPCGSVPPPAPPPCCQFCEALQDACWSRLGGGRLPVACASLPTQEDGYCVLIGPAAERISEEVGLLQLLGDPPPQQVTQTDDPDVGLAYVFGPDANSGQVARYHFPSLFFRDFSLLFHIRPATEGPGVLFAITDSAQAMVLLGVKLSGVQDGHQDISLLYTEPGAGQTHTAASFRLPAFVGQWTHLALSVAGGFVALYVDCEEFQRMPLARSSRGLELEPGAGLFVAQAGGADPDKFQGVIAELKVRRDPQVSPMHCLDEEGDDSDGASGDSGSGLGDARELLREETGAALKPRLPAPPPVTTPPLAGGSSTEDSRSEEVEEQTTVASLGAQTLPGSDSVSTWDGSVRTPGGRVKEGGLKGQKGEPGVPGPPGRAGPPGSPCLPGPPGLPCPVSPLGPAGPALQTVPGPQGPPGPPGRDGTPGRDGEPGDPGEDGKPGDTGPQGFPGTPGDVGPKGDKGDPGVGERGPPGPQGPPGPPGPSFRHDKLTFIDMEGSGFGGDLEALRGPRGFPGPPGPPGVPGLPGEPGRFGVNSSDVPGPAGLPGVPGREGPPGFPGLPGPPGPPGREGPPGRTGQKGSLGEAGAPGHKGSKGAPGPAGARGESGLAGAPGPAGPPGPPGPPGPPGPGLPAGFDDMEGSGGPFWSTARSADGPQGPPGLPGLKGDPGVPGLPGAKGEVGADGVPGFPGLPGREGIAGPQGPKGDRGSRGEKGDPGKDGVGQPGLPGPPGPPGPVVYVSEQDGSVLSVPGPEGRPGFAGFPGPAGPKGNLGSKGERGSPGPKGEKGEPGSIFSPDGGALGPAQKGAKGEPGFRGPPGPYGRPGYKGEIGFPGRPGRPGMNGLKGEKGEPGDASLGFGMRGMPGPPGPPGPPGPPGTPVYDSNVFAESSRPGPPGLPGNQGPPGPKGAKGEVGPPGPPGQFPFDFLQLEAEMKGEKGDRGDAGQKGERGEPGGGGFFGSSLPGPPGPPGPPGPRGYPGIPGPKGESIRGQPGPPGPQGPPGIGYEGRQGPPGPPGPPGPPSFPGPHRQTISVPGPPGPPGPPGPPGTMGASSGVRLWATRQAMLGQVHEVPEGWLIFVAEQEELYVRVQNGFRKVQLEARTPLPRGTDNEVAALQPPVVQLHDSNPYPRREHPHPTARPWRADDILASPPRLPEPQPYPGAPHHSSYVHLRPARPTSPPAHSHRDFQPVLHLVALNSPLSGGMRGIRGADFQCFQQARAVGLAGTFRAFLSSRLQDLYSIVRRADRAAVPIVNLKDELLFPSWEALFSGSEGPLKPGARIFSFDGKDVLRHPTWPQKSVWHGSDPNGRRLTESYCETWRTEAPSATGQASSLLGGRLLGQSAASCHHAYIVLCIENSFMTASK

SEQ ID NO: 7754 - protein, 503 aa, Homo sapiens
MPVPPPPAPPPPPTFALANTEKPTLNKTEQAGRNALLSDISKGKKLKKTVTNDRSAPILDKPKGAGAGGGGGGFGGGGGFGGGGGGGGGGSFGGGGPPGLGGLFQAGMPKLRSTANRDNDSGGSRPPLLPPGGRSTSAKPFSPPSGPGRFPVPSPGHRSGPPEPQRNRMPPPRPDVGSKPDSIPPPVPSTPRPIQSSPHNRGSPPVPGGPRQPSPGPTPPPFPGNRGTALGGGSIRQSPLSSSSPFSNRPPLPPTPSRALDDKPPPPPPPVGNRPSIHREAVPPPPPQNNKPPVPSTPRPSASSQAPPPPPPPSRPGPPPLPPSSSGNDETPRLPQRNLSLSSSTPPLPSPGRSGPLPPPPSERPPPPVRDPPGRSGPLPPPPPVSRNGSTSRALPATPQLPSRSGVDSPRSGPRPPLPPDRPSAGAPPPPPPSTSIRNGFQDSPCEDEWESRFYFHPISDLPPPEPYVQTTKSYPSKLARNESRSGSNRRERGAPPLPPIPR

SEQ ID NO: 7755 - protein, 807 aa, Homo sapiens
MDQREILQKFLDEAQSKKITKEEFANEFLKLKRQSTKYKADKTYPTTVAEKPKNIKKNRYKDILPYDYSRVELSLITSDEDSSYINANFIKGVYGPKAYIATQGPLSTTLLDFWRMIWEYSVLIIVMACMEYEMGKKKCERYWAEPGEMQLEFGPFSVSCEAEKRKSDYIIRTLKVKFNSETRTIYQFHYKNWPDHDVPSSIDPILELIWDVRCYQEDDSVPICIHCSAGCGRTGVICAIDYTWMLLKDGIIPENFSVFSLIREMRTQRPSLVQTQEQYELVYNAVLELFKRQMDVIRDKHSGTESQAKHCIPEKNHTLQADSYSPNLPKSTTKAAKMMNQQRTKMEIKESSSFDFRTSEISAKEELVLHPAKSSTSFDFLELNYSFDKNADTTMKWQTKAFPIVGEPLQKHQSLDLGSLLFEGCSNSKPVNAAGRYFNSKVPITRTKSTPFELIQQRETKEVDSKENFSYLESQPHDSCFVEMQAQKVMHVSSAELNYSLPYDSKHQIRNASNVKHHDSSALGVYSYIPLVENPYFSSWPPSGTSSKMSLDLPEKQDGTVFPSSLLPTSSTSLFSYYNSHDSLSLNSPTNISSLLNQESAVLATAPRIDDEIPPPLPVWTPESFIVVEEAGEFSPNVPKSLSSAVKVKIGTSLEWGGTSEPKKFDDSVILRPSKSVKLRSPKSELHQDRSSPPPPLPERTLESFFLADEDCMQAQSIETYSTSYPDTMENSTSSKQTLKTPGKSFTRSKSLKILRNMKKSICNSCPPNKPAESVQSNNSSSFLNFGFANRFSKPKGPRNPPPTWNI

SEQ ID NO: 7756 - protein, 568 aa, Homo sapiens
MGLLTFRDVAIEFSLEEWQCLDTAQRNLYKNVILENYRNLVFLGIAVSKQDLITCLEQEKEPLTVKRHEMVNEPPVMCSHFAQEFWPEQNIKDSFEKVTLRRYEKCGNDNFQLKGCKSVDECKLHKGGYNGLNQCLPTMQSKMFQCDKYVKVFNKFSHSDRHKIKHMENKPFKCKECGRSFCMLSHLTRHERNYTKVNFCKCEECEKAVNQSSKLTKHKRIYTCEKLYKCQECDRTFNQFSNLTEYKKDYAREKPYKCEECGKAFNQSSHLTTHKIIHTGEKPYKCEECGKAFNQFSNLTTHKKIHTGEQPYICEECGKAFTQSSTLTTHKRIHTGEKPYKCEECGKAFNRSSKLTEHKNIHTGEQPYKCEECGKAFNRSSNLTEHRKIHTEEKPYKCKECGKAFKHSSALTTHKRIHTGEKPYKCEECGKAFNRSSKLTEHKKLHTGKKPYKCEECGKAFIQSSKLTEHKKIHSGEIPYKCEECGKAFKHSSSLTTHKRIHTGEKPYKCEECGKAFSRSSKLTEHKIIHTGEKPYKCERCDKAFNQSANLTKHKKIHTGEKLQNWNV

SEQ ID NO: 7757 - protein, 377 aa, Homo sapiens
MPANFTEGSFDSSGTGQTLDSSPVACTETVTFTEVVEGKEWGSFYYSFKTEQLITLWVLFVFTIVGNSVVLFSTWRRKKKSRMTFFVTQLAITDSFTGLVNILTDINWRFTGDFTAPDLVCRVVRYLQVVLLYASTYVLVSLSIDRYHAIVYPMKFLQGEKQARVLIVIAWSLSFLFSIPTLIIFGKRTLSNGEVQCWALWPDDSYWTPYMTIVAFLVYFIPLTIISIMYGIVIRTIWIKSKTYETVISNCSDGKLCSSYNRGLISKAKIKAIKYSIIIILAFICCWSPYFLFDILDNFNLLPDTQERFYASVIIQNLPALNSAINPLIYCVFSSSISFPCRVIRLRQLQEAALMLCPQRENWKGTWPGVPSWALPR

SEQ ID NO: 7758 - protein, 903 aa, Homo sapiens
MLREEAAQKRKGKESGMALPQGRLTFRDVAIEFSLAEWKFLNPAQRALYREVMLENYRNLEAVDISSKHMMKEVLSTGQGNREVIHTGTLQRHQSYHIGDFCFQEIEKEIHNIEFQCQEDERNGHEAPTTKIKKLTGSTDQHDHRHAGNKPIKDQLGSSFYSHLPELHIFQIKGEIANQLEKSTSDASSVSTSQRISCRPQIHISNNYGNNPLNSSLLPQKQEVHMREKSFPCNESGKAFNCSSLLRKHQIPHLGDKQYKCDVCGKLFNHKQYLACHRRCHTGEKPYKCKECGKSFSYKSSLTCHHRLHTGVKPYKCNECGKVFRQNSALVIHKAIHTGEKPYKCNECGKAFNQQSHLSRHQRLHTGVKPYKCKICEKAFACHSYLANHTRIHSGEKTYKCNECGKAFNHQSSLARHHILHTGEKPYKCEECDKVFSQKSTLERHKRIHTGEKPYKCKVCDTAFTCNSQLARHRRIHTGEKTYKCNECRKTFSRRSSLLCHRRLHSGEKPYKCNQCGNTFRHRASLVYHRRLHTLEKSYKCTVCNKVFMRNSVLAVHTRIHTAKKPYKCNECGKAFNQQSHLSRHRRLHTGEKPYKCEACDKVFGQKSALESHKRIHTGEKPYRCQVCDTAFTWNSQLARHTRIHTGEKTYKCNECGKTFSYKSSLVWHRRLHGGEKSYKCKVCDKAFVCRSYVAKHTRIHSGMKPYKCNECSKTFSNRSSLVCHRRIHSGEKPYKCSECSKTFSQKATLLCHRRLHSGEKPYKCNDCGNTFRHWSSLVYHRRLHTGEKSYKCTVCDKAFVRNSYLARHIRIHTAEKPYKCNECGKAFNEQSHLSRHHRIHTGEKPYKCEACDKVFSRKSHLKRHRIIHTGEKPYKCNECGKAFSDRSTLIHHQAIHGIGKFD

SEQ ID NO: 7759 - protein, 564 aa, Homo sapiens
MNRSIPVEVDESEPYPSQLLKPIPEYSPEEESEPPAPNIRNMAPNSLSAPTMLHNSSGDFSQAHSTLKLANHQRPVSRQVTCLRTQVLEDSEDSFCRRHPGLGKAFPSGCSAVSEPASESVVGALPAEHQFSFMEKRNQWLVSQLSAASPDTGHDSDKSDQSLPNASADSLGGSQEMVQRPQPHRNRAGLDLPTIDTGYDSQPQDVLGIRQLERPLPLTSVCYPQDLPRPLRSREFPQFEPQRYPACAQMLPPNLSPHAPWNYHYHCPGSPDHQVPYGHDYPRAAYQQVIQPALPGQPLPGASVRGLHPVQKVILNYPSPWDHEERPAQRDCSFPGLPRHQDQPHHQPPNRAGAPGESLECPAELRPQVPQPPSPAAVPRPPSNPPARGTLKTSNLPEELRKVFITYSMDTAMEVVKFVNFLLVNGFQTAIDIFEDRIRGIDIIKWMERYLRDTVMIIVAISPKYKQDVEGAESQLDEDEHGLHTKYIHRMMQIEFIKQGSMNFRFIPVLFPNAKKEHVPTWLQNTHVYSWPKNKKNILLRLLREEEYVAPPRGPLPTLQVVPL

SEQ ID NO: 7760 - protein, 1230 aa, Homo sapiens
MPSSLMLEVPALADFNRAWTELTDWLSLLDQVIKSQRVMVGDLEDINEMIIKQKATMQDLEQRRPQLEELITAAQNLKNKTSNQEARTIITDRIERIQNQWDEVQEHLQNRRQQLNEMLKDSTQWLEAKEEAEQVLGQARAKLESWKEGPYTVDAIQKKITETKQLAKDLRQWQTNVDVANDLALKLLRDYSADDTRKVHMITENINASWRSIHKRVSEREAALEETHRLLQQFPLDLEKFLAWLTEAETTANVLQDATRKERLLEDSKGVKELMKQWQDLQGEIEAHTDVYHNLDENSQKILRSLEGSDDAVLLQRRLDNMNFKWSELRKKSLNIRSHLEASSDQWKRLHLSLQELLVWLQLKDDELSRQAPIGGDFPAVQKQNDVHRAFKRELKTKEPVIMSTLETVRIFLTEQPLEGLEKLYQEPRELPPEERAQNVTRLLRKQAEEVNTEWEKLNLHSADWQRKIDETLERLRELQEATDELDLKLRQAEVIKGSWQPVGDLLIDSLQDHLEKVKALRGEIAPLKENVSHVNDLARQLTTLGIQLSPYNLSTLEDLNTRWKLLQVAVEDRVRQLHEAHRDFGPASQHFLSTSVQGPWERAISPNKVPYYINHETQTTCWDHPKMTELYQSLADLNNVRFSAYRTAMKLRRLQKALCLDLLSLSAACDALDQHNLKQNDQPMDILQIINCLTTIYDRLEQEHNNLVNVPLCVDMCLNWLLNVYDTGRTGRIRVLSFKTGIISLCKAHLEDKYRYLFKQVASSTGFCDQRRLGLLLHDSIQIPRQLGEVASFGGSNIEPSVRSCFQFANNKPEIEAALFLDWMRLEPQSMVWLPVLHRVAAAETAKHQAKCNICKECPIIGFRYRSLKHFNYDICQSCFFSGRVAKGHKMHYPMVEYCTPTTSGEDVRDFAKVLKNKFRTKRYFAKHPRMGYLPVQTVLEGDNMETPASSPQLSHDDTHSRIEHYASRLAEMENSNGSYLNDSISPNESIDDEHLLIQHYCQSLNQDSPLSQPRSPAQILISLESEERGELERILADLEEENRNLQAEYDRLKQQHEHKGLSPLPSPPEMMPTSPQSPRDAELIAEAKLLRQHKGRLEARMQILEDHNKQLESQLHRLRQLLEQPQAEAKVNGTTVSSPSTSLQRSDSSQPMLLRVVGSQTSDSMGEEDLLSPPQDTSTGLEEVMEQLNNSFPSSRGHNVGSLFHMADDLGRAMESLVSVMTDEEGAE

SEQ ID NO: 7761 - protein, 463 aa, Homo sapiens
MYGNYSHFMKFPAGYGGSPGHTGSTSMSPSAALSTGKPMDSHPSYTDTPVSAPRTLSAVGTPLNALGSPYRVITSAMGPPSGALAAPPGINLVAPPSSQLNVVNSVSSSEDIKPLPGLPGIGNMNYPSTSPGSLVKHICAICGDRSSGKHYGVYSCEGCKGFFKRTIRKDLIYTCRDNKDCLIDKRQRNRCQYCRYQKCLVMGMKREAVQEERQRSRERAESEAECATSGHEDMPVERILEAELAVEPKTESYGDMNMENSTNDPVTNICHAADKQLFTLVEWAKRIPHFSDLTLEDQVILLRAGWNELLIASFSHRSVSVQDGILLATGLHVHRSSAHSAGVGSIFDRVLTELVSKMKDMQMDKSELGCLRAIVLFNPDAKGLSNPSEVETLREKVYATLEAYTKQKYPEQPGRFAKLLLRLPALRSIGLKCLEHLFFFKLIGDTPIDTFLMEMLETPLQIT

SEQ ID NO: 7762 - protein, 763 aa, Homo sapiens
MKTSPRRPLILKRRRLPLPVQNAPSETSEEEPKRSPAQQESNQAEASKEVAESNSCKFPAGIKIINHPTMPNTQVVAIPNNANIHSIITALTAKGKESGSSGPNKFILISCGGAPTQPPGLRPQTQTSYDAKRTEVTLETLGPKPAARDVNLPRPPGALCEQKRETCADGEAAGCTINNSLSNIQWLRKMSSDGLGSRSIKQEMEEKENCHLEQRQVKVEEPSRPSASWQNSVSERPPYSYMAMIQFAINSTERKRMTLKDIYTWIEDHFPYFKHIAKPGWKNSIRHNLSLHDMFVRETSANGKVSFWTIHPSANRYLTLDQVFKPLDPGSPQLPEHLESQQKRPNPELRRNMTIKTELPLGARRKMKPLLPRVSSYLVPIQFPVNQSLVLQPSVKVPLPLAASLMSSELARHSKRVRIAPKVLLAEEGIAPLSSAGPGKEEKLLFGEGFSPLLPVQTIKEEEIQPGEEMPHLARPIKVESPPLEEWPSPAPSFKEESSHSWEDSSQSPTPRPKKSYSGLRSPTRCVSEMLVIQHRERRERSRSRRKQHLLPPCVDEPELLFSEGPSTSRWAAELPFPADSSDPASQLSYSQEVGGPFKTPIKETLPISSTPSKSVLPRTPESWRLTPPAKVGGLDFSPVQTSQGASDPLPDPLGLMDLSTTPLQSAPPLESPQRLLSSEPLDLISVPFGNSSPSDIDVPKPGSPEPQVSGLAANRSLTEGLVLDTMNDSLSKILLDISFPGLDEDPLGPDNINWSQFIPELQ

SEQ ID NO: 7763 - protein, 610 aa, Homo sapiens
MSQTSLKQKKNEPGMRSSKESLEAEKRKESDKTGVRLSNQMRRAVNPNHSLRCCPFQGHSSCRRCLCAAEGTALGPCHTIRIYIHMCLLWEQGQQITMMRGSQESSLRKTDSRGYLVRSQWSRISRSPSTKAPSIDEPRSRNTSAKLPSSSTSSRTPSTSPSLHDSSPPPLSGQPSLQPPASPQLPRSLDSRPPTPPEPDPGSRRSTKMQENPEAWAQGIVREIRQTRDSQPLEYSRTSPTEWKSSSQRRGIYPASTQLDRNSLSEQQQQQREDEDDYEAAYWASMRSFYEKNPSCSRPWPPKPKNAITIALSSCALFNMVDGRKIYEQEGLEKYMEYQLTNENVILTPGPAFRFVKALQYVNARLRDLYPDEQDLFDIVLMTNNHAQVGVRLINSVNHYGLLIDRFCLTGGKDPIGYLKAYLTNLYIAADSEKVQEAIQEGIASATMFDGAKDMAYCDTQLRVAFDGDAVLFSDESEHFTKEHGLDKFFQYDTLCESKPLAQGPLKGFLEDLGRLQKKFYAKNERLLCPIRTYLVTARSAASSGARVLKTLRRWGLEIDEALFLAGAPKSPILVKIRPHIFFDDHMFHIEGAQRLGSIAAYGFNKKFSS

SEQ ID NO: 7764 - protein, 1142 aa, Homo sapiens
MKEPLLGGECDKAVASQLGLLDEIKTEPDNAQEYCHRQQSRTQENELKINAVFSESASQLTAGIQLSLASSGVNKMLPSVSTTAIQVSCAGCKKILQKGQTAYQRKGSAQLFCSIPCITEYISSASSPVPSKRTCSNCSKDILNPKDVISVQLEDTTSCKTFCSLSCLSSYEEKRKPFVTICTNSILTKCSMCQKTAIIQYEVKYQNVKHNLCSNACLSKFHSANNFIMNCCENCGTYCYTSSSLSHILQMEGQSHYFNSSKSITAYKQKPAKPLISVPCKPLKPSDEMIETTSDLGKTELFCSINCFSAYSKAKMESSSVSVVSVVHDTSTELLSPKKDTTPVISNIVSLADTDVALPIMNTDVLQDTVSSVTATADVIVDLSKSSPSEPSNAVASSSTEQPSVSPSSSVFSQHAIGSSTEVQKDNMKSMKISDELCHPKCTSKVQKVKGKSRSIKKSCCADFECLENSKKDVAFCYSCQLFCQKYFSCGRESFATHGTSNWKKTLEKFRKHEKSEMHLKSLEFWREYQFCDGAVSDDLSIHSKQIEGNKKYLKLIIENILFLGKQCLPLRGNDQSVSSVNKGNFLELLEMRAKDKGEETFRLMNSQVDFYNSTQIQSDIIEIIKTEMLQDIVNEINDSSAFSIICDETINSAMKEQLSICVRYPQKSSKAILIKERFLGFVDTEEMTGTHLHRTIKTYLQQIGVDMDKIHGQAYDSTTNLKIKFNKIAAEFKKEEPRALYIHCYAHFLDLSIIRFCKEVKELRSALKTLSSLFNTICMSGEMLANFRNIYRLSQNKTCKKHISQSCWTVHDRTLLSVIDSLPEIIETLEVIASHSSNTSFADELSHLLTLVSKFEFVFCLKFLYRVLSVTGILSKELQNKTIDIFSLSSKIEAILECLSSERNDVYFKTIWDGTEEICQKITCKGFKVEKPSLQKRRKIQKSVDLGNSDNMFFPTSTEEQYKINIYYQGLDTILQNLKLCFSEFDYCKIKQISELLFKWNEPLNETTAKHVQEFYKLDEDIIPELRFYRHYAKLNFVIDDSCINFVSLGCLFIQHGLHSNIPCLSKLLYIALSWPITSASTENSFSTLPRLKTYLCNTMGQEKLTGPALMAVEQELVNKLMEPERLNEIVEKFISQMKEI

SEQ ID NO: 7765 - protein, 3859 aa, Homo sapiens
MAFVATQGATVVDQTTLMKKYLQFVAALTDVNTPDETKLKMMQEVSENFENVTSSPQYSTFLEHIIPRFLTFLQDGEVQFLQEKPAQQLRKLVLEIIHRIPTNEHLRPHTKNVLSVMFRFLETENEENVLICLRIIIELHKQFRPPITQEIHHFLDFVKQIYKELPKVVNRYFENPQVIPENTVPPPEMVGMITTIAVKVNPEREDSETRTHSIIPRGSLSLKVLAELPIIVVLMYQLYKLNIHNVVAEFVPLIMNTIAIQVSAQARQHKLYNKELYADFIAAQIKTLSFLAYIIRIYQELVTKYSQQMVKGMLQLLSNCPAETAHLRKELLIAAKHILTTELRNQFIPCMDKLFDESILIGSGYTARETLRPLAYSTLADLVHHVRQHLPLSDLSLAVQLFAKNIDDESLPSSIQTMSCKLLLNLVDCIRSKSEQESGNGRDVLMRMLEVFVLKFHTIARYQLSAIFKKCKPQSELGAVEAALPGVPTAPAAPGPAPSPAPVPAPPPPPPPPPPATPVTPAPVPPFEKQGEKDKEDKQTFQVTDCRSLVKTLVCGVKTITWGITSCKAPGEAQFIPNKQLQPKETQIYIKLVKYAMQALDIYQVQIAGNGQTYIRVANCQTVRMKEEKEVLEHFAGVFTMMNPLTFKEIFQTTVPYMVERISKNYALQIVANSFLANPTTSALFATILVEYLLDRLPEMGSNVELSNLYLKLFKLVFGSVSLFAAENEQMLKPHLHKIVNSSMELAQTAKEPYNYFLLLRALFRSIGGGSHDLLYQEFLPLLPNLLQGLNMLQSGLHKQHMKDLFVELCLTVPVRLSSLLPYLPMLMDPLVSALNGSQTLVSQGLRTLELCVDNLQPDFLYDHIQPVRAELMQALWRTLRNPADSISHVAYRVLGKFGGSNRKMLKESQKLHYVVTEVQGPSITVEFSDCKASLQLPMEKAIETALDCLKSANTEPYYRRQAWEVIKCFLVAMMSLEDNKHALYQLLAHPNFTEKTIPNVIISHRYKAQDTPARKTFEQALTGAFMSAVIKDLRPSALPFVASLIRHYTMVAVAQQCGPFLLPCYQVGSQPSTAMFHSEENGSKGMDPLVLIDAIAICMAYEEKELCKIGEVALAVIFDVASIILGSKERACQLPLFSYIVERLCACCYEQAWYAKLGGVVSIKFLMERLPLTWVLQNQQTFLKALLFVMMDLTGEVSNGAVAMAKTTLEQLLMRCATPLKDEERAEEIVAAQEKSFHHVTHDLVREVTSPNSTVRKQAMHSLQVLAQVTGKSVTVIMEPHKEVLQDMVPPKKHLLRHQPANAQIGLMEGNTFCTTLQPRLFTMDLNVVEHKVFYTELLNLCEAEDSALTKLPCYKSLPSLVPLRIAALNALAACNYLPQSREKIIAALFKALNSTNSELQEAGEACMRKFLEGATIEVDQIHTHMRPLLMMLGDYRSLTLNVVNRLTSVTRLFPNSFNDKFCDQMMQHLRKWMEVVVITHKGGQRSDGNESISECGRCPLSPFCQFEEMKICSAIINLFHLIPAAPQTLVKPLLEVVMKTERAMLIEAGSPFREPLIKFLTRHPSQTVELFMMEATLNDPQWSRMFMSFLKHKDARPLRDVLAANPNRFITLLLPGGAQTAVRPGSPSTSTMRLDLQFQAIKIISIIVKNDDSWLASQHSLVSQLRRVWVSENFQERHRKENMAATNWKEPKLLAYCLLNYCKRNYGDIELLFQLLRAFTGRFLCNMTFLKEYMEEEIPKNYSIAQKRALFFRFVDFNDPNFGDELKAKVLQHILNPAFLYSFEKGEGEQLLGPPNPEGDNPESITSVFITKVLDPEKQADMLDSLRIYLLQYATLLVEHAPHHIHDNNKNRNSKLRRLMTFAWPCLLSKACVDPACKYSGHLLLAHIIAKFAIHKKIVLQVFHSLLKAHAMEARAIVRQAMAILTPAVPARMEDGHQMLTHWTRKIIVEEGHTVPQLVHILHLIVQHFKVYYPVRHHLVQHMVSAMQRLGFTPSVTIEQRRLAVDLSEVVIKWELQRIKDQQPDSDMDPNSSGEGVNSVSSSIKRGLSVDSAQEVKRFRTATGAISAVFGRSQSLPGADSLLAKPIDKQHTDTVVNFLIRVACQVNDNTNTAGSPGEVLSRRCVNLLKTALRPDMWPKSELKLQWFDKLLMTVEQPNQVNYGNICTGLEVLSFLLTVLQSPAILSSFKPLQRGIAACMTCGNTKVLRAVHSLLSRLMSIFPTEPSTSSVASKYEELECLYAAVGKVIYEGLTNYEKATNANPSQLFGTLMILKSACSNNPSYIDRLISVFMRSLQKMVREHLNPQAASGSTEATSGTSELVMLSLELVKTRLAVMSMEMRKNFIQAILTSLIEKSPDAKILRAVVKIVEEWVKNNSPMAANQTPTLREKSILLVKMMTYIEKRFPEDLELNAQFLDLVNYVYRDETLSGSELTAKLEPAFLSGLRCAQPLIRAKFFEVFDNSMKRRVYERLLYVTCSQNWEAMGNHFWIKQCIELLLAVCEKSTPIGTSCQGAMLPSITNVINLADSHDRAAFAMVTHVKQEPRERENSESKEEDVEIDIELAPGDQTSTPKTKELSEKDIGNQLHMLTNRHDKFLDTLREVKTGALLSAFVQLCHISTTLAEKTWVQLFPRLWKILSDRQQHALAGEISPFLCSGSHQVQRDCQPSALNCFVEAMSQCVPPIPIRPCVLKYLGKTHNLWFRSTLMLEHQAFEKGLSLQIKPKQTTEFYEQESITPPQQEILDSLAELYSLLQEEDMWAGLWQKRCKYSETATAIAYEQHGFFEQAQESYEKAMDKAKKEHERSNASPAIFPEYQLWEDHWIRCSKELNQWEALTEYGQSKGHINPYLVLECAWRVSNWTAMKEALVQVEVSCPKEMAWKVNMYRGYLAICHPEEQQLSFIERLVEMASSLAIREWRRLPHVVSHVHTPLLQAAQQIIELQEAAQINAGLQPTNLGRNNSLHDMKTVVKTWRNRLPIVSDDLSHWSSIFMWRQHHYQGKPTWSGMHSSSIVTAYENSSQHDPSSNNAMLGVHASASAIIQYGKIARKQGLVNVALDILSRIHTIPTVPIVDCFQKIRQQVKCYLQLAGVMGKNECMQGLEVIESTNLKYFTKEMTAEFYALKGMFLAQINKSEEANKAFSAAVQMHDVLVKAWAMWGDYLENIFVKERQLHLGVSAITCYLHACRHQNESKSRKYLAKVLWLLSFDDDKNTLADAVDKYCIGVPPIQWLAWIPQLLTCLVGSEGKLLLNLISQVGRVYPQAVYFPIRTLYLTLKIEQRERYKSDPGPIRATAPMWRCSRIMHMQRELHPTLLSSLEGIVDQMVWFRENWHEEVLRQLQQGLAKCYSVAFEKSGAVSDAKITPHTLNFVKKLVSTFGVGLENVSNVSTMFSSAASESLARRAQATAQDPVFQKLKGQFTTDFDFSVPGSMKLHNLISKLKKWIKILEAKTKQLPKFFLIEEKCRFLSNFSAQTAEVEIPGEFLMPKPTHYYIKIARFMPRVEIVQKHNTAARRLYIRGHNGKIYPYLVMNDACLTESRREERVLQLLRLLNPCLEKRKETTKRHLFFTVPRVVAVSPQMRLVEDNPSSLSLVEIYKQRCAKKGIEHDNPISRYYDRLATVQARGTQASHQVLRDILKEVQSNMVPRSMLKEWALHTFPNATDYWTFRKMFTIQLALIGFAEFVLHLNRLNPEMLQIAQDTGKLNVAYFRFDINDATGDLDANRPVPFRLTPNISEFLTTIGVSGPLTASMIAVARCFAQPNFKVDGILKTVLRDEIIAWHKKTQEDTSSPLSAAGQPENMDSQQLVSLVQKAVTAIMTRLHNLAQFEGGESKVNTLVAAANSLDNLCRMDPAWHPWL

SEQ ID NO: 7766 - protein, 1586 aa, Homo sapiens
MEEMRDSYLEEDVYQLQELRRELDRANKNCRILQYRLRKAEQKSLKVAETGQVDGELIRSLEQDLKVAKDVSVRLHHELKTVEEKRAKAEDENETLRQQMIEVEISKQALQNELERLKESSLKRRSTREMYKEKKTFNQDDSADLRCQLQFAKEEAFLMRKKMAKLGREKDELEQELQKYKSLYGDVDSPLPTGEAGGPPSTREAELKLRLKLVEEEANILGRKIVELEVENRGLKAEMEDMRGQQEREGPGRDHAPSIPTSPFGDSLESSTELRRHLQFVEEEAELLRRSISEIEDHNRQLTHELSKFKFEPPREPGWLGEGASPGAGGGAPLQEELKSARLQISELSGKVLKLQHENHALLSNIQRCDLAAHLGLRAPSPRDSDAESDAGKKESDGEESRLPQPKREGPVGGESDSEEMFEKTSGFGSGKPSEASEPCPTELLKAREDSEYLVTLKHEAQRLERTVERLITDTDSFLHDAGLRGGAPLPGPGLQGEEEQGEGDQQEPQLLGTINAKMKAFKKELQAFLEQVNRIGDGLSPLPHLTESSSFLSTVTSVSRDSPIGNLGKELGPDLQSRLKEQLEWQLGPARGDERESLRLRAARELHRRADGDTGSHGLGGQTCFSLELRGPPVLPEQSVSIEELQGQLVQAARLHQEETETFTNKIHKMEEEHLYALRWKELEMHSLALQNTLHERTWSDEKNLMQQELRSLKQNIFLFYVKLRWLLKHWRQGKQMEEEGEEFTEGEHPETLSRLGELGVQGGHQADGPDHDSDRGCGFPVGEHSPHSRVQIGDHSLRLQTADRGQPHKQVVENQQLFSAFKALLEDFRAELREDERARLRLQQQYASDKAAWDVEWAVLKCRLEQLEEKTENKLGELGSSAESKGALKKEREVHQKLLADSHSLVMDLRWQIHHSEKNWNREKVELLDRLDRDRQEWERQKKEFLWRIEQLQKENSPRRGGSFLCDQKDGNVRPFPHQGSLRMPRPVAMWPCADADSIPFEDRPLSKLKESDRCSASENLYLDALSLDDEPEEPPAHRPEREFRNRLPEEEENHKGNLQRAVSVSSMSEFQRLMDISPFLPEKGLPSTSSKEDVTPPLSPDDLKYIEEFNKSWDYTPNRGHNGGGPDLWADRTEVGRAGHEDSTEPFPDSSWYLTTSVTMTTDTMTSPEHCQKQPLRSHVLTEQSGLRVLHSPPAVRRVDSITAAGGEGPFPTSRARGSPGDTKGGPPEPMLSRWPCTSPRHSRDYVEGARRPLDSPLCTSLGFASPLHSLEMSKNLSDDMKEVAFSVRNAICSGPGELQVKDMACQTNGSRTMGTQTVQTISVGLQTEALRGSGVTSSPHKCLTPKAGGGATPVSSPSRSLRSRQVAPAIEKVQAKFERTCCSPKYGSPKLQRKPLPKADQPNNRTSPGMAQKGYSESAWARSTTTRESPVHTTINDGLSSLFNIIDHSPVVQDPFQKGLRAGSRSRSAEPRPELGPGQETGTNSRGRSPSPIGVGSEMCREEGGEGTPVKQDLSAPPGYTLTENVARILNKKLLEHALKEERRQAAHGPPGLHSDSHSLGDTAEPGPMENQTVLLTAPWGL

SEQ ID NO: 7767 - protein, 1094 aa, Homo sapiens
MKIATVSVLLPLALCLIQDAASKNEDQEMCHEFQAFMKNGKLFCPQDKKFFQSLDGIMFINKCATCKMILEKEAKSQKRARHLARAPKATAPTELNCDDFKKGERDGDFICPDYYEAVCGTDGKTYDNRCALCAENAKTGSQIGVKSEGECKSSNPEQDVCSAFRPFVRDGRLGCTRENDPVLGPDGKTHGNKCAMCAELFLKEAENAKREGETRIRRNAEKDFCKEYEKQVRNGRLFCTRESDPVRGPDGRMHGNKCALCAEIFKQRFSEENSKTDQNLGKAEEKTKVKREIVKLCSQYQNQAKNGILFCTRENDPIRGPDGKMHGNLCSMCQAYFQAENEEKKKAEARARNKRESGKATSYAELCSEYRKLVRNGKLACTRENDPIQGPDGKVHGNTCSMCEVFFQAEEEEKKKKEGKSRNKRQSKSTASFEELCSEYRKSRKNGRLFCTRENDPIQGPDGKMHGNTCSMCEAFFQQEERARAKAKREAAKEICSEFRDQVRNGTLICTREHNPVRGPDGKMHGNKCAMCASVFKLEEEEKKNDKEEKGKVEAEKVKREAVQELCSEYRHYVRNGRLPCTRENDPIEGLDGKIHGNTCSMCEAFFQQEAKEKERAEPRAKVKREAEKETCDEFRRLLQNGKLFCTRENDPVRGPDGKTHGNKCAMCKAVFQKENEERKRKEEEDQRNAAGHGSSGGGGGNTQDECAEYREQMKNGRLSCTRESDPVRDADGKSYNNQCTMCKAKLEREAERKNEYSRSRSNGTGSESGKDTCDEFRSQMKNGKLICTRESDPVRGPDGKTHGNKCTMCKEKLEREAAEKKKKEDEDRSNTGERSNTGERSNDKEDLCREFRSMQRNGKLICTRENNPVRGPYGKMHINKCAMCQSIFDREANERKKKDEEKSSSKPSNNAKDQCRQVQNEAEDAKFRQPGRSLASVARMSTDECSEFRNYIRNNELICPRENDPVHGADGKFYTNKCYMCRAVFLTEALERAKLQEKPSHVRASQEEDSPDSFSSLDSEMCKDYRVLPRIGYLCPKDLKPVCGDDGQTYNNPCMLCHENLIRQTNTHIRSTGKCEESSTPGTTAASMPPSDE

SEQ ID NO: 7768 - protein, 426 aa, Homo sapiens
MEGHKAEEEVLDVLRLNVGGCIYTARRESLCRFKDSMLASMFSGRFPLKTDESGACVIDRDGRLFKYLLDYLHGEVQIPTDEQTRIALQEEADYFGIPYPYSLSDHLANEMETYSLRSNIELKKALTDFCDSYGLVCNKPTVWVLHYLNTSGASCESRIIGVYATKTDGTDAIEKQLGGRIHSKGIFKREAGNNVQYIWSYYSVAELKKMMDAFDAWEGKGVSYWRVPHELIECWTLEERPLLGSLRHMAPIRKRRLITFNEADESVNYKTGPKPVRFLGPSTSTQIKVKNSASVTVSPASAIQTSAGATANRFQSGSRRKAAQRSAPSRATALVGTGAPGHPQASPGAASAENGGTHLPPAKVLLSDKKPTPQRVIKLKRTPLCATAPCLPSPTATRQANSLKPLPGEAARALGVRTENGKNKGN

SEQ ID NO: 7769 - protein, 746 aa, Homo sapiens
MISTKEKNKIPKDSMTLLPCFYFVELPIVASSIVSLYFLELTDLFKPAKVGFQCYDRTLSMPYVETNEELIPLLMLLSLAFAAPAASIMVAEGMLYCLQSRLWGRAGGPAGAEGSINAGGCNFNSFLRRTVRFVGVHVFGLCATALVTDVIQLATGYHTPFFLTVCKPNYTLLGTSCEVNPYITQDICSGHDIHAILSARKTFPSQHATLSAFAAVYVSVSPAPHCPSQALLLTRGEPSLTPTPMPQMYFNSVISDTTKLLKPILVFAFAIAAGVCGLTQITQYRSHPVDVYAGFLIGAGIAAYLACHAVGNFQAPPAEKPAAPAPAKDALRALTQRGHDSVYQQNKSVSTDELGPPGRLEGAPRPVAREKTSLGSLKRASVDVDLLAPRSPMAKENMVTFSHTLPRASAPSLDDPARRHMTIHVPLDASRSKQLISEWKQKSLEGRGLGLPDDASPGHLRAPAEPMAEEEEEEEDEEEEEEEEEEEDEGPAPPSLYPTVQARPGLGPRVILPPRAGPPPLVHIPEEGAQTGAGLSPKSGAGVRAKWLMMAEKSGAAVANPPRLLQVIAMSKAPGAPGPKAAETASSSSASSDSSQYRSPSDRDSASIVTIDAHAPHHPVVHLSAGGAPWEWKAAGGGAKAEADGGYELGDLARGFRGGAKPPGVSPGSSVSDVDQEEPRFGAVATVNLATGEGLPPLGAADGALGPGSRESTLRRHAGGLGLAEREAEAEAEGYFRKMQARRFPD

SEQ ID NO: 7770 - protein, 1119 aa, Homo sapiens
MGNAHSKSGDRHSALPGRPELSFYGSFPRKWSENVFLDNELLTSKILSVLRPQSERGFRAGDLRYPTHFLSTNSVLASVTASLKEHPRGTLLSDGSPALSRNVGMTVSQKGGPQPTPSPAGPGTQLGPITGEMDEADSAFLKFKQTADDSLSLTSPNTESIFVEDPYTASLRSEIESDGHEFEAESWSLAVDAAYAKKQKREVVKRQDVLYELMQTEVHHVRTLKIMLKVYSRALQEELQFSSKAIGRLFPCADDLLETHSHFLARLKERRQESLEEGSDRNYVIQKIGDLLVQQFSGENGERMKEKYGVFCSGHNEAVSHYKLLLQQNKKFQNLIKKIGNFSIVRRLGVQECILLVTQRITKYPVLVERIIQNTEAGTEDYEDLTQALNLIKDIISQVDAKVSECEKGQRLREIAGKMDLKSSSKLKNGLTFRKEDMLQRQLHLEGMLCWKTTSGRLKDILAILLTDVLLLLQEKDQKYVFASVDSKPPVISLQKLIVREVANEEKAMFLISASLQGPEMYEIYTSSKEDRNAWMAHIQRAVESCPDEEEGPFSLPEEERKVVEARATRLRDFQERLSMKDQLIAQSLLEKQQIYLEMAEMGGLEDLPQPRGLFRGGDPSETLQGELILKSAMSEIEGIQSLICRQLGSANGQAEDGGSSTGPPRRAETFAGYDCTNSPTKNGSFKKKVSSTDPRPRDWRGPPNSPDLKLSDSDIPGSSEESPQVVEAPGTESDPRLPTVLESELVQRIQTLSQLLLNLQAVIAHQDSYVETQRAAIQEREKQFRLQSTRGNLLLEQERQRNFEKQREERAALEKLQSQLRHEQQRWERERQWQHQELERAGARLQEREGEARQLRERLEQERAELERQRQAYQHDLERLREAQRAVERERERLELLRRLKKQNTAPGALPPDTLAEAQPPSHPPSFNGEGLEGPRVSMLPSGVGPEYAERPEVARRDSAPTENRLAKSDVPIQLLSATNQFQRQAAVQQQIPTKLAASTKGGKDKGGKSRGSQRWESSASFDLKQQLLLNKLMGKDESTSRNRRSLSPILPGRHSPAPPPDPGFPAPSPPPADSPSEGFSLKAGGTALLPGPPAPSPLPATPLSAKEDASKEDVIFF

SEQ ID NO: 7771 - protein, 556 aa, Homo sapiens
MRGRGGGRARCPAPLRSLLGAFGARDAAAAARDPAQDEMDQTPPARPEYLVSGIRTPPVRRNSKLATLGRIFKPWKWRKKKNEKLKQTTSALEKKMAGRQGREELIKKGLLEMMEQDAESKTCNPDGGPRSVQSEPPTPKSETLTSEDAQPGSPLATGTDQVSLDKPLSSAAHLDDAAKMPSASSGEEADAGSLLPTTNELSQALAGADSLDSPPRPLERSVGQLPSPPLLPTPPPKASSKTTKNVTGQATLFQASSMKSADPSLRGQLSTPTGSPHLTTVHRPLPPSRVIEELHRALATKHRQDSFQGRESKGSPKKRLDVRLSRTSSVERGKEREEAWSFDGALENKRTAAKESEENKENLIINSELKDDLLLYQDEEALNDSIISGTLPRKCKKELLAVKLRNRPSKQELEDRNIFPRRTDEERQEIRQQIEMKLSKRLSQRPAVEELERRNILKQRNDQTEQEERREIKQRLTRKLNQRPTVDELRDRKILIRFSDYVEVAKAQDYDRRADKPWTRLSAADKAAIRKELNEYKSNEMEVHASSKHLTRFHRP

SEQ ID NO: 7772 - protein, 423 aa, Homo sapiens
MEPAPARSPRPQQDPARPQEPTMPPPETPSEGRQPSPSPSPTERAPASEEEFQFLRCQQCQAEAKCPKLLPCLHTLCSGCLEASGMQCPICQAPWPLGADTPALDNVFFESLQRRLSVYRQIVDAQAVCTRCKESADFWCFECEQLLCAKCFEAHQWFLKHEARPLAELRNQSVREFLDGTRKTNNIFCSNPNHRTPTLTSIYCRGCSKPLCCSCALLDSSHSELKCDISAEIQQRQEELDAMTQALQEQDSAFGAVHAQMHAAVGQLGRARAETEELIRERVRQVVAHVRAQERELLEAVDARYQRDYEEMASRLGRLDAVLQRIRTGSALVQRMKCYASDQEVLDMHGFLRQALCRLRQEEPQSLQAAVRTDGFDEFKVRLQDLSSCITQGKDAAVSKKASPEAASTPRDPIDVDLRNALW

SEQ ID NO: 7773 - protein, 870 aa, Homo sapiens
MGPPSLVLCLLSATVFSLLGGSSAFLSHHRLKGRFQRDRRNIRPNIILVLTDDQDVELGSMQVMNKTRRIMEQGGAHFINAFVTTPMCCPSRSSILTGKYVHNHNTYTNNENCSSPSWQAQHESRTFAVYLNSTGYRTAFFGKYLNEYNGSYVPPGWKEWVGLLKNSRFYNYTLCRNGVKEKHGSDYSKDYLTDLITNDSVSFFRTSKKMYPHRPVLMVISHAAPHGPEDSAPQYSRLFPNASQHITPSYNYAPNPDKHWIMRYTGPMKPIHMEFTNMLQRKRLQTLMSVDDSMETIYNMLVETGELDNTYIVYTADHGYHIGQFGLVKGKSMPYEFDIRVPFYVRGPNVEAGCLNPHIVLNIDLAPTILDIAGLDIPADMDGKSILKLLDTERPVNRFHLKKKMRVWRDSFLVERGKLLHKRDNDKVDAQEENFLPKYQRVKDLCQRAEYQTACEQLGQKWQCVEDATGKLKLHKCKGPMRLGGSRALSNLVPKYYGQGSEACTCDSGDYKLSLAGRRKKLFKKKYKASYVRSRSIRSVAIEVDGRVYHVGLGDAAQPRNLTKRHWPGAPEDQDDKDGGDFSGTGGLPDYSAANPIKVTHRCYILENDTVQCDLDLYKSLQAWKDHKLHIDHEIETLQNKIKNLREVRGHLKKKRPEECDCHKISYHTQHKGRLKHRGSSLHPFRKGLQEKDKVWLLREQKRKKKLRKLLKRLQNNDTCSMPGLTCFTHDNQHWQTAPFWTLGPFCACTSANNNTYWCMRTINETHNFLFCEFATGFLEYFDLNTDPYQLMNAVNTLDRDVLNQLHVQLMELRSCKGYKQCNPRTRNMDLGLKDGGSYEQYRQFQRRKWPEMKRPSSKSLGQLWEGWEG

SEQ ID NO: 7774 - protein, 2078 aa, Homo sapiens
MPWPFSESIKKRACRYLLQRYLGHFLQEKLSLEQLSLDLYQGTGSLAQVPLDKWCLNEILESADAPLEVTEGFIQSISLSVPWGSLLQDNCALEVRGLEMVFRPRPRPATGSEPMYWSSFMTSSMQLAKECLSQKLTDEQGEGSQPFEGLEKFAETIETVLRRVKVTFIDTVLRIEHVPENSKTGTALEIRIERTVYCDETADESSGINVHQPTAFAHKLLQLSGVSLFWDEFSASAKSSPVCSTAPVETEPKLSPSWNPKIIYEPHPQLTRNLPEIAPSDPVQIGRLIGRLELSLTLKQNEVLPGAKLDVDGQIDSIHLLLSPRQVHLLLDMLAAIAGPENSSKIGLANKDRKNRPMQQEDEYRIQMELNRYYLRKDSLSVGVSSEQSFYETETARTPSSREEEVFFSMADMDMSHSLSSLPPLGDPPNMDLELSLTSTYTNTPAGSPLSATVLQPTWGEFLDHHKEQPVRGSTFPSNLVHPTPLQKTSLPSRSVSVDESRPELIFRLAVGTFSISVLHIDPLSPPETSQNLNPLTPMAVAFFTCIEKIDPARFSTEDFKSFRAVFAEACSHDHLRFIGTGIKVSYEQRQRSASRYFSTDMSIGQMEFLECLFPTDFHSVPPHYTELLTFHSKEETGSHSPVCLQLHYKHSENRGPQGNQARLSSVPHKAELQIKLNPVCCELDISIVDRLNSLLQPQKLATVEMMASHMYTSYNKHISLHKAFTEVFLDDSHSPANCRISVQVATPALNLSVRFPIPDLRSDQERGPWFKKSLQKEILYLAFTDLEFKTEFIGGSTPEQIKLELTFRELIGSFQEEKGDPSIKFFHVSSGVDGDTTSSDDFDWPRIVLKINPPAMHSILERIAAEEEEENDGHYQEEEEGGAHSLKDVCDLRRPAPSPFSSRRVMFENEQMVMPGDPVEMTEFQDKAISNSHYVLELTLPNIYVTLPNKSFYEKLYNRIFNDLLLWEPTAPSPVETFENISYGIGLSVASQLINTFNKDSFSAFKSAVHYDEESGSEEETLQYFSTVDPNYRSRRKKKLDSQNKNSQSFLSVLLNINHGLIAVFTDVKQDNGDLLENKHGEFWLEFNSGSLFCVTKYEGFDDKHYICLHSSSFSLYHKGIVNGVILPTETRLPSSTRPHWLEPTIYSSEEDGLSKTSSDGVGGDSLNMLSVAVKILSDKSESNTKEFLIAVGLKGATLQHRMLPSGLSWHEQILYFLNIADEPVLGYNPPTSFTTFHVHLWSCALDYRPLYLPIRSLLTVETFSVSSSVALDKSSSTLRIILDEAALHLSDKCNTVTINLSRDYVRVMDMGLLELTITAVKSDSDGEQTEPRFELHCSSDVVHIRTCSDSCAALMNLIQYIASYGDLQTPNKADMKPGAFQRRSKVDSSGRSSSRGPVLPEADQQMLRDLMSDAMEEIDMQQGTSSVKPQANGVLDEKSQIQEPCCSDLFLFPDESGNVSQESGPTYASFSHHFISDAMTGVPTENDDFCILFAPKAAMQEKEEEPVIKIMVDDAIVIRDNYFSLPVNKTDTSKAPLHFPIPVIRYVVKEVSLVWHLYGGKDFGIVPPTSPAKSYISPHSSPSHTPTRHGRNTVCGGKGRNHDFLMEIQLSKVKFQHEVYPPCKPDCDSSLSEHPVSRQVFIVQDLEIRDRLATSQMNKFLYLYCSKEMPRKAHSNMLTVKALHVCPESGRSPQECCLRVSLMPLRLNIDQDALFFLKDFFTSLSAEVELQMTPDPEVKKSPGADVTCSLPRHLSTSKEPNLVISFSGPKQPSQNDSANSVEVVNGMEEKNFSAEEASFRDQPVFFREFRFTSEVPIRLDYHGKHVSMDQGTLAGILIGLAQLNCSELKLKRLSYRHGLLGVDKLFSYAITEWLNDIKKNQLPGILGGVGPMHSLVQLVQGLKDLVWLPIEQYRKDGRIVRGFQRGAASFGTSTAMAALELTNRMVQTIQAAAETAYDMVSPGTLSIEPKKTKRFPHHRLAHQPVDLREGVAKAYSVVKEGITDTAQTIYETAAREHESRGVTGAVGEVLRQIPPAVVKPLIVATEATSNVLGGMRNQIRPDVRQDESQKWRHGDD

SEQ ID NO: 7775 - protein, 490 aa, Homo sapiens
MRPAFALCLLWQALWPGPGGGEHPTADRAGCSASGACYSLHHATMKRQAAEEACILRGGALSTVRAGAELRAVLALLRAGPGPGGGSKDLLFWVALERRRSHCTLENEPLRGFSWLSSDPGGLESDTLQWVEEPQRSCTARRCAVLQATGGVEPAGWKEMRCHLRANGYLCKYQFEVLCPAPRPGAASNLSYRAPFQLHSAALDFSPPGTEVSALCRGQLPISVTCIADEIGARWDKLSGDVLCPCPGRYLRAGKCAELPNCLDDLGGFACECATGFELGKDGRSCVTSGEGQPTLGGTGVPTRRPPATATSPVPQRTWPIRVDEKLGETPLVPEQDNSVTSIPEIPRWGSQSTMSTLQMSLQAESKATITPSGSVISKFNSTTSSATPQAFDSSSAVVFIFVSTAVVVLVILTMTVLGLVKLCFHESPSSQPRKESMGPPGLESDPEPAALGSSSAHCTNNGVKVGDCDLRDRAEGALLAESPLGSSDA

SEQ ID NO: 7776 - protein, 1907 aa, Homo sapiens
MAPEPAPGRTMVPLVPALVMLGLVAGAHGDSKPVFIKVPEDQTGLSGGVASFVCQATGEPKPRITWMKKGKKVSSQRFEVIEFDDGAGSVLRIQPLRVQRDEAIYECTATNSLGEINTSAKLSVLEEEQLPPGFPSIDMGPQLKVVEKARTATMLCAAGGNPDPEISWFKDFLPVDPATSNGRIKQLRSGALQIESSEESDQGKYECVATNSAGTRYSAPANLYVRVRRVAPRFSIPPSSQEVMPGGSVNLTCVAVGAPMPYVKWMMGAEELTKEDEMPVGRNVLELSNVVRSANYTCVAISSLGMIEATAQVTVKALPKPPIDLVVTETTATSVTLTWDSGNSEPVTYYGIQYRAAGTEGPFQEVDGVATTRYSIGGLSPFSEYAFRVLAVNSIGRGPPSEAVRARTGEQAPSSPPRRVQARMLSASTMLVQWEPPEEPNGLVRGYRVYYTPDSRRPPNAWHKHNTDAGLLTTVGSLLPGITYSLRVLAFTAVGDGPPSPTIQVKTQQGVPAQPADFQAEVESDTRIQLSWLLPPQERIIMYELVYWAAEDEDQQHKVTFDPTSSYTLEDLKPDTLYRFQLAARSDMGVGVFTPTIEARTAQSTPSAPPQKVMCVSMGSTTVRVSWVPPPADSRNGVITQYSVAYEAVDGEDRGRHVVDGISREHSSWDLVGLEKWTEYRVWVRAHTDVGPGPESSPVLVRTDEDVPSGPPRKVEVEPLNSTAVHVYWKLPVPSKQHGQIRGYQVTYVRLENGEPRGLPIIQDVMLAEAQWRPEESEDYETTISGLTPETTYSVTVAAYTTKGDGARSKPKIVTTTGAVPGRPTMMISTTAMNTALLQWHPPKELPGELLGYRLQYCRADEARPNTIDFGKDDQHFTVTGLHKGTTYIFRLAAKNRAGLGEEFEKEIRTPEDLPSGFPQNLHVTGLTTSTTELAWDPPVLAERNGRIISYTVVFRDINSQQELQNITTDTRFTLTGLKPDTTYDIKVRAWTSKGSGPLSPSIQSRTMPVEQVFAKNFRVAAAMKTSVLLSWEVPDSYKSAVPFKILYNGQSVEVDGHSMRKLIADLQPNTEYSFVLMNRGSSAGGLQHLVSIRTAPDLLPHKPLPASAYIEDGRFDLSMPHVQDPSLVRWFYIVVVPIDRVGGSMLTPRWSTPEELELDELLEAIEQGGEEQRRRRRQAERLKPYVAAQLDVLPETFTLGDKKNYRGFYNRPLSPDLSYQCFVLASLKEPMDQKRYASSPYSDEIVVQVTPAQQQEEPEMLWVTGPVLAVILIILIVIAILLFKRKRTHSPSSKDEQSIGLKDSLLAHSSDPVEMRRLNYQTPGMRDHPPIPITDLADNIERLKANDGLKFSQEYESIDPGQQFTWENSNLEVNKPKNRYANVIAYDHSRVILTSIDGVPGSDYINANYIDGYRKQNAYIATQGPLPETMGDFWRMVWEQRTATVVMMTRLEEKSRVKCDQYWPARGTETCGLIQVTLLDTVELATYTVRTFALHKSGSSEKRELRQFQFMAWPDHGVPEYPTPILAFLRRVKACNPLDAGPMVVHCSAGVGRTGCFIVIDAMLERMKHEKTVDIYGHVTCMRSQRNYMVQTEDQYVFIHEALLEAATCGHTEVPARNLYAHIQKLGQVPPGESVTAMELEFKLLASSKAHTSRFISANLPCNKFKNRLVNIMPYELTRVCLQPIRGVEGSDYINASFLDGYRQQKAYIATQGPLAESTEDFWRMLWEHNSTIIVMLTKLREMGREKCHQYWPAERSARYQYFVVDPMAEYNMPQYILREFKVTDARDGQSRTIRQFQFTDWPEQGVPKTGEGFIDFIGQVHKTKEQFGQDGPITVHCSAGVGRTGVFITLSIVLERMRYEGVVDMFQTVKTLRTQRPAMVQTEDQYQLCYRAALEYLGSFDHYAT

SEQ ID NO: 7777 - protein, 312 aa, Homo sapiens
MENYNQTSTDFILLGFFPPSRIGLFLFILIVFIFLMALIGNLSMILLIFLDTHLHTPMYFLLSQLSLIDLNYISTIVPKMASDFLSGNKSISFTGCGIQSFFFSALGGAEALLLASMAYDRYIAICFPLHYPIRMSKRMCVLMITGSWIIGSINACAHTVYVLHIPYCQSRAINHFFCDVPAMVTLACMDTWVYEGTVFLSTTIFLVFPFIAISCSYGRVLLAVYHMKSAEGRKKAYLTCSTHLTVVTFYYAPFVYTYLRPRSLRSPTEDKVLAVFYTTLTPMLNPIIYSLRNKEVMGALTRVSQRICSGKM

SEQ ID NO: 7778 - protein, 630 aa, Homo sapiens
MIQSDKGADPPDKKDMKLSTATNPQNGLSQILRLVLQELSLFYGRDVNGVCLLYDLLHSPWLQALLKIYDCLQEFKEKKLVPATPHAQVLSYEVVELLRETPTSPEIQELRQMLQAPHFKALLSAHDTIAQKDFEPLLPPLPDNIPESEEAMRIVCLVKNQQPLGATIKRHEMTGDILVARIIHGGLAERSGLLYAGDKLVEVNGVSVEGLDPEQVIHILAMSRGTIMFKVVPVSDPPVNSQQMVYVRAMTEYWPQEDPDIPCMDAGLPFQKGDILQIVDQNDALWWQARKISDPATCAGLVPSNHLLKRKQREFWWSQPYQPHTCLKSTLSISMEEEDDMKIDEKCVEAEELSEDKEEFVGYGQKFFIAGFRRSMRLCRRKSHLSPLHASVCCTGSCYSAVGAPYEEVVRYQRRPSDKYRLIVLMGPSGVGVNELRRQLIEFNPSHFQSAVPHTTRTKKSYEMNGREYHYVSKETFENLIYSHRMLEYGEYKGHLYGTSVDAVQTVLVEGKICVMDLEPQDIQGVRTHELKPYVIFIKPSNMRCMKQSRKNAKVITDYYVDMKFKDEDLQEMENLAQRMETQFGQFFDHVIVNDSLHDACAQLLSAIQKAQEEPQWVPATWISSDTESQ

SEQ ID NO: 7779 - protein, 557 aa, Homo sapiens
MDSTVPSALELPQRLALNPRESPRSPEEEEPHLLSSLAAVQTLASVIRPCYGPHGRQKFLVTMKGETVCTGCATAILRALELEHPAAWLLREAGQTQAENSGDGTAFVVLLTEALLEQAEQLLKAGLPRPQLREAYATATAEVLATLPSLAIQSLGPLEDPSWALHSVMNTHTLSPMDHLTKLVAHACWAIKELDGSFKPERVGVCALPGGTLEDSCLLPGLAISGKLCGQMATVLSGARVALFACPFGPAHPNAPATARLSSPADLAQFSKGSDQLLEKQVGQLAAAGINVAVVLGEVDEETLTLADKYGIVVIQARSWMEIIYLSEVLDTPLLPRLLPPQRPGKCQRVYRQELGDGLAVVFEWECTGTPALTVVLRGATTQGLRSAEQAVYHGIDAYFQLCQDPRLIPGAGATEMALAKMLSDKGSRLEGPSGPAFLAFAWALKYLPKTLAENAGLAVSDVMAEMSGVHQGGNLLMGVGTEGIINVAQEGVWDTLIVKAQGFRAVAEVVLQLVTVDEIVVAKKSPTHQEIWNPDSKKTKKHPPPVETKKILGLNN

SEQ ID NO: 7780 - protein, 1194 aa, Homo sapiens
MDAKARNCLLQHREALEKDIKTSYIMDHMISDGFLTISEEEKVRNEPTQQQRAAMLIKMILKKDNDSYVSFYNALLHEGYKDLAALLHDGIPVVSSSSVRTVLCEGGVPQRPVVFVTRKKLVNAIQQKLSKLKGEPGWVTIHGMAGCGKSVLAAEAVRDHSLLEGCFPGGVHWVSVGKQDKSGLLMKLQNLCTRLDQDESFSQRLPLNIEEAKDRLRILMLRKHPRSLLILDDVWDSWVLKAFDSQCQILLTTRDKSVTDSVMGPKYVVPVESSLGKEKGLEILSLFVNMKKADLPEQAHSIIKECKGSPLVVSLIGALLRDFPNRWEYYLKQLQNKQFKRIRKSSSYDYEALDEAMSISVEMLREDIKDYYTDLSILQKDVKVPTKVLCILWDMETEEVEDILQEFVNKSLLFCDRNGKSFRYYLHDLQVDFLTEKNCSQLQDLHKKIITQFQRYHQPHTLSPDQEDCMYWYNFLAYHMASAKMHKELCALMFSLDWIKAKTELVGPAHLIHEFVEYRHILDEKDCAVSENFQEFLSLNGHLLGRQPFPNIVQLGLCEPETSEVYQQAKLQAKQEVDNGMLYLEWINKKNITNLSRLVVRPHTDAVYHACFSEDGQRIASCGADKTLQVFKAETGEKLLEIKAHEDEVLCCAFSTDDRFIATCSVDKKVKIWNSMTGELVHTYDEHSEQVNCCHFTNSSHHLLLATGSSDCFLKLWDLNQKECRNTMFGHTNSVNHCRFSPDDKLLASCSADGTLKLWDATSANERKSINVKQFFLNLEDPQEDMEVIVKCCSWSADGARIMVAAKNKIFLWNTDSRSKVADCRGHLSWVHGVMFSPDGSSFLTSSDDQTIRLWETKKVCKNSAVMLKQEVDVVFQENEVMVLAVDHIRRLQLINGRTGQIDYLTEAQVSCCCLSPHLQYIAFGDENGAIEILELVNNRIFQSRFQHKKTVWHIQFTADEKTLISSSDDAEIQVWNWQLDKCIFLRGHQETVKDFRLLKNSRLLSWSFDGTVKVWNIITGNKEKDFVCHQGTVLSCDISHDATKFSSTSADKTAKIWSFDLLLPLHELRGHNGCVRCSAFSVDSTLLATGDDNGEIRIWNVSNGELLHLCAPLSEEGAATHGGWVTDLCFSPDGKMLISAGGYIKWWNVVTGESSQTFYTNGTNLKKIHVSPDFKTYVTVDNLGILYILQTLE

SEQ ID NO: 7781 - protein, 389 aa, Homo sapiens
MQGAQEASASEMLPLLLPLLWAGALAQERRFQLEGPESLTVQEGLCVLVPCRLPTTLPASYYGYGYWFLEGADVPVATNDPDEEVQEETRGRFHLLWDPRRKNCSLSIRDARRRDNAAYFFRLKSKWMKYGYTSSKLSVRVMALTHRPNISIPGTLESGHPSNLTCSVPWVCEQGTPPIFSWMSAAPTSLGPRTTQSSVLTITPRPQDHSTNLTCQVTFPGAGVTMERTIQLNVSWMLRRPPLSTPDAPQKVAISIFQGNSAAFKILQNTSSLPVLEGQALRLLCDADGNPPAHLSWFQGFPALNATPISNTGVLELPQVGSAEEGDFTCRAQHPLGSLQISLSLFVHWKPEGRAGGVLGAVWGASITTLVFLCVCFIFRVISTSSRQA

SEQ ID NO: 7782 - protein, 1052 aa, Homo sapiens
MEAAHLLPAADVLRHFSVTAEGGLSPAQVTGARERYGPNELPSEEGKSLWELVLEQFEDLLVRILLLAALVSFVLAWFEEGEETTTAFVEPLVIMLILVANAIVGVWQERNAESAIEALKEYEPEMGKVIRSDRKGVQRIRARDIVPGDIVEVAVGDKVPADLRLIEIKSTTLRVDQSILTGESVSVTKHTEAIPDPRAVNQDKKNMLFSGTNITSGKAVGVAVATGLHTELGKIRSQMAAVEPERTPLQRKLDEFGRQLSHAISVICVAVWVINIGHFADPAHGGSWLRGAVYYFKIAVALAVAAIPEGLPAVITTCLALGTRRMARKNAIVRSLPSVETLGCTSVICSDKTGTLTTNQMSVCRMFVVAEADAGSCLLHEFTISGTTYTPEGEVRQGDQPVRCGQFDGLVELATICALCNDSALDYNEAKGVYEKVGEATETALTCLVEKMNVFDTDLQALSRVERAGACNTVIKQLMRKEFTLEFSRDRKSMSVYCTPTRPHPTGQGSKMFVKGAPESVIERCSSVRVGSRTAPLTPTSREQILAKIRDWGSGSDTLRCLALATRDAPPRKEDMELDDCSKFVQYETDLTFVGCVGMLDPPRPEVAACITRCYQAGIRVVMITGDNKGTAVAICRRLGIFGDTEDVAGKAYTGREFDDLSPEQQRQACRTARCFARVEPAHKSRIVENLQSFNEITAMTGDGVNDAPALKKAEIGIAMGSGTAVAKSAAEMVLSDDNFASIVAAVEEGRAIYSNMKQFIRYLISSNVGEVVCIFLTAILGLPEALIPVQLLWVNLVTDGLPATALGFNPPDLDIMEKLPRSPREALISGWLFFRYLAIGVYVGLATVAAATWWFVYDAEGPHINFYQLRNFLKCSEDNPLFAGIDCEVFESRFPTTMALSVLVTIEMCNALNSVSENQSLLRMPPWMNPWLLVAVAMSMALHFLILLVPPLPLIFQVTPLSGRQWVVVLQISLPVILLDEALKYLSRNHMHACLYPGLLRTVSQAWSRQPLTTSWTPDHTGLASLGQGHSIVSLSELLREGGSREEMSQK

SEQ ID NO: 7783 - protein, 438 aa, Homo sapiens
MGGCAGSRRRFSDSEGEETVPEPRLPLLDHQGAHWKNAVGFWLLGLCNNFSYVVMLSAAHDILSHKRTSGNQSHVDPGPTPIPHNSSSRFDCNSVSTAAVLLADILPTLVIKLLAPLGLHLLPYSPRVLVSGICAAGSFVLVAFSHSVGTSLCGVVFASISSGLGEVTFLSLTAFYPRAVISWWSSGTGGAGLLGALSYLGLTQAGLSPQQTLLSMLGIPALLLASYFLLLTSPEAQDPGGEEEAESAARQPLIRTEAPESKPGSSSSLSLRERWTVFKGLLWYIVPLVVVYFAEYFINQGLFELLFFWNTSLSHAQQYRWYQMLYQAGVFASRSSLRCCRIRFTWALALLQCLNLVFLLADVWFGFLPSIYLVFLIILYEGLLGGAAYVNTFHNIALETSDEHREFAMAATCISDTLGISLSGLLALPLHDFLCQLS

SEQ ID NO: 7784 - protein, 1730 aa, Homo sapiens
MNVQPCSRCGYGVYPAEKISCIDQIWHKACFHCEVCKMMLSVNNFVSHQKKPYCHAHNPKNNTFTSVYHTPLNLNVRTFPEAISGIHDQEDGEQCKSVFHWDMKSKDKEGAPNRQPLANERAYWTGYGEGNAWCPGALPDPEIVRMVEARKSLGEEYTEDYEQPRGKGSFPAMITPAYQRAKKANQLASQVEYKRGHDERISRFSTVVDTPELLRSKAGAQLQSDVRYTEDYEQQRGKGSFPAMITPAYQIAKRANELASDVRYHQQYQKEMRGMAGPAIGAEGILTRECADQYGQGYPEEYEEHRGKGSFPAMITPAYQNAKKAHELASDIKYRQDFNKMKGAAHYHSLPAQDNLVLKQAQSVNKLVSEVEYKKDLESSRGHSINYCETPQFRNVSKISKFTSDNKYKENYQNHMRGRYEGVGMDRRTLHAMKVGSLASNVAYKADYKHDIVDYNYPATLTPSYQTAMKLVPLKDANYRQSIDKLKYSSVTDTPQIVQAKINAQQLSHVNYRADYEKNKLNYTLPQDVPQLVKAKTNAKLFSEVKYKEGWEKTKGKGFEMKLDAMSLLAAKASGELASNIKYKEEYEKTKGKAMGTADSRLLHSLQIAKMSSEVEYKKGFEESKTRFHLPMDMVNIRHAKKAQTLASDLDYRKKLHEYTVLPEDMKTQWAKKAYGLQSELQYKADLAWMKGVGWLTEGSLNLEQAKKAGQLVSEKNYRQRVDELKFTSVTDSSQMEHAKKSQELQSGVAYKAGNEQSVHQYTISKDEPLFLQARANAANLSEKLYKSSWENQKAKGFELRLDSLTFLAAKAKRDLASEVKYKEDYERSRGKLIGAKDVQGDSQMSHSLQMSKLQSELEYKKGFEDTKSQCHVSLDMVHLVHARKAQHLATDVGYKTAEHHFTALPTDMKVEWAKKAYGLQSDNQYRADVKWMKGMGWVATGSLNVEQAKKAGELISEKKYRQHPDALKFTSIKDTPEMVQARISYTQAVDRLYREQGENIKHHYTPTADLPEVLLAKLNAMNISETRYKESWSKLRDGGYKLRLDALPFQAAKASGEIISDYKYKEAFEKMKGQMLGSRSLEDDISLAHSVYATSLQSDVNYKKGFEHSKAQFHLPLDMAALVHAKKAQTLASNQDYKHPLPQYTSLAEDLRLSCAKKAHKLQSENLYRSDLNFMRGVACVIPGTLEIEGRKKASELISESKYRQHPHSFKYTAVTDTPNLLHAKFSNQITNERLYKAAGEDARHEYTMTLGLPEFIRAKTNAANLSDARYKESWRNLRAQGYKLTIEALPFQAARASGDIASDFLYRHDFVKERGKLIGPQSVRDDPRIQHCRRMGQLQSELQYRRGATSSQAQFHLPMDMVHLVHAKNAQALASDHDYRTQYHKFTALPEDLKMAWAKKAHALQSELRYKSDLIGMKGIGWLALRSPQMESAKKAGELISETKYRKKPDSIKFTTVVDSPDLVHAKNSYMHCNERMYRSGDAESLHRYTLIPDHPDFTRARLNALHLSDKVYRNSWEQTRAGSYDFRLDAIPFQTARASREIASDFRYKEAFLRDRGLQIGYRSVDDDPRMKHFLNVGRLQSDNEYKKDFAKSRSQFHSSTDQPGLLQAKRSQQLASDVHYRQPLPQPTCDPEQLGLRHAQKAHQLQSDVKYKSDLNLTRGVGWTPPGSYKVEMARRAAELANARGLGLQGAYRGAEAVEAGDHQSGEVNPDATEILHVKKKKALLL

SEQ ID NO: 7785 - protein, 1176 aa, Homo sapiens
MALARPGTPDPQALASVLLLLLWAPALSLLAGTVPSEPPSACASDPCAPGTECQATESGGYTCGPMEPRGCATQPCHHGALCVPQGPDPTGFRCYCVPGFQGPRCELDIDECASRPCHHGATCRNLADRYECHCPLGYAGVTCEMEVDECASAPCLHGGSCLDGVGSFRCVCAPGYGGTRCQLDLDECQSQPCAHGGTCHDLVNGFRCDCAGTGYEGTHCEREVLECASAPCEHNASCLEGLGSFRCLCWPGYSGELCEVDEDECASSPCQHGGRCLQRSDPALYGGVQAAFPGAFSFRHAAGFLCHCPPGFEGADCGVEVDECASRPCLNGGHCQDLPNGFQCHCPDGYAGPTCEEDVDECLSDPCLHGGTCSDTVAGYICRCPETWGGRDCSVQLTGCQGHTCPLAATCIPIFESGVHSYVCHCPPGTHGPFCGQNTTFSVMAGSPIQASVPAGGPLGLALRFRTTLPAGTLATRNDTKESLELALVAATLQATLWSYSTTVLVLRLPDLALNDGHWHQVEVVLHLATLELRLWHEGCPARLCVASGPVALASTASATPLPAGISSAQLGDATFAGCLQDVRVDGHLLLPEDLGENVLLGCERREQCRPLPCVHGGSCVDLWTHFRCDCARPHRGPTCADEIPAATFGLGGAPSSASFLLQELPGPNLTVSFLLRTRESAGLLLQFANDSAAGLTVFLSEGRIRAEVPGSPAVVLPGRWDDGLRHLVMLSFGPDQLQDLGQHVHVGGRLLAADSQPWGGPFRGCLQDLRLDGCHLPFFPLPLDNSSQPSELGGRQSWNLTAGCVSEDMCSPDPCFNGGTCLVTWNDFHCTCPANFTGPTCAQQLWCPGQPCLPPATCEEVPDGFVCVAEATFREGPPAAFSGHNASSGRLLGGLSLAFRTRDSEAWLLRAAAGALEGVWLAVRNGSLAGGVRGGHGLPGAVLPIPGPRVADGAWHRVRLAMERPAATTSRWLLWLDGAATPVALRGLASDLGFLQGPGAVRILLAENFTGCLGRVALGGLPLPLARPRPGAAPGAREHFASWPGTPAPILGCRGAPVCAPSPCLHDGACRDLFDAFACACGPGWEGPRCEAHVDPCHSAPCARGRCHTHPDGRFECRCPPGFGGPRCRWDGWAGGWAANAPWGYGGAEKSARSVDESLPFPGPHVLICDMRRTV

SEQ ID NO: 7786 - protein, 266 aa, Homo sapiens
MVCLKLPGGSCMTALTVTLMVLSSPLALSGDTRPRFLWQPKRECHFFNGTERVRFLDRYFYNQEESVRFDSDVGEFRAVTELGRPDAEYWNSQKDILEQARAAVDTYCRHNYGVVESFTVQRRVQPKVTVYPSKTQPLQHHNLLVCSVSGFYPGSIEVRWFLNGQEEKAGMVSTGLIQNGDWTFQTLVMLETVPRSGEVYTCQVEHPSVTSPLTVEWRARSESAQSKMLSGVGGFVLGLLFLGAGLFIYFRNQKGHSGLQPTGFLS

SEQ ID NO: 7787 - protein, 334 aa, Homo sapiens
MSWIKEGELSLWERFCANIIKAGPMPKHIAFIMDGNRRYAKKCQVERQEGHSQGFNKLAETLRWCLNLGILEVTVYAFSIENFKRSKSEVDGLMDLARQKFSRLMEEKEKLQKHGVCIRVLGDLHLLPLDLQELIAQAVQATKNYNKCFLNVCFAYTSRHEISNAVREMAWGVEQGLLDPSDISESLLDKCLYTNRSPHPDILIRTSGEVRLSDFLLWQTSHSCLVFQPVLWPEYTFWNLFEAILQFQMNHSVLQQKARDMYAEERKRQQLERDQATVTEQLLREGLQASGDAQLRRTRLHKLSARREERVQGFLQALELKRADWLARLGTASA

SEQ ID NO: 7788 - protein, 99 aa, Homo sapiens
MAFRDVAVDFTQDEWRLLSPAQRTLYREVMLENYSNLVSLGISFSKPELITQLEQGKETWREEKKCSPATCPDHQEYGNNCDLQKEADPEPELYLDPFC

SEQ ID NO: 7789 - protein, 2986 aa, Homo sapiens
MTDRFWDQWYLWYLRLLRLLDRGSFRNDGLKASDVLPILKEKVAFVSGGRDKRGGPILTFPARSNHDRIRQEDLRKLVTYLASVPSEDVCKRGFTVIIDMRGSKWDLIKPLLKTLQEAFPAEIHVALIIKPDNFWQKQKTNFGSSKFIFETSMVSVEGLTKLVDPSQLTEEFDGSLDYNHEEWIELRLSLEEFFNSAVHLLSRLEDLQEMLARKEFPVDVEGSRRLIDEHTQLKKKVLKAPVEELDREGQRLLQCIRCSDGFSGRNCIPGSADFQSLVPKITSLLDKLHSTRQHLHQMWHVRKLKLDQCFQLRLFEQDAEKMFDWISHNKELFLQSHTEIGVSYQYALDLQTQHNHFAMNSMNAYVNINRIMSVASRLSEAGHYASQQIKQISTQLDQEWKSFAAALDERSTILAMSAVFHQKAEQFLSGVDAWCKMCSEGGLPSEMQDLELAIHHHQTLYEQVTQAYTEVSQDGKALLDVLQRPLSPGNSESLTATANYSKAVHQVLDVVHEVLHHQRRLESIWQHRKVRLHQRLQLCVFQQDVQQVLDWIENHGEAFLSKHTGVGKSLHRARALQKRHDDFEEVAQNTYTNADKLLEAAEQLAQTGECDPEEIYKAARHLEVRIQDFVRRVEQRKLLLDMSVSFHTHTKELWTWMEDLQKEMLEDVCADSVDAVQELIKQFQQQQTATLDATLNVIKEGEDLIQQLRSAPPSLGEPSEARDSAVSNNKTPHSSSISHIESVLQQLDDAQVQMEELFHERKIKLDIFLQLRIFEQYTIEVTAELDAWNEDLLRQMNDFNTEDLTLAEQRLQRHTERKLAMNNMTFEVIQQGQDLHQYITEVQASGIELICEKDIDLAAQVQELLEFLHEKQHELELNAEQTHKRLEQCLQLRHLQAEVKQVLGWIRNGESMLNASLVNASSLSEAEQLQREHEQFQLAIESLFHATSLQKTHQSALQVQQKAEVLLQAGHYDADAIRECAEKVALHWQQLMLKMEDRLKLVNASVAFYKTSEQVCSVLESLEQEYRRDEDWCGGRDKLGPAAEIDHVIPLISKHLEQKEAFLKACTLARRNAEVFLKYIHRNNVSMPSVASHTRGPEQQVKAILSELLQRENRVLHFWTLKKRRLDQCQQYVVFERSAKQALDWIQETGEFYLSTHTSTGETTEETQELLKEYGEFRVPAKQTKEKVKLLIQLADSFVEKGHIHATEIRKWVTTVDKHYRDFSLRMGKYRYSLEKALGVNTEDNKDLELDIIPASLSDREVKLRDANHEVNEEKRKSARKKEFIMAELLQTEKAYVRDLHECLETYLWEMTSGVEEIPPGILNKEHIIFGNIQEIYDFHNNIFLKELEKYEQLPEDVGHCFVTWADKFQMYVTYCKNKPDSNQLILEHAGTFFDEIQQRHGLANSISSYLIKPVQRITKYQLLLKELLTCCEEGKGELKDGLEVMLSVPKKANDAMHVSMLEGFDENLDVQGELILQDAFQVWDPKSLIRKGRERHLFLFEISLVFSKEIKDSSGHTKYVYKNKLLTSELGVTEHVEGDPCKFALWSGRTPSSDNKTVLKASNIETKQEWIKNIREVIQERIIHLKGALKEPLQLPKTPAKQRNNSKRDGVEDIDSQGDGSSQPDTISIASRTSQNTVDSDKLSGGCELTVVLQDFSAGHSSELTIQVGQTVELLERPSERPGWCLVRTTERSPPLEGLVPSSALCISHSRSSVEMDCFFPLVKDAYSHSSSENGGKSESVANLQAQPSLNSIHSSPGPKRSTNTLKKWLTSPVRRLNSGKADGNIKKQKKVRDGRKSFDLGSPKPGDETTPQGDSADEKSKKGWGEDEPDEESHTPLPPPMKIFDNDPTQDEMSSSLLAARQASTEVPTAADLVNAIEKLVKNKLSLEGSSYRGSLKDPAGCLNEGMAPPTPPKNPEEEQKAKALRGRMFVLNELVQTEKDYVKDLGIVVEGFMKRIEEKGVPEDMRGKDKIVFGNIHQIYDWHKDFFLAELEKCIQEQDRLAQLFIKHERKLHIYVWYCQNKPRSEYIVAEYDAYFEEVKQEINQRLTLSDFLIKPIQRITKYQLLLKDFLRYSEKAGLECSDIEKAVELMCLVPKRCNDMMNLGRLQGFEGTLTAQGKLLQQDTFYVIELDAGMQSRTKERRVFLFEQIVIFSELLRKGSLTPGYMFKRSIKMNYLVLEENVDNDPCKFALMNRETSERVVLQAANADIQQAWVQDINQVLETQRDFLNALQSPIEYQRKERSTAVMRSQPARLPQASPRPYSSVPAGSEKPPKGSSYNPPLPPLKISTSNGSPGFEYHQPGDKFEASKQNDLGGCNGTSSMAVIKDYYALKENEICVSQGEVVQVLAVNQQNMCLVYQPASDHSPAAEGWVPGSILAPLTKATAAESSDGSIKKSCSWHTLRMRKRAEVENTGKNEATGPRKPKDILGNKVSVKETNSSEESECDDLDPNTSMEILNPNFIQEVAPEFLVPLVDVTCLLGDTVILQCKVCGRPKPTITWKGPDQNILDTDNSSATYTVSSCDSGEITLKICNLMPQDSGIYTCIATNDHGTTSTSATVKVQGVPAAPNRPIAQERSCTSVILRWLPPSSTGNCTISGYTVEYREEGSQIWQQSVASTLDTYLVIEDLSPGCPYQFRVSASNPWGISLPSEPSEFVRLPEYDAAADGATISWKENFDSAYTELNEIGRGRFSIVKKCIHKATRKDVAVKFVSKKMKKKEQAAHEAALLQHLQHPQYITLHDTYESPTSYILILELMDDGRLLDYLMNHDELMEEKVAFYIRDIMEALQYLHNCRVAHLDIKPENLLIDLRIPVPRVKLIDLEDAVQISGHFHIHHLLGNPEFAAPEVIQGIPVSLGTDIWSIGVLTYVMLSGVSPFLDESKEETCINVCRVDFSFPHEYFCGVSNAARDFINVILQEDFRRRPTAATCLQHPWLQPHNGSYSKIPLDTSRLACFIERRKHQNDVRPIPNVKSYIVNRVNQGT

SEQ ID NO: 7790 - protein, 794 aa, Homo sapiens
MSAESGPGTRLRNLPVMGDGLETSQMSTTQAQAQPQPANAASTNPPPPETSNPNKPKRQTNQLQYLLRVVLKTLWKHQFAWPFQQPVDAVKLNLPDYYKIIKTPMDMGTIKKRLENNYYWNAQECIQDFNTMFTNCYIYNKPGDDIVLMAEALEKLFLQKINELPTEETEIMIVQAKGRGRGRKETGTAKPGVSTVPNTTQASTPPQTQTPQPNPPPVQATPHPFPAVTPDLIVQTPVMTVVPPQPLQTPPPVPPQPQPPPAPAPQPVQSHPPIIAATPQPVKTKKGVKRKADTTTPTTIDPIHEPPSLPPEPKTTKLGQRRESSRPVKPPKKDVPDSQQHPAPEKSSKVSEQLKCCSGILKEMFAKKHAAYAWPFYKPVDVEALGLHDYCDIIKHPMDMSTIKSKLEAREYRDAQEFGADVRLMFSNCYKYNPPDHEVVAMARKLQDVFEMRFAKMPDEPEEPVVAVSSPAVPPPTKVVAPPSSSDSSSDSSSDSDSSTDDSEEERAQRLAELQEQLKAVHEQLAALSQPQQNKPKKKEKDKKEKKKEKHKRKEEVEENKKSKAKEPPPKKTKKNNSSNSNVSKKEPAPMKSKPPPTYESEEEDKCKPMSYEEKRQLSLDINKLPGEKLGRVVHIIQSREPSLKNSNPDEIEIDFETLKPSTLRELERYVTSCLRKKRKPQAEKVDVIAGSSKMKGFSSSESESSSESSSSDSEDSETAFCTSGDFVSPGPSPYHSHVQCGRFREMLRWFLVDVEQTAAGQPHRQSAAGPAITWAPAIAYPSPECARCCVGCS

SEQ ID NO: 7791 - protein, 5795 aa, Homo sapiens
MCDCFHMVLPTWPGTPGSVSGRQLQPGEPGAETEDDHSVTEGPADEGIRPRPQGSSPVYEYTTEAADFGLQEDAPGRQGSAGRRRSWWKRDSGDSRTFFRMSRPEAVQEATEVTLKTEVEAGASGYSVTGGGDQGIFVKQVLKDSSAAKLFNLREGDQLLSTTVFFENIKYEDALKILQYSEPYKVQFKIRRQLPAPQDEEWASSDAQHGPQGKEKEDTDVADGCRETPTKTLEGDGDQERLISKPRVGRGRQSQRERLSWPKFQSIKSKRGPGPQRSHSSSEAYEPRDAHDVSPTSTDTEAQLTVERQEQKAGPGSQRRRKFLNLRFRTGSGQGPSSTGQPGRGFQSGVGRAGVLEELGPWGDSLEETGAATGSRREERAEQDREVMPAQSMPLPTELGDPRLCEGTPQEGGLRAARLHGKTLEGQAQETAVAQRKPRAQPTPGMSREGEGEGLQSLEIGIARLSLRDTTEGGTQIGPPEIRVRVHDLKTPKFAFSTEKEPERERRLSTPQRGKRQDASSKAGTGLKGEEVEGAGWMPGREPTTHAEAQGDEGDGEEGLQRTRITEEQDKGREDTEGQIRMPKFKIPSLGWSPSKHTKTGREKATEDTEQGREGEATATADRREQRRTEEGLKDKEDSDSMTNTTKIQLIHDEKRLKKEQILTEKEVATKDSKFKMPKFKMPLFGASAPGKSMEASVDVSAPKVEADVSLLSMQGDLKTTDLSVQTPSADLEVQDGQVDVKLPEGPLPEGASLKGHLPKVQRPSLKMPKVDLKGPKLDLKGPKAEVTAPDVKMSLSSMEVDVQAPRAKLDGARLEGDLSLADKEVTAKDSKFKMPKFKMPSFGVSAPGKSMEDSVDVSAPKVEADVSLSSMQGDLKATDLSIQPPSADLEVQAGQVDVKLPEGPVPEGAGPKVHLPKVEMPSFKMPKVDLKGPQIDVKGPKLDLKGPKAEVTAPDGEVSLPSMEVDVQAQKAKLDGAWLEGDLSLADKDVTAKDSKFKMPKFKMPSFGVSAPGKSIKALVDVSAPKVEADLSLPSMQGDLKTTDLSIQPASTDLKVQADQVDVKLPEGHLPEGAGLKGHLPKVEMPSFKMPKVALKGPQVDVKGPKLDLKSPKAEVTAPDVEVSLPSVEVDVEAPGAKLDSARLEGELSLADKDVTAKDSRFKMPKFKMPSFGASAPGKSIEASVDVSAPKVEADVSLPSMQGDLKTTDLSIQPPSADLEVHAGQVDVKLLEGHVPEGAGFKGHLPKVQMPSLKMPKVDLKGPQVEVRGPKLDLKGHKAEVTAHEVAVSLPSVEVDMQAPGAKLDGAQLDGDLSLADKDVTAKDSKFKMPKFKMPSFGVSAPGKSIEASVDLSAPKVEADMSLPSMQGDLKTTDLSIQPPSTDLELQAGQLDVKLPEGPVPEGAGLKGHLPKLQMPSFKVPKVDLKGPEIDIKGPKLDLKDPKVEVTAPDVEVSLPSVEVDVEAPGAKLDGGRLEEDMSLADKDLTTKDSKFKMPKFKMPSFGVSAPGKSIEASVDVSAPKVEADVSLPSMQGDLKATDLSIQPPSADLEVQAGQVDVKLPEGPVSEGAGLKGHLPKVQMPSFKMPKVDLKGPQIDVKGPKLDLKGPKVEVTAPDVKMSLSSMEVDVQAPRAKLDGAQLEGDLSLADKAVTAKDSKFKMPKFKMPSFGVSAPGKSIEASVDVSEPKVEADVSLPSMQGDLKTTDLSIQSPSADLEVQAGQVNVKLPEGPLPEGAGFKGHLPKVQMPSLKMPKVALKGPQMDVKGPKLDLKGPKAEVMAPDVEVSLPSVEVDVEAPGAKLDSVRLEGDLSLADKDVTAKDSKFKMPKFKMPSFGVSAPGKSIEASVDVSAPKVEAEVSLPSMQGDLKTTDLCIPLPSADLVVQAGQVDMKLPEGQVPEGAGLKGHLPKVDMPSFKMPKVDLKGPQTDVKGAKLDLKGPKAEVTAPDVEVSLPSMEVDVQAQKAKLDGARLEGDLSLADKDMTAKDSKFKMPKFKMPSFGVSAPGRSIEASVDVPAPKVEADVSLPSMQGDLKTTDLSIQPPSADLKVQTGQVDVKLPEGHVPEGAGLKGHLPKVEMPSLKMPKVDLKGPQVDIKGPKLDLKDPKVEMRVPDVEVSLPSMEVDVQAPRAKLDSAHLQGDLTLANKDLTTKDSKFKMPKFKMPSFGVSAPGKSIEASVDVSPPKVEADMSLPSMQGDLKTTDLSIQPLSADVKVQAGQVDVKLLEGPVPEEVGLKGHLPKLQMPSFKVPKVDLKGPEIDIKGPKLDLKDPKVEVTAPDVEVSLPSVEVDVKAPGAKLDGARLEGDMSLADKDVTAKDSKFKMPKFKMLSFGVSALGKSIEASADVSALKVEADVSLPSMQGDLKTTDLSVQPPSADLEVQAGQVDVKLPEGPVPEGAGLKGHLPKLQMPSFKMPKVDLKGPQIDVKGPKLDLKGPKTDVMAPDVEVSQPSVEVDVEAPGAKLDGAWLEGDLSVADKDVTTKDSRFKIPKFKMPSFGVSAPGKSIEASVDVSAPKVEADGSLSSMQGDLKATDLSIQPPSADLEVQAGQVDVKLPEGPVPEGAGLKGHLPKVQMPSFKMPEMDLKGPQLDVKGPKLDLKGPKAEVTAPDVEMSLSSMEVDVQAPRAKLDGARLEGDLSLADKGVTAKDSKFKMPKFKMPSFRVSAPGESIEALVDVSELKVEADMSLPSMQGDLKTTDISIQPPSAQLEVQAGQVDVKLPEGHVPEGAGLKGHLPKLQMPSFKMPEVDLKGPQIDVKGPNVDLKGPKAEVTAPDVKMSLSSMEVDVQAPRAKLDGARLEGDLSLADKGMTAKDSKFKMPKFKMPSFGVSAPGKSIEASVDVSELKVEADGSFPSMQGDLKTTDIRIQPPSAQLEVQAGQVDVKLPEGHVPEGAGLKGHLPKVQMPSFKMPKVDLKGPQIDVKGPKLDLKGPKAEVTAPDVEVSLPSVEVDVEAPRAKLDGARLEGDLSLADKDVTAKDSKFKMPKFKMPSFGVSAPGKSIEVSVDVSAPKVEAEVSLPSMQGDLKTTDISIEPPSAQLEVQAGQVDLKLPEGHVPEGAGLKGHLPKLQMPSFKMPKVDRKGPQIDVKGPKLDLKGPKTDVTAPDVEVSQPGMEVDVEAPGAKLDGARLEGDLSLADKDVTAKDSKFKMPKFKMPSFGVSAPGKSIEVLVDVSAPKVEADLSLPSMQGDLKNTDISIEPPSAQLEVQAGQVDVKLPEGHVLEGAGLKGHLPKLQMPSFKMPKVDRKGPQIDIKGPKLDLKGPKMDVTAPDVEVSQPSMEVDVEAPGAKLDGARLEGDLSLADKDVTAKDSKFKMPKFKMPSYRASAPGKSIQASVDVSAPKAEADVSLPSMQGDLKTTDLSIQLPSVDLEVQAGQVDVKLPEGHVPEGAGLKGHLPKVEMPSFKMPKVDLKSPQVDIKGPKLDLKVPKAEVTVPDVEVSLPSVEVDVQAPRAKLDGARLEGDLSLAEKDVTAKDSKFKMPKFKMPSFGVSAPGRSIEASLDVSAPKVEADVSLSSMQGDLKATDLSIQPPSADLEVQAVQVDVELLEGPVPEGAGLKGHLPKVEMPSLKTPKVDLKGPQIDVKGPKLDLKGPKAEVRVPDVEVSLPSVEVDVQAPKAKLDAGRLEGDLSLADKDVTAKDSKFKMPKFKMPSFRVSAPGKSMEASVDVSAPKVEADVSLPSMQGDLKTTDLSIQPPSADLKVQAGQMDVKLPEGQVPEGAGLKEHLPKVEMPSLKMPKVDLKGPQVDIKGPKLDLKVSKAEVTAPDVEVSLPSVEVDVQAPRAKLDSAQLEGDLSLADKDVTAKDSKFKMPKFKMPSFGVSAPGKSIEASVHVSAPKVEADVSLPSMQGDLKTTDLSIQPHSADLTVQARQVDMKLLEGHVPEEAGLKGHLPKVQMPSFKMPKVDLKGPEIDIKGPKLDLKDPKVEVTAPDVEVSLPSVEVDVEAPGAKLDGARLEGDLSLADKDMTAKDSKFKMPKFKMPSFGVSAPGKSMEASVDVTAPKVEADVSLPSMQGDLKATDLSVQPPSADLEVQAGQVDVKLPEGPVPEGASLKGHLPKVQMPSFKMPKVDLKGPQIDVKGPKLDLKGPKAEVTAPDVKMSLSSMEVDVQAPRAKLDGVQLEGDLSLADKDVTAKDSKFKMPKFKMPSFGVSAPGKSMEASVDVSELKAKADVSLPSMQGDLKTTDLSIQSPSADLEVQAGQVDVKLPEGPLPKGAGLKGHLPKVQMPCLKMPKVALKGPQVDVKGPKLDLKGPKADVMTPVVEVSLPSMEVDVEAPGAKLDSVRLEGDLSLADKDMTAKDSKFKMPKFKMPSFGVSAPGKSIEASLDVSALKVEADVSLPSMQGDLKTTHLSIQPPSADLEVQAGQEDVKLPEGPVHEGAGLKGHLPKLQMPSFKVPKVDLKGPQIDVNVPKLDLKGPKVEVTSPNLDVSLPSMEVDIQAPGAKLDSTRLEGDLSLADKDVTAKDSKFKMPKFKMPSFGMLSPGKSIEVSVDVSAPKMEADMSIPSMQGDLKTTDLRIQAPSADLEVQAGQVDLKLPEGHMPEVAGLKGHLPKVEMPSFKMPKVDLKGPQVDVKGPKLDLKGPKAEVMAPDVEVSLPSVETDVQAPGSMLDGARLEGDLSLAHEDVAGKDSKFQGPKLSTSGFEWSSKKVSMSSSEIEGNVTFHEKTSTFPIVESVVHEGDLHDPSRDGNLGLAVGEVGMDSKFKKLHFKVPKVSFSSTKTPKDSLVPGAKSSIGLSTIPLSSSECSSFELQQVSACSEPSMQMPKVGFAGFPSSRLDLTGPHFESSILSPCEDVTLTKYQVTVPRAALAPELALEIPSGSQADIPLPKTECSTDLQPPEGVPTSQAESHSGPLNSMIPVSLGQVSFPKFYKPKFVFSVPQMAVPEGDLHAAVGAPVMSPLSPGERVQCPLPSTQLPSPGTCVSQGPEELVASLQTSVVAPGEAPSEDADHEGKGSPLKMPKIKLPSFRWSPKKETGPKVDPECSVEDSKLSLVLDKDEVAPQSAIHMDLPPERDGEKGRSTKPGFAMPKLALPKMKASKSGVSLPQRDVDPSLSSATAGGSFQDTEKASSDGGRGGLGATASATGSEGVNLHRPQVHIPSLGFAKPDLRSSKAKVEVSQPEADLPLPKHDLSTEGDSRGCGLGDVPVSQPCGEGIAPTPEDPLQPSCRKPDAEVLTVESPEEEAMTKYSQESWFKMPKFRMPSLRRSFRDRGGAGKLEVAQTQAPAATGGEAAAKVKEFLVSGSNVEAAMSLQLPEADAEVTASESKSSTDILRCDLDSTGLKLHLSTAGMTGDELSTSEVRIHPSKGPLPFQMPGMRLPETQVLPGEIDETPLSKPGHDLASMEDKTEKWSSQPEGPLKLKASSTDMPSQISVVNVDQLWEDSVLTVKFPKLMVPRFSFPAPSSEDDVFIPTVREVQCPEANIDTALCKESPGLWGASILKAGAGVPGEQPVDLNLPLEAPPISKVRVHIQGAQVESQEVTIHSIVTPEFVDLSVPRTFSTQIVRESEIPTSEIQTPSYGFSLLKVKIPEPHTQARVYTTMTQHSRTQEGTEEAPIQATPGVDSISGDLQPDTGEPFEMISSSVNVLGQQTLTFEVPSGHQLADSCSDEEPAEILEFPPDDSQEATTPLADEGRAPKDKPESKKSGLLWFWLPNIGFSSSVDETGVDSKNDVQRSAPIQTQPEARPEAELPKKQEKAGWFRFPKLGFSSSPTKKSKSTEDGAELEEQKLQEETITFFDARESFSPEEKEEGELIGPVGTGLDSRVMVTSAARTELILPEQDRKADDESKGSGLGPNEG

SEQ ID NO: 7792 - protein, 463 aa, Homo sapiens
MAQQQTGSRKRKAPAVEAGAGSSSSQGLAAADGEGPLLPKKQKRPATRRRLVHYLKGREVGARGPAGLQGFEGELRGYAVQRLPELLTERQLDLGTLNKVFASQWLNARQVVCGTKCNTLFVVDVQSGHITRIPLMRDKEAGLAQAHQGCGIHAIELNPSKTLLATGGENPNSLAIYQLPTLDPLCLGDRHGHKDWIFAVAWLSDTVAVSGSRDGTVALWRMDPDMFNGSIAWHSEVGLPVYAHIRPRDVEAIPRASTNPSNRKVRALAFSGKNQELGAVSLDGYFHLWKARSTLSRLLSIRLPYCRENVCLTYCDELSLYAVGSQSHVSFLDPRQRQQNIRPLCSREGGTGVRSLSFYQHIITVGTGHGSLLFYDIRAQKFLEERASSSLDSMPGPAGRKLKLACGRGWLNQDDVWVNYFGGMGEFPNALYTHCYNWPEMKLFVAGGPLPSGLHGNYAGLWS

SEQ ID NO: 7793 - protein, 473 aa, Homo sapiens
MALKDTGSGGSTILPISEMVSSSSSPGASAAAAPGPCAPSPFPEVVELNVGGQVYVTKHSTLLSVPDSTLASMFSPSSPRGGARRRGELPRDSRARFFIDRDGFLFRYVLDYLRDKQLALPEHFPEKERLLREAEYFQLTDLVKLLSPKVTKQNSLNDEGCQSDLEDNVSQGSSDALLLRGAAAAVPSGPGAHGGGGGGGAQDKRSGFLTLGYRGSYTTVRDNQADAKFRRVARIMVCGRIALAKEVFGDTLNESRDPDRQPEKYTSRFYLKFTYLEQAFDRLSEAGFHMVACNSSGTAAFVNQYRDDKIWSSYTEYIFFRPPQKIVSPKQEHEDRKHDKVTDKGSESGTSCNELSTSSCDSHSEASTPQDNPSSAQQATAHQPNTLTLDRPSKKAPVQWIPPPDKRRNSELFQTLISKSRETNLSKKKVCEKLSVEEEMKKCIQDFKKIHIPDYFPERKRQWQSELLQKYGL

SEQ ID NO: 7794 - protein, 483 aa, Homo sapiens
MKKGIRYETSRKTSYIFQPQHGPWQTRMRKISNHGSLRVAKVAYPLGLCVGVFIYVAYIKWHRATATQAFFSITRAAPGARWGQQAHSPLGTAADGHEVFYGIMFDAGSTGTRVHVFQFTRPPRETPTLTHETFKALKPGLSAYADDVEKSAQGIRELLDVAKQDIPFDFWKATPLVLKATAGLRLLPGEKAQKLLQKVKKVFKASPFLVGDDCVSIMNGTDEGVSAWITINFLTGSLKTPGGSSVGMLDLGGGSTQIAFLPRVEGTLQASPPGYLTALRMFNRTYKLYSYSYLGLGLMSARLAILGGVEGQPAKDGKELVSPCLSPSFKGEWEHAEVTYRVSGQKAAASLHELCAARVSEVLQNRVHRTEEVKHVDFYAFSYYYDLAAGVGLIDAEKGGSLVVGDFEIAAKYVCRTLETQPQSSPFSCMDLTYVSLLLQEFGFPRSKVLKLTRKIDNVETSWALGAIFHYIDSLNRQKSPAS

SEQ ID NO: 7795 - protein, 377 aa, Homo sapiens
MQHYGVNGYSLHAMNSLSAMYNLHQQAAQQAQHAPDYRPSVHALTLAERLADIILEARYGSQHRKQRRSRTAFTAQQLEALEKTFQKTHYPDVVMRERLAMCTNLPEARVQVWFKNRRAKFRKKQRSLQKEQLQKQKEAEGSHGEGKAEAPTPDTQLDTEQPPRLPGSDPPAELHLSLSEQSASESAPEDQPDREEDPRAGAEDPKAEKSPGADSKGLGCKRGSPKADSPGSLTITPVAPGGGLLGPSHSYSSSPLSLFRLQEQFRQHMAATNNLVHYSSFEVGGPAPAAAAAAAAVPYLGVNMAPLGSLHCQSYYQSLSAAAAAHQGVWGSPLLPAPPAGLAPASATLNSKTTSIENLRLRAKQHAASLGLDTLPN

SEQ ID NO: 7796 - protein, 486 aa, Homo sapiens
MGPLSPARTLRLWGPRSLGVALGVFMTIGFALQLLGGPFQRRLPGLQLRQPSAPSLRPALPSCPPRQRLVFLKTHKSGSSSVLSLLHRYGDQHGLRFALPARYQFGYPKLFQASRVKGYRPQGGGTQLPFHILCHHMRFNLKEVLQVMPSDSFFFSIVRDPAALARSAFSYYKSTSSAFRKSPSLAAFLANPRGFYRPGARGDHYARNLLWFDFGLPFPPEKRAKRGNIHPPRDPNPPQLQVLPSGAGPRAQTLNPNALIHPVSTVTDHRSQISSPASFDLGSSSFIQWGLAWLDSVFDLVMVAEYFDESLVLLADALCWGLDDVVGFMHNAQAGHKQGLSTVSNSGLTAEDRQLTARARAWNNLDWALYVHFNRSLWARIEKYGQGRLQTAVAELRARREALAKHCLVGGEASDPKYITDRRFRPFQFGSAKVLGYILRSGLSPQDQEECERLATPELQYKDKLDAKQFPPTVSLPLKTSRPLSP

SEQ ID NO: 7797 - protein, 673 aa, Homo sapiens
MMHVNNFPFRRHSWICFDVDNGTSAGRSPLDPMTSPGSGLILQANFVHSQRRESFLYRSDSDYDLSPKSMSRNSSIASDIHGDDLIVTPFAQVLASLRTVRNNFAALTNLQDRAPSKRSPMCNQPSINKATITEEAYQKLASETLEELDWCLDQLETLQTRHSVSEMASNKFKRMLNRELTHLSEMSRSGNQVSEFISNTFLDKQHEVEIPSPTQKEKEKKKRPMSQISGVKKLMHSSSLTNSSIPRFGVKTEQEDVLAKELEDVNKWGLHVFRIAELSGNRPLTVIMHTIFQERDLLKTFKIPVDTLITYLMTLEDHYHADVAYHNNIHAADVVQSTHVLLSTPALEAVFTDLEILAAIFASAIHDVDHPGVSNQFLINTNSELALMYNDSSVLENHHLAVGFKLLQEENCDIFQNLTKKQRQSLRKMVIDIVLATDMSKHMNLLADLKTMVETKKVTSSGVLLLDNYSDRIQVLQNMVHCADLSNPTKPLQLYRQWTDRIMEEFFRQGDRERERGMEISPMCDKHNASVEKSQVGFIDYIVHPLWETWADLVHPDAQDILDTLEDNREWYQSTIPQSPSPAPDDPEEGRQGQTEKFQFELTLEEDGESDTEKDSGSQVEEDTSCSDSKTLCTQDSESTEIPLDEQVEEEAVGEEEESQPEACVIDDRSPDT

SEQ ID NO: 7798 - protein, 1169 aa, Homo sapiens
MARQPPPPWVHAAFLLCLLSLGGAIEIPMDLTQPPTITKQSAKDHIVDPRDNILIECEAKGNPAPSFHWTRNSRFFNIAKDPRVSMRRRSGTLVIDFRSGGRPEEYEGEYQCFARNKFGTALSNRIRLQVSKSPLWPKENLDPVVVQEGAPLTLQCNPPPGLPSPVIFWMSSSMEPITQDKRVSQGHNGDLYFSNVMLQDMQTDYSCNARFHFTHTIQQKNPFTLKVLTNHPYNDSSLRNHPDMYSARGVAERTPSFMYPQGTASSQMVLRGMDLLLECIASGVPTPDIAWYKKGGDLPSDKAKFENFNKALRITNVSEEDSGEYFCLASNKMGSIRHTISVRVKAAPYWLDEPKNLILAPGEDGRLVCRANGNPKPTVQWMVNGEPLQSAPPNPNREVAGDTIIFRDTQISSRAVYQCNTSNEHGYLLANAFVSVLDVPPRMLSPRNQLIRVILYNRTRLDCPFFGSPIPTLRWFKNGQGSNLDGGNYHVYENGSLEIKMIRKEDQGIYTCVATNILGKAENQVRLEVKDPTRIYRMPEDQVARRGTTVQLECRVKHDPSLKLTVSWLKDDEPLYIGNRMKKEDDSLTIFGVAERDQGSYTCVASTELDQDLAKAYLTVLGRPDRPRDLELTDLAERSVRLTWIPGDANNSPITDYVVQFEEDQFQPGVWHDHSKYPGSVNSAVLRLSPYVNYQFRVIAINEVGSSHPSLPSERYRTSGAPPESNPGDVKGEGTRKNNMEITWTPMNATSAFGPNLRYIVKWRRRETREAWNNVTVWGSRYVVGQTPVYVPYEIRVQAENDFGKGPEPESVIGYSGEDYPRAAPTEVKVRVMNSTAISLQWNRVYSDTVQGQLREYRAYYWRESSLLKNLWVSQKRQQASFPGDRLRGVVSRLFPYSNYKLEMVVVNGRGDGPRSETKEFTTPEGVPSAPRRFRVRQPNLETINLEWDHPEHPNGIMIGYTLKYVAFNGTKVGKQIVENFSPNQTKFTVQRTDPVSRYRFTLSARTQVGSGEAVTEESPAPPNEAYTNNQADIATQGWFIGLMCAIALLVLILLIVCFIKRSRGGKYPVREKKDVPLGPEDPKEEDGSFDYSDEDNKPLQGSQTSLDGTIKQQESDDSLVDYGEGGEGQFNEDGSFIGQYTVKKDKEETEGNESSEATSPVNAIYSLA

SEQ ID NO: 7799 - protein, 737 aa, Homo sapiens
MGGCTVKPQLLLLALVLHPWNPCLGADSEKPSSIPTDKLLVITVATKESDGFHRFMQSAKYFNYTVKVLGQGEEWRGGDGINSIGGGQKVRLMKEVMEHYADQDDLVVMFTECFDVIFAGGPEEVLKKFQKANHKVVFAADGILWPDKRLADKYPVVHIGKRYLNSGGFIGYAPYVNRIVQQWNLQDNDDDQLFYTKVYIDPLKREAINITLDHKCKIFQTLNGAVDEVVLKFENGKARAKNTFYETLPVAINGNGPTKILLNYFGNYVPNSWTQDNGCTLCEFDTVDLSAVDVHPNVSIGVFIEQPTPFLPRFLDILLTLDYPKEALKLFIHNKEVYHEKDIKVFFDKAKHEIKTIKIVGPEENLSQAEARNMGMDFCRQDEKCDYYFSVDADVVLTNPRTLKILIEQNRKIIAPLVTRHGKLWSNFWGALSPDGYYARSEDYVDIVQGNRVGVWNVPYMANVYLIKGKTLRSEMNERNYFVRDKLDPDMALCRNAREMGVFMYISNRHEFGRLLSTANYNTSHYNNDLWQIFENPVDWKEKYINRDYSKIFTENIVEQPCPDVFWFPIFSEKACDELVEEMEHYGKWSGGKHHDSRISGGYENVPTDDIHMKQVDLENVWLHFIREFIAPVTLKVFAGYYTKGFALLNFVVKYSPERQRSLRPHHDASTFTINIALNNVGEDFQGGGCKFLRYNCSIESPRKGWSFMHPGRLTHLHEGLPVKNGTRYIAVSFIDP

SEQ ID NO: 7800 - protein, 4950 aa, Homo sapiens
DDEVVLQCTATIHKEQQKLCLAAEGFGNRLCFLESTSNSKNVPPDLSICTFVLEQSLSVRALQEMLANTVEKSEGQVDVEKWLFSLKTAQGGGHRTLLYGHAILLRHSYSGMYLCCLSTSRSSTDKLAFDVGLQEDTTGEACWWTIHPASKQRSEGEKVRVGDDLILVSVSSERYLHLSYGNGSLHVDAAFQQTLWSVAPISSGSEAAQGYLIGGDVLRLLHGHMDECLTVPSGEHGEEQRRTVHYEGGAVSVHARSLWRLETLRVAWSGSHIRWGQPFRLRHVTTGKYLSLMEDKNLLLMDKEKADVKSTAFTFRSSKEKLDVGVRKEVDGMGTSEIKYGDSVCYIQHVDTGLWLTYQSVDVKSVRMGSIQRKAIMHHEGHMDDGISLSRSQHEESRTARVIRSTVFLFNRFIRGLDALSKKAKASTVDLPIESVSLSLQDLIGYFHPPDEHLEHEDKQNRLRALKNRQNLFQEEGMINLVLECIDRLHVYSSAAHFADVAGREAGESWKSILNSLYELLAALIRGNRKNCAQFSGSLDWLISRLERLEASSGILEVLHCVLVESPEALNIIKEGHIKSIISLLDKHGRNHKVLDVLCSLCVCHGVAVRSNQHLICDNLLPGRDLLLQTRLVNHVSSMRPNIFLGVSEGSAQYKKWYYELMVDHTEPFVTAEATHLRVGWASTEGYSPYPGGGEEWGGNGVGDDLFSYGFDGLHLWSGCIARTVSSPNQHLLRTDDVISCCLDLSAPSISFRINGQPVQGMFENFNIDGLFFPVVSFSAGIKVRFLLGGRHGEFKFLPPPGYAPCYEAVLPKEKLKVEHSREYKQERTYTRDLLGPTVSLTQAAFTPIPVDTSQIVLPPHLERIREKLAENIHELWVMNKIELGWQYGPVRDDNKRQHPCLVEFSKLPEQERNYNLQMSLETLKTLLALGCHVGISDEHAEDKVKKMKLPKNYQLTSGYKPAPMDLSFIKLTPSQEAMVDKLAENAHNVWARDRIRQGWTYGIQQDVKNRRNPRLVPYTLLDDRTKKSNKDSLREAVRTLLGYGYNLEAPDQDHAARAEVCSGTGERFRIFRAEKTYAVKAGRWYFEFETVTAGDMRVGWSRPGCQPDQELGSDERAFAFDGFKAQRWHQGNEHYGRSWQAGDVVGCMVDMNEHTMMFTLNGEILLDDSGSELAFKDFDVGDGFIPVCSLGVAQVGRMNFGKDVSTLKYFTICGLQEGYEPFAVNTNRDITMWLSKRLPQFLQVPSNHEHIEVTRIDGTIDSSPCLKVTQKSFGSQNSNTDIMFYRLSMPIECAEVFSKTVAGGLPGAGLFGPKNDLEDYDADSDFEVLMKTAHGHLVPDRVDKDKEATKPEFNNHKDYAQEKPSRLKQRFLLRRTKPDYSTSHSARLTEDVLADDRDDYDFLMQTSTYYYSVRIFPGQEPANVWVGWITSDFHQYDTGFDLDRVRTVTVTLGDEKGKVHESIKRSNCYMVCAGESMSPGQGRNNNGLEIGCVVDAASGLLTFIANGKELSTYYQVEPSTKLFPAVFAQATSPNVFQFELGRIKNVMPLSAGLFKSEHKNPVPQCPPRLHVQFLSHVLWSRMPNQFLKVDVSRISERQGWLVQCLDPLQFMSLHIPEENRSVDILELTEQEELLKFHYHTLRLYSAVCALGNHRVAHALCSHVDEPQLLYAIENKYMPGLLRAGYYDLLIDIHLSSYATARLMMNNEYIVPMTEETKSITLFPDENKKHGLPGIGLSTSLRPRMQFSSPSFVSISNECYQYSPEFPLDILKSKTIQMLTEAVKEGSLHARDPVGGTTEFLFVPLIKLFYTLLIMGIFHNEDLKHILQLIEPSVFKEAATPEEESDTLEKELSVDDAKLQGAGEEEAKGGKRPKEGLLQMKLPEPVKLQMCLLLQYLCDCQVRHRIEAIVAFSDDFVAKLQDNQRFRYNEVMQALNMSAALTARKTKEFRSPPQEQINMLLNFKDDKSECPCPEEIRDQLLDFHEDLMTHCGIELDEDGSLDGNSDLTIRGRLLSLVEKVTYLKKKQAEKPVESDSKKSSTLQQLISETMVRWAQESVIEDPELVRAMFVLLHRQYDGIGGLVRALPKTYTINGVSVEDTINLLASLGQIRSLLSVRMGKEEEKLMIRGLGDIMNNKVFYQHPNLMRALGMHETVMEVMVNVLGGGESKEITFPKMVANCCRFLCYFCRISRQNQKAMFDHLSYLLENSSVGLASPAMRGSTPLDVAAASVMDNNELALALREPDLEKVVRYLAGCGLQSCQMLVSKGYPDIGWNPVEGERYLDFLRFAVFCNGESVEENANVVVRLLIRRPECFGPALRGEGGNGLLAAMEEAIKIAEDPSRDGPSPNSGSSKTLDTEEEEDDTIHMGNAIMTFYSALIDLLGRCAPEMHLIHAGKGEAIRIRSILRSLIPLGDLVGVISIAFQMPTIAKDGNVVEPDMSAGFCPDHKAAMVLFLDRVYGIEVQDFLLHLLEVGFLPDLRAAASLDTAALSATDMALALNRYLCTAVLPLLTRCAPLFAGTEHHASLIDSLLHTVYRLSKGCSLTKAQRDSIEVCLLSICGQLRPSMMQHLLRRLVFDVPLLNEHAKMPLKLLTNHYERCWKYYCLPGGWGNFGAASEEELHLSRKLFWGIFDALSQKKYEQELFKLALPCLSAVAGALPPDYMESNYVSMMEKQSSMDSEGNFNPQPVDTSNITIPEKLEYFINKYAEHSHDKWSMDKLANGWIYGEIYSDSSKVQPLMKPYKLLSEKEKEIYRWPIKESLKTMLAWGWRIERTREGDSMALYNRTRRISQTSQVSVDAAHGYSPRAIDMSNVTLSRDLHAMAEMMAENYHNIWAKKKKMELESKGGGNHPLLVPYDTLTAKEKAKDREKAQDILKFLQINGYAVSRGFKDLELDTPSIEKRFAYSFLQQLIRYVDEAHQYILEFDGGSRGKGEHFPYEQEIKFFAKVVLPLIDQYFKNHRLYFLSAASRPLCSGGHASNKEKEMVTSLFCKLGVLVRHRISLFGNDATSIVNCLHILGQTLDARTVMKTGLESVKSALRAFLDNAAEDLEKTMENLKQGQFTHTRNQPKGVTQIINYTTVALLPMLSSLFEHIGQHQFGEDLILEDVQVSCYRILTSLYALGTSKSIYVERQRSALGECLAAFAGAFPVAFLETHLDKHNIYSIYNTKSSRERAALSLPTNVEDVCPNIPSLEKLMEEIVELAESGIRYTQMPHVMEVILPMLCSYMSRWWEHGPENNPERAEMCCTALNSEHMNTLLGNILKIIYNNLGIDEGAWMKRLAVFSQPIINKVKPQLLKTHFLPLMEKLKKKAATVVSEEDHLKAEARGDMSEAELLILDEFTTLARDLYAFYPLLIRFVDYNRAKWLKEPNPEAEELFRMVAEVFIYWSKSHNFKREEQNFVVQNEINNMSFLITDTKSKMSKAAVSDQERKKMKRKGDRYSMQTSLIVAALKRLLPIGLNICAPGDQELIALAKNRFSLKDTEDEVRDIIRSNIHLQGKLEDPAIRWQMALYKDLPNRTDDTSDPEKTVERVLDIANVLFHLEQKSKRVGRRHYCLVEHPQRSKKAVWHKLLSKQRKRAVVACFRMAPLYNLPRHRAVNLFLQGYEKSWIETEEHYFEDKLIEDLAKPGAEPPEEDEGTKRVDPLHQLILLFSRTALTEKCKLEEDFLYMAYADIMAKSCHDEEDDDGEEEVKSFEEKEMEKQKLLYQQARLHDRGAAEMVLQTISASKGETGPMVAATLKLGIAILNGGNSTVQQKMLDYLKEKKDVGFFQSLAGLMQSCSVLDLNAFERQNKAEGLGMVTEEGSGEKVLQDDEFTCDLFRFLQLLCEGHNSDFQNYLRTQTGNNTTVNIIISTVDYLLRVQESISDFYWYYSGKDVIDEQGQRNFSKAIQVAKQVFNTLTEYIQGPCTGNQQSLAHSRLWDAVVGFLHVFAHMQMKLSQDSSQIELLKELMDLQKDMVVMLLSMLEGNVVNGTIGKQMVDMLVESSNNVEMILKFFDMFLKLKDLTSSDTFKEYDPDGKGVISKRDFHKAMESHKHYTQSETEFLLSCAETDENETLDYEEFVKRFHEPAKDIGFNVAVLLTNLSEHMPNDTRLQTFLELAESVLNYFQPFLGRIEIMGSAKRIERVYFEISESSRTQWEKPQVKESKRQFIFDVVNEGGEKEKMELFVNFCEDTIFEMQLAAQISESDLNERSANKEESEKERPEEQGPRMAFFSILTVRSALFALRYNILTLMRMLSLKSLKKQMKKVKKMTVKDMVTAFFSSYWSIFMTLLHFVASVFRGFFRIICSLLLGGSLVEGAKKIKVAELLANMPDPTQDEVRGDGEEGERKPLEAALPSEDLTDLKELTEESDLLSDIFGLDLKREGGQYKLIPHNPNAGLSDLMSNPVPMPEVQEKFQVIYLVTAAFSRRAYVLFVCFHRGEDGEKEEKAKEDKGKQKLRQLHTHRYGEPEVPESAFWKKIIAYQQKLLNYFARNFYNMRMLALFVAFAINFILLFYKVSTSSVVEGKELPTRSSSENAKVTSLDSSSHRIIAVHYVLEESSGYMEPTLRILAILHTVISFFCIIGYYCLKVPLVIFKREKEVARKLEFDGLYITEQPSEDDIKGQWDRLVINTQSFPNNYWDKFVKRKVMDKYGEFYGRDRISELLGMDKAALDFSDAREKKKPKKDSSLSAVLNSIDVKYQMWKLGVVFTDNSFLYLAWYMTMSVLGHYNNFFFAAHLLDIAMGFKTLRTILSSVTHNGKQLVLTVGLLAVVVYLYTVVAFNFFRKFYNKSEDGDTPDMKCDDMLTCYMFHMYVGVRAGGGIGDEIEDPAGDEYEIYRIIFDITFFFFVIVILLAIIQGLIIDAFGELRDQQEQVKEDMETKCFICGIGNDYFDTVPHGFETHTLQEHNLANYLFFLMYLINKDETEHTGQESYVWKMYQERCWEFFPAGDCFRKQYEDQLN

SEQ ID NO: 7801 - protein, 474 aa, Homo sapiens
MIMNKMKNFKRRFSLSVPRTETIEESLAEFTEQFNQLHNRRNENLQLGPLGRDPPQECSTFSPTDSGEEPGQLSPGVQFQRRQNQRRFSMEDVSKRLSLPMDIRLPQEFLQKLQMESPDLPKPLSRMSRRASLSDIGFGKLETYVKLDKLGEGTYATVFKGRSKLTENLVALKEIRLEHEEGAPCTAIREVSLLKNLKHANIVTLHDLIHTDRSLTLVFEYLDSDLKQYLDHCGNLMSMHNVKIFMFQLLRGLAYCHHRKILHRDLKPQNLLINERGELKLADFGLARAKSVPTKTYSNEVVTLWYRPPDVLLGSTEYSTPIDMWGVGCIHYEMATGRPLFPGSTVKEELHLIFRLLGTPTEETWPGVTAFSEFRTYSFPCYLPQPLINHAPRLDTDGIHLLSSLLLYESKSRMSAEAALSHSYFRSLGERVHQLEDTASIFSLKEIQLQKDPGYRGLAFQQPGRGKNRRQSIF

SEQ ID NO: 7802 - protein, 593 aa, Homo sapiens
MGQGLKAWPRYRVVGSADAGQYNLEITDAELSDDASYECQATEAALRSRRAKLTVLNPPTVTLSIEPQTVQEGERVVFTCQATANPEILGYRWAKGGFLIEDAHESRYETNVDYSFFTEPVSCEVHNKVGSTNVSTLVNVHFAPRIVVDPKPTTTDIGSDVTLTCVWVGNPPLTLTWTKKDSNMVLSNSNQLLLKSVTQADAGTYTCRAIVPRIGVAEREVPLYVNGPPIISSEAVQYAVRGDGGKVECFIGSTPPPDRIAWAWKENFLEVGTLERYTVERTNSGSGVLSTLTINNVMEADFQTHYNCTAWNSFGPGTAIIQLEEREVLPVGIIAGATIGASILLIFFFIALVFFLYRRRKGSRKDVTLRKLDIKVETVNREPLTMHSDREDDTASVSTATRVMKAIYSSFKDDVDLKQDLRCDTIDTREEYEMKDPTNGYYNVRAHEDRPSSRAVLYADYRAPGPARFDGRPSSRLSHSSGYAQLNTYSRGPASDYGPEPTPPGPAAPAGTDTTSQLSYENYEKFNSHPFPGAAGYPTYRLGYPQAPPSGLERTPYEAYDPIGKYATATRFSYTSQHSDYGQRFQQRMQTHV

SEQ ID NO: 7803 - protein, 307 aa, Homo sapiens
LDLGPPVDPDEDSDNSAIYVQGLNDSVTLDDLADFFKQCGVVKMNKRTGQPMIHIYLDKETGKPKGDATVSYEDPPTAKAAVEWFDGKDFQGSKLKVSLARKKPPMNSMRGGLPPREGRGMPPPLRGGPGGPGGPGGPMGRMGGRGGDRGGFPPRGPRGSRGNPSGGGNVQHRAGDWQCPNPSIGDFCCDVIVCRGCGNQNFAWRTECNQCGDRGRGGPGGMRGGRGGLMDRGGPGGMFRGGRGGDRGGFRGGRGMDRGGFGGGRRGGPGGPPGPLMEQMGGRRGGRGGPGKMDKGEHRQERRDRPY

SEQ ID NO: 7804 - protein, 2000 aa, Homo sapiens
MAQALLVPPGPESFRLFTRESLAAIEKRAAEEKAKKPKKEQDNDDENKPKPNSDLEAGKNLPFIYGDIPPEMVSEPLEDLDPYYINKKTFIVMNKGKAIFRFSATSALYILTPLNPVRKIAIKILVHSLFSMLIMCTILTNCVFMTLSNPPDWTKNVEYTFTGIYTFESLIKILARGFCLEDFTFLRDPWNWLDFSVIVMAYVTEFVSLGNVSALRTFRVLRALKTISVIPGLKTIVGALIQSVKKLSDVMILTVFCLSVFALIGLQLFMGNLRNKCLQWPPSDSAFETNTTSYFNGTMDSNGTFVNVTMSTFNWKDYIGDDSHFYVLDGQKDPLLCGNGSDAGQCPEGYICVKAGRNPNYGYTSFDTFSWAFLSLFRLMTQDYWENLYQLTLRAAGKTYMIFFVLVIFLGSFYLVNLILAVVAMAYEEQNQATLEEAEQKEAEFQQMLEQLKKQQEEAQAVAAASAASRDFSGIGGLGELLESSSEASKLSSKSAKEWRNRRKKRRQREHLEGNNKGERDSFPKSESEDSVKRSSFLFSMDGNRLTSDKKFCSPHQSLLSIRGSLFSPRRNSKTSIFSFRGRAKDVGSENDFADDEHSTFEDSESRRDSLFVPHRHGERRNSNVSQASMSSRMVPGLPANGKMHSTVDCNGVVSLVGGPSALTSPTGQLPPEGTTTETEVRKRRLSSYQISMEMLEDSSGRQRAVSIASILTNTMEELEESRQKCPPCWYRFANVFLIWDCCDAWLKVKHLVNLIVMDPFVDLAITICIVLNTLFMAMEHYPMTEQFSSVLTVGNLVFTGIFTAEMVLKIIAMDPYYYFQEGWNIFDGIIVSLSLMELGLSNVEGLSVLRSFRLLRVFKLAKSWPTLNMLIKIIGNSVGALGNLTLVLAIIVFIFAVVGMQLFGKSYKECVCKINDDCTLPRWHMNDFFHSFLIVFRVLCGEWIETMWDCMEVAGQTMCLIVFMLVMVIGNLVVLNLFLALLLSSFSSDNLAATDDDNEMNNLQIAVGRMQKGIDYVKNKMRECFQKAFFRKPKVIEIHEGNKIDSCMSNNTGIEISKELNYLRDGNGTTSGVGTGSSVEKYVIDENDYMSFINNPSLTVTVPIAVGESDFENLNTEEFSSESELEESKEKLNATSSSEGSTVDVVLPREGEQAETEPEEDLKPEACFTEGCIKKFPFCQVSTEEGKGKIWWNLRKTCYSIVEHNWFETFIVFMILLSSGALAFEDIYIEQRKTIKTMLEYADKVFTYIFILEMLLKWVAYGFQTYFTNAWCWLDFLIVDVSLVSLVANALGYSELGAIKSLRTLRALRPLRALSRFEGMRVVVNALVGAIPSIMNVLLVCLIFWLIFSIMGVNLFAGKFYHCVNMTTGNMFDISDVNNLSDCQALGKQARWKNVKVNFDNVGAGYLALLQVATFKGWMDIMYAAVDSRDVKLQPVYEENLYMYLYFVIFIIFGSFFTLNLFIGVIIDNFNQQKKKFGGQDIFMTEEQKKYYNAMKKLGSKKPQKPIPRPANKFQGMVFDFVTRQVFDISIMILICLNMVTMMVETDDQGKYMTLVLSRINLVFIVLFTGEFVLKLVSLRHYYFTIGWNIFDFVVVILSIVGMFLAEMIEKYFVSPTLFRVIRLARIGRILRLIKGAKGIRTLLFALMMSLPALFNIGLLLFLVMFIYAIFGMSNFAYVKKEAGIDDMFNFETFGNSMICLFQITTSAGWDGLLAPILNSAPPDCDPDTIHPGSSVKGDCGNPSVGIFFFVSYIIISFLVVVNMYIAVILENFSVATEESAEPLSEDDFEMFYEVWEKFDPDATQFIEFSKLSDFAAALDPPLLIAKPNKVQLIAMDLPMVSGDRIHCLDILFAFTKRVLGESGEMDALRIQMEDRFMASNPSKVSYEPITTTLKRKQEEVSAAIIQRNFRCYLLKQRLKNISSNYNKEAIKGRIDLPIKQDMIIDKLNGNSTPEKTDGSSSTTSPPSYDSVTKPDKEKFEKDKPEKESKGKEVRENQK

SEQ ID NO: 7805 - protein, 2440 aa, Homo sapiens
ERFLVPPQQIQGSGVSPQLRRSVSVDMPRPLNNSQMNNPVGLPQHFSPQSLPVQQHNILGQAYIELRHRAPDGRQRLPFSAPPGSVVEASSNLRHGNFIPRPDFPGPRHTDPMRRPPQGLPNQLPVHPDLEQVPPSQQEQGHSVHSSSMVMRTLNHPLGGEFSEAPLSTSVPSETTSDNLQITTQPSDGLEEKLDSDDPSVKELDVKDLEGVEVKDLDDEDLENLNLDTEDGKVVELDTLDNLETNDPNLDDLLRSGEFDIIAYTDPELDMGDKKSMFNEELDLPIDDKLDNQCVSVEPKKKEQENKTLVLSDKHSPQKKSTVTNEVKTEVLSPNSKVESKCETEKNDENKDNVDTPCSQASAHSDLNDGEKTSLHPCDPDLFEKRTNRETAGPSANVIQASTQLPAQDVINSCGITGSTPVLSSLLANEKSDNSDIRPSGSPPPPTLPASPSNHVSSLPPFIAPPGRVLDNAMNSNVTVVSRVNHVFSQGVQVNPGLIPGQSTVNHSLGTGKPATQTGPQTSQSGTSSMSGPQQLMIPQTLAQQNRERPLLLEEQPLLLQDLLDQERQEQQQQRQMQAMIRQRSEPFFPNIDFDAITDPIMKAKMVALKGINKVMAQNNLGMPPMVMSRFPFMGQVVTGTQNSEGQNLGPQAIPQDGSITHQISRPNPPNFGPGFVNDSQRKQYEEWLQETQQLLQMQQKYLEEQIGAHRKSKKALSAKQRTAKKAGREFPEEDAEQLKHVTEQQSMVQKQLEQIRKQQKEHAELIEDYRIKQQQQCAMAPPTMMPSVQPQPPLIPGATPPTMSQPTFPMVPQQLQHQQHTTVISGHTSPVRMPSLPGWQPNSAPAHLPLNPPRIQPPIAQLPIKTCTPAPGTVSNANPQSGPPPRVEFDDNNPFSESFQERERKERLREQQERQRIQLMQEVDRQRALQQRMEMEQHGMVGSEISSSRTSVSQIPFYSSDLPCDFMQPLGPLQQSPQHQQQMGQVLQQQNIQQGSINSPSTQTFMQTNERRQVGPPSFVPDSPSIPVGSPNFSSVKQGHGNLSGTSFQQSPVRPSFTPALPAAPPVANSSLPCGQDSTITHGHSYPGSTQSLIQLYSDIIPEEKGKKKRTRKKKRDDDAESTKAPSTPHSDITAPPTPGISETTSTPAVSTPSELPQQADQESVEPVGPSTPNMAAGQLCTELENKLPNSDFSQATPNQQTYANSEVDKLSMETPAKTEEIKLEKAETESCPGQEEPKLEEQNGSKVEGNAVACPVSSAQSPPHSAGAPAAKGDSGNELLKHLLKNKKSSSLLNQKPEGSICSEDDCTKDNKLVEKQNPAEGLQTLGAQMQGGFGCGNQLPKTDGGSETKKQRSKRTQRTGEKAAPRSKKRKKDEEEKQAMYSSTDTFTHLKQQLSLLPLMEPIIGVNFAHFLPYGSGQFNSGNRLLGTFGSATLEGVSDYYSQLIYKQNNLSNPPTPPASLPPTPPPMACQKMANGFATTEELAGKAGVLVSHEVTKTLGPKPFQLPFRPQDDLLARALAQGPKTVDVPASLPTPPHNNQEELRIQDHCGDRDTPDSFVPSSSPESVVGVEVSRYPDLSLVKEEPPEPVPSPIIPILPSTAGKSSESRRNDIKTEPGTLYFASPFGPSPNGPRSGLISVAITLHPTAAENISSVVAAFSDLLHVRIPNSYEVSSAPDVPSMGLVSSHRINPGLEYRQHLLLRGPPPGSANPPRLVSSYRLKQPNVPFPPTSNGLSGYKDSSHGIAESAALRPQWCCHCKVVILGSGVRKSFKDLTLLNKDSRESTKRVEKDIVFCSNNCFILYSSTAQAKNSENKESIPSLPQSPMRETPSKAFHQYSNNISTLDVHCLPQLPEKASPPASPPIAFPPAFEAAQVEAKPDELKVTVKLKPRLRAVHGGFEDCRPLNKKWRGMKWKKWSIHIVIPKGTFKPPCEDEIDEFLKKLGTSLKPDPVPKDYRKCCFCHEEGDGLTDGPARLLNLDLDLWVHLNCALWSTEVYETQAGALINVELALRRGLQMKCVFCHKTGATSGCHRFRCTNIYHFTCAIKAQCMFFKDKTMLCPMHKPKGIHEQELSYFAVFRRVYVQRDEVRQIASIVQRGERDHTFRVGSLIFHTIGQLLPQQMQAFHSPKALFPVGYEASRLYWSTRYANRRCRYLCSIEEKDGRPVFVIRIVEQGHEDLVLSDISPKGVWDKILEPVACVRKKSEMLQLFPAYLKGEDLFGLTVSAVARIAESLPGVEACENYTFRYGRNPLMELPLAVNPTGCARSEPKMSAHVKRPHTLNSTSTSKSFQSTVTGELNAPYSKQFVHSKSSQYRKMKTEWKSNVYLARSRIQGLGLYAARDIEKHTMVIEYIGTIIRNEVANRKEKLYESQNRGVYMFRMDNDHVIDATLTGGPARYINHSCAPNCVAEVVTFERGHKIIISSSRRIQKGEEVRV

SEQ ID NO: 7806 - protein, 2294 aa, Homo sapiens
MARFGEAVVARPGSGDGDSDQSRNRQGTPVPASGQAAAYKQTKAQRARTMALYNPIPVRQNCFTVNRSLFIFGEDNIVRKYAKKLIDWPPFEYMILATIIANCIVLALEQHLPEDDKTPMSRRLEKTEPYFIGIFCFEAGIKIVALGFIFHKGSYLRNGWNVMDFIVVLSGILATAGTHFNTHVDLRTLRAVRVLRPLKLVSGIPSLQIVLKSIMKAMVPLLQIGLLLFFAILMFAIIGLEFYSGKLHRACFMNNSGILEGFDPPHPCGVQGCPAGYECKDWIGPNDGITQFDNILFAVLTVFQCITMEGWTTVLYNTNDALGATWNWLYFIPLIIIGSFFVLNLVLGVLSGEFAKERERVENRRAFMKLRRQQQIERELNGYRAWIDKAEEVMLAEENKNAGTSALEVLRRATIKRSRTEAMTRDSSDEHCVDISSVGTPLARASIKSAKVDGVSYFRHKERLLRISIRHMVKSQVFYWIVLSLVALNTACVAIVHHNQPQWLTHLLYYAEFLFLGLFLLEMSLKMYGMGPRLYFHSSFNCFDFGVTVGSIFEVVWAIFRPGTSFGISVLRALRLLRIFKITKYWASLRNLVVSLMSSMKSIISLLFLLFLFIVVFALLGMQLFGGRFNFNDGTPSANFDTFPAAIMTVFQILTGEDWNEVMYNGIRSQGGVSSGMWSAIYFIVLTLFGNYTLLNVFLAIAVDNLANAQELTKDEQEEEEAFNQKHALQKAKEVSPMSAPNMPSIERERRRRHHMSVWEQRTSQLRKHMQMSSQEALNREEAPTMNPLNPLNPLSSLNPLNAHPSLYRRPRAIEGLALGLALEKFEEERISRGGSLKGDGGDRSSALDNQRTPLSLGQREPPWLARPCHGNCDPTQQEAGGGEAVVTFEDRARHRQSQRRSRHRRVRTEGKESSSASRSRSASQERSLDEAMPTEGEKDHELRGNHGAKEPTIQEERAQDLRRTNSLMVSRGSGLAGGLDEADTPLVLPHPELEVGKHVVLTEQEPEGSSEQALLGNVQLDMGRVISQSEPDLSCITANTDKATTESTSVTVAIPDVDPLVDSTVVHISNKTDGEASPLKEAEIREDEEEVEKKKQKKEKRETGKAMVPHSSMFIFSTTNPIRRACHYIVNLRYFEMCILLVIAASSIALAAEDPVLTNSERNKVLRYFDYVFTGVFTFEMVIKMIDQGLILQDGSYFRDLWNILDFVVVVGALVAFALANALGTNKGRDIKTIKSLRVLRVLRPLKTIKRLPKLKAVFDCVVTSLKNVFNILIVYKLFMFIFAVIAVQLFKGKFFYCTDSSKDTEKECIGNYVDHEKNKMEVKGREWKRHEFHYDNIIWALLTLFTVSTGEGWPQVLQHSVDVTEEDRGPSRSNRMEMSIFYVVYFVVFPFFFVNIFVALIIITFQEQGDKMMEECSLEKNERACIDFAISAKPLTRYMPQNRHTFQYRVWHFVVSPSFEYTIMAMIALNTVVLMMKYYSAPCTYELALKYLNIAFTMVFSLECVLKVIAFGFLNYFRDTWNIFDFITVIGSITEIILTDSKLVNTSGFNMSFLKLFRAARLIKLLRQGYTIRILLWTFVQSFKALPYVCLLIAMLFFIYAIIGMQVFGNIKLDEESHINRHNNFRSFFGSLMLLFRSATGEAWQEIMLSCLGEKGCEPDTTAPSGQNENERCGTDLAYVYFVSFIFFCSFLMLNLFVAVIMDNFEYLTRDSSILGPHHLDEFVRVWAEYDRAACGRIHYTEMYEMLTLMSPPLGLGKRCPSKVAYKRLVLMNMPVAEDMTVHFTSTLMALIRTALDIKIAKGGADRQQLDSELQKETLAIWPHLSQKMLDLLVPMPKASDLTVGKIYAAMMIMDYYKQSKVKKQRQQLEEQKNAPMFQRMEPSSLPQEIIANAKALPYLQQDPVSGLSGRSGYPSMSPLSPQDIFQLACMDPADDGQFQERQSLEPEVSELKSVQPSNHGIYLPSDTQEHAGSGRASSMPRLTVDPQVVTDPSSMRRSFSTIRDKRSNSSWLEEFSMERSSENTYKSRRRSYHSSLRLSAHRLNSDSGHKSDTHRSGGRERGRSKERKHLLSPDVSRCNSEERGTQADWESPERRQSRSPSEGRSQTPNRQGTGSLSESSIPSVSDTSTPRRSRRQLPPVPPKPRPLLSYSSLIRHAGSISPPADGSEEGSPLTSQALESNNACLTESSNSPHPQQSQHASPQRYISEPYLALHEDSHASDCGEEETLTFEAAVATSLGRSNTIGSAPPLRHSWQMPNGHYRRRRRGGPGPGMMCGAVNNLLSDTEEDDKC

SEQ ID NO: 7807 - protein, 760 aa, Homo sapiens
MMDQARSAFSNLFGGEPLSYTRFSLARQVDGDNSHVEMKLAVDEEENADNNTKANVTKPKRCSGSICYGTIAVIVFFLIGFMIGYLGYCKGVEPKTECERLAGTESPVREEPGEDFPAARRLYWDDLKRKLSEKLDSTDFTGTIKLLNENSYVPREAGSQKDENLALYVENQFREFKLSKVWRDQHFVKIQVKDSAQNSVIIVDKNGRLVYLVENPGGYVAYSKAATVTGKLVHANFGTKKDFEDLYTPVNGSIVIVRAGKITFAEKVANAESLNAIGVLIYMDQTKFPIVNAELSFFGHAHLGTGDPYTPGFPSFNHTQFPPSRSSGLPNIPVQTISRAAAEKLFGNMEGDCPSDWKTDSTCRMVTSESKNVKLTVSNVLKEIKILNIFGVIKGFVEPDHYVVVGAQRDAWGPGAAKSGVGTALLLKLAQMFSDMVLKDGFQPSRSIIFASWSAGDFGSVGATEWLEGYLSSLHLKAFTYINLDKAVLGTSNFKVSASPLLYTLIEKTMQNVKHPVTGQFLYQDSNWASKVEKLTLDNAAFPFLAYSGIPAVSFCFCEDTDYPYLGTTMDTYKELIERIPELNKVARAAAEVAGQFVIKLTHDVELNLDYERYNSQLLSFVRDLNQYRADIKEMGLSLQWLYSARGDFFRATSRLTTDFGNAEKTDRFVMKKLNDRVMRVEYHFLSPYVSPKESPFRHVFWGSGSHTLPALLENLKLRKQNNGAFNETLFRNQLALATWTIQGAANALSGDVWDIDNEF

SEQ ID NO: 7808 - protein, 423 aa, Homo sapiens
METRGPGLAVRAESRRLVGIGPRAPPGRVGLQPSGRLDRRGGAGTMGYKDNDGEEEEREGGAAGPRGSRLPPITGGASELAKRKVKKKKRKKKTKGSGKGDDKHQSQSLKSQPLSSSFHDILSPCKERGPKPEHRQSKVEKKHLPSDSSTVSLPDFAEIENLANRINESLRWDGILADPEAEKERIRIYKLNRRKRYRCLALKGFHPDPEALKGFHPDPDALKGFHPDPEALKGFHPDPEALKGIHPDPEALKGFHPDPEALKGFHPDPEALKGFHTDPEALKGFHIDPEALKGFHPDPKALKGFHPDPKALKGFHTDPEALKGFHPDPKALKGFHPDPEALKGFHPDPEALKGFHPDPEALKGFHTDPNAEEAPENLPYLSDKDGSSSHRQPTSKAECPNLCFEGNLTPKLLHSDLAPTLLE

SEQ ID NO: 7809 - protein, 886 aa, Homo sapiens
MELRCGGLLFSSRFDSGNLAHVEKVESLSSDGEGVGGGASALTSGIASSPDYEFNVWTRPDCAETEFENGNRSWFYFSVRGGMPGKLIKINIMNMNKQSKLYSQGMAPFVRTLPTRPRWERIRDRPTFEMTETQFVLSFVHRFVEGRGATTFFAFCYPFSYSDCQELLNQLDQRFPENHPTHSSPLDTIYYHRELLCYSLDGLRVDLLTITSCHGLREDREPRLEQLFPDTSTPRPFRFAGKRIFFLSSRVHPGETPSSFVFNGFLDFILRPDDPRAQTLRRLFVFKLIPMLNPDGVVRGHYRTDSRGVNLNRQYLKPDAVLHPAIYGAKAVLLYHHVHSRLNSQSSSEHQPSSCLPPDAPVSDLEKANNLQNEAQCGHSADRHNAEAWKQTEPAEQKLNSVWIMPQQSAGLEESAPDTIPPKESGVAYYVDLHGHASKRGCFMYGNSFSDESTQVENMLYPKLISLNSAHFDFQGCNFSEKNMYARDRRDGQSKEGSGRVAIYKASGIIHSYTLECNYNTGRSVNSIPAACHDNGRASPPPPPAFPSRYTVELFEQVGRAMAIAALDMAECNPWPRIVLSEHSSLTNLRAWMLKHVRNSRGLSSTLNVGVNKKRGLRTPPKSHNGLPVSCSENTLSRARSFSTGTSAGGSSSSQQNSPQMKNSPSFPFHGSRPAGLPGLGSSTQKVTHRVLGPVREPRSQDRRRQQQPLNHRPAGSLAPSPAPTSSGPASSHKLGSCLLPDSFNIPGSSCSLLSSGDKPEAVMVIGKGLLGTGARMPCIKTRLQARPRLGRGSPPTRRGMKGSSGPTSPTPRTRESSELELGSCSATPGLPQARPPRPRSAPAFSPISCSLSDSPSWNCYSRGPLGQPEVCFVPKSPPLTVSPRV

SEQ ID NO: 7810 - protein, 273 aa, Homo sapiens
MKSQGQHWYSSSDKNCKVSFREKLLIIDSNLGVQDVENLKFLCIGLVPNKKLEKSSSASDVFEHLLAEDLLSEEDPFFLAELLYIIRQKKLLQHLNCTKEEVERLLPTRQRVSLFRNLLYELSEGIDSENLKDMIFLLKDSLPKTEMTSLSFLAFLEKQGKIDEDNLTCLEDLCKTVVPKLLRNIEKYKREKAIQIVTPPVDKEAESYQGEEELVSQTDVKTFLEALPQESWQNKHAGSNEGSCVQDESEPQRPLCHCQQPQLYLPEGQTRNP

SEQ ID NO: 7811 - protein, 299 aa, Homo sapiens
MWLPWALLLLWVPGCFALSKCRTVAGPVGGSLSVQCPYEKEHRTLNKYWCRPPQIFLCDKIVETKGSAGKRNGRVSIRDSPANLSFTVTLENLTEEDAGTYWCGVDTPWLRDFHDPVVEVEVSVFPASTSMTPASITAAKTSTITTAFPPVSSTTLFAVGATHSASIQEETEEVVNSQLPLLLSLLALLLLLLVGASLLAWRMFQKWIKAGDHSELSQNPKQAATQSELHYANLELLMWPLQEKPAPPREVEVEYSTVASPREELHYASVVFDSNTNRIAAQRPREEEPDSDYSVIRKT

SEQ ID NO: 7812 - protein, 680 aa, Homo sapiens
MVSWGRFICLVVVTMATLSLARPSFSLVEDTTLEPEDAISSGDDEDDTDGAEDFVSENSNNKRAPYWTNTEKMEKRLHAVPAANTVKFRCPAGGNPMPTMRWLKNGKEFKQEHRIGGYKVRNQHWSLIMESVVPSDKGNYTCVVENEYGSINHTYHLDVVERSPHRPILQAGLPANASTVVGGDVEFVCKVYSDAQPHIQWIKHVEKNGSKYGPDGLPYLKVLKHSGINSSNAEVLALFNVTEADAGEYICKVSNYIGQANQSAWLTVLPKQQAPGREKEITASPDYLEIAIYCIGVFLIACMVVTVILCRMKNTTKKPDFSSQPAVHKLTKRIPLRRQVTVSAESSSSMNSNTPLVRITTRLSSTADTPMLAGVSEYELPEDPKWEFPRDKLTLGKPLGEGCFGQVVMAEAVGIDKDKPKEAVTVAVKMLKDDATEKDLSDLVSEMEMMKMIGKHKNIINLLGACTQDGPLYVIVEYASKGNLREYLRARRPPGMEYSYDINRVPEEQMTFKDLVSCTYQLARGMEYLASQKCIHRDLAARNVLVTENNVMKIADFGLARDINNIDYYKKTTNGRLPVKWMAPEALFDRVYTHQSDVWSFGVLMWEIFTLGGSPYPGIPVEELFKLLKEGHRMDKPANCTNELYMMMRDCWHAVPSQRPTFKQLVEDLDRILTLTTNEI

SEQ ID NO: 7813 - protein, 591 aa, Homo sapiens
MSLENEDKRARTRSKALRGPPETTAADLSCPTPGCTGSGHVRGKYSRHRSLQSCPLAKKRKLEGAEAEHLVSKRKSHPLKLALDEGYGVDSDGSEDTEVKDASVSDESEGTLEGAEAETSGQDEIHRPETAEDPSRAEKREIKCPTPGCDGTGHVTGLYPHHRSLSGCPHKDRIPPEILAMHENVLKCPTPGCTGQGHVNSNRNTHRSLSGCPIAAAEKLAKSHEKQQPQTGDPSKSSSNSDRILRPMCFVKQLEVPPYGSYRPNVAPATPRANLAKELEKFSKVTFDYASFDAQVFGKRMLAPKIQTSETSPKAFQCFDYSQDAEAAHMAATAILNLSTRCWEMPENLSTKPQDLPSKSVDIEVDENGTLDLSMHKHRKRENAFPSSSSCSSSPGVKSPDASQRHSSTSAPSSSMTSPQSSQASRQDEWDRPLDYTKPSRLREEEPEESEPAAHSFASSEADDQEVSEENFEERKYPGEVTLTNFKLKFLSKDIKKELLTCPTPGCDGSGHITGNYASHRRCPTPGCDGSGHITGNYASHRSLSGCPRAKKSGVKVAPTKDDKEDPELMKYVGPCWLFHCIAELRFSCVL

SEQ ID NO: 7814 - protein, 461 aa, Homo sapiens
MKDFSDVILCMEATESSKTEFCNPAFEPESGPPCPPPVFPEDASYSVPAPWHGRRPRGLRPDCRFSWLCVLLLSSLLLLLLGLLVAIILAQLQAAPPSGASHSPLPAGGLTTTTTTPTITTSQAAGTPKGQQESGVSPSPQSTCGGLLSGPRGFFSSPNYPDPYPPNTHCVWHIQVATDHAIQLKIEALSIESVASCLFDRLELSPEPEGPLLRVCGRVPPPTLNTNASHLLVVFVSDSSVEGFGFHAWYQAMAPGRGSCAHDEFRCDQLICLLPDSVCDGFANCADGSDETNCSAKFSGSVEQSHPPTSSPRTMSWLCCLGQIMASAVEASQPPTWPSMPRRTPVGPVSSPARQEGVRVCSGCVTCGETAPMAAMTTAAAPCSHPQSLTSLPCYQHFRRLLCGLLVPRCTPLGSVLPPCRSVCQEAEHQCQSGLALLGTPWPFNCNRLPEAADLEACAQP

SEQ ID NO: 7815 - protein, 728 aa, Homo sapiens
MGMARGSLTRVPGVMGEGTQGPELSLDPDPCSPQSTPGLMKGNKLEEQDPRPLQPIPGLMEGNKLEEQDSSPPQSTPGLMKGNKREEQGLGPEPAAPQQPTAEEEALIEFHRSYRELFEFFCNNTTIHGAIRLVCSQHNRMKTAFWAVLWLCTFGMMYWQFGLLFGEYFSYPVSLNINLNSDKLVFPAVTICTLNPYRYPEIKEELEELDRITEQTLFDLYKYSSFTTLVAGSRSRRDLRGTLPHPLQRLRVPPPPHGARRARSVASSLRDNNPQVDWKDWKIGFQLCNQNKSDCFYQTYSSGVDAVREWYRFHYINILSRLPETLPSLEEDTLGNFIFACRFNQVSCNQANYSHFHHPMYGNCYTFNDKNNSNLWMSSMPGINNGLSLMLRAEQNDFIPLLSTVTGARVMVHGQDEPAFMDDGGFNLRPGVETSISMRKETLDRLGGDYGDCTKNGSDVPVENLYPSKYTQQVCIHSCFQESMIKECGCAYIFYPRPQNVEYCDYRKHSSWGYCYYKLQVDFSSDHLGCFTKCRKPCSVTSYQLSAGYSRWPSVTSQEWVFQMLSRQNNYTVNNKRNGVAKVNIFFKELNYKTNSESPSVTMVTLLSNLGSQWSLWFGSSVLSVVEMAELVFDLLVIMFLMLLRRFRSRYWSPGRGGRGAQEVASTLASSPPSHFCPHPMSLSLSQPGPAPSPALTAPPPAYATLGPRPSPGGSAGASSSTCPLGGP

SEQ ID NO: 7816 - protein, 1814 aa, Homo sapiens
MMDLVLEEDVTVPGTLSGCSGLVPSVPDDLDGINPNAGLGNGLLPNVSEETVSPTRARNMKDFENQITELKKENFNLKLRIYFLEERMQQEFHGPTEHIYKTNIELKVEVESLKRELQEREQLLIKASKAVESLAEAGGSEIQRVKEDARKKVQQVEDLLTKRILLLEKDVTAAQAELEKAFAGTETEKALRLRLESKLSEMKKMHEGDLAMALVLDEKDRLIEELKLSLKSKEALIQCLKEEKSQMACPDENVSSGELRGLCAAPREEKERETEAAQMEHQKERNSFEERIQALEEDLREKEREIATEKKNSLKRDKAIQGLTMALKSKEKKVEELNSEIEKLSAAFAKAREALQKAQTQEFQGSEDYETALSGKEALSAALRSQNLTKSTENHRLRRSIKKITQELSDLQQERERLEKDLEEAHREKSKGDCTIRDLRNEVEKLRNEVNEREKAMENRYKSLLSESNKKLHNQEQVIKHLTESTNQKDVLLQKFNEKDLEVIQQNCYLMAAEDLELRSEGLITEKCSSQQPPGSKTIFSKEKKQSSDYEELIQVLKKEQDIYTHLVKSLQESDSINNLQAELNKIFALRKQLEQDVLSYQNLRKTLEEQISEIRRREEESFSLYSDQTSYLSICLEENNRFQVEHFSQEELKKKVSDLIQLVKELYTDNQHLKKTIFDLSCMGFQGNGFPDRLASTEQTELLASKEDEDTIKIGEDDEINFLSDQHLQQSNEIMKDLSKGGCKNGYLRHTESKISDCDGAHAPGCLEEGAFINLLAPLFNEKATLLLESRPDLLKVVRELLLGQLFLTEQEVSGEHLDGKTEKTPKQKGELVHFVQTNSFSKPHDELKLSCEAQLVKAGEVPKVGLKDASVQTVATEGDLLRFKHEATREAWEEKPINTALSAEHRPENLHGVPGWQAALLSLPGITNREAKKSRLPILIKPSRSLGNMYRLPATQEVVTQLQSQILELQGELKEFKTCNKQLHQKLILAEAVMEGRPTPDKTLLNAQPPVGAAYQDSPGEQKGIKTTSSVWRDKEMDSDQQRSYEIDSEICPPDDLASLPSCKENPEDVLSPTSVATYLSSKSQPSAKVSVMGTDQSESINTSNETEYLKQKIHDLETELEGYQNFIFQLQKHSQCSEAIITVLCGTEGAQDGLSKPKNGSDGEEMTFSSLHQVRYVKHVKILGPLAPEMIDSRVLENLKQQLEEQEYKLQKEQNLNMQLFSEIHNLQNKFRDLSPPRYDSLVQSQARELSLQRQQIKDGHGICVISRQHMNTMIKAFEELLQASDVDYCVAEGFQEQLNQCAELLEKLEKLFLNGKSVGVEMNTQNELMERIEEDNLTYQHLLPESPEPSASHALSDYETSEKSFFSRDQKQDNETEKTSVMVNSFSQDLLMEHIQEIRTLRKRLEESIKTNEKLRKQLERQGSEFVQGSTSIFASGSELHSSLTSEIHFLRKQNQALNAMLIKGSRDKQKENDKLRESLSRKTVSLEHLQREYASVKEENERLQKEGSEKERHNQQLIQEVRCSGQELSRVQEEVKLRQQLLSQNDKLLQSLRVELKAYEKLDEEHRRLRDGDKYPMESDNSFDLFDSSQAVTPKSVSETPPLSGNDTDSLSCDSGSSATSTPCVSRLVTGHHLWASKNGRHVLGLIEDYEALLKQISQGQRLLAEMDIQTQEAPSSTSQELGTKGPHPAPLSKFVSSVSTAKLTLEEAYRRLKLLWRVSLPEDGQCPLHCEQIGEMKAEVTKLHKKLFEQEKKLQNTMKLLQLSKRQEKVIFDQLVVTHKILRKARGNLELRPGGAHPGTCSPSRPGS

SEQ ID NO: 7817 - protein, 708 aa, Homo sapiens
MLRMRVPALLVLLFCFRGRAGPSPHFLQQPEDLVVLLGEEARLPCALGAYWGLVQWTKSGLALGGQRDLPGWSRYWISGNAANGQHDLHIRPVELEDEASYECQATQAGLRSRPAQLHVLVPPEAPQVLGGPSVSLVAGVPANLTCRSRGDARPTPELLWFRDGVLLDGATFHQTLLKEGTPGSVESTLTLTPFSHDDGATFVCRARSQALPTGRDTAITLSLQYPPEVTLSASPHTVQEGEKVIFLCQATAQPPVTGYRWAKGGSPVLGARGPRLEVVADASFLTEPVSCEVSNAVGSANRSTALDVLFGPILQAKPEPVSVDVGEDASFSCAWRGNPLPRVTWTRRGGAQVLGSGATLRLPSVGPEDAGDYVCRAEAGLSGLRGGAAEARLTVNAPPVVTALHSAPAFLRGPARLQCLVFASPAPDAVVWSWDEGFLEAGSQGRFLVETFPAPESRGGLGPGLISVLHISGTQESDFSRSFNCSARNRLGEGGAQASLGRRDLLPTVRIVAGVAAATTTLLMVITGVALCCWRHSKASASFSEQKNLMRIPGSSDGSSSRGPEEEETGSREDRGPIVHTDHSDLVLEEEGTLETKDPTNGYYKVRGVSVSLSLGEAPGGGLFLPPPSPLGPPGTPTFYDFNPHLGMVPPCRLYRARAGYLTTPHPRAFTSYIKPTSFGPPDLAPGTPPFPYAAFPTPSHPRLQTHV

SEQ ID NO: 7818 - protein, 1300 aa, Homo sapiens
MPKIVLNGVTVDFPFQPYKCQQEYMTKVLECLQQKVNGILESPTGTGKTLCLLCTTLAWREHLRDGISARKIAERAQGELFPDRALSSWGNAAAAAGDPIACYTDIPKIIYASRTHSQLTQVINELRNTSYRPKVCVLGSREQLCIHPEVKKQESNHLQIHLCRKKVASRSCHFYNNVEEKSLEQELASPILDIEDLVKSGSKHRVCPYYLSRNLKQQADIIFMPYNYLLDAKSRRAHNIDLKGTVVIFDEAHNVEKMCEESASFDLTPHDLASGLDVIDQVLEEQTKAAQQGEPHPEFSADSPSPGLNMELEDIAKLKMILLRLEGAIDAVELPGDDSGVTKPGSYIFELFAEAQITFQTKGCILDSLDQIIQHLAGRAGVFTNTAGLQKLADIIQIVFSVDPSEGSPGSPAGLGALQSYKVHIHPDAGHRRTAQRSDAWSTTAARKRGKVLSYWCFSPGHSMHELVRQGVRSLILTSGTLAPVSSFALEMQIPFPVCLENPHIIDKHQIWVGVVPRGPDGAQLSSAFDRRFSEECLSSLGKALGNIARVVPYGLLIFFPSYPVMEKSLEFWRARDLARKMEALKPLFVEPRSKGSFSETISAYYARVAAPGSTGATFLAVCRGKASEGLDFSDTNGRGVIVTGLPYPPRMDPRVVLKMQFLDEMKGQGGAGGQFLSGQEWYRQQASRAVNQAIGRVIRHRQDYGAVFLCDHRFAFADARAQLPSWVRPHVRVYDNFGHVIRDVAQFFRVAERTMPAPAPRATAPSVRGEDAVSEAKSPGPFFSTRKAKSLDLHVPSLKQRSSGSPAAGDPESSLCVEYEQEPVPARQRPRGLLAALEHSEQRAGSPGEEQAHSCSTLSLLSEKRPAEEPRGGRKKIRLVSHPEEPVAGAQTDRAKLFMVAVKQELSQANFATFTQALQDYKGSDDFAALAACLGPLFAEDPKKHNLLQGFYQFVRPHHKQQFEEVCIQLTGRGCGYRPEHSIPRRQRAQPVLDPTGRTAPDPKLTVSTAAAQQLDPQEHLNQGRPHLSPRPPPTGDPGSQPQWGSGVPRAGKQGQHAVSAYLADARRALGSAGCSQLLAALTAYKQDDDLDKVLAVLAALTTAKPEDFPLLHRFSMFVRPHHKQRFSQTCTDLTGRPYPGMEPPGPQEERLAVPPVLTHRAPQPGPSRSEKTGKTQSKISSFLRQRPAGTVGAGGEDAGPSQSSGPPHGPAASEWGEPHGRDIAGQQATGAPGGPLSAGCVCQGCGAEDVVPFQCPACDFQRCQACWQRHLQASRMCPACHTASRKQSVMQVFWPEPQ

SEQ ID NO: 7819 - protein, 363 aa, Homo sapiens
MKTLLLLLLVLLELGEAQGSLHRVPLRRHPSLKKKLRARSQLSEFWKSHNLDMIQFTESCSMDQSAKEPLINYLDMEYFGTISIGSPPQNFTVIFDTGSSNLWVPSVYCTSPACKTHSRFQPSQSSTYSQPGQSFSIQYGTGSLSGIIGADQVSVEGLTVVGQQFGESVTEPGQTFVDAEFDGILGLGYPSLAVGGVTPVFDNMMAQNLVDLPMFSVYMSSNPEGGAGSELIFGGYDHSHFSGSLNWVPVTKQAYWQIALDNMLWSVPTLTSCRMSPSPLTESPIPSAQLPTPYWTSWMECSSAAVAFKDLTSTLQLGPSGSWGMSSFDSFTQSLTVGITVWDWPQQSPKEGPCVCACLSDRP

SEQ ID NO: 7820 - protein, 2506 aa, Homo sapiens
MARFGDEMPARYGGGGSGAAAGVVVGSGGGRGAGGSRQGGQPGAQRMYKQSMAQRARTMALYNPIPVRQNCLTVNRSLFLFSEDNVVRKYAKKITEWPPFEYMILATIIANCIVLALEQHLPDDDKTPMSERLDDTEPYFIGIFCFEAGIKIIALGFAFHKGSYLRNGWNVMDFVVVLTGILATVGTEFDLRTLRAVRVLRPLKLVSGIPSLQVVLKSIMKAMIPLLQIGLLLFFAILIFAIIGLEFYMGKFHTTCFEEGTDDIQGESPAPCGTEEPARTCPNGTKCQPYWEGPNNGITQFDNILFAVLTVFQCITMEGWTDLLYNSNDASGNTWNWLYFIPLIIIGSFFMLNLVLGVLSGEFAKERERVENRRAFLKLRRQQQIERELNGYMEWISKAEEVILAEDETDGEQRHPFDALRRTTIKKSKTDLLNPEEAEDQLADIASVGSPFARASIKSAKLENSTFFHKKERRMRFYIRRMVKTQAFYWTVLSLVALNTLCVAIVHYNQPEWLSDFLYYAEFIFLGLFMSEMFIKMYGLGTRPYFHSSFNCFDCGVIIGSIFEVIWAVIKPGTSFGISVLRALRLLRIFKVTKYWASLRNLVVSLLNSMKSIISLLFLLFLFIVVFALLGMQLFGGQFNFDEGTPPTNFDTFPAAIMTVFQILTGEDWNEVMYDGIKSQGGVQGGMVFSIYFIVLTLFGNYTLLNVFLAIAVDNLANAQELTKDEQEEEEAANQKLALQKAKEVAEVSPLSAANMSIAVKEQQKNQKPAKSVWEQRTSEMRKQNLLASREALYNEMDPDERWKAAYTRHLRPDMKTHLDRPLVVDPQENRNNNTNKSRAAEPTVDQRLGQQRAEDFLRKQARYHDRARDPSGSAGLDARRPWAGSQEAELSREGPYGRESDHHAREGSLEQPGFWEGEAERGKAGDPHRRHVHRQGGSRESRSGSPRTGADGEHRRHRAHRRPGEEGPEDKAERRARHREGSRPARGGEGEGEGPDGGERRRRHRHGAPATYEGDARREDKERRHRRRKENQGSGVPVSGPNLSTTRPIQQDLGRQDPPLAEDIDNMKNNKLATAESAAPHGSLGHAGLPQSPAKMGNSTDPGPMLAIPAMATNPQNAASRRTPNNPGNPSNPGPPKTPENSLIVTNPSGTQTNSAKTARKPDHTTVDIPPACPPPLNHTVVQVNKNANPDPLPKKEEEKKEEEEDDRGEDGPKPMPPYSSMFILSTTNPLRRLCHYILNLRYFEMCILMVIAMSSIALAAEDPVQPNAPRNNVLRYFDYVFTGVFTFEMVIKMIDLGLVLHQGAYFRDLWNILDFIVVSGALVAFAFTGNSKGKDINTIKSLRVLRVLRPLKTIKRLPKLKAVFDCVVNSLKNVFNILIVYMLFMFIFAVVAVQLFKGKFFHCTDESKEFEKDCRGKYLLYEKNEVKARDREWKKYEFHYDNVLWALLTLFTVSTGEGWPQVLKHSVDATFENQGPSPGYRMEMSIFYVVYFVVFPFFFVNIFVALIIITFQEQGDKMMEEYSLEKNERACIDFAISAKPLTRHMPQNKQSFQYRMWQFVVSPPFEYTIMAMIALNTIVLMMKFYGASVAYENALRVFNIVFTSLFSLECVLKVMAFGILNYFRDAWNIFDFVTVLGSITDILVTEFGNNFINLSFLRLFRAARLIKLLRQGYTIRILLWTFVQSFKALPYVCLLIAMLFFIYAIIGMQVFGNIGIDVEDEDSDEDEFQITEHNNFRTFFQALMLLFRSATGEAWHNIMLSCLSGKPCDKNSGILTRECGNEFAYFYFVSFIFLCSFLMLNLFVAVIMDNFEYLTRDSSILGPHHLDEYVRVWAEYDPAAWGRMPYLDMYQMLRHMSPPLGLGKKCPARVAYKRLLRMDLPVADDNTVHFNSTLMALIRTALDIKIAKGGADKQQMDAELRKEMMAIWPNLSQKTLDLLVTPHKSTDLTVGKIYAAMMIMEYYRQSKAKKLQAMREEQDRTPLMFQRMEPPSPTQEGGPGQNALPSTQLDPGGALMAHESGLKESPSWVTQRAQEMFQKTGTWSPEQGPPTDMPNSQPNSQSVEMREMGRDGYSDSEHYLPMEGQGRAASMPRLPAENQRRRGRPRGNNLSTISDTSPMKRSASVLGPKARRLDDYSLERVPPEENQRHHQRRRDRSHRASERSLGRYTDVDTGLGTDLSMTTQSGDLPSKERDQERGRPKDRKHRQHHHHHHHHHHPPPPDKDRYAQERPDHGRARARDQRWSRSPSEGREHMAHRQGSSSVSGSPAPSTSGTSTPRRGRRQLPQTPSTPRPHVSYSPVIRKAGGSGPPQQQQQQQQQQQQQAVARPGRAATSGPRRYPGPTAEPLAGDRPPTGGHSSGRSPRMERRVPGPARSESPRACRHGGARWPASGPHVSEGPPGPRHHGYYRGSDYDEADGPGSGGGEEAMAGAYDAPPPVRHASSGATGRSPRTPRASGPACASPSRHGRRLPNGYYPAHGLARPRGPGSRKGLHEPYSESDDDWC

SEQ ID NO: 7821 - protein, 513 aa, Homo sapiens
MNLDSIHRLIEETQIFQMQQSSIKSRGDMVAPASPPRDTCNTCFPLHGLQSHAAHNFCAHSYNTNKWDICEELRLRELEEVKARAAQMEKTMRWWSDCTANWREKWSKVRAERNSAREEGRQLRIKLEMAMKELSTLKKKQSLPPQKEALEAKVTQDLKLPGFVEESCEHTDQFQLSSQMHESIREYLVKRQFSTKEDTNNKEQGVVIDSLKLSEEMKPNLDGVDLFNNGGSGNGETKTGLRLKAINLPLENEVTEISALQVHLDEFQKILWKEREMRTALEKEIERLESALSLWKWKYEELKESKPKNVKEFDILLGQHNDEMQELSGNIKEESKSQNSKDRVICELRAELERLQAENTSEWDKREILEREKQGLERENRRLKIQVKEMEELLDKKNRLSANSQSPDFKMSQIDLQEKNQELLNLQHAYYKLNRQYQANIAELTHANNRVDQNEAEVKKLRLRVEELKQGLNQKEDELDDSLNQIRKLQRSLDEEKERNENLETELRHLQNW

SEQ ID NO: 7822 - protein, 2351 aa, Homo sapiens
MQIELSTCFFLCLLRFCFSATRRYYLGAVELSWDYMQSDLGELPVDARFPPRVPKSFPFNTSVVYKKTLFVEFTDHLFNIAKPRPPWMGLLGPTIQAEVYDTVVITLKNMASHPVSLHAVGVSYWKASEGAEYDDQTSQREKEDDKVFPGGSHTYVWQVLKENGPMASDPLCLTYSYLSHVDLVKDLNSGLIGALLVCREGSLAKEKTQTLHKFILLFAVFDEGKSWHSETKNSLMQDRDAASARAWPKMHTVNGYVNRSLPGLIGCHRKSVYWHVIGMGTTPEVHSIFLEGHTFLVRNHRQASLEISPITFLTAQTLLMDLGQFLLFCHISSHQHDGMEAYVKVDSCPEEPQLRMKNNEEAEDYDDDLTDSEMDVVRFDDDNSPSFIQIRSVAKKHPKTWVHYIAAEEEDWDYAPLVLAPDDRSYKSQYLNNGPQRIGRKYKKVRFMAYTDETFKTREAIQHESGILGPLLYGEVGDTLLIIFKNQASRPYNIYPHGITDVRPLYSRRLPKGVKHLKDFPILPGEIFKYKWTVTVEDGPTKSDPRCLTRYYSSFVNMERDLASGLIGPLLICYKESVDQRGNQIMSDKRNVILFSVFDENRSWYLTENIQRFLPNPAGVQLEDPEFQASNIMHSINGYVFDSLQLSVCLHEVAYWYILSIGAQTDFLSVFFSGYTFKHKMVYEDTLTLFPFSGETVFMSMENPGLWILGCHNSDFRNRGMTALLKVSSCDKNTGDYYEDSYEDISAYLLSKNNAIEPRSFSQNSRHPSTRQKQFNATTIPENDIEKTDPWFAHRTPMPKIQNVSSSDLLMLLRQSPTPHGLSLSDLQEAKYETFSDDPSPGAIDSNNSLSEMTHFRPQLHHSGDMVFTPESGLQLRLNEKLGTTAATELKKLDFKVSSTSNNLISTIPSDNLAAGTDNTSSLGPPSMPVHYDSQLDTTLFGKKSSPLTESGGPLSLSEENNDSKLLESGLMNSQESSWGKNVSSTESGRLFKGKRAHGPALLTKDNALFKVSISLLKTNKTSNNSATNRKTHIDGPSLLIENSPSVWQNILESDTEFKKVTPLIHDRMLMDKNATALRLNHMSNKTTSSKNMEMVQQKKEGPIPPDAQNPDMSFFKMLFLPESARWIQRTHGKNSLNSGQGPSPKQLVSLGPEKSVEGQNFLSEKNKVVVGKGEFTKDVGLKEMVFPSSRNLFLTNLDNLHENNTHNQEKKIQEEIEKKETLIQENVVLPQIHTVTGTKNFMKNLFLLSTRQNVEGSYDGAYAPVLQDFRSLNDSTNRTKKHTAHFSKKGEEENLEGLGNQTKQIVEKYACTTRISPNTSQQNFVTQRSKRALKQFRLPLEETELEKRIIVDDTSTQWSKNMKHLTPSTLTQIDYNEKEKGAITQSPLSDCLTRSHSIPQANRSPLPIAKVSSFPSIRPIYLTRVLFQDNSSHLPAASYRKKDSGVQESSHFLQGAKKNNLSLAILTLEMTGDQREVGSLGTSATNSVTYKKVENTVLPKPDLPKTSGKVELLPKVHIYQKDLFPTETSNGSPGHLDLVEGSLLQGTEGAIKWNEANRPGKVPFLRVATESSAKTPSKLLDPLAWDNHYGTQIPKEEWKSQEKSPEKTAFKKKDTILSLNACESNHAIAAINEGQNKPEIEVTWAKQGRTERLCSQNPPVLKRHQREITRTTLQSDQEEIDYDDTISVEMKKEDFDIYDEDENQSPRSFQKKTRHYFIAAVERLWDYGMSSSPHVLRNRAQSGSVPQFKKVVFQEFTDGSFTQPLYRGELNEHLGLLGPYIRAEVEDNIMVTFRNQASRPYSFYSSLISYEEDQRQGAEPRKNFVKPNETKTYFWKVQHHMAPTKDEFDCKAWAYFSDVDLEKDVHSGLIGPLLVCHTNTLNPAHGRQVTVQEFALFFTIFDETKSWYFTENMERNCRAPCNIQMEDPTFKENYRFHAINGYIMDTLPGLVMAQDQRIRWYLLSMGSNENIHSIHFSGHVFTVRKKEEYKMALYNLYPGVFETVEMLPSKAGIWRVECLIGEHLHAGMSTLFLVYSNKCQTPLGMASGHIRDFQITASGQYGQWAPKLARLHYSGSINAWSTKEPFSWIKVDLLAPMIIHGIKTQGARQKFSSLYISQFIIMYSLDGKKWQTYRGNSTGTLMVFFGNVDSSGIKHNIFNPPIIARYIRLHPTHYSIRSTLRMELMGCDLNSCSMPLGMESKAISDAQITASSYFTNMFATWSPSKARLHLQGRSNAWRPQVNNPKEWLQVDFQKTMKVTGVTTQGVKSLLTSMYVKEFLISSSQDGHQWTLFFQNGKVKVFQGNQDSFTPVVNSLDPPLLTRYLRIHPQSWVHQIALRMEVLGCEAQDLY

SEQ ID NO: 7823 - protein, 1516 aa, Homo sapiens
MAANVGSMFQYWKRFDLQQLQRELDATATVLANRQDESEQSRKRLIEQSREFKKNTPEDLRKQVAPLLKSFQGEIDALSKRSKEAEAAFLNVYKRLIDVPDPVPALDLGQQLQLKVQRLHDIETENQKLRETLEEYNKEFAEVKNQEVTIKALKEKIREYEQTLKNQAETIALEKEQKLQNDFAEKERKLQETQMSTTSKLEEAEHKVQSLQTALEKTRTELFDLKTKYDEETTAKADEIEMIMTDLERANQRAEVAQREAETLREQLSSANHSLQLASQIQKAPDVEQAIEVLTRSSLEVELAAKEREIAQLVEDVQRLQASLTKLRENSASQISQLEQQLSAKNSTLKQLEEKLKGQADYEEVKKELNILKSMEFAPSEGAGTQDAAKPLEVLLLEKNRSLQSENAALRISNSDLSGSARRKGKDQPESRRPGSLPAPPPSQLPRNPGEQASNTNGTHQFSPAGLSQDFFSSSLASPSLPLASTGKFALNSLLQRQLMQSFYSKAMQEAGSTSMIFSTGPYSTNSISSQSPLQQSPDVNGMAPSPSQSESAGSVSEGEEMDTAEIARQVKEQLIKHNIGQRIFGHYVLGLSQGSVSEILARPKPWNKLTVRGKEPFHKMKQFLSDEQNILALRSIQGRQRENPGQSLNRLFQEVPKRRNGSEGNITTRIRASETGSDEAIKSILEQAKRELQVQKTAEPAQPSSASGSGNSDDAIRSILQQARREMEAQQAALDPALKQAPLSQSDITILTPKLLSTSPMPTVSSYPPLAISLKKPSAAPEAGASALPNPPALKKEAQDAPGLDPQGAADCAQGVLRQVKNEVGRSGAWKDHWWSAVQPERRNAASSEEAKAEETGGGKEKGSGGSGGGSQPRAERSQLQGPSSSEYWKEWPSAESPYSQSSELSLTGASRSETPQNSPLPSSPIVPMSKPTKPSVPPLTPEQYEVYMYQEVDTIELTRQVKEKLAKNGICQRIFGEKVLGLSQGSVSDMLSRPKPWSKLTQKGREPFIRMQLWLNGELGQGVLPVQGQQQGPVLHSVTSLQDPLQQGCVSSESTPKTSASCSPAPESPMSSSESVKSLTELVQQPCPPIEASKDSKPPEPSDPPASDSQPTTPLPLSGHSALSIQELVAMSPELDTYGITKRVKEVLTDNNLGQRLFGETILGLTQGSVSDLLARPKPWHKLSLKGREPFVRMQLWLNDPNNVEKLMDMKRMEKKAYMKRRHSSVSDSQPCEPPSVGTEYSQGASPQPQHQLKKPRVVLAPEEKEALKRAYQQKPYPSPKTIEDLATQLNLKTSTVINWFHNYRSRIRRELFIEEIQAGSQGQAGASDSPSARSGRAAPSSEGDSCDGVEATEGPGSADTEEPKSQGEAEREEVPRPAEQTEPPPSGTPGPDDARDDDHEGGPVEGPGPLPSPASATATAAPAAPEDAATSAAAAPGEGPAAPSSAPPPSNSSSSSAPRRPSSLQSLFGLPEAAGARDSRDNPLRKKKAANLNSIIHRLEKAASREEPIEWEF

SEQ ID NO: 7824 - protein, 1243 aa, Homo sapiens [sequence omitted]

SEQ ID NO: 7825 - protein, 995 aa, Homo sapiens
MVFSVRQCGHVGRTEEVLLTFKIFLVIICLHVVLVTSLEEDTDNSSLSPPPAKLSVVSFAPSSNGTPDVTLSLLPSNETGVKPQRNICNLSSICNDSAFFRGEIMFQYDKESTVPQNQHITNGTLTGVLSLSELKRSELNKTLQTLSETYFIMCATAEAQSTLNCTFTIKLNNTMNACAVIAALERVKIRPMEHCCCSVRIPCPSSPEELEKLQCDLQDPIVCLADHPRGPPFSSSQSIPVVPRATVLSQVPKATSFAEPPDYSPVTHNVPSPIGEIQPLSPQPSAPIASSPAIDMPPQSETISSPMPQTHVSGTPPPVKASFSSPTVSAPANVNTTSAPPVQTDIVNTSSISDLENQVLQMEKALSLGSLEPNLAGEMINQVSRLLHSPPDMLAPLAQRLLKVVDDIGLQLNFSNTTISLTSPSLALAVIRVNASSFNTTTFVAQDPANLQVSLETQAPENSIGTITLPSSLMNNLPAHDMELASRVQFNFFETPALFQDPSLENLSLISYVISSSVANLTVRNLTRNVTVTLKHINPSQDELTVRCVFWDLGRNGGRGGWSDNGCSVKDRRLNETICTCSHLTSFGVLLDLSRTSVLPAQMMALTFITYIGCGLSSIFLSVTLVTYIAFEKIRRDYPSKILIQLCAALLLLNLVFLLDSWIALYKMQGLCISVAVFLHYFLLVSFTWMGLEAFHMYLALVKVFNTYIRKYILKFCIVGWGVPAVVVTIILTISPDNYGLGSYGKFPNGSPDDFCWINNNAVFYITVVGYFCVIFLLNVSMFIVVLVQLCRIKKKKQLGAQRKTSIQDLRSIAGLTFLLGITWGFAFFAWGPVNVTFMYLFAIFNTLQGFFIFIFYCVAKENVRKQWRRYLCCGKLRLAENSDWSKTATNGLKKQTVNQGVSSSSNSLQSSSNSTNSTTLLVNNDCSVHASGNGNASTERNGVSFSVQNGDVCLHDFTGKQHMFNEKEDSCNGKGRMALRRTSKRGSLHFIEQM

SEQ ID NO: 7826 - protein, 3174 aa, Homo sapiens
MVFESVVVDVLNRFLGDYVVDLDTSQLSLGIWKGAVALKNLQIKENALSQLDVPFKVKVGHIGNLKLIIPWKNLYTQPVEAVLEEIYLLIVPSSRIKYDPLKEEKQLMEAKQQELKRIEEAKQKVVDQEQHLPEKQDTFAEKLVTQIIKNLQVKISSIHIRYEDDITNRDKPLSFGISLQNLSMQTTDQYWVPCLHDETEKLVRKLIRLDNLFAYWNVKSQMFYLSDYDNSLDDLKNGIVNENIVPEGYDFVFRPISANAKLVMNRRSDFDFSAPKINLEIELHNIAIEFNKPQYFSIMELLESVDMMAQNLPYRKFKPDVPLHHHAREWWAYAIHGVLEVNVCPRLWMWSWKHIRKHRQKVKQYKELYKKKLTSKKPPGELLVSLEELEKTLDVFNITIARQTAEVEVKKAGYKIYKEGVKDPEDNKGWFSWLWSWSEQNTNEQQPDVQPETLEEMLTPEEKALLYEAIGYSETAVDPTLLKTFEALKFFVHLKSMSIVLRENHQKPELVDIVIEEFSTLIVQRPGAQAIKFETKIDSFHITGLPDNSEKPRLLSSLDDAMSLFQITFEINPLDETVSQRCIIEAEPLEIIYDARTVNSIVEFFRPPKEVHLAQLTAATLTKLEEFRSKTATGLLYIIETQKVLDLKINLKASYIIVPQDGIFSPTSNLLLLDLGHLKVTSKSRSELPDVKQGEANLKEIMDRAYDSFDIQLTSVQLLYSRVGDNWREARKLSVSTQHILVPMHFNLELSKAMVFMDVRMPKFKIYGKLPLISLRISDKKLQGIMELIESIPKPEPVTEVSAPVKSFQIQTSTSLGTSQISQKIIPLLELPSVSEDDSEEEFFDAPCSPLEEPLQFPTGVKSIRTRKLQKQDCSVNMTTFKIRFEVPKVLIEFYHLVGDCELSVVEILVLGLGAEIEIRTYDLKANAFLKEFCLKCPEYLDENKKPVYLVTTLDNTMEDLLTLEYVKAEKNVPDLKSTYNNVLQLIKVNFSSLDIHLHTEALLNTINYLHNILPQSEEKSAPVSTTETEDKGDVIKKLALKLSTNEDIITLQILAELSCLQIFIQDQKCNISEIKIEGLDSEMIMRPSETEINAKLRNIIVLDSDITAIYKKAVYITGKEVFSFKMVSYMDATAGSAYTDMNVVDIQVNLIVGCIEVVFVTKFLYSILAFIDNFQAAKQALAEATVQAAGMAATGVKELAQRSSRMALDINIKAPVVVIPQSPVSENVFVADFGLITMTNTFHMITESQSSPPPVIDLITIKLSEMRLYRSRFINDAYQEVLDLLLPLNLEVVVERNLCWEWYQEVPCFNVNAQLKPMEFILSQEDITTIFKTLHGNIWYEKDGSASPAVTKDQYSATSGVTTNASHHSGGATVVTAAVVEVHSRALLVKTTLNISFKTDDLTMVLYSPGPKQASFTDVRDPSLKLAEFKLENIISTLKMYTDGSTFSSFSLKNCILDDKRPHVKKATPRMIGLTVGFDKKDMMDIKYRKVRDGCVTDAVFQEMYICASVEFLQTVANVFLEAYTTGTAVETSVQTWTAKEEVPTQESVKWEINVIIKNPEIVFVADMTKNDAPALVITTQCEICYKGNLENSTMTAAIKDLQVRACPFLPVKRKGKITTVLQPCDLFYQTTQKGTDPQVIDMSVKSLTLKVSPVIINTMITITSALYTTKETIPEETASSTAHLWEKKDTKTLKMWFLEESNETEKIAPTTELVPKGEMIKMNIDSIFIVLEAGIGHRTVPMLLAKSRFSGEGKNWSSLINLHCQLELEVHYYNEMFGVWEPLLEPLEIDQTEDFRPWNLGIKMKKKAKMAIVESDPEEENYKVPEYKTVISFHSKDQLNITLSKCGLVMLNNLVKAFTEAATGSSADFVKDLAPFMILNSLGLTISVSPSDSFSVLNIPMAKSYVLKNGESLSMDYIRTKDNDHFNAMTSLSSKLFFILLTPVNHSTADKIPLTKVGRRLYTVRHRESGVERSIVCQIDTVEGSKKVTIRSPVQIRNHFSVPLSVYEGDTLLGTASPENEFNIPLGSYRSFIFLKPEDENYQMCEGIDFEEIIKNDGALLKKKCRSKNPSKESFLINIVPEKDNLTSLSVYSEDGWDLPYIMHLWPPILLRNLLPYKIAYYIEGIENSVFTLSEGHSAQICTAQLGKARLHLKLLDYLNHDWKSEYHIKPNQQDISFVSFTCVTEMEKTDLDIAVHMTYNTGQTVVAFHSPYWMVNKTGRMLQYKADGIHRKHPPNYKKPVLFSFQPNHFFNNNKVQLMVTDSELSNQFSIDTVGSHGAVKCKGLKMDYQVGVTIDLSSFNITRIVTFTPFYMIKNKSKYHISVAEEGNDKWLSLDLEQCIPFWPEYASSKLLIQVERSEDPPKRIYFNKQENCILLRLDNELGGIIAEVNLAEHSTVITFLDYHDGAATFLLINHTKNELVQYNQSSLSEIEDSLPPGKAVFYTWADPVGSRRLKWRCRKSHGEVTQKDDMMMPIDLGEKTIYLVSFFEGLQRIILFTEDPRVFKVTYESEKAELAEQEIAVALQDVGISLVNNYTKQEVAYIGITSSDVVWETKPKKKARWKPMSVKHTEKLEREFKEYTESSPSEDKVIQLDTNVPVRLTPTGHNMKILQPHVIALRRNYLPALKVEYNTSAHQSSFRIQIYRIQIQNQIHGAVFPFVFYPVKPPKSVTMDSAPKPFTDVSIVMRSAGHSQISRIKYFKVLIQEMDLRLDLGFIYALTDLMTEAEVTENTEVELFHKDIEAFKEEYKTASLVDQSQVSLYEYFHISPIKLHLSVSLSSGREEAKDSKQNGGLIPVHSLNLLLKSIGATLTDVQDVVFKLAFFELNYQFHTTSDLQSEVIRHYSKQAIKQMYVLILGLDVLGNPFGLIREFSEGVEAFFYEPYQGAIQGPEEFVEGMALGLKALVGGAVGGLAGAASKITGAMAKGVAAMTMDEDYQQKRREAMNKQPAGFREGITRGGKGLVSGFVSGITGIVTKPIKGAQKGGAAGFFKGVGKGLVGAVARPTGGIIDMASSTFQGIKRATETSEVESLRPPRFFNEDGVIRPYRLRDGTGNQMLQVMENGRFAKYKYFTHVMINKTDMLMITRRGVLFVTKGTFGQLTCEWQYSFDEFTKEPFIVHGRRLRIEAKERVKSVFHAREFGKIINFKTPEDARWILTKLQEAREPSPSL

SEQ ID NO: 7827 - protein, 611 aa, Homo sapiens
MWLAKACWSIQSEMPCIQAQYGTPAPSPGPRDHLASDPLTPEFIKPTMDLASPEAAPAAPTALPSFSTFMDGYTGEFDTFLYQLPGTVQPCSSASSSASSTSSSSATSPASASFKFEDFQVYGCYPGPLSGPVDEALSSSGSDYYGSPCSAPSPSTPSFQPPQLSPWDGSFGHFSPSQTYEGLRAWTEQLPKASGPPQPPAFFSFSPPTGPSPSLAQSPLKLFPSQATHQLGEGESYSMPTAFPGLAPTSPHLEGSGILDTPVTSTKARSGAPGGSEGRCAVCGDNASCQHYGVRTCEGCKGFFKRTVQKNAKYICLANKDCPVDKRRRNRCQFCRFQKCLAVGMVKEVVRTDSLKGRRGRLPSKPKQPPDASPANLLTSLVRAHLDSGPSTAKLDYSKFQELVLPHFGKEDAGDVQQFYDLLSGSLEVIRKWAEKIPGFAELSPADQDLLLESAFLELFILRLAYRSKPGEGKLIFCSGLVLHRLQCARGFGDWIDSILAFSRSLHSLLVDVPAFACLSALVLITDRHGLQEPRRVEELQNRIASCLKEHVAAVAGEPQPASCLSRLLGKLPELRTLCTQGLQRIFYLKLEDLVPPPPIIDKIFMDTLPF

SEQ ID NO: 7828 - protein, 905 aa, Homo sapiens
MAKRALHDFIDKYLYAMRLSDETLIDIMTRFRKEMKNGLSRDFNPTATVKMLPTFVRSIPDGSEKGDFIALDLGGSSFRILRVQVNHEKNQNVHMESEVYDTPENIVHGSGSQLFDHVAECLGDFMEKRKIKDKKLPVGFTFSFPCQQSKIDEAILITWTKRFKASGVEGADVVKLLNKAIKKRGDYDANIVAVVNDTVGTMMTCGYDDQHCEVGLIIGTGTNACYMEELRHIDLVEGDEGRMCINTEWGAFGDDGSLEDIRTEFDREIDRGSLNPGKQLFEKMVSGMYLGELVRLILVKMAKEGLLFEGRITPELLTRGKFNTSDVSAIEKNKEGLHNAKEILTRLGVEPSDDDCVSVQHVCTIVSFRSANLVAATLGAILNRLRDNKGTPRLRTTVGVDGSLYKTHPQYSRRFHKTLRRLVPDSDVRFLLSESGSGKGAAMVTAVAYRLAEQHRQIEETLAHFHLTKDMLLEVKKRMRAEMELGLRKQTHNNAVVKMLPSFVRRTPDGTENGDFLALDLGGTNFRVLLVKIRSGKKRTVEMHNKIYAIPIEIMQGTGEELFDHIVSCISDFLDYMGIKGPRMPLGFTFSFPCQQTSLDAGILITWTKGFKATDCVGHDVVTLLRDAIKRREEFDLDVVAVVNDTVGTMMTCAYEEPTCEVGLIVGTGSNACYMEEMKNVEMVEGDQGQMCINMEWGAFGDNGCLDDIRTHYDRLVDEYSLNAGKQRYEKMISGMYLGEIVRNILIDFTKKGFLFRGQISETLKTRGIFETKFLSQIESDRLALLQVRAILQQLGLNSTCDDSILVKTVCGVVSRRAAQLCGAGMAAVVDKIRENRGLDRLNVTVGVDGTLYKLHPHFSRIMHQTVKELSPKCNVSFLLSEDGSGKGAALITAVGVRLRTEASS

SEQ ID NO: 7829 - protein, 394 aa, Homo sapiens
MPSNSSASISKLRESLTPDGSKWSTSLMQTLGNHSRGEQDSSLDMKDFRPLRKWSSLSKLTAPDNCGQGGTVCREESRNGLEKIGKAKALTSQLRTIGPSCLHDSMEMLRLEDKEINKKRSSTLDCKYKFESCSKEDFRASSSTLRRQPVDMTYSALPESKPIMTSSEAFEPPKYLMLGQQAVGGVPIQPSVRTQMWLTEQLRTNPLEGRNTEDSYSLAPWQQQQIEDFRQGSETPMQVLTGSSRQSYSPGYQDFSKWESMLKIKEGLLRQKEIVIDRQKQQITHLHERIRDNELRAQHAMLGHYVNCEDSYVASLQPQYENTSLQTPFSEESVSHSQQGEFEQKLASTEKEVLQLNEFLKQRLSLFSEEKKKLEEKVGFSNKVELGQQHFLSI

SEQ ID NO: 7830 - protein, 993 aa, Homo sapiens
MRPVALLLLPSLLALLAHGLSLEAPTVGKGQAPGIEETDGELTAAPTPEQPERGVHFVTTAPTLKLLNHHPLLEEFLQEGLEKGDEELRPALPFQPDPPAPFTPSPLPRLANQDSRPVFTSPTPAMAAVPTQPQSKEGPWSPESESPMLRITAPLPPGPSMAVPTLGPGEIASTTPPSRAWTPTQEGPGDMGRPWVAEVVSQGAGIGIQGTITSSTASGDDEETTTTTTIITTTITTVQTPGPCSWNFSGPEGSLDSPTDLSSPTDVGLDCFFYISVYPGYGVEIKVQNISLREGETVTVEGLGGPDPLPLANQSFLLRGQVIRSPTHQAALRFQSLPPPAGPGTFHFHYQAYLLSCHFPRRPAYGDVTVTSLHPGGSARFHCATGYQLKGARHLTCLNATQPFWDSKEPVCIAACGGVIRNATTGRIVSPGFPGNYSNNLTCHWLLEAPEGQRLHLHFEKVSLAEDDDRLIIRNGDNVEAPPVYDSYEVEYLPIEGLLSSGKHFFVELSTDSSGAAAGMALRYEAFQQGHCYEPFVKYGNFSSSTPTYPVGTTVEFSCDPGYTLEQGSIIIECVDPHDPQWNETEPACRAVCSGEITDSAGVVLSPNWPEPYGRGQDCIWGVHVEEDKRIMLDIRVLRIGPGDVLTFYDGDDLTARVLGQYSGPRSHFKLFTSMADVTIQFQSDPGTSVLGYQQGFVIHFFEVPRNDTCPELPEIPNGWKSPSQPELVHGTVVTYQCYPGYQVVGSSVLMCQWDLTWSEDLPSCQRVTSCHDPGDVEHSRRLISSPKFPVGATVQYICDQGFVLMGSSILTCHDRQAGSPKWSDRAPKCLLEQLKPCHGLSAPENGARSPEKQLHPAGATIHFSCAPGYVLKGQASIKCVPGHPSHWSDPPPICRAASLDGFYNSRSLDVAKAPAASSTLDAAHIAAAIFLPLVAMVLLVGGVYFYFSRLQGKSSLQLPRPRPRPYNRITIESAFDNPTYETGETREYEVSI

SEQ ID NO: 7831 - protein, 1914 aa, Homo sapiens
MGDVKLVASSHISKTSLSVDPSRVDSMPLTEAPAFILPPRNLCIKEGATAKFEGRVRGYPEPQVTWHRNGQPITSGGRFLLDCGIRGTFSLVIHAVHEEDRGKYTCEATNGSGARQVTVELTVEGSFAKQLGQPVVSKTLGDRFSAPAVETRPSIWGECPPKFATKLGRVVVKEGQMGRFSCKITGRPQPQVTWLKGNVPLQPSARVSVSEKNGMQVLEIHGVNQDDVGVYTCLVVNGSGKASMSAELSIQGLDSANRSFVRETKATNSDVRKEVTNVISKESKLDSLEAAAKSKNCSSPQRGGSPPWAANSQPQPPRESKLESCKDSPRTAPQTPVLQKTSSSITLQAARVQPEPRAPGLGVLSPSGEERKRPAPPRPATFPTRQPGLGSQDVVSKAANRRIPMEGQRDSAFPKFESKPQSQEVKENQTVKFRCEVSGIPKPEVAWFLEGTPVRRQEGSIEVYEDAGSHYLCLLKARTRDSGTYSCTASNAQGQLSCSWTLQVERLAVMEVAPSFSSVLKDCAVIEGQDFVLQCSVRGTPVPRITWLLNGQPIQYARSTCEAGVAELHIQDALPEDHGTYTCLAENALGQVSCSAWVTVHEKKSSRKSEYLLPVAPSKPTAPIFLQGLSDLKVMDGSQVTMTVQVSGNPPPEVIWLHNGNEIQESEDFHFEQRGTQHSLCIQEVFPEDTGTYTCEAWNSAGEVRTQAVLTVQEPHDGTQPWFISKPRSVTASLGQSVLISCAIAGDPFPTVHWLRDGKALCKDTGHFEVLQNEDVFTLVLKKVQPWHAGQYEILLKNRVGECSCQVSLMLQNSSARALPRGREPASCEDLCGGGVGADGGGSDRYGSLRPGWPARGQGWLEEEDGEDVRGVLKRRVETRQHTEEAIRQQEVEQLDFRDLLGKKVSTKTLSEDDLKEIPAEQMDFRANLQRQVKPKTVSEEERKVHSPQQVDFRSVLAKKGTSKTPVPEKVPPPKPATPDFRSVLGGKKKLPAENGSSSAETLNAKAVESSKPLSNAQPSGPLKPVGNAKPAETLKPMGNAKPAETLKPMGNAKPDENLKSASKEELKKDVKNDVNCKRGHAGTTDNEKRSESQGTAPAFKQKLQDVHVAEGKKLLLQCQVSSDPPATIIWTLNGKTLKTTKFIILSQEGSLCSVSIEKALPEDRGLYKCVAKNDAGQAECSCQVTVDDAPASENTKAPEMKSRRPKSSLPPVLGTESDATVKKKPAPKTPPKAAMPPQIIQFPEDQKVRAGESVELFGKVTGTQPITCTWMKFRKQIQESEHMKVENSENGSKLTILAARQEHCGCYTLLVENKLGSRQAQVNLTVVDKPDPPAGTPCASDIRSSSLTLSWYGSSYDGGSAVQSYSIEIWDSANKTWKELATCRSTSFNVQDLLPDHEYKFRVRAINVYGTSEPSQESELTTVGEKPEEPKDEVEVSDDDEKEPEVDYRTVTINTEQKVSDFYDIEERLGSGKFGQVFRLVEKKTRKVWAGKFFKAYSAKEKENIRQEISIMNCLHHPKLVQCVDAFEEKANIVMVLEIVSGGELFERIIDEDFELTERECIKYMRQISEGVEYIHKQGIVHLDLKPENIMCVNKTGTRIKLIDFGLARRLENAGSLKVLFGTPEFVAPEVINYEPIGYATDMWSIGVICYILVSGLSPFMGDNDNETLANVTSATWDFDDEAFDEISDDAKDFISNLLKKDMKNRLDCTQCLQHPWLMKDTKNMEAKKLSKDRMKKYMARRKWQKTGNAVRAIGRLSSMAMISGLSGRKSSTGSPTSPLNAEKLESEEDVSQAFLEAVAEEKPHVKPYFSKTIRDLEVVEGSAARFDCKIEGYPDPEVVWFKDDQSIRESRHFQIDYDEDGNCSLIISDVCGDDDAKYTCKAVNSLGEATCTAELIVETMEEGEGEGEEEEE

SEQ ID NO: 7832 - protein, 1556 aa, Homo sapiens
MPLLHRKPFVRQKPPADLRPDEEVFYCKVTNEIFRHYDDFFERTILCNSLVWSCAVTGRPGLTYQEALESEKKARQNLQSFPEPLIIPVLYLTSLTHRSRLHEICDDIFAYVKDRYFVEETVEVIRNNGARLQCRILEVLPPSHQNGFANGHVNSVDGETIIISDSDDSETQSCSFQNGKKKDAIDPLLFKYKVQPTKKELHESAIVKATQISRRKHLFSRDKLKLFLKQHCEPQDGVIKIKASSLSTYKIAEQDFSYFFPDDPPTFIFSPANRRRGRPPKRIHISQEDNVANKQTLASYRSKATKERDKLLKQEEMKSLAFEKAKLKREKADALEAKKKEKEDKEKKREELKKIVEEERLKKKEEKERLKVEREKEREKLREEKRKYVEYLKQWSKPREDMECDDLKELPEPTPVKTRLPPEIFGDALMVLEFLNAFGELFDLQDEFPDGVTLEVLEEALVGNDSEGPLCELLFFFLTAIFQAIAEEEEEVAKEQLTDADTKDLTEALDEDADPTKSALSAVASLAAAWPQLHQGCSLKSLDLDSCTLSEILRLHILASGADVTSANAKYRYQKRGGFDATDDACMELRLSNPSLVKKLSSTSVYDLTPGEKMKILHALCGKLLTLVSTRDFIEDYVDILRQAKQEFRELKAEQHRKEREEAAARIRKRKEEKLKEQEQKMKEKQEKLKEDEQRNSTADISIGEEEREDFDTSIESKDTEQKELDQDMVTEDEDDPGSHKRGRRGKRGQNGFKEFTRQEQINCVTREPLTADEEEALKQEHQRKEKELLEKIQSAIACTNIFPLGRDRMYRRYWIFPSIPGLFIEEDYSGLTEDMLLPRPSSFQNNVQSQDPQVSTKTGEPLMSESTSNIDQGPRDHSVQLPKPVHKPNRWCFYSSCEQLDQLIEALNSRGHRESALKETLLQEKSRICAQLARFSEEKFHFSDKPQPDSKPTYSRGRSSNAYDPSQMCAEKQLELRLRDFLLDIEDRIYQGTLGAIKVTDRHIWRSALESGRYELLSEENKENGIIKTVNEDVEEMEIDEQTKVIVKDRLLGIKTETPSTVSTNASTPQSVSSVVHYLAMALFQIEQGIERRFLKAPLDASDSGRSYKTVLDRWRESLLSSASLSQVFLHLSTLDRSVIWSKSILNARCKICRKKGDAENMVLCDGCDRGHHTYCVRPKLKTVPEGDWFCPECRPKQRSRRLSSRQRPSLESDEDVEDSMGGEDDEVDGDEEEGQSEEEEYEVEQDEDDSQEEEEVSLPKRGRPQVRLPVKTRGKLSSSFSSRGQQQEPGRYPSRSQQSTPKTTVSSKTGRSLRKINSAPPTETKSLRIASRSTRHSHGPLQADVFVELLSPRRKRRGRKSANNTPENSPNFPNFRVIATKSSEQSRSVNIASKLSLQESESKRRCRKRQSPEPSPVTLGRRSSGRQGGVHELSAFEQLVVELVRHDDSWPFLKLVSKIQVPDYYDIIKKPIALNIIREKVNKCEYKLASEFIDDIELMFSNCFEYNPRNTSEAKAGTRLQAFFHIQAQKLGLHVTPSNVDQVSTPPAAKKSRI

SEQ ID NO: 7833 - protein, 786 aa, Homo sapiens
MKGTGIMDCAPKALLARALYDNCPDCSDELAFSRGDILTILEQHVPESEGWWKCLLHGRQGLAPANRLQILTEVAADRPCPPFLRGLEEAPASSEETYQVPTLPRPPTPGPVYEQMRSWAEGPQPPTAQVYEFPDPPTSARIICEKTLSFPKQAILTLPRPVRASLPTLPSQVYDVPTQHRGPVVLKEPEKQQLYDIPASPKKAGLHPPDSQASGQGVPLISVTTLRRGGYSTLPNPQKSEWIYDTPVSPGKASVRNTPLTSFAEESRPHALPSSSSTFYNPPSGRSRSLTPQLNNNVPMQKKLSLPEIPSYGFLVPRGTFPLDEDVSYKVPSSFLIPRVEQQNTKPNIYDIPKATSSVSQAGKELEKAKEVSENSAGHNSSWFSRRTTSPSPEPDRLSGSSSDSRASIVSSCSTTSTDDSSSSSSEESAKELSLDLDVAKETVMALQHKVVSSVAGLMLFVSRKWRFRDYLEANIDAIHRSTDHIEESVREFLDFARGVHGTACNLTDSNLQNRIRDQMQTISNSYRILLETKESLDNRNWPLEVLVTDSVQNSPDDLERFVMVARMLPEDIKRFASIVIANGRLLFKRNCEKEETVQLTPNAEFKCEKYIQPPQRETESHQKSTPSTKQREDEHSSELLKKNRANICGQNPGPLIPQPSSQQTPERKPRLSEHCRLYFGALFKAISAFHGSLSSSQPAEIITQSKLVIMVGQKLVDTLCMETQERDVRNEILRGSSHLCSLLKDVALATKNAVLTYPSPAALGHLQAEAEKLEQHTRQFRGTLG

SEQ ID NO: 7834 - protein, 416 aa, Homo sapiens
MFSVFEEITRIVVKEMDAGGDMIAVRSLVDADRFRCFHLVGEKRTFFGCRHYTTGLTLMDILDTDGDKWLDELDSGLQGQKAEFQILDNVDSTGELIVRLPKEITISGSFQGFHHQKIKISENRISQQYLATLENRKLKRELPFSFRSINTRENLYLVTETLETVKEETLKSDRQYKFWSQISQGHLSYKHKGQREVTIPPNRVLSYRVKQLVFPNKETMNIHFRGKTKSFPEEKDGASSCLGKSLGSEDSRNMKEKLEDMESVLKDLTEEKRKDVLNSLAKCLGKEDIRQDLEQRVSEVLISGELHMEDPDKPLLSSLFNAAGVLVEARAKAILDFLDALLELSEEQQFVAEALEKGTLPLLKDQVKSVMEQNWDELASSPPDMDYDPEARILCALYVVVSILLELAEGPTSVSS

SEQ ID NO: 7835 - protein, 2639 aa, Homo sapiens
MSSSHSRAGQSAAGAAPGGGVDTRDAEMPATEKDLAEDAPWKKIQQNTFTRWCNEHLKCVSKRIANLQTDLSDGLRLIALLEVLSQKKMHRKHNQRPTFRQMQLENVSVALEFLDRESIKLVSIDSKAIVDGNLKLILGLIWTLILHYSISMPMWDEEEDEEAKKQTPKQRLLGWIQNKLPQLPITNFSRDWQSGRALGALVDSCAPGLCPDWDSWDASKPVTNAREAMQQADDWLGIPQVITPEEIVDPNVDEHSVMTYLSQFPKAKLKPGAPLRPKLNPKKARAYGPGIEPTGNMVKKRAEFTVETRSAGQGEVLVYVEDPAGHQEEAKVTANNDKNRTFSVWYVPEVTGTHKVTVLFAGQHIAKSPFEVYVDKSQGDASKVTAQGPGLEPSGNIANKTTYFEIFTAGAGTGEVEVVIQDPMGQKGTVEPQLEARGDSTYRCSYQPTMEGVHTVHVTFAGVPIPRSPYTVTVGQACNPSACRAVGRGLQPKGVRVKETADFKVYTKGAGSGELKVTVKGPKGEERVKQKDLGDGVYGFEYYPMVPGTYIVTITWGGQNIGRSPFEVKVGTECGNQKVRAWGPGLEGGVVGKSADFVVEAIGDDVGTLGFSVEGPSQAKIECDDKGDGSCDVRYWPQEAGEYAVHVLCNSEDIRLSPFMADIRDAPQDFHPDRVKARGPGLEKTGVAVNKPAEFTVDAKHGGKAPLRVQVQDNEGCPVEALVKDNGNGTYSCSYVPRKPVKHTAMVSWGGVSIPNSPFRVNVGAGSHPNKVKVYGPGVAKTGLKAHEPTYFTVDCAEAGQGDVSIGIKCAPGVVGPAEADIDFDIIRNDNDTFTVKYTPRGAGSYTIMVLFADQATPTSPIRVKVEPSHDASKVKAEGPGLSRTGVELGKPTHFTVNAKAAGKGKLDVQFSGLTKGDAVRDVDIIDHHDNTYTVKYTPVQQGPVGVNVTYGGDPIPKSPFSVAVSPSLDLSKIKVSGLGEKVDVGKDQEFTVKSKGAGGQGKVASKIVGPSGAAVPCKVEPGLGADNSVVRFLPREEGPYEVEVTYDGVPVPGSPFPLEAVAPTKPSKVKAFGPGLQGGSAGSPARFTIDTKGAGTGGLGLTVEGPCEAQLECLDNGDGTCSVSYVPTEPGDYNINILFADTHIPGSPFKAHVVPCFDASKVKCSGPGLERATAGEVGQFQVDCSSAGSAELTIEICSEAGLPAEVYIQDHGDGTHTITYIPLCPGAYTVTIKYGGQPVPNFPSKLQVEPAVDTSGVQCYGPGIEGQGVFREATTEFSVDARALTQTGGPHVKARVANPSGNLTETYVQDRGDGMYKVEYTPYEEGLHSVDVTYDGSPVPSSPFQVPVTEGCDPSRVRVHGPGIQSGTTNKPNKFTVETRGAGTGGLGLAVEGPSEAKMSCMDNKDGSCSVEYIPYEAGTYSLNVTYGGHQVPGSPFKVPVHDVTDASKVKCSGPGLSPGMVRANLPQSFQVDTSKAGVAPLQVKVQGPKGLVEPVDVVDNADGTQTVNYVPSREGPYSISVLYGDEEVPRSPFKVKVLPTHDASKVKASGPGLNTTGVPASLPVEFTIDAKDAGEGLLAVQITDPEGKPKKTHIQDNHDGTYTVAYVPDVTGRYTILIKYGGDEIPFSPYRVRAVPTGDASKCTVTGAGIGPTIQIGEETVITVDTKAAGKGKVTCTVCTPDGSEVDVDVVENEDGTFDIFYTAPQPGKYVICVRFGGEHVPNSPFQVTALAGDQPSVQPPLRSQQLAPQYTYAQGGQQTWAPERPLVGVNGLDVTSLRPFDLVIPFTIKKGEITGEVRMPSGKVAQPTITDNKDGTVTVRYAPSEAGLHEMDIRYDNMHIPGSPLQFYVDYVNCGHVTAYGPGLTHGVVNKPATFTVNTKDAGEGGLSLAIEGPSKAEISCTDNQDGTCSVSYLPVLPGDYSILVKYNEQHVPGSPFTARVTGDDSMRMSHLKVGSAADIPINISETDLSLLTATVVPPSGREEPCLLKRLRNGHVGISFVPKETGEHLVHVKKNGQHVASSPIPVVISQSEIGDASRVRVSGQGLHEGHTFEPAEFIIDTRDAGYGGLSLSIEGPSKVDINTEDLEDGTCRVTYCPTEPGNYIINIKFADQHVPGSPFSVKVTGEGRVKESITRRRRAPSVANVGSHCDLSLKIPEISIQDMTAQVTSPSGKTHEAEIVEGENHTYCIRFVPAEMGTHTVSVKYKGQHVPGSPFQFTVGPLGEGGAHKVRAGGPGLERAEAGVPAEFSIWTREAGAGGLAIAVEGPSKAEISFEDRKDGSCGVAYVVQEPGDYEVSVKFNEEHIPDSPFVVPVASPSGDARRLTVSSLQESGLKVNQPASFAVSLNGAKGAIDAKVHSPSGALEECYVTEIDQDKYAVRFIPRENGVYLIDVKFNGTHIPGSPFKIRVGEPGHGGDPGLVSAYGAGLEGGVTGNPAEFVVNTSNAGAGALSVTIDGPSKVKMDCQECPEGYRVTYTPMAPGSYLISIKYGGPYHIGGSPFKAKVTGPRLVSNHSLHETSSVFVDSLTKATCAPQHGAPGPGPADASKVVAKGLGLSKAYVGQKSSFTVDCSKAGNNMLLVGVHGPRTPCEEILVKHVGSRLYSVSYLLKDKGEYTLVVKWGDEHIPGSPYRVVVP

SEQ ID NO: 7836 - protein, 562 aa, Homo sapiens
MAAAWMAPAQESVTFEDVAVTFTQEEWGQLDVTQRALYVEVMLETCGLLVALGDSTKPETVEPIPSHLALPEEVSLQEQLAQGVPRYSYLGQAMDQDGPSEMQEYFLRPGTDPQSEKLHGKMSLEHEGLATADGICSMMIQNQVSPEDALYGFDSYGPVTDSLIHEGENSYKFEEMFNENCFLVQHEQILPRVKPYDCPECGKAFGKSKHLLQHHIIHTGEKPYKCLECGKDFNRRSHLTRHQRTHNGDKPFVCSECGRTFNRGSHLTRHQRVHSGEKPFVCNECGKAFTYRSNFVLHNKSHNEKKPFACSECGKGFYESTALIQHFIIHTGERPFKCLECGKAFNCRSHLKQHERIHTGEKPFVCSQCGKAFTHYSTYVLHERAHTGEKPFECKECGKAFSIRKDLIRHFNIHTGEKPYECLQCGKAFTRMSGLTRHQWIHTGEKPYVCIQCGKAFCRTTNLIRHFSIHTGEKPYECVECGKAFNRRSPLTRHQRIHTAEKSHEPIQSGNVSCESTDLIQHSIIHTESSPVSAVNMETPSIAAHSSSLDINGFIVEETLPL

SEQ ID NO: 7837 - protein, 627 aa, Homo sapiens
MAKLETLPVRADPGRDPLLAFAPRPSELGPPDPRLAMGSVGSGVAHAQEFAMKSVGTRTGGGGSQGSFPGPRGSGSGASRERPGRYPSEDKGLANSLYLNGELRGSDHTDVCGNVVGSSGGSSSSGGSDKAPPQYREPSHPPKLLATSGKLDQCSEPLVRPSAFKPVVPKNFHSMQNLCPPQTNGTPEGRQGPGGLKGGLDKSRTMTPAGGSGSGLSDSGRNSLTSLPTYSSSYSQHLAPLSASTSHINRIGTASYGSGSGGSSGGGSGYQDLGTSDSGRASSKSGSSSSMGRPGHLGSGEGGGGGLPFAACSPPSPSALIQELEERLWEKEQEVAALRRSLEQSEAAVAQQDKKQLQEEAARLMRQREELEDKVAACQKEQADFLPRIEETKWEVCQKAGEISLLKQQLKDSQADVSQKLSEIVGLRSQLREGRASLREKEEQLLSLRDSFSSKQASLELGEGELPAACLKPALTPVDPAEPQDALATCESDEAKMRRQAGVAAAASLVSVDGEAEAGGESGTRALRREVGRLQAELAAERRARERQGASFAEERRVWLEEKEKVIEYQKQLQLSYVEMYQRNQQLERRLRERGAAGGASTPTPQHGEEKKAWTPSRLERIESTEI

SEQ ID NO: 7838 - protein, 567 aa, Homo sapiens
MPDSPVDVKTQSRLTPPTMPPPPTTQGAPRTSSFTPTTLTNGTSHSPTALNGAPSPPNGFSNGPSSSSSSSLANQQLPPACGARQLSKLKRFLTTLQQFGNDISPEIGERVRTLVLGLVNSTLTIEEFHSKLQEATNFPLRPFVIPFLKANLPLLQRELLHCARLAKQNPAQYLAQHEQLLLDASTTSPVDSSELLLDVNENGKRRTPDRTKENGFDREPLHSEHPSKRPCTISPGQRYSPNNGLSYQPNGLPHPTPPPPQHYRLDDMAIAHHYRDSYRHPSHRDLRDRNRPMGLHGTRQEEMIDHRLTDREWAEEWKHLDHLLNCIMDMVEKTRRSLTVLRRCQEADREELNYWIRRYSDAEDLKKGGGSSSSHSRQQSPVNPDPVALDAHREFLHRPASGYVPEEIWKKAEEAVNEVKRQAMTELQKAVSEAERKAHDMITTERAKMERTVAEAKRQAAEDALAVINQQEDSSESCWNCGRKASETCSGCNTARYCGSFCQHKDWEKHHHICGQTLQAQQQGDTPAVSSSVTPNSGAGSPMDTPPAATPRSTTPGTPSTIETTPR

SEQ ID NO: 7839 - protein, 1827 aa, Homo sapiens
MADERKDEAKAPHWTSAPLTEASAHSHPPEIKDQGGAGEGLVRSANGFPYREDEEGAFGEHGSQGTYSNTKENGINGELTSADRETAEEVSARIVQVVTAEAVAVLKGEQEKEAQHKDQTAALPLAAEETANLPPSPPPSPASEQTVTVEEDLLTASKMEFHDQQELTPSTAEPSDQKEKESEKQSKPGEDLKHAALVSQPETTKTYPDKKDMQGTEEEKAPLALFGHTLVASLEDMKQKTEPSLVVPGIDLPKEPPTPKEQKDWFIEMPTEAKKDEWGLVAPISPGPLTPMREKDVFDDIPKWEGKQFDSPMPSPFQGGSFTLPLDVMKNEIVTETSPFAPAFLQPDDKKSLQQTSGPATAKDSFKIEEPHEAKPDKMAEAPPSEAMTLPKDAHIPVVEEHVMGKVLEEEKEAINQETVQQRDTFTPSGQEPILTEKETELKLEEKTTISDKEAVPKESKPPKPADEEIGIIQTSTEHTFSEQKDQEPTTDMLKQDSFPVSLEQAVTDSAMTSKTLEKAMTEPSALIEKSSIQELFEMRVDDKDKIEGVGAATSAELDMPFYEDKSGMSKYFETSALKEEATKSIEPGSDYYELSDTRESVHESIDTMSPMHKNGDKEFQTGKESQPSPPAQEAGYSTLAQSYPSDLPEEPSSPQERMFTIDPKVYGEKRDLHSKNKDDLTLSRSLGLGGRSAIEQRSMSINLPMSCLDSIALGFNFGRGHDLSPLASDILTNTSGSMDEGDDYLPATTPALEKAPCFPVESKEEEQIEKVKATGEESTQAEISCESPFLAKDFYKNGTVMAPDLPEMLDLAGTRSRLASVSADAEVARRKSVPSETVVEDSRTGLPPVTDENHVIVKTDSQLEDLGYCVFNKYTVPLPSPVQDSENLSGESGTFYEGTDDKVRRDLATDLSLIEVKLAAAGRVKDEFSVDKEASAHISGDKSGLSKEFDQEKKANDRLDTVLEKSEEHADSKEHAKKTEEAGDEIETFGLGVTYEQALAKDLSIPTDASSEKAEKGLSSVPEIAEVEPSKKVEQGLDFAVQGQLDVKISDFGQMASGLNIDDRRATELKLEATQDMTPSSKAPQEADAFMGVESGHMKEGTKVSETEVKEKVAKPDLVHQEAVDKEESYESSGEHESLTMESLKADEGKKETSPESSLIQDEIAVKLSVEIPCPPAVSEADLATDERADVQMEFIQGPKEESKETPDISITPSDVAEPLHETIVSEPAEIQSEEEEIEAQGEYDKLLFRSDTLQITDLGVSGAREEFVETCPSEHKGVIESVVTIEDDFITVVQTTTDEGESGSHSVRFAALEQPEVERRPSPHDEEEFEVEEAAEAQAEPKDGSPEAPASPEREEVALSEYKTETYDDYKDETTIDDSIMDADSLWVDTQDDDRSIMTEQLETIPKEEKAEKEARRSSLEKHRKEKPFKTGRGRISTPERKVAKKEPSTVSRDEVRRKKAVYKKAELAKKTEVQAHSPSRKFILKPAIKYTRPTHLSCVKRKTTAAGGESALAPSVFKQAKDKVSDGVTKSPEKRSSLPRPSSILPPRRGVSGDRDENSFSLNSSISSSARRTTRSEPIRRAGKSGTSTPTTPGSTAITPGTPPSYSSRTPGTPGTPSYPRTPHTPGTPKSAILVPSEKKVAIIRTPPKSPATPKQLRLINQPLPDLKNVKSKIGSTDNIKYQPKGGQVQIVTKKIDLSHVTSKCGSLKNIRHRPGGGRVKIESVKLDFKEKAQAKVGSLDNAHHVPGGGNVKIDSQKLNFREHAKARVDHGAEIITQSPGRSSVASPRRLSNVSSSGSINLLESPQLATLAEDVTAALAKQGL

SEQ ID NO: 7840 - protein, 854 aa, Homo sapiens
MDFSMVAGAAAYNEKSGRITSLSLLFQKVFAQIFPQWRKGNTEECLPYKCSETGALGENYSWQIPINHNDFKILKNNERQLCEVLQNKFGCISTLVSPVQEGNSKSLQVFRKMLTPRIELSVWKDDLTTHAVDAVVNAANEDLLHGGGLALALVKAGGFEIQEESKQFVARYGKVSAGEIAVTGAGRLPCKQIIHAVGPRWMEWDKQGCTGKLQRAIVSILNYVIYKNTHIKTVAIPALSSGIFQFPLNLCTKTIVETIRVSLQGKPMMSNLKEIHLVSNEDPTVAAFKAASEFILGKSELGQETTPSFNAMVVNNLTLQIVQGHIEWQTADVIVNSVNPHDITVGPVAKSILQQAGVEMKSEFLATKAKQFQRSQLVLVTKGFNLFCKYIYHVLWHSEFPKPQILKHAMKECLEKCIEQNITSISFPALGTGNMEIKKETAAEILFDEVLTFAKDHVKHQLTVKFVIFPTDLEIYKAFSSEMAKRSKMLSLNNYSVPQSTREEKRENGLEARSPAINLMGFNVEEMYEAHAWIQRILSLQNHHIIENNHILYLGRKEHDILSQLQKTSSVSITEIISPGRTELEIEGARADLIEVVMNIEDMLCKVQEEMARKKERGLWRSLGQWTIQQQKTQDEMKENIIFLKCPVPPTQELLDQKKQFEKCGLQVLKVEKIDNEVLMAAFQRKKKMMEEKLHRQPVSHRLFQQVPYQFCNVVCRVGFQRMYSTPCDPKYGAGIYFTKNLKNLAEKAKKISAADKLIYVFEAEVLTGFFCQGHPLNIVPPPLSPGAIDGHDSVVDNVSSPETFVIFSGMQAIPQYLWTCTQEYVQSQDYSSGPMRPFAQHPWRGFASGSPVD

SEQ ID NO: 7841 - protein, 540 aa, Homo sapiens
MAHELVMFRDVAIDVSQEEWECLNPAQRNLYKEVMLENYSNLVSLGLSVSKPAVISSLEQGKEPWMVVREETGRWCPDLASRDEPQKLSPKRDIYETELSQWVNMEEFKSHSPERSIFSAIWEGNCHFEQHQGQEEGYFRQLMINHENMPIFSQHTLLTQEFYDREKISECKKCRKIFSYHLFFSHHKRTHSKELSECKECTEIVNTPCLFKQQTIQNGDKCNECKECWKAFVHCSQLKHLRIHNGEKRYECNECGKAFNYGSELTLHQRIHTGEKPYECKECGKAFRQRSQLTQHQRLHTGEKPYECKQCGKAFIRGFQLTEHLRLHTGEKPYECKECGKTFRHRSHLTIHQRIHTGEKPYECRECGKAFSYHSSFSHHQKIHSGKKPYECHECGKAFCDGLQLTLHQRIHTGEKPYECKECGKTFRQCSHLKRHQRIHTGEKPHECMICGKAFRLHSHLIQHQRIHTGEKPYECKECGKAFSYHSSFSHHQRIHSGKKPYQCGKAFNHRLQLNLHQTLHTGEKPVRFPLLPPHPSLAS

SEQ ID NO: 7842 - protein, 314 aa, Homo sapiens
MDGTNGSTQTHFILLGFSDRPHLERILFVVILIAYLLTLVGNTTIILVSRLDPHLHTPMYFFLAHLSFLDLSFTTSSIPQLLYNLNGCDKTISYMGCAIQLFLFLGLGGVECLLLAVMAYDRCVAICKPLHYMVIMNPRLCRGLVSVTWGCGVANSLAMSPVTLRLPRCGHHEVDHFLREMPALIRMACVSTVAIEGTVFVLAVGVVLSPLVFILLSYSYIVRAVLQIRSASGRQKAFGTCGSHLTVVSLFYGNIIYMYMQPGASSSQDQGMFLMLFYNIVTPLLNPLIYTLRNREVKGALGRLLLGKRELGKE

SEQ ID NO: 7843 - protein, 1134 aa, Homo sapiens
MGKEQELLEAARTGHLPAVEKLLSGKRLSSGFGGGGGGGSGGGGGGSGGGGGGLGSSSHPLSSLLSMWRGPNVNCVDSTGYTPLHHAALNGHKDVVEVLLRNDALTNVADSKGCYPLHLAAWKGDAQIVRLLIHQGPSHTRVNEQNNDNETALHCAAQYGHTEVVKVLLEELTDPTMRNNKFETPLDLAALYGRLEVVKMLLNAHPNLLSCNTKKHTPLHLAARNGHKAVVQVLLDAGMDSNYQTEMGSALHEAALFGKTDVVQILLAAGTDVNIKDNHGLTALDTVRELPSQKSQQIAALIEDHMTGKRSTKEVDKTPPPQPPLISSMDSISQKSQGDVEKAVTELIIDFDANAEEEGPYEALYNAISCHSLDSMASGRSSDQDSTNKEAEAAGVKPAGVRPRERPPPPAKPPPDEEEEDHIDKKYFPLTASEVLSMRPRIHGSAAREEDEHPYELLLTAETKKVVLVDGKTKDHRRSSSSRSQDSAEGQDGQVPEQFSGLLHGSSPVCEVGQDPFQLLCTAGQSHPDGSPQQGACHKASMQLEETGVHAPGASQPSALDQSKRVGYLTGLPTTNSRSHPETLTHTASPHPGGAEEGDRSGARSRAPPTSKPKAELKLSRSLSKSDSDLLTCSPTEDATMGSRSESLSNCSIGKKRLEKSPSFASEWDEIEKIMSSIGEGIDFSQERQKISGLRTLEQSVGEWLESIGLQQYESKLLLNGFDDVHFLGSNVMEEQDLRDIGISDPQHRRKLLQAARSLPKVKALGYDGNSPPSVPSWLDSLGLQDYVHSFLSSGYSSIDTVKNLWELELVNVLKVQLLGHRKRIIASLADRPYEEPPQKPPRFSQLRCQDLLSQTSSPLSQNDSCTGRSADLLLPPGDTGRRRHDSLHDPAAPSRAERFRIQEEHREAKLTLRPPSLAAPYAPVQSWQHQPEKLIFESCGYEANYLGSMLIKDLRGTESTQDACAKMRKSTEHMKKIPTIILSITYKGVKFIDASNKNVIAEHEIRNISCAAQDPEDLCTFAYITKDLQTSHHYCHVFSTVDVNLTYEIILTLGQAFEVAYQLALQAQKSRATGASAAEMIETKSSKPVPKPRVGVRKSALEPPDMDQDAQSHASVSWVVDPKPDSKRSLSTN

SEQ ID NO: 7844 - protein, 1725 aa, Homo sapiens
MGNSDSQYTLQGSKNHSNTITGAKQIPCSLKIRGIHAKEEKSLHGWGHGSNGAGYKSRSLARSCLSHFKSNQPYASRLGGPTCKVSRGVAYSTHRTNAPGKDFQGISAAFSTENGFHSVGHELADNHITSRDCNGHLLNCYGRNESIASTPPGEDRKSPRVLIKTLGKLDGCLRVEFHNGGNPSKVPAEDCSEPVQLLRYSPTLASETSPVPEARRGSSADSLPSHRPSPTDSRLRSSKGSSLSSESSWYDSPWGNAGELSEAEGSFLAPGMPDPSLHASFPPGDAKKPFNQSSSLSSLRELYKDANLGSLSPSGIRLSDEYMGTHASLSNRVSFASDIDVPSRVAHGDPIQYSSFTLPCRKPKAFVEDTAKKDSLKARMRRISDWTGSLSRKKRKLQEPRSKEGSDYFDSRSDGLNTDVQGSSQASAFLWSGGSTQILSQRSESTHAIGSDPLRQNIYENFMRELEMSRTNTENIETSTETAESSSESLSSLEQLDLLFEKEQGVVRKAGWLFFKPLVTVQKERKLELVARRKWKQYWVTLKGCTLLFYETYGKNSMDQSSAPRCALFAEDSIVQSVPEHPKKENVFCLSNSFGDVYLFQATSQTDLENWVTAVHSACASLFAKKHGKEDTLRLLKNQTKNLLQKIDMDSKMKKMAELQLSVVSDPKNRKAIENQIQQWEQNLEKFHMDLFRMRCYLASLQGGELPNPKSLLAAASRPSKLALGRLGILSVSSFHALVCSRDDSALRKRTLSLTQRGRNKKGIFSSLKGLDTLARKGKEKRPSITQIFDSSGSHGFSGTQLPQNSSNSSEVDELLHIYGSTVDGVPRDNAWEIQTYVHFQDNHGVTVGIKPEHRVEDILTLACKMRQLEPSHYGLQLRKLVDDNVEYCIPAPYEYMQQQVYDEIEVFPLNVYDVQLTKTGSVCDFGFAVTAQVDERQHLSRIFISDVLPDGLAYGEGLRKGNEIMTLNGEAVSDLDLKQMEALFSEKSVGLTLIARPPDTKATLCTSWSDSDLFSRDQKSLLPPPNQSQLLEEFLDNFKKNTANDFSNVPDITTGLKRSQTDGTLDQVSHREKMEQTFRSAEQITALCRSFNDSQANGMEGPRENQDPPPRSLARHLSDADRLRKVIQELVDTEKSYVKDLSCLFELYLEPLQNETFLTQDEMESLFGSLPEMLEFQKVFLETLEDGISASSDFNTLETPSQFRKLLFSLGGSFLYYADHFKLYSGFCANHIKVQKVLERAKTDKAFKAFLDARNPTKQHSSTLESYLIKPVQRVLKYPLLLKELVSLTDQESEEHYHLTEALKAMEKVASHINEMQKIYEDYGTVFDQLVAEQSGTEKEVTELSMGELLMHSTVSWLNPFLSLGKARKDLELTVFVFKRAVILVYKENCKLKKKLPSNSRPAHNSTDLDPFKFRWLIPISALQVRLGNPAGTENNSIWELIHTKSEIEGRPETIFQLCCSDSESKTNIVKVIRSILRENFRRHIKCELPLEKTCKDRLVPLKNRVPVSAKLASSRSLKVLKNSSSNEWTGETGKGTLLDSDEGSLSSGTQSSGCPTAEGRQDSKSTSPGKYPHPGLADFADNLIKESDILSDEDDDHRQTVKQGSPTKDIEIQFQRLRISEDPDVHPEAEQQPGPESGEGQKGGEQPKLVRGHFCPIKRKANSTKRDRGTLLKAQIRHQSLDSQSENATIDLNSVLEREFSVQSLTSVVSEECFYETESHGKS

SEQ ID NO: 7845 - protein, 487 aa, Homo sapiens
MDGTETRQRRLDSCGKPGELGLPHPLSTGGLPVASEDGALRAPESQSVTPKPLETEPSRETTWSIGLQVTVPFMFAGLGLSWAGMLLDYFQHWPVFVEVKDLLTLVPPLVGLKGNLEMTLASRLSTAANTGQIDDPQEQHRVISSNLALIQVQATVVGLLAAVAALLLGVVSREEVDVAKVELLCASSVLTAFLAAFALGVLMVCIVIGARKLGVNPDNIATPIAASLGDLITLSILALVSSFFYRHKDSRYLTPLVCLSFAALTPVWVLIAKQSPPIVKILKFGWFPIILAMVISSFGGLILSKTVSKQQYKGMAIFTPVICGVGGNLVAIQTSRISTYLHMWSAPGVLPLQMKKFWPNPCSTFCTSEINSMSARVLLLLVVPGHLIFFYIIYLVEGQSVINSQTFVVLYLLAGLIQVTILLYLAEVMVRLTWHQALDPDNHCIPYLTGLGDLLGTGLLALCFFTDWLLKSKAELGGISELASGPP

SEQ ID NO: 7846 - protein, 309 aa, Homo sapiens
MENSTEVTEFILLGLTDDPNLQIPLLLAFLFIYLITLLGNGGMMVIIHSDSHLHTPMYFFLSNLSLVDLGYSSAVAPKTVAALRSGDKAISYDGCAAQFFFFVGFATVECYLLASMAYDRHAAVCRPLHYTTTMTAGVCALLATGSYVSGFLNASIHAAGTFRLSFCGSNEINHFFCDIPPLLALSCSDTRISKLVVFVAGFNVFFTLLVILISYFFICITIQRMHSAEGQKKVFSTCASHLTALSIFYGTIIFMYLQPNSSQSVDTDKIASVFYTVVIPMLNPLIYSLRNKEVKSALWKILNKLYPQY

SEQ ID NO: 7847 - protein, 1032 aa, Homo sapiens
MEAAAAVVAAEAEVENEDGDSSCGDVCFMDKGLQSISELSLDSTLHAVNLHCNNISKIEAIDHIWNLQHLDLSSNQISRIEGLNTLTKLCTLNLSCNLITKVEGLEELINLTRLNVSYNHIDDLSGLIPLHGIKHKLRYIDLHSNRIDSIHHLLQCMVGLHFLTNLILEKDGDDNPVCRLPGYRAVILQTLPQLRILDCKNIFGEPVNLTEINSSQLQCLEGLLDNLVSSDSPLNISEDEIIDRMPVITAPIDELVPLEQFASTPSDAVLTSFMSVCQSSEPEKNNHENDLQNEIKLQKLDDQILQLLNETSNSIDNVLEKDPRPKRDTDITSESDYGNRKECNRKVPRRSKIPYDAKTIQTIKHHNKNYNSFVSCNRKMKPPYLKELYVSSSLANCPMLQESEKPKTEIIKVDQSHSEDNTYQSLVEQLDQEREKRWRAEQAENKLMDYIDELHKHANEKEDIHSLALLTTDRLKEIIFRERNSKGQLEVMVHKLQNEIKKLTVELMKAKDQQEDHLKHLRTLEKTLEKMERQKRQQQAAQIRLIQEVELKASAADREIYLLRTSLHREREQAQQLHQLLALKEQEHRKELETREFFTDADFQDALAKEIAKEEKKHEQMIKEYQEKIDVLSQQYMDLENEFRIALTVEARRFQDVKDGFENVATELAKSKHALIWAQRKENESSSLIKDLTCMVKEQKTKLAEVSKLKQETAANLQNQINTLEILIEDDKQKSIQIELLKHEKVQLISELAAKESLIFGLRTERKVWGHELAQQGSSLAQNRGKLEAQIESLSRENECLRKTNESDSDALRIKCKIIDDQTETIRKLKDCLQEKDEHIKRLQEKITEIEKCTQEQLDEKSSQLDEVLEKLERHNERKEKLKQQLKGKEVELEEIRKAYSTLNRKWHDKGELLCHLETQVKEVKEKFENKEKKLKAERDKSIELQKNAMEKLHSMDDAFKRQVDAIVEAHQAEIAQLANEKQKCIDSANLKVHQIEKEMRELLEETCKNKKTMEAKIKQLAFALNEIQQDM

SEQ ID NO: 7848 - protein, 1287 aa, Homo sapiens
MEPIYPFARPQMNTRFPSSRMVPFHFPPSKCALWNPTPTGDFIYLHLSYYRNPKLVVTEKTIRLAYRHAKQNKKNSSCFLLGSLTADEDEEGVTLTVDRFDPGREVPECLEITPTASLPGDFLIPCKVHTQELCSREMIVHSVDDFSSALKALQCHICSKDSLDCGKLLSLRVHITSRESLDSVEFDLHWAAVTLANNFKCTPVKPIPIIPTALARNLSSNLNISQVQGTYKYGYLTMDETRKLLLLLESDPKVYSLPLVGIWLSGITHIYSPQVWACCLRYIFNSSVQERVFSESGNFIIVLYSMTHKEPEFYECFPCDGKIPDFRFQLLTSKETLHLFKNVEPPDKNPIRCELSAESQNAETEFFSKASKNFSIKRSSQKLSSGKMPIHDHDSGVEDEDFSPRPIPSPHPVSQKISKIQPSVPELSLVLDGNFIESNPLPTPLEMVNNENPPLINHLEHLKPLQPQLYDEKHSPEVEAGEPSLRGIPNQLNQDKPALLRHCKVRQPPAYKKGNPHTRNSIKPSSHNGPSHDIFEKLQTVSAGNVQNEEYPIRPSTLNSRQSSLAPQSQPHDFVFSPHNSGRPMELQIPTPPLPSYCSTNVCRCCQHHSHIQYSPLNSWQGANTVGSIQDVQSEALQKHSLFHPSGCPALYCNAFCSSSSPIALRPQGDMGSCSPHSNIEPSPVARPPSHMDLCNPQPCTVCMHTPKTESDNGMMGLSPDAYRFLTEQDRQLRLLQAQIQRLLEAQSLMPCSPKTTAVEDTVQAGRQMELVSVEAQSSPGLHMRKGVSIAVSTGASLFWNAAGEDQEPDSQMKQDDTKISSEDMNFSVDINNEVTSLPGSASSLKAVDIPSFEESNIAVEEEFNQPLSVSNSSLVVRKEPDVPVFFPSGQLAESVSMCLQTGPTGGASNNSETSEEPKIEHVMQPLLHQPSDNQKIYQDLLGQVNHLLNSSSKETEQPSTKAVIISHECTRTQNVYHTKKKTHHSRLVDKDCVLNATLKQLRSLGVKIDSPTKVKKNAHNVDHASVLACISPEAVISGLNCMSFANVGMSGLSPNGVDLSMEANAIALKYLNENQLSQLSVTRSNQNNCDPFSLLHINTDRSTVGLSLISPNNMSFATKKYMKRYGLLQSSDNSEDEEEPPDNADSKSEYLLNQNLRSIPEQLGGQKEPSKNDHEIINCSNCESVGTNADTPVLRNITNEVLQTKAKQQLTEKPAFLVKNLKPSPAVNLRTGKAEFTQHPEKENEGDITIFPESLQPSETLKQMNSMNSVGTFLDVKRLRQLPKLF

SEQ ID NO: 7849 - protein, 563 aa, Homo sapiens
MAALSPTFATSTQDSTCLQDSEFPVSSKDHSCPQNLDLFVCSGLEPHTPSVGSQESVTFQDVAVDFTEKEWPLLDSSQRKLYKDVMLENYSNLTSLDWETPSKTKWSLLMEDIFGKETPSGVTMERAGLGEKSTEYAHLFEVFGMDPHLTQPMGRHAGKRPYHRRDYGVAFKGRPHLTQHMSMYDGRKMHECHQCQKAFTTSASLTRHRRIHTGEKPYECSDCGKAFNDPSALRSHARTHLKEKPFDCSQCGNAFRTLSALKIHMRVHTGERPYKCDQCGKAYGRSCHLIAHKRTHTGERPYECHDCGKAFQHPSHLKEHVRNHTGEKPYACTQCGKAFRWKSNFNLHKKNHMVEKTYECKECGKSFGDLVSRRKHMRIHIVKKPVECRQCGKTFRNQSILKTHMNSHTGEKPYGCDLCGKAFSASSNLTAHRKIHTQERRYECAACGKVFGDYLSRRRHMSVHLVKKRVECRQCGKAFRNQSTLKTHMRSHTGEKPYECDHCGKAFSIGSNLNVHRRIHTGEKPYECLVCGKAFSDHSSLRSHVKTHRGEKLFVSSVWKRLQ

SEQ ID NO: 7850 - protein, 452 aa, Homo sapiens
MEFQAVVMAVGGGSRMTDLTSSIPKPLLPVGNKPLIWYPLNLLERVGFEEVIVVTTRDVQKALCAEFKMKMKPDIVCIPDDADMGTADSLRYIYPKLKTDVLVLSCDLITDVALHEVVDLFRAYDASLAMLMRKGQDSIEPVPGQKGKKKAVEQRDFIGVDSTGKRLLFMANEADLDEELVIKGSILQKHPRIRFHTGLVDAHLYCLKKYIVDFLMENGSITSIRSELIPYLVRKQFSSASSQQGQEEKEEDLKKKELKSLDIYSFIKEANTLNLAPYDACWNACRGDRWEDLSRSQVRCYVHIMKEGLCSRVSTLGLYMEANRQVPKLLSALCPEEPPVHSSAQIVSKHLVGVDSLIGPETQIGEKSSIKRSVIGSSCLIKDRVTITNCLLMNSVTVEEGSNIQGSVICNNAVIEKGADIKDCLIGSGQRIEAKAKRVNEVIVGNDQLMEI

SEQ ID NO: 7851 - protein, 931 aa, Homo sapiens
MDMFPLTWVFLALYFSRHQVRGQPDPPCGGRLNSKDAGYITSPGYPQDYPSHQNCEWIVYAPEPNQKIVLNFNPHFEIEKHDCKYDFIEIRDGDSESADLLGKHCGNIAPPTIISSGSMLYIKFTSDYARQGAGFSLRYEIFKTGSEDCSKNFTSPNGTIESPGFPEKYPHNLDCTFTILAKPKMEIILQFLIFDLEHDPLQVGEGDCKYDWLDIWDGIPHVGPLIGKYCGTKTPSELRSSTGILSLTFHTDMAVAKDGFSARYYLVHQEPLENFQCNVPLGMESGRIANEQISASSTYSDGRWTPQQSRLHGDDNGWTPNLDSNKEYLQVDLRFLTMLTAIATQGAISRETQNGYYVKSYKLEVSTNGEDWMVYRHGKNHKVFQANNDATEVVLNKLHAPLLTRFVRIRPQTWHSGIALRLELFGCRVTDAPCSNMLGMLSGLIADSQISASSTQEYLWSPSAARLVSSRSGWFPRIPQAQPGEEWLQVDLGTPKTVKGVIIQGARGGDSITAVEARAFVRKFKVSYSLNGKDWEYIQDPRTQQPKLFEGNMHYDTPDIRRFDPIPAQYVRVYPERWSPAGIGMRLEVLGCDWTDSKPTVETLGPTVKSEETTTPYPTEEEATECGENCSFEDDKDLQLPSGFNCNFDFLEEPCGWMYDHAKWLRTTWASSSSPNDRTFPDDRNFLRLQSDSQREGQYARLISPPVHLPRSPVCMEFQYQATGGRGVALQVVREASQESKLLWVIREDQGGEWKHGRIILPSYDMEYQIVFEGVIGKGRSGEIAIDDIRISTDVPLENCMEPISAFAGENFKVDIPEIHEREGYEDEIDDEYEVDWSNSSSATSGSGAPSTDKEKSWLYTLDPILITIIAMSSLGVLLGATCAGLLLYCTCSYSGLSSRSCTTLENYNFELYDGLKHKVKMNHQKCCSEA

SEQ ID NO: 7852 - protein, 1075 aa, Homo sapiens
MSSQTKFKKDKEIIAEYEAQIKEIRTQLVEQFKCLEQQSESRLQLLQDLQEFFRRKAEIELEYSRSLEKLAERFSSKIRSSREHQFKKDQYLLSPVNCWYLVLHQTRRESRDHATLNDIFMNNVIVRLSQISEDVIRLFKKSKEIGLQMHEELLKVTNELYTVMKTYHMYHAESISAESKLKEAEKQEEKQFNKSGDLSMNLLRHEDRPQRRSSVKKIEKMKEKRQAKYSENKLKCTKARNDYLLNLAATNAAISKYYIHDVSDLIDCCDLGFHASLARTFRTYLSAEYNLETSRHEGLDVIENAVDNLDSRSDKHTVMDMCNQVFCPPLKFEFQPHMGDEVCQVSAQQPVQTELLMRYHQLQSRLATLKIENEEVRKTLDATMQTLQDMLTVEDFDVSDAFQHSRSTESVKSAASETYMSKINIAKRRANQQETEMFYFTKFKEYVNGSNLITKLQAKHDLLKQTLGEGERAECGTTRGRRNARTRNQDSGQAIPLVVESCIRYINLYGLQQQGIFRVPGSQVEVNDIKNSFERGEDPLVDDQNERDINSVAGVLKLYFRGLENPLFPKERFQDLISTIKLENPAERVHQIQQILVTLPRVVIVVMRYLFAFLNHLSQYSDENMMDPYNLAICFGPTLMHIPDGQDPVSCQAHINEVIKTIIIHHEAIFPSPRELEGPVYEKCMAGGEEYCDSPHSEPGAIDEVDHDNGTEPHTSDEEVEQIEAIAKFDYMGRSPRELSFKKGASLLLYHRASEDWWEGRHNGVDGLIPHQYIVVQDMDDAFSDSLSQKADSEASSGPLLDDKASSKNDLQSPTEHISDYGFGGVMGRVRLRSDGAAIPRRRSGGDTHSPPRGLGPSIDTPPRAAACPSSPHKIPLTRGRIESPEKRRMATFGSAGSINYPDKKALSEGHSMRSTCGSTRHSSLGDHKSLEAEALAEDIEKTMSTALHELRELERQNTVKQAPDVVLDTLEPLKNPPGPVSSEPASPLHTIVIRDPDAAMRRSSSSSTEMMTTFKPALSARLAGAQLRPPPMRPVRPVVQHRSSSSSSSGVGSPAVTPTEKMFPNSSADKSGTM

SEQ ID NO: 7853 - protein, 2007 aa, Homo sapiens
MAQRTGLEDPERYLFVDRAVIYNPATQADWTAKKLVWIPSERHGFEAASIKEERGDEVMVELAENGKKAMVNKDDIQKMNPPKFSKVEDMAELTCLNEASVLHNLKDRYYSGLIYTYSGLFCVVINPYKNLPIYSENIIEMYRGKKRHEMPPHIYAISESAYRCMLQDREDQSILCTGESGAGKTENTKKVIQYLAHVASSHKGRKDHNIPQESPKPVKHQGELERQLLQANPILESFGNAKTVKNDNSSRFGKFIRINFDVTGYIVGANIETYLLEKSRAVRQAKDERTFHIFYQLLSGAGEHLKSDLLLEGFNNYRFLSNGYIPIPGQQDKDNFQETMEAMHIMGFSHEEILSMLKVVSSVLQFGNISFKKERNTDQASMPENTVAQKLCHLLGMNVMEFTRAILTPRIKVGRDYVQKAQTKEQADFAVEALAKATYERLFRWLVHRINKALDRTKRQGASFIGILDIAGFEIFELNSFEQLCINYTNEKLQQLFNHTMFILEQEEYQREGIEWNFIDFGLDLQPCIDLIERPANPPGVLALLDEECWFPKATDKTFVEKLVQEQGSHSKFQKPRQLKDKADFCIIHYAGKVDYKADEWLMKNMDPLNDNVATLLHQSSDRFVAELWKDEIQNIQRASFYDSVSGLHEPPVDRIVGLDQVTGMTETAFGSAYKTKKGMFRTVGQLYKESLTKLMATLRNTNPNFVRCIIPNHEKRAGKLDPHLVLDQLRCNGVLEGIRICRQGFPNRIVFQEFRQRYEILTPNAIPKGFMDGKQACERMIRALELDPNLYRIGQSKIFFRAGVLAHLEEERDLKITDIIIFFQAVCRGYLARKAFAKKQQQLSALKVLQRNCAAYLKLRHWQWWRVFTKVKPLLQVTRQEEELQAKDEELLKVKEKQTKVEGELEEMERKHQQLLEEKNILAEQLQAETELFAEAEEMRARLAAKKQELEEILHDLESRVEEEEERNQILQNEKKKMQAHIQDLEEQLDEEEGARQKLQLEKVTAEAKIKKMEEEILLLEDQNSKFIKEKKLMEDRIAECSSQLAEEEEKAKNLAKIRNKQEVMISDLEERLKKEEKTRQELEKAKRKLDGETTDLQDQIAELQAQIDELKLQLAKKEEELQGALARGDDETLHKNNALKVVRELQAQIAELQEDFESEKASRNKAEKQKRDLSEELEALKTELEDTLDTTAAQQELRTKREQEVAELKKALEEETKNHEAQIQDMRQRHATALEELSEQLEQAKRFKANLEKNKQGLETDNKELACEVKVLQQVKAESEHKRKKLDAQVQELHAKVSEGDRLRVELAEKASKLQNELDNVSTLLEEAEKKGIKFAKDAASLESQLQDTQELLQEETRQKLNLSSRIRQLEEEKNSLQEQQEEEEEARKNLEKQVLALQSQLADTKKKVDDDLGTIESLEEAKKKLLKDAEALSQRLEEKALAYDKLEKTKNRLQQELDDLTVDLDHQRQVASNLEKKQKKFDQLLAEEKSISARYAEERDRAEAEAREKETKALSLARALEEALEAKEEFERQNKQLRADMEDLMSSKDDVGKNVHELEKSKRALEQQVEEMRTQLEELEDELQATEDAKLRLEVNMQAMKAQFERDLQTRDEQNEEKKRLLIKQVRELEAELEDERKQRALAVASKKKMEIDLKDLEAQIEAANKARDEVIKQLRKLQAQMKDYQRELEEARASRDEIFAQSKESEKKLKSLEAEILQLQEELASSERARRHAEQERDELADEITNSASGKSALLDEKRRLEARIAQLEEELEEEQSNMELLNDRFRKTTLQVDTLNAELAAERSAAQKSDNARQQLERQNKELKAKLQELEGAVKSKFKATISALEAKIGQLEEQLEQEAKERAAANKLVRRTEKKLKEIFMQVEDERRHADQYKEQMEKANARMKQLKRQLEEAEEEATRANASRRKLQRELDDATEANEGLSREVSTLKNRLRRGGPISFSSSRSGRRQLHLEGASLELSDDDTESKTSDVNETQPPQSE

SEQ ID NO: 7854 - protein, 444 aa, Homo sapiens
MAVESQGGRPLVLGLLLCVLGPVVSHAGKILLIPVDGSHWLSMLGAIQQLQQRGHEIVVLAPDASLYIRDGAFYTLKTYPVPFQREDVKESFVSLGHNVFENDSFLQRVIKTYKKIKKDSAMLLSGCSHLLHNKELMASLAESSFDVMLTDPFLPCSPIVAQYLSLPTVFFLHALPCSLEFEATQCPNPFSYVPRPLSSHSDHMTFLQRVKNMLIAFSQNFLCDVVYSPYATLASEFLQREVTVQDLLSSASVWLFRSDFVKDYPRPIMPNMVFVGGINCLHQNPLSQEFEAYINASGEHGIVVFSLGSMVSEIPEKKAMAIADALGKIPQTVLWRYTGTRPSNLANNTILVKWLPQNDLLGHPMTRAFITHAGSHGVYESICNGVPMVMMPLFGDQMDNAKRMETKGAGVTLNVLEMTSEDLENALKAVINDKRKKQQSGRQM

SEQ ID NO: 7855 - protein, 550 aa, Homo sapiens
MAFNDLLQQVGGVGRFQQIQVTLVVLPLLLMASHNTLQNFTAAIPTHHCRPPADANLSKNGGLEVWLPRDRQGQPESCLRFTSPQWGLPFLNGTEANGTGATEPCTDGWIYDNSTFPSTIVTEWDLVCSHRALRQLAQSLYMVGVLLGAMVFGYLADRLGRRKVLILNYLQTAVSGTCAAFAPNFPIYCAFRLLSGMALAGISLNCMTLNVEWMPIHTRACVGTLIGYVYSLGQFLLAGVAYAVPHWRHLQLLVSAPFFAFFIYSWFFIESARWHSSSGRLDLTLRALQRVARINGKREEGAKLSMEVLRASLQKELTMGKGQASAMELLRCPTLRHLFLCLSMLWFATSFAYYGLVMDLQGFGVSIYLIQVIFGAVDLPAKLVGFLVINSLGRRPAQMAALLLAGICILLNGVIPQDQSIVRTSLAVLGKGCLAASFNCIFLYTGELYPTMIRQTGMGMGSTMARVGSIVSPLVSMTAELYPSMPLFIYGAVPVAASAVTVLLPETLGQPLPDTVQDLESRKGKQTRQQQEHQKYMVPLQASAQEKNGL

SEQ ID NO: 7856 - protein, 476 aa, Homo sapiens
MSDAQLGPLRLTLLSVSARTGFCKKQQELWQRRKEAAEALGTRKVSVLLATSHSGARPAVSTMDSSAAPTNASNCTDALAYSSCSPAPSPGSWVNLSHLDGNLSDPCGPNRTDLGGRDSLCPPTGSPSMITAITIMALYSIVCVVGLFGNFLVMYVIVRYTKMKTATNIYIFNLALADALATSTLPFQSVNYLMGTWPFGTILCKIVISIDYYNMFTSIFTLCTMSVDRYIAVCHPVKALDFRTPRNAKIINVCNWILSSAIGLPVMFMATTKYRQGSIDCTLTFSHPTWYWENLLKICVFIFAFIMPVLIITVCYGLMILRLKSVRMLSGSKEKDRNLRRITRMVLVVVAVFIVCWTPIHIYVIIKALVTIPETTFQTVSWHFCIALGYTNSCLNPVLYAFLDENFKRCFREFCIPTSSNIEQQNSTRIRQNTRDHPSTANTVDRTNHQNYYIIHRCCCNTPLISQKPVLLWFCD

SEQ ID NO: 7857 - protein, 896 aa, Homo sapiens
MAAAGPRRSVRGAVCLHLLLTLVIFSRAGEACKKVILNVPSKLEADKIIGRVNLEECFRSADLIRSSDPDFRVLNDGSVYTARAVALSDKKRSFTIWLSDKRKQTQKEVTVLLEHQKKVSKTRHTRETVLRRAKRRWAPIPCSMQENSLGPFPLFLQQVESDAAQNYTVFYSISGRGVDKEPLNLFYIERDTGNLFCTRPVDREEYDVFDLIAYASTADGYSADLPLPLPIRVEDENDNHPVFTEAIYNFEVLESSRPGTTVGVVCATDRDEPDTMHTRLKYSILQQTPRSPGLFSVHPSTGVITTVSHYLDREVVDKYSLIMKVQDMDGQFFGLIGTSTCIITVTDSNDNAPTFRQNAYEAFVEENAFNVEILRIPIEDKDLINTANWRVNFTILKGNENGHFKISTDKETNEGVLSVVKPLNYEENRQVNLEIGVNNEAPFARDIPRVTALNRALVTVHVRDLDEGPECTPAAQYVRIKENLAVGSKINGYKAYDPENRNGNGLRYKKLHDPKGWITIDEISGSIITSKILDREVETPKNELYNITVLAIDKDDRSCTGTLAVNIEDVNDNPPEILQEYVVICKPKMGYTDILAVDPDEPVHGAPFYFSLPNTSPEISRLWSLTKVNDTAARLSYQKNAGFQEYTIPITVKDRAGQAATKLLRVNLCECTHPTQCRATSRSTGVILGKWAILAILLGIALLFSVLLTLVCGVFGATKGKRFPEDLAQQNLIISNTEAPGDDRVCSANGFMTQTTNNSSQGFCGTMGSGMKNGGQETIEMMKGGNQTLESCRGAGHHHTLDSCRGGHTEVDNCRYTYSEWHSFTQPRLGEKLHRCNQNEDRMPSQDYVLTYNYEGRGSPAGSVGCCSEKQEEDGLDFLNNLEPKFITLAEACTKR

SEQ ID NO: 7858 - protein, 1273 aa, Homo sapiens
MKRRLDDQESPVYAAQQRRIPGSTEAFPHQHRVLAPAPPVYEAVSETMQSATGIQYSVTPSYQVSAMPQSSGSHGPAIAAVHSSHHHPTAVQPHGGQVVQSHAHPAPPVAPVQGQQQFQRLKVEDALSYLDQVKLQFGSQPQVYNDFLDIMKEFKSQSIDTPGVISRVSQLFKGHPDLIMGFNTFLPPGYKIEVQTNDMVNVTTPGQVHQIPTHGIQPQPQPPPQHPSQPSAQSAPAPAQPAPQPPPAKVSKPSQLQAHTPASQQTPPLPPYASPRSPPVQPHTPVTISLGTAPSLQNNQPVEFNHAINYVNKIKNRFQGQPDIYKAFLEILHTYQKEQRNAKEAGGNYTPALTEQEVYAQVARLFKNQEDLLSEFGQFLPDANSSVLLSKTTAEKVDSVRNDHGGTVKKPQLNNKPQRPSQNGCQIRRHPTGTTPPVKKKPKLLNLKDSSMADASKHGGGTESLFFDKVRKALRSAEAYENFLRCLVIFNQEVISRAELVQLVSPFLGKFPELFNWFKNFLGYKESVHLETYPKERATEGIAMEIDYASCKRLGSSYRALPKSYQQPKCTGRTPLCKEVLNDTWVSFPSWSEDSTFVSSKKTQYEEHIYRCEDERFELDVVLETNLATIRVLEAIQKKLSRLSAEEQAKFRLDNTLGGTSEVIHRKALQRIYADKAADIIDGLRKNPSIAVPIVLKRLKMKEEEWREAQRGFNKVWREQNEKYYLKSLDHQGINFKQNDTKVLRSKSLLNEIESIYDERQEQATEENAGVPVGPHLSLAYEDKQILEDAAALIIHHVKRQTGIQKEDKYKIKQIMHHFIPDLLFAQRGDLSDVEEEEEEEMDVDEATGAVKKHNGVGGSPPKSKLLFSNTAAQKLRGMDEVYNLFYVNNNWYIFMRLHQILCLRLLRICSQAERQIEEENREREWEREVLGIKRDKSDSPAIQLRLKEPMDVDVEDYYPAFLDMVRSLLDGNIDSSQYEDSLREMFTIHAYIAFTMDKLIQSIVRQLQHIVSDEICVQVTDLYLAENNNGATGGQLNTQNSRSLLESTYQRKAEQLMSDENCFKLMFIQSQGQVQLTIELLDTEEENSDDPVEAERWSDYVERYMNSDTTSPELREHLAQKPVFLPRNLRRIRKCQRGREQQEKEGKEGNSKKTMENVDSLDKLECRFKLNSYKMVYVIKSEDYMYRRTALLRAHQSHERVSKRLHQRFQAWVDKWTKEHVPREMAAETSKWLMGEGLEGLVPCTTTCDTETLHFVSINKYRVKYGTVFKAP

SEQ ID NO: 7859 - protein, 552 aa, Homo sapiens
MHFKCSSLYMLYLTEVETNWINLLDRDTFSKSDPICVLYVQGVGNKEWREFGRTEVIDNTLNPDFVRKFILDYFFEERENLRFDLYDVDSKSPNLSKHDFLGQVFCTLGEIVGSQGSRLEKPIVGIPGKKCGTIILTAEELNCCRDAVLMQFCANKLDKKDFFGKSDPFLVFYRSNEDGSFTICHKTEVVKNTLNPVWQAFKISVRALCNGDYDRTIKVEVYDWDRDGSHDFIGEFTTSYRELSRGQSQFNVYEVVNPKKKGKKKKYTNSGTVTLLSFLVETEVSFLDYIKGGTQINFTVAIDFTASNGNPAQPTSLHYMNPYQLNAYGMALKAVGEIVQDYDSDKMFPALGFGAKLPPDGRISHEFALNGNPQNPYCDGIEGVMEAYYRSLKSVQLYGPTNFAPVINHVARYASSVKDGSQYFVLLIVTDGVISDMAQTKESIVNASKLPMSIIIVGVGPAEFDAMVELDGDDVRVSSRGKYAERDIVQFVPFRDYIDRSGNHILSMARLAKDVLAEIPEQFLSYMRARGIKPSPAPPPYTPPTHVLQTQI

SEQ ID NO: 7860 - protein, 984 aa, Homo sapiens
MAGNDCGALLDEELSSFFLNYLADTQGGGSGEEQLYADFPELDLSQLDASDFDSATCFGELQWCPENSETEPNQYSPDDSELFQIDSENEALLAELTKTLDDIPEDDVGLAAFPALDGGDALSCTSASPAPSSAPPSPAPEKPSAPAPEVDELSLADSTQDKKAPMMQSQSRSCTELHKHLTSAQCCLQDRGLQPPCLQSPRLPAKEDKEPGEDCPSPQPAPASPRDSLALGRADPGAPVSQEDMQAMVQLIRYMHTYCLPQRKLPPQTPEPLPKACSNPSQQVRSRPWSRHHSKASWAEFSILRELLAQDVLCDVSKPYRLATPVYASLTPRSRPRPPKDSQASPGRPSSVEEVRIAASPKSTGPRPSLRPLRLEVKREVRRPARLQQQEEEDEEEEEEEEEEEKEEEEEWGRKRPGRGLPWTKLGRKLESSVCPVRRSRRLNPELGPWLTFADEPLVPSEPQGALPSLCLAPKAYDVERELGSPTDEDSGQDQQLLRGPQIPALESPCESGCGDMDEDPSCPQLPPRDSPRCLMLALSQSDPTFGKKSFEQTLTVELCGTAGLTPPTTPPYKPTEEDPFKPDIKHSLGKEIALSLPSPEGLSLKATPGAAHKLPKKHPERSELLSHLRHATAQPASQAGQKRPFSCSFGDHDYCQVLRPEGVLQRKVLRSWEPSGVHLEDWPQQGAPWAEAQAPGREEDRSCDAGAPPKDSTLLRDHEIRASLTKHFGLLETALEEEDLASCKSPEYDTVFEDSSSSSGESSFLPEEEEEEGEEEEEDDEEEDSGVSPTCSDHCPYQSPPSKANRQLCSRSRSSSGSSPCHSWSPATRRNFRCESRGPCSDRTPSIRHARKRREKAIGEGRVVYIQNLSSDMSSRELKRRFEVFGEIEECEVLTRNRRGEKYGFITYRCSEHAALSLTKGAALRKRNEPSFQLSYGGLRHFCWPRYTDYDSNSEEALPASGKSKYEAMDFDSLLKEAQQSLH

SEQ ID NO: 7861 - protein, 1191 aa, Homo sapiens
MERPLENGDESPDSQGHATDWRFAVCSFRDAWEEEEPASQMHVKDPGPPRPPAGATQDEELQGSPLSRKFQLPPAADESGDAQRGTVESSSVLSEGPGPSGVESLLCPMSSHLSLAQGESDTPGVGLVGDPGPSRAMPSGLSPGALDSDPVGLGDPLSEISKLLEAAPSGSGLPKPADCLLAQDLCWELLASGMATLPGTRDVQGRAVLLLCAHSPAWLQSECSSQELIRLLLYLRSIPRPEVQALGLTVLVDARICAPSSSLFSGLSQLQEAAPGAVYQVLLVGSTLLKEVPSGLQLEQLPSQSLLTHIPTAGLPTSLGGGLPYCHQAWLDFRRRLEALLQNCQAACALLQGAIESVKAVPQPMEPGEVGQLLQQTEVLMQQVLDSPWLAWLQCQGGRELTWLKQEVPEVTLSPDYRTAMDKADELYDRVDGLLHQLTLQSNQRIQALELVQTLEARESGLHQIEVWLQQVGWPALEEAGEPSLDMLLQAQGSFQELYQVAQEQVRQGEKFLQPLTGWEAAELDPPGARFLALRAQLTEFSRALAQRCQRLADAERLFQLFREALTWAEEGQRVLAELEQERPGVVLQQLQLHWTRHPDLPPAHFRKMWALATGLGSEAIRQECRWAWARCQDTWLALDQKLEASLKLPPVGSTASLCVSQVPAAPAHPPLRKAYSFDRNLGQSLSEPACHCHHAATIAACRRPEAGGGALPQASPTVPPPGSSDPRSLNRLQLVLAEMVATEREYVRALEYTMENYFPELDRPDVPQGLRGQRAHLFGNLEKLRDFHCHFFLRELEACTRHPPRVAYAFLRHRVQFGMYALYSKNKPRSDALMSSYGHTFFKDKQQALGDHLDLASYLLKPIQRMGKYALLLQELARACGGPTQELSALREAQSLVHFQLRHGNDLLAMDAIQGCDVNLKEQGQLVRQDEFVVRTGRHKSVRRIFLFEELLLFSKPRHGPTGVDTFAYKRSFKMADLGLTECCGNSNLRFEIWFRRRKARDTFVLQASSLAIKQAWTADISHLLWRQAVHNKEVRMAEMVSMGVGNKAFRDIAPSEEAINDRTVNYVLKCREVRSRASIAVAPFDHDSLYLGASNSLPGDPASCSVLGSLNLHLYRDPALLGLRCPLYPSFPEEAALEAEAELGGQPSLTAEDSEISSQCPSASGSSGSDSSCVSGQALGRGLEDLPCV

SEQ ID NO: 7862 - protein, 628 aa, Homo sapiens
MALTQGPLKFMDVAIEFSQEEWKCLDPAQRTLYRDVMLENYRNLVSLGICLPDLSVTSMLEQKRDPWTLQSEEKIANDPDGRECIKGVNTERSSKLGSNAGNKPCKNQLGFTFQLHLSDLQLFQAERKISGCKHFEKPVSDNSSVSPLEKISSSVKSHLLNKYRNNFDHAPLLPQEQKAHIREKAYKCNEHGQVFRASASLTNQVIHNADNPYKCSECGKVFSCSSKLVIHRRMHTGEKPYKCHECGKLFSSNSNLSQHQRIHTGEKPYKCHECDKVFRSSSKLAQHQRIHTGEKPYKCHECDKVFNQIAHLVRHQKIHTGEKPYSCNKCGKVFSRHSYLAEHQTVHTGEKPYKCEECGKAFSVRSSLITHQLIHTGRKPYKCKECDKVFGRKCFLTSHQRIHTRERPYGCSQCGKIFSQKSDLIRHRKTHTDEKPYKCNKCGTAFREFSDLTAHFLIHSGEKPYECKECGKVFRYKSSLTSHHRIHTGEKPYKCNRCGKVFSRSSNLVCHQKIHTGEKPYKCNQCGKVFNQASYLTRHQIIHTGERPYRCSKCGKAFRGCSGLTAHLAIHTEKKSHECKECGKIFTQKSSLTNHHRIHIGEKPYKCTLCSKVFSHNSDLAQHQRVHS

SEQ ID NO: 7863 - protein, 1712 aa, Homo sapiens
MGRDQRAVAGPALRRWLLLGTVTVGFLAQSVLAGVKKFDVPCGGRDCSGGCQCYPEKGGRGQPGPVGPQGYNGPPGLQGFPGLQGRKGDKGERGAPGVTGPKGDVGARGVSGFPGADGIPGHPGQGGPRGRPGYDGCNGTQGDSGPQGPPGSEGFTGPPGPQGPKGQKGEPYALPKEERDRYRGEPGEPGLVGFQGPPGRPGHVGQMGPVGAPGRPGPPGPPGPKGQQGNRGLGFYGVKGEKGDVGQPGPNGIPSDTLHPIIAPTGVTFHPDQYKGEKGSEGEPGIRGISLKGEEGIMGFPGLRGYPGLSGEKGSPGQKGSRGLDGYQGPDGPRGPKGEAGDPGPPGLPAYSPHPSLAKGARGDPGFPGAQGEPGSQGEPGDPGLPGPPGLSIGDGDQRRGLPGEMGPKGFIGDPGIPALYGGPPGPDGKRGPPGPPGLPGPPGPDGFLFGLKGAKGRAGFPGLPGSPGARGPKGWKGDAGECRCTEGDEAIKGLPGLPGPKGFAGINGEPGRKGDRGDPGQHGLPGFPGLKGVPGNIGAPGPKGAKGDSRTITTKGERGQPGVPGVPGMKGDDGSPGRDGLDGFPGLPGPPGDGIKGPPGDPGYPGIPGTKGTPGEMGPPGLGLPGLKGQRGFPGDAGLPGPPGFLGPPGPAGTPGQIDCDTDVKRAVGGDRQEAIQPGCIGGPKGLPGLPGPPGPTGAKGLRGIPGFAGADGGPGPRGLPGDAGREGFPGPPGFIGPRGSKGAVGLPGPDGSPGPIGLPGPDGPPGERGLPGEVLGAQPGPRGDAGVPGQPGLKGLPGDRGPPGFRGSQGMPGMPGLKGQPGLPGPSGQPGLYGPPGLHGFPGAPGQEGPLGLPGIPGREGLPGDRGDPGDTGAPGPVGMKGLSGDRGDAGFTGEQGHPGSPGFKGIDGMPGTPGLKGDRGSPGMDGFQGMPGLKGRPGFPGSKGEAGFFGIPGLKGLAGEPGFKGSRGDPGPPGPPPVILPGMKDIKGEKGDEGPMGLKGYLGAKGIQGMPGIPGLSGIPGLPGRPGHIKGVKGDIGVPGIPGLPGFPGVAGPPGITGFPGFIGSRGDKGAPGRAGLYGEIGATGDFGDIGDTINLPGRPGLKGERGTTGIPGLKGFFGEKGTEGDIGFPGITGVTGVQGPPGLKGQTGFPGLTGPPGSQGELGRIGLPGGKGDDGWPGAPGLPGFPGLRGIRGLHGLPGTKGFPGSPGSDIHGDPGFPGPPGERGDPGEANTLPGPVGVPGQKGDQGAPGERGPPGSPGLQGFPGITPPSNISGAPGDKGAPGIFGLKGYRGPPGPPGSAALPGSKGDTGNPGAPGTPGTKGWAGDSGPQGRPGVFGLPGEKGPRGEQGFMGNTGPTGAVGDRGPKGPKGDPGFPGAPGTVGAPGIAGIPQKIAVQPGTVGPQGRRGPPGAPGEMGPQGPPGEPGFRGAPGKAGPQGRGGVSAVPGFRGDEGPIGHQGPIGQEGAPGRPGSPGLPGMPGRSVSIGYLLVKHSQTDQEPMCPVGMNKLWSGYSLLYFEGQEKAHNQDLGLAGSCLARFSTMPFLYCNPGDVCYYASRNDKSYWLSTTAPLPMMPVAEDEIKPYISRCSVCEAPAIAIAVHSQDVSIPHCPAGWRSLWIGYSFLMHTAAGDEGGGQSLVSPGSCLEDFRATPFIECNGGRGTCHYYANKYSFWLTTIPEQSFQGSPSADTLKAGLIRTHISRCQVCMKNL

SEQ ID NO: 7864 - protein, 1150 aa, Homo sapiens
MKLKKQVTVCGAAIFCVAVFSLYLMLDRVQHDPTRHQNGGNFPRSQISVLQNRIEQLEQLLEENHEIISHIKDSVLELTANAEGPPAMLPYYTVNGSWVVPPEPRPSFFSISPQDCQFALGGRGQKPELQMLTVSEELPFDNVDGGVWRQGFDISYDPHDWDAEDLQVFVVPHSHNDPGWIKTFDKYYTEQTQHILNSMVSKLQEDPRRRFLWAEVSFFAKWWDNINVQKRAAVRRLVGNGQLEIATGGWVMPDEANSHYFALIDQLIEGHQWLERNLGATPRSGWAVDPFGYSSTMPYLLRRANLTSMLIQRVHYAIKKHFAATHSLEFMWRQTWDSDSSTDIFCHMMPFYSYDVPHTCGPDPKICCQFDFKRLPGGRINCPWKVPPRAITEANVAERAALLLDQYRKKSQLFRSNVLLVPLGDDFRYDKPQEWDAQFFNYQRLFDFFNSRPNLHVQAQFGTLSDYFDALYKRTGVEPGARPPGFPVLSGDFFSYADREDHYWTGYYTSRPFYKSLDRVLEAHLRGAEVLYSLAAAHARRSGLAGRYPLSDFTLLTEARRTLGLFQHHDAITGTAKEAVVVDYGVRLLRSLVNLKQVIIHAAHYLVLGDKETYHFDPEAPFLQVDDTRLSHDALPERTVIQLDSSPRFVVLFNPLEQERFSMVSLLVNSPRVRVLSEEGQPLAVQISAHWSSATEAVPDVYQVSVPVRLPALGLGVLQLQLGLDGHRTLPSSVRIYLHGRQLSVSRHEAFPLRVIDSGTSDFALSNRYMQVWFSGLTGLLKSIRRVDEEHEQQVDMQVLVYGTRTSKDKSGAYLFLPDGEAKPYVPKEPPVLRVTEGPFFSEVVAYYEHIHQAVRLYNLPGVEGLSLDISSLVDIRDYVNKELALHIHTDIDSQGIFFTDLNGFQVQPRRYLKKLPLQANFYPMPVMAYIQDAQKRLTLHTAQALGVSSLKDGQLEVILDRRLMQDDNRGLGQGLKDNKRTCNRFRLLLERRTVGSEVQDSHSTSYPSLLSHLTSMYLNAPALALPVARMQLPGPGLRSFHPLASSLPCDFHLLNLRTLQAEEDTLPSAETALILHRKGFDCGLEAKNLGFNCTTSQGKVALGSLFHGLDVVFLQPTSLTLLYPLASPSNSTDVYLEPMEIATFRLRLG

SEQ ID NO: 7865 - protein, 121 aa, Homo sapiens
MARRAGGARMFGSLLLFALLAAGVAPLSWDLPEPRSRASKIRVHSRGNLWATGHFMGKKSLEPSSPSPLGTAPHTSLRDQRLQLSHDLLGILLLKKALGVSLSRPAPQIQYRRLLVQILQK

SEQ ID NO: 7866 - protein, 1695 aa, Homo sapiens
MNVQPCSRCGYGVYPAEKISCIDQIWHKACFHCEVCKMMLSVNNFVSHQKKPYCHAHNPKNNTFTSVYHTPLNLNVRTFPEAISGIHDQEDGEQCKSVFHWDMKSKDKEGAPNRQPLANERAYWTGYGEGNAWCPGALPDPEIVRMVEARKSLGEEYTEDYEQPRGKGSFPAMITPAYQRAKKANQLASQVEYKRGHDERISRFSTVVDTPELLRSKAGAQLQSDVRYTEDYEQQRGKGSFPAMITPAYQIAKRANELASDVRYHQQYQKEMRGMAGPAIGAEGILTRECADQYGQGYPEEYEEHRGKGSFPAMITPAYQNAKKAHELASDIKYRQDFNKMKGAAHYHSLPAQDNLVLKQAQSVNKLVSENKYKENYQNHMRGRYEGVGMDRRTLHAMKVGSLASNVAYKADYKHDIVDYNYPATLTPSYQTAMKLVPLKDANYRQSIDKLKYSSVTDTPQIVQAKINAQQLSHVNYRADYEKNKLNYTLPQDVPQLVKAKTNAKLFSEVKYKEGWEKTKGKGFEMKLDAMSLLAAKASGELASNIKYKEEYEKTKGKAMGTADSRLLHSLQIAKMSSEVEYKKGFEESKTRFHLPMDMVNIRHAKKAQTLASDLDYRKKLHEYTVLPEDMKTQWAKKAYGLQSELQYKADLAWMKGVGWLTEGSLNLEQAKKAGQLVSEKNYRQRVDELKFTSVTDSSQMEHAKKSQELQSGVAYKAGNEQSVHQYTISKDEPLFLQARANAANLSEKLYKSSWENQKAKGFELRLDSLTFLAAKAKRDLASEVKYKEDYERSRGKLIGAKDVQGDSQMSHSLQMSKLQSELEYKKGFEDTKSQCHVSLDMVHLVHARKAQHLATDVGYKTAEHHFTALPTDMKVEWAKKAYGLQSDNQYRADVKWMKGMGWVATGSLNVEQAKKAGELISEKKYRQHPDALKFTSIKDTPEMVQARISYTQAVDRLYREQGENIKHHYTPTADLPEVLLAKLNAMNISETRYKESWSKLRDGGYKLRLDALPFQAAKASGEIISDYKYKEAFEKMKGQMLGSRSLEDDISLAHSVYATSLQSDVNYKKGFEHSKAQFHLPLDMAALVHAKKAQTLASNQDYKHPLPQYTSLAEDLRLSCAKKAHKLQSENLYRSDLNFMRGVACVIPGTLEIEGRKKASELISESKYRQHPHSFKYTAVTDTPNLLHAKFSNQITNERLYKAAGEDARHEYTMTLGLPEFIRAKTNAANLSDARYKESWRNLRAQGYKLTIEALPFQAARASGDIASDFLYRHDFVKERGKLIGPQSVRDDPRIQHCRRMGQLQSELQYRRGATSSQAQFHLPMDMVHLVHAKNAQALASDHDYRTQYHKFTALPEDLKMAWAKKAHALQSELRYKSDLIGMKGIGWLALRSPQMESAKKAGELISETKYRKKPDSIKFTTVVDSPDLVHAKNSYMHCNERMYRSGDAESLHRYTLIPDHPDFTRARLNALHLSDKVYRNSWEQTRAGSYDFRLDAIPFQTARASREIASDFRYKEAFLRDRGLQIGYRSVDDDPRMKHFLNVGRLQSDNEYKKDFAKSRSQFHSSTDQPGLLQAKRSQQLASDVHYRQPLPQPTCDPEQLGLRHAQKAHQLQSDVKYKSDLNLTRGVGWTPPGSYKVEMARRAAELANARGLGLQGAYRGAEAVEAGDHQSGEVNPDATEILHVKKKKALLL

SEQ ID NO: 7867 - protein, 844 aa, Homo sapiens
MVQKSRNGGVYPGPSGEKKLKVGFVGLDPGAPDSTRDGALLIAGSEAPKRGSILSKPRAGGAGAGKPPKRNAFYRKLQNFLYNVLERPRGWAFIYHAYVFLLVFSCLVLSVFSTIKEYEKSSEGALYILEIVTIVVFGVEYFVRIWAAGCCCRYRGWRGRLKFARKPFCVIDIMVLIASIAVLAAGSQGNVFATSALRSLRFLQILRMIRMDRRGGTWKLLGSVVYAHSKELVTAWYIGFLCLILASFLVYLAEKGENDHFDTYADALWWGLITLTTIGYGDKYPQTWNGRLLAATFTLIGVSFFALPAGILGSGFALKVQEQHRQKHFEKRRNPAAGLIQSAWRFYATNLSRTDLHSTWQYYERTVTVPMYRLIPPLNQLELLRNLKSKSGLAFRKDPPPEPSPSQKVSLKDRVFSSPRGVAAKGKGSPQAQTVRRSPSADQSLEDSPSKVPKSWSFGDRSRARQAFRIKGAASRQNSEEASLPGEDIVDDKSCPCEFVTEDLTPGLKVSIRAVCVMRFLVSKRKFKESLRPYDVMDVIEQYSAGHLDMLSRIKSLQSRVDQIVGRGPAITDKDRTKGPAEAELPEDPSMMGRLGKVEKQVLSMEKKLDFLVNIYMQRMGIPPTETEAYFGAKEPEPAPPYHSPEDSREHVDRHGCIVKIVRSSSSTGQKNFSAPPAAPPVQCPPSTSWQPQSHPRQGHGTSPVGDHGSLVRIPPPPAHERSLSAYGGGNRASMEFLRQEDTPGCRPPEGNLRDSDTSISIPSVDHEELERSFSGFSISQSKENLDALNSCYAAVAPCAKVRPYIAEGESDTDSDLCTPCGPPPRSATGEGPFGDVGWAGPRK

SEQ ID NO: 7868 - protein, 1216 aa, Homo sapiens
MSQAGDVEGPSTGDPVLSPQHNCELLQNMEGASSMPGLSPDGPGASSGPGVRAGSRRKIPRKEALRGGSSRAAGAAEVRPGVLELLAVVQSRGSMLAPGLHMQLPSVPTQGRALTSKRLQVSLCDILDDSCPRKLCSRSAGLPERALACRERLAGVEEVSCLRPREARDGGMSSPGCDRRSPTLSKEEPPGRPLTSSPDPVPVRVRKKWRRQGAHSECEEGAGDFLWLDQSPRGDNLLSVGDPPQVADLESLGGPCRPPSPKDTGSGPGEPGGSGAGCASGTEKFGYLPATGDGPQPGSPCGPVGFPVPSGGESLSSAAQAPPQSAALCLGASAQASAEQQEAVCVVRTGSDEGQAPAQDQEELEAKAQPASRGRLEQGLAAPADTCASSREPLGGLSSSLDTEASRACSGPFMEQRRSKGTKNLKKGPVPCAQDRGTDRSSDNSHQDRPEEPSPGGCPRLEEVKIPHGVKLVCYLGSGPVIQLLGAISHGQAGGQLPPKLEVLEDLMEVSSPSPAQRLRRKKRPMVQGPAGCQVFQPSPSGGTAGDPGGLSDPFYPPRSGSLALGDPSSDPACSQSGPMEAEEDSLPEQPEDSAQLQQEKPSLYIGVRGTVVRSMQEVLWTRLRELPDPVLSEEVVEGIAAGIEAALWDLTQGTNGRYKTKYRSLLFNLRDPRNLDLFLKVVHGDVTPYDLVRMSSMQLAPQELARWRDQEEKRGLNIIEQQQKEPCRLPASKMTHKGEVEIQRDMDQTLTLEDLVGPQMFMDCSPQALPIASEDTTGQHDHHFLDPNCHICKDWEPSNELLGSFEAAKSCGDNIFQKALSQTPMPAPEMPKTRELSPTEPQDRVPPSGLHVPAAPTKALPCLPPWEGVLDMFSIKRFRARAQLVSGHSCRLVQALPTVIRSAGCIPSNIVWDLLASICPAKAKDVCVVRLCPHGARDTQNCRLLYSYLNDRQRHGLASVEHMGMVLLPLPAFQPLPTRLRPLGGPGLWALPVSPLLSPGLEVTHSSLLLAVLLPKEGLPDTAGSSPWLGKVQKMVSFNSKVEKRYYQPDDRRPNVPLKGTPPPGGAWQQSQGRGSIAPRGISAWQRPPRGRGRLWPEPENWQHPGRGQWPPEPGLRQSQHPYSVAPAGHGFGRGQHFHRDSCPHQALLRHLESLATMSHQLQALLCPQTKSSIPRPLQRLSSALAAPEPPGPARDSSLGPTDEAGSECPFPRKA

SEQ ID NO: 7869 - protein, 750 aa, Homo sapiens
MGKSESQMDITDINTPKPKKKQRWTPLEISLSVLVLLLTIIAVTMIALYATYDDGICKSSDCIKSAARLIQNMDATTEPCTDFFKYACGGWLKRNVIPETSSRYGNFDILRDELEVVLKDVLQEPKTEDIVAVQKAKALYRSCINESAIDSRGGEPLLKLLPDIYGWPVATENWEQKYGASWTAEKAIAQLNSKYGKKVLINLFVGTDDKNSVNHVIHIDQPRLGLPSRDYYECTGIYKEACTAYVDFMISVARLIRQEERLPIDENQLALEMNKVMELEKEIANATAKPEDRNDPMLLYNKMTLAQIQNNFSLEINGKPFSWLNFTNEIMSTVNISITNEEDVVVYAPEYLTKLKPILTKYSARDLQNLMSWRFIMDLVSSLSRTYKESRNAFRKALYGTTSETATWRRCANYVNGNMENAVGRLYVEAAFAGESKHVVEDLIAQIREVFIQTLDDLTWMDAETKKRAEEKALAIKERIGYPDDIVSNDNKLNNEYLELNYKEDEYFENIIQNLKFSQSKQLKKLREKVDKDEWISGAAVVNAFYSSGRNQIVFPAGILQPPFFSAQQSNSLNYGGIGMVIGHEITHGFDDNGRNFNKDGDLVDWWTQQSASNFKEQSQCMVYQYGNFSWDLAGGQHLNGINTLGENIADNGGLGQAYRAYQNYIKKNGEEKLLPGLDLNHKQLFFLNFAQVWCGTYRPEYAVNSIKTDVHSPGNFRIIGTLQNSAEFSEAFHCRKNSYMNPEKKCRVW

SEQ ID NO: 7870 - protein, 876 aa, Homo sapiens
MSQSPAFGPRRGSSPRGAAGAAARRNESQDYLLMDSELGEDGCPQAPLPCYGYYPCFRGSDNRLAHRRQTVLREKGRRLANRGPAYMFSDRSTSLSIEEERFLDAAEYGNIPVVRKMLEECHSLNVNCVDYMGQNALQLAVANEHLEITELLLKKENLSRVGDALLLAISKGYVRIVEAILSHPAFAEGKRLATSPSQSELQQDDFYAYDEDGTRFSHDVTPIILAAHCQEYEIVHTLLRKGARIERPHDYFCKCNDCNQKQKHDSFSHSRSRINAYKGLASPAYLSLSSEDPVMTALELSNELAVLANIEKEFKNDYKKLSMQCKDFVVGLLDLCRNTEEVEAILNGDVETLQSGDHGRPNLSRLKLAIKYEVKKMGKIMRGPFMKFVAHAASFTIFLGLLVMNAADRFEGTKLLPNETSTDNAKQLFRMKTSCFSWMEMLIISWVIGMIWAECKEIWTQGPKEYLFELWNMLDFGMLAIFAASFIARFMAFWHASKAQSIIDANDTLKDLTKVTLGDNVKYYNLARIKWDPSDPQIISEGLYAIAVVLSFSRIAYILPANESFGPLQISLGRTVKDIFKFMVIFIMVFVAFMIGMFNLYSYYIGAKQNEAFTTVEESFKTLFWAIFGLSEVKSVVINYNHKFIENIGYVLYGVYNVTMVIVLLNMLIAMINSSFQEIEDDADVEWKFARAKLWFSYFEEGRTLPVPFNLVPSPKSLFYLLLKLKKWISELFQGHKKGFQEDAEMNKINEEKKLGILGSHEDLSKLSLDKKQVGHNKQPSIRSSEDFHLNSFNNPPRQYQKIMKRLIKRYVLQAQIDKESDEVNEGELKEIKQDISSLRYELLEEKSQNTEDLAELIRELGEKLSMEPNQEETNR

SEQ ID NO: 7871 - protein, 633 aa, Homo sapiens
MKAIKKSLTEEEYLYLDFSHQTEGCIFPLHTSVTLFLLSYCDCKIFKICLVVTKEVSRDSSLLRDDLIQDVEIQIISRQELPPIVQNCCLPAVVERSDNFCRAGLAVVLRHIIQKSYEADPLKKELLELLGFKKTCLKACAEVSQWTRLCELTIPLAIENFLRESSDQPPTIPVEILQLEKKLSEPVRVHNDDKLRRQKLKQQKADGVGPPLTKGKAKSKVHTQETSEGLDSSSKSLELKVAFSKLTVQEEPATTNREPSHIRKAKASDLPPLEHVFAEGLYFTLADIVLLPCIHHFLVIISRKFSEKLVEFPLLASWYQRIQEVPGVKTAASKCGIQFLHLPKLLTTSTEQHPNLCEVPGVEEQSDPLFIGGPRPTMAKLMEKGIEVMFSPHPCPTWTLDWNVLPAAVSPKEGKMSSDRALRKQQQLNNLVYVVTNQAKPGDRIVDFCSGGGHVGIVLAHMLPSCQVTLIENKELSLIRAKKRSDELGLSNIWFIQANMEYFTGMFNIGVALHACGVATDMVIEHCIKTRASFVTCPCCYGFIQNTSKFNFPKSEQFKKTLSYKEHMILCRFADQTAVQLPPQRRLIGKQCMCLVDLDRARAAEECGYSVQVISMEPESCSPKNNMIVGVPI

SEQ ID NO: 7872 - protein, 1102 aa, Homo sapiens
MRTSLQAVALWGQKAPPHSITAIMITDDQRTIVTGSQEGQLCLWNLSHELKISAKELLFGHSASVTCLARARDFSKQPYIVSAAENGEMCVWNVTNGQCMEKATLPYRHTAICYYHCSFRMTGEGWLLCCGEYQDVLIIDAKTLAVVHSFRSSQFPDWINCMCIVHSMRIQEDSLLVVSVAGELKVWDLSSSINSIQEKQDVYEKESKFLESLNCQTIRFCTYTERLLLVVFSKCWKVYDYCDFSLLLTEVSRNGQFFAGGEVIAAHRILIWTEDGHSYIYQLLNSGLSKSIYPADGRVLKETIYPHLLCSTSVQENKEQSRPFVMGYMNERKEPFYKVLFSGEVSGRITLWHIPDVPVSKFDGSPREIPVTATWTLQDNFDKHDTMSQSIIDYFSGLKDGAGTAVVTSSEYIPSLDKLICGCEDGTIIITQALNAAKARLLEGGSLVKDSPPHKVLKGHHQSVTSLLYPHGLSSKLDQSWMLSGDLDSCVILWDIFTEEILHKFFLEAGPVTSLLMSPEKFKLRGEQIICCVCGDHSVALLHLEGKSCLLHARKHLFPVRMIKWHPVENFLIVGCADDSVYIWEIETGTLERHETGERARIILNCCDDSQLVKSVLPIASETLKHKSIEQRSSSPYQLGPLPCPGLQVESSCKVTDAKFCPRPFNVLPVKTKWSNVGFHILLFDLENLVELLLPTPLSDVDSSSSFYGGEVLRRAKSTVEKKTLTLRKSKTACGPLSAEALAKPITESLAQGDNTIKFSEENDGIKRQKKMKISKKMQPKPSRKVDASLTIDTAKLFLSCLLPWGVDKDLDYLCIKHLNILKLQGPISLGISLNEDNFSLMLPGWDLCNSGMIKDYSGVNLFSRKVLDLSDKYTATLPNQVGIPRGLENNCDSLRESDTIVYLLSRLFLVNKLVNMPLELACRVGSSFRMESIHNKMRGAGNDILNMSSFYSCLRNGKNESHVPEADLSLLKLISCWRDQSVQVTEAIQAVLLAEVQQHMKSLGKIPVNSQPVSMAENGNCEMKQMLPKLEWTEELELQCVRNTLPLQTPVSPVKHDSNSNSANFQDVEDMPDRCALEESESPGEPRHHSWIAKVCPCKVS

SEQ ID NO: 7873 - protein, 568 aa, Homo sapiens
MWLRAFILATLSASAAWAGHPSSPPVVDTVHGKVLGKFVSLEGFAQPVAIFLGIPFAKPPLGPLRFTPPQPAEPWSFVKNATSYPPMCTQDPKAGQLLSELFTNRKENIPLKLSEDCLYLNIYTPADLTKKNRLPVMVWIHGGGLMVGAASTYDGLALAAHENVVVVTIQYRLGIWGFFSTGDEHSRGNWGHLDQVAALRWVQDNIASFGGNPGSVTIFGESAGGESVSVLVLSPLAKNLFHRAISESGVALTSVLVKKGDVKPLAEQIAITAGCKTTTSAVMVHCLRQKTEEELLETTLKMKFLSLDLQGDPRESQPLLGTVIDGMLLLKTPEELQAERNFHTVPYMVGINKQEFGWLIPMQLMSYPLSEGQLDQKTAMSLLWKSYPLVCIAKELIPEATEKYLGGTDDTVKKKDLFLDLIADVMFGVPSVIVARNHRDAGAPTYMYEFQYRPSFSSDMKPKTVIGDHGDELFSVFGAPFLKEGASEEEIRLSKMVMKFWANFARNGNPNGEGLPHWPEYNQKEGYLQIGANTQAAQKLKDKEVAFWTNLFAKKAVEKPPQTEHIEL

SEQ ID NO: 7874 - protein, 1610 aa, Homo sapiens
MAGQGDCCVKVAVRIRPQLSKEKIEGCHICTSVTPGEPQVLLGKDKAFTYDFVFDLDTWQEQIYSTCVSKLIEGCFEGYNATVLAYGQTGAGKTYTMGTGFDMATSEEEQGIIPRAIAHLFGGIAERKRRAQEQGVAGPEFKVSAQFLELYNEEILDLFDSTRDPDTRHRRSNIKIHEDANGGIYTTGVTSRLIHSQEELIQCLKQGALSRTTASTQMNVQSSRSHAIFTIHLCQMRMCTQPDLVNEAVTGLPDGTPPSSEYETLTAKFHFVDLAGSERLKRTGATGERAKEGISINCGLLALGNVISALGDQSKKVVHVPYRDSKLTRLLQDSLGGNSQTIMIACVSPSDRDFMETLNTLKYANRARNIKNKVVVNQDKTSQQISALRAEIARLQMELMEYKAGKRVIGEDGAEGYSDLFRENAMLQKENGALRLRVKAMQEAIDAINNRVTQLMSQEANLLLAKAGDGNEAIGALIQNYIREIEELRTKLLESEAMNESLRRSLSRASARSPYSLGASPAAPAFGGSPASSMEDASEVIRRAKQDLERLKKKEVRQRRKSPEKEAFKKRAKLQQENSEETDENEAEEEEEERDESGCEEEEGREDEDEDSGSEESLVDSDSDPEEKEVNFQADLADLTCEIEIKQKLIDELENSQRRLQTLKHQYEEKLILLQNKIRDTQLERDRVLQNLSTMECYTEEKANKIKADYEKRLREMNRDLQKLQAAQKEHARLLKNQSRYERELKKLQAEVAEMKKAKVALMKQMREEQQRRRLVETKRNREIAQLKKEQRRQEFQIRALESQKRQQEMVLRRKTQEVSALRRLAKPMSERVAGRAGLKPPMLDSGAEVSASTTSSEAESGARSVSSIVRQWNRKINHFLGDHPAPTVNGTRPARKKFQKKGASQSFSKAARLKWQSLERRIIDIVMQRMTIVNLEADMERLIKKREELFLLQEALRRKRERLQAESPEEEKGLQELAEEIEVLAANIDYINDGITDCQATIVQLEETKEELDSTDTSVVISSCSLAEARLLLDNFLKASIDKGLQVAQKEAQIRLLEGRLRQTDMAGSSQNHLLLDALREKAEAHPELQALIYNVQQENGYASTDEEISEFSEGSFSQSFTMKGSTSHDDFKFKSEPKLSAQMKAVSAECLGPPLDISTKNITKSLASLVEIKEDGVGFSVRDPYYRDRVSRTVSLPTRGSTFPRQSRATETSPLTRRKSYDRGQPIRSTDVGFTPPSSPPTRPRNDRNVFSRLTSNQSQGSALDKGIISPVGGAKGARTAPLQCVSMAEGHTKPILCLDATDELLFTGSKDRSCKMWNLVTGQEIAALKGHPNNVVSIKYCSHSGLVFSVSTSYIKVWDIRDSAKCIRTLTSSGQVISGDACAATSTRAITSAQGEHQINQIALSPSGTMLYAASGNAVRIWELSRFQPVGKLTGHIGPVMCLTVTQTASQHDLVVTGSKDHYVKMFELGECVTGTIGPTHNFEPPHYDGIECLAIQGDILFSGSRDNGIKKWDLDQQELIQQIPNAHKDWVCALAFIPGRPMLLSACRAGVIKVWNVDNFTPIGEIKGHDSPINAICTNAKHIFTASSDLTVKFWSVRRLPHSGPP

SEQ ID NO: 7875 - protein, 547 aa, Homo sapiens
MTKTDPAPMAPPPRGEEEEEEEEDEPVPEAPSPTQERRQKPVVHPSAPAPLPKDYAFTFFDPNDPACQEILFDPQTTIPELFAIVRQWVPQVQHKIDVIGNEILRRGCHVNDRDGLTDMTLLHYACKAGAHGVGDPAAAVRLSQQLLALGADVTLRSRWTNMNALHYAAYFDVPDLVRVLLKGARPRVVNSTCSDFNHGSALHIAASSLCLGAAKCLLEHGANPALRNRKGQVPAEVVPDPMDMSLDKAEAALVAKELRTLLEEAVPLSCALPKVTLPNYDNVPGNLMLSALGLRLGDRVLLDGQKTGTLRFCGTTEFASGQWVGVELDEPEGKNDGSVGGVRYFICPPKQGLFASVSKISKAVDAPPSSVTSTPRTPRMDFSRVTGKGRREHKGKKKTPSSPSLGSLQQRDGAKAEVGDQVLVAGQKQGIVRFYGKTDFAPGYWYGIELDQPTGKHDGSVFGVRYFTCPPRHGVFAPASRIQRIGGSTDSPGDSVGAKKVHQVTMTQPKRTFTTVRTPKDIASENSISRLLFCCWFPWMLRAEMQS

SEQ ID NO: 7876 - protein, 1045 aa, Homo sapiens
MGSQPPLGSPLSREEGEAPPPAPASEGRRRSRRVRLRGSCRHRPSFLGCRELAASAPARPAPASSEIMASAAKEFKMDNFSPKAGTSKLQQTVPADASPDSKCPICLDRFDNVSYLDRCLHKFCFRCVQEWSKNKAECPLCKQPFDSIFHSVRAEDDFKEYVLRPSYNGSFVTPDRRFRYRTTLTRERNASVYSPSGPVNRRTTTPPDSGVLFEGLGISTRPRDVEIPQFMRQIAVRRPTTADERSLRKIQEQDIINFRRTLYRAGARVRNIEDGGRYRDISAEFFRRNPACLHRLVPWLKRELTVLFGAHGSLVNIVQHIIMSNVTRYDLESQAFVSDLRPFLLNRTEHFIHEFISFARSPFNMAAFDQHANYDCPAPSYEEGSHSDSSVITISPDEAETQELDINVATVSQAPWDDETPGPSYSSSEQVHVTMSSLLNTSDSSDEELVTGGATSQIQGVQTNDDLNNDSDDSSDNCVIVGFVKPLAERTPELVELSSDSEDLGSYEKMETVKTQEQEQSYSSGDSDVSRCSSPHSVLGKDEQINKGHCDSSTRIKSKKEEKRSTSLSSPRNLNSSVRGDRVYSPYNHRHRKRGRSRSSDSRSQSRSGHDQKNHRKHHGKKRMKSKRSRSRESSRPRGRRDKKRSRTRDSSWSRRSQTLSLSSESTSRSRSRSSDHGKRRSRSRNRDRYYLRNNYGSRYKWEYTYYSRNKDRDGYESSYRRRTLSRAHYSRQSSSPEFRVQSFSERTNARKKNNHSERKYYYYERHRSRSLSSNRSRTASTGTDRVRNEKPGGKRKYKTRHLEGTNEVAQPSREFASKAKDSHYQKSSSKLDGNYKNESDTFSDSRSSDRETKHKRRKRKTRSLSVEIVYEGKATDTTKHHKKKKKKHKKKHKKHHGDNASRSPVVITIDSDSDKDSEVKEDTECDNSGPQDPLQNEFLAPSLEPFETKDVVTIEAEFGVLDKECDIATLSNNLNNANKTVDNIPPLAASVEQTLDVREESTFVSDLENQPSNIVSLQTEPSRQLPSPRTSLMSVCLGRDCDMS

SEQ ID NO: 7877 - protein, 996 aa, Homo sapiens
MGGSQSLQPAPASDLNLEASEAMSSDSEEAFETPESTTPVKAPPAPPPPPPEVIPEPEVSTQPPPEEPGCGSETVPVPDGPRSDSVEGSPFRPPSHSFSAVFDEDKPIASSGTYNLDFDNIELVDTFQTLEPRASDAKNQEGKVNTRRKSTDSVPISKSTLSRSLSLQASDFDGASSSGNPEAVALAPDAYSTGSSSASSTLKRTKKPRPPSLKKKQTTKKPTETPPVKETQQEPDEESLVPSGENLASETKTESAKTEGPSPALLEETPLEPAVGPKAACPLDSESAEGVVPPASGGGRVQNSPPVGRKTLPLTTAPEAGEVTPSDSGGQEDSPAKGLSVRLEFDYSEDKSSWDNQQENPPPTKKIGKKPVAKMPLRRPKMKKTPEKLDNTPASPPRSPAEPNDIPIAKGTYTFDIDKWDDPNFNPFSSTSKMQESPKLPQQSYNFDPDTCDESVDPFKTSSKTPSSPSKSPASFEIPASAMEANGVDGDGLNKPAKKKKTPLKTDTFRVKKSPKRSPLSDPPSQDPTPAATPETPPVISAVVHATDEEKLAVTNQKWTCMTVDLEADKQDYPQPSDLSTFVNETKFSSPTEELDYRNSYEIEYMEKIGSSLPQDDDAPKKQALYLMFDTSQESPVKSSPVRMSESPTPCSGSSFEETEALVNTAAKNQHPVPRGLAPNQESHLQVPEKSSQKELEAMGLGTPSEAIEITAPEGSFASADALLSRLAHPVSLCGALDYLEPDLAEKNPPLFAQKLQREAAHPTDVSISKTALYSRIGTAEVEKPAGLLFQQPDLDSALQIARAEIITKEREVSEWKDKYEESRREVMEMRKIVAEYEKTIAQMIEDEQREKSVSHQTVQQLVLEKEQALADLNSVEKSLADLFRRYEKMKEVLEGFRKNEEVLKRCAQEYLSRVKKEEQRYQALKVHAEEKLDRANAEIAQVRGKAQQEQAAHQASLRKEQLRVDALERTLEQKNKEIEELTKICDELIAKMGKS

SEQ ID NO: 7878 - protein, 603 aa, Homo sapiens
MRRRAARGPGPPPPGPGLSRLPLPLLLLLALGTRGGCAAPAPAPRAEDLSLGVEWLSRFGYLPPADPTTGQLQTQEELSKAITAMQQFGGLEATGILDEATLALMKTPRCSLPDLPVLTQARRRRQAPAPTKWNKRNLSWRVRTFPRDSPLGHDTVRALMYYALKVWSDIAPLNFHEVAGSAADIQIDFSKADHNDGYPFDGPGGTVAHAFFPGHHHTAGDTHFDDDEAWTFRSSDAHGMDLFAVAVHEFGHAIGLSHVAAAHSIMRPYYQGPVGDPLRYGLPYEDKVRVWQLYGVRESVSPTAQPEEPPLLPEPPDNRSSAPPRKDVPHRCSTHFDAVAQIRGEAFFFKGKYFWRLTRDRHLVSLQPAQMHRFWRGLPLHLDSVDAVYERTSDHKIVFFKGDRYWVFKDNNVEEGYPRPVSDFSLPPGGIDAAFSWAHNDRTYFFKDQLYWRYDDHTRHMDPGYPAQSPLWRGVPSTLDDAMRWSDGASYFFRGQEYWKVLDGELEVAPGYPQSTARDWLVCGDSQADGSVAAGVDAAEGPRAPPGQHDQSRSEDGYEVCSCTSGASSPPGAPGPLVAATMLLLLPPLSPGALWTAAQALTL

SEQ ID NO: 7879 - protein, 1312 aa, Homo sapiens
MEEEDESRGKTEESGEDRGDGPPDRDPTLSPSAFILRAIQQAVGSSLQGDLPNDKDGSRCHGLRWRRCRSPRSEPRSQESGGTDTATVLDMATDSFLAGLVSVLDPPDTWVPSRLDLRPGESEDMLELVAEVRIGDRDPIPLPVPSLLPRLRAWRTGKTVSPQSNSSRPTCARHLTLGTGDGGPAPPPAPSSASSSPSPSPSSSSPSPPPPPPPPAPPAPPAPRFDIYDPFHPTDEAYSPPPAPEQKYDPFEPTGSNPSSSAGTPSPEEEEEEEEEEEEEEEDEEEEEGLSQSISRISETLAGIYDDNSLSQDFPGDESPRPDAQPTQPTPAPGTPPQVDSTRADGAMRRRVFVVGTEAEACREGKVSVEVVTAGGAALPPPLLPPGDSEIEEGEIVQPEEEPRLALSLFRPGGRAARPTPAASATPTAQPLPQPPAPRAPEGDDFLSLHAESDGEGALQVDLGEPAPAPPAADSRWGGLDLRRKILTQRRERYRQRSPSPAPAPAPAAAAGPPTRKKSRRERKRSGEAKEAASSSSGTQPAPPAPASPWDSKKHRSRDRKPGSHASSSARRRSRSRSRSRSTRRRSRSTDRRRGGSRRSRSREKRRRRRRSASPPPATSSSSSSRRERHRGKHRDGGGSKKKKKRSRSRGEKRSGDGSEKAPAPAPPPSGSTSCGDRDSRRRGAVPPSIQDLTDHDLFAIKRTITVGRLDKSDPRGPSPAPASSPKREVLYDSEGLSGEERGGKSSQKDRRRSGAASSSSSSREKGSRRKALDGGDRDRDRDRDRDRDRSSKKARPPKESAPSSGPPPKPPVSSGSGSSSSSSSCSSRKVKLQSKVAVLIREGVSSTTPAKDAASAGLGSIGVKFSRDRESRSPFLKPDERAPTEMAKAAPGSTKPKKTKVKAKAGAKKTKGTKGKTKPSKTRKKVRSGGGSGGSGGQVSLKKSKADSCSQAAGTKGAEETSWSGEERAAKVPSTPPPKAAPPPPALTPDSQTVDSSCKTPEVSFLPEEATEEAGVRGGAEEEEEEEEEEEEEEEEEEQQPATTTATSTAAAAPSTAPSAGSTAGDSGAEDGPASRVSQLPTLPPPMPWNLPAGVDCTTSGVLALTALLFKMEEANLASRAKAQELIQATNQILSHRKPPSSLGMTPAPVPTSLGLPPGPSSYLLPGSLPLGGCGSTPPTPTGLAATSDKREGSSSSEGRGDTDKYLKKLHTQERAVEEVKLAIKPYYQKKDITKEEYKDILRKAVHKICHSKSGEINPVKVSNLVRAYVQRYRYFRKHGRKPGDPPGPPRPPKEPGPPDKGGPGLPLPPL

SEQ ID NO: 7880 - protein, 371 aa, Homo sapiens
MPANFTEGSFDSSGTGQTLDSSPVACTETVTFTEVVEGKEWGSFYYSFKTEQLITLWVLFVFTIVGNSVVLFSTWRRKKKSRMTFFVTQLAITDSFTGLVNILTDINWRFTGDFTAPDLVCRVVRYLQVVLLYASTYVLVSLSIDRYHAIVYPMKFLQGEKQARVLIVIAWSLSFLFSIPTLIIFGKRTLSNGEVQCWALWPDDSYWTPYMTIVAFLVYFIPLTIISIMYGIVIRTIWIKSKTYETVISNCSDGKLCSSYNRGLISKAKIKAIKYSIIIILAFICCWSPYFLFDILDNFNLLPDTQERFYASVIIQNLPALNSAINPLIYCVFSSSISFPCREQRSQDSRMTFRERTERHEMQILSKPEFI

SEQ ID NO: 7881 - protein, 1129 aa, Homo sapiens
MPATRKPMRYGHTEGHTEVCFDDSGSFIVTCGSDGDVRIWEDLDDDDPKFINVGEKAYSCALKSGKLVTAVSNNTIQVHTFPEGVPDGILTRFTTNANHVVFNGDGTKIAAGSSDFLVKIVDVMDSSQQKTFRGHDAPVLSLSFDPKDIFLASASCDGSVRVWQISDQTCAISWPLLQKCNDVINAKSICRLAWQPKSGKLLAIPVEKSVKLYRRESWSHQFDLSDNFISQTLNIVTWSPCGQYLAAGSINGLIIVWNVETKDCMERVKHEKGYAICGLAWHPTCGRISYTDAEGNLGLLENVCDPSGKTSSSKVSSRVEKDYNDLFDGDDMSNAGDFLNDNAVEIPSFSKGIINDDEDDEDLMMASGRPRQRSHILEDDENSVDISMLKTGSSLLKEEEEDGQEGSIHNLPLVTSQRPFYDGPMPTPRQKPFQSGSTPLHLTHRFMVWNSIGIIRCYNDEQDNAIDVEFHDTSIHHATHLSNTLNYTIADLSHEAILLACESTDELASKLHCLHFSSWDSSKEWIIDLPQNEDIEAICLGQGWAAAATSALLLRLFTIGGVQKEVFSLAGPVVSMAGHGEQLFIVYHRGTGFDGDQCLGVQLLELGKKKKQILHGDPLPLTRKSYLAWIGFSAEGTPCYVDSEGIVRMLNRGLGNTWTPICNTREHCKGKSDHYWVVGIHENPQQLRCIPCKGSRFPPTLPRPAVAILSFKLPYCQIATEKGQMEEQFWRSVIFHNHLDYLAKNGYEYEESTKNQATKEQQELLMKMLALSCKLEREFRCVELADLMTQNAVNLAIKYASRSRKLILAQKLSELAVEKAAELTATQVEEEEEEEDFRKKLNAGYSNTATEWSQPRFRNQVEEDAEDSGEADDEEKPEIHKPGQNSFSKSTNSSDVSAKSGAVTFSSQGRVNPFKVSASSKEPAMSMNSARSTNILDNMGKSSKKSTALSRTTNNEKSPIIKPLIPKPKPKQASAASYFQKRNSQTNKTEEVKEENLKNVLSETPAICPPQNTENQRPKTGFQMWLEENRSNILSDNPDFSDEADIIKEGMIRFRVLSTEERKVWANKAKGETASEGTEAKKRKRVVDESDETENQEEKAKENLNLSKKQKPLDFSTNQKLSAFAFKQE

SEQ ID NO: 7882 - protein, 514 aa, Homo sapiens
MGRKKIQIQRITDERNRQVTFTKRKFGLMKKAYELSVLCDCEIALIIFNHSNKLFQYASTDMDKVLLKYTEYNEPHESRTNADIIETLRKKGFNGCDSPEPDGEDSLEQSPLLEDKYRRASEELDGLFRRYGSTVPAPNFAMPVTVPVSNQSSLQFSNPSGSLVTPSLVTSSLTDPRLLSPQQPALQRNSVSPGLPQRPASAGAMLGGDLNSANGACPSPVGNGYVSARASPGLLPVANGNSLNKVIPAKSPPPPTHSTQLGAPSRKPDLRVITSQAGKGLMHHLNNAQRLGVSQSTHSLTTPVVSVATPSLLSQGLPFSSMPTAYNTDYQLTSAELSSLPAFSSPGGLSLGNVTAWQQPQQPQQPQQPQPPQQQPPQPQQPQPQQPQQPQQPPQQQSHLVPVSLSNLIPGSPLPHVGAALTVTTHPHISIKSEPVSPSRERSPAPPPPAVFPAARPEPGDGLSSPAGGSYETGDRDDGRGDFGPTLGLLRPAPEPEAEGSAVKRMRLDTWTLK

SEQ ID NO: 7883 - protein, 701 aa, Homo sapiens [sequence omitted]

SEQ ID NO: 7884 - protein, 475 aa, Homo sapiens
MTTWSSLQGSHVSKRALAYALVVTNCQERIQHWKKVDNDYNALRERLSTLPDKLSYNIMVPFGPFAFMPGKLVHTNEVTVLLGDNWFAKCSAKQAVGLVEHRKEHVRKTIDDLKKVMKNFESRVEFTEDLQKMSDAAGDIVDIREEIKCDFEFKAKHRIAHKPHSKPKTSDIFEADIANDVKSKDLLADKELWARLEELERQEELLGELDSKPDTVIANGEDTTSSEEEKEDRNTNVNAMHQVTDSHTPCHKDVASSEPFSGQVNSQLNCSVNGSSSYHSDDDDDDDDDDDDDNIDDDDGDNDHEALGVGDNSIPTIYFSHTVEPKRVRINTGKNTTLKFSEKKEEAKRKRKNSTGSGHSAQELPTIRTPADIYRAFVDVVNGEYVPRKSILKSRSRENSVCSDTSESSAAEFDDRRGVLRSISCEEATCSDTSESILEEEPQENQKKLLPLSVTPEVLRLVGYSRNLAPLNVIL

SEQ ID NO: 7885 - protein, 540 aa, Homo sapiens
MRGLLCWPVLLLLLQPWETQLQLTGPRCHTGPLDLVFVIDSSRSVRPFEFETMRQFLMGLLRGLNVGPNATRVGVIQYSSQVQSVFPLRAFSRREDMERAIRDLVPLAQGTMTGLAIQYAMNVAFSVAEGARPPEERVPRVAVIVTDGRPQDRVAEVAAQARARGIEIYAVGVQRADVGSLRAMASPPLDEHVFLVESFDLIQEFGLQFQSRLCAIDYCSFGNHSCQHECVSTPGGPRCHCREGHDLQPDGRSCQVRDLCNGVDHGCEFQCVSEGLSYRCLCPEGRQLQADGKSCNRCREGHVDLVLLVDGSKSVRPQNFELVKRFVNQIVDFLDVSPEGTRVGLVQFSSRVRTEFPLGRYGTAAEVKQAVLAVEYMERGTMTGLALRHMVEHSFSEAQGARPRALNVPRVGLVFTDGRSQDDISVWAARAKEEGIVMYAVGVGKAVEAELREIASEPAELHVSYAPDFGTMTHLLENLRGSICPEEGISAGTELRSPCECESLVEFQGRTLGALESLTLNLAQLTARLEDLENQLANQK

SEQ ID NO: 7886 - protein, 326 aa, Homo sapiens
MLLSKFGSLAHLCGPGGVDHLPVKILQPAKADKESFEKAYQVGAVLGSGGFGTVYAGSRIADGLPVAVKHVVKERVTEWGSLGGATVPLEVVLLRKVGAAGGARGVIRLLDWFERPDGFLLVLERPEPAQDLFDFITERGALDEPLARRFFAQVLAAVRHCHSCGVVHRDIKDENLLVDLRSGELKLIDFGSGALLKDTVYTDFDGTRVYSPPEWIRYHRYHGRSATVWSLGVLLYDMVCGDIPFEQDEEILRGRLLFRRRVSPECQQLIRWCLSLRPSERPSLDQIAAHPWMLGADGGVPESCDLRLCTLDPDDVASTTSSSESL

SEQ ID NO: 7887 - protein, 959 aa, Homo sapiens
MAASTGYVRLWGAARCWVLRRPMLAAAGGRVPTAAGAWLLRGQRTCDASPPWALWGRGPAIGGQWRGFWEASSRGGGAFSGGEDASEGGAEEGAGGAGGSAGAGEGPVITALTPMTIPDVFPHLPLIAITRNPVFPRFIKIIEVKNKKLVELLRRKVRLAQPYVGVFLKRDDSNESDVVESLDEIYHTGTFAQIHEMQDLGDKLRMIVMGHRRVHISRQLEVEPEEPEAENKHKPRRKSKRGKKEAEDELSARHPAELAMEPTPELPAEVLMVEVENVVHEDFQVTEEVKALTAEIVKTIRDIIALNPLYRESVLQMMQAGQRVVDNPIYLSDMGAALTGAESHELQDVLEETNIPKRLYKALSLLKKEFELSKLQQRLGREVEEKIKQTHRKYLLQEQLKIIKKELGLEKDDKDAIEEKFRERLKELVVPKHVMDVVDEELSKLGLLDNHSSEFNVTRNYLDWLTSIPWGKYSNENLDLARAQAVLEEDHYGMEDVKKRILEFIAVSQLRGSTQGKILCFYGPPGVGKTSIARSIARALNREYFRFSVGGMTDVAEIKGHRRTYVGAMPGKIIQCLKKTKTENPLILIDEVDKIGRGYQGDPSSALLELLDPEQNANFLDHYLDVPVDLSKVLFICTANVTDTIPEPLRDRMEMINVSGYVAQEKLAIAERYLVPQARALCGLDESKAKLSSDVLTLLIKQYCRESGVRNLQKQVEKVLRKSAYKIVSGEAESVEVTPENLQDFVGKPVFTVERMYDVTPPGVVMGLAWTAMGGSTLFVETSLRRPQDKDAKGDKDGSLEVTGQLGEVMKESARIAYTFARAFLMQHAPANDYLVTSHIHLHVPEGATPKDGPSAGCTIVTALLSLAMGRPVRQNLAMTGEVSLTGKILPVGGIKEKTIAAKRAGVTCIVLPAENKKDFYDLAAFITEGLEVHFVEHYREIFDIAFPDEQAEALAVER

SEQ ID NO: 7888 - protein, 238 aa, Homo sapiens
MWVPVVFLTLSVTWIGAAPLILSRIVGGWECEKHSQPWQVLVASRGRAVCGGVLVHPQWVLTAAHCIRNKSVILLGRHSLFHPEDTGQVFQVSHSFPHPLYDMSLLKNRFLRPGDDSSHDLMLLRLSEPAELTDAVKVMDLPTQEPALGTTCYASGWGSIEPEEFLTPKKLQCVDLHVISNDVCAQVHPQKVTKFMLCAGRWTGGKSTCSWVILITELTMPALPMVLHGSLVPWRGGV

SEQ ID NO: 7889 - protein, 935 aa, Homo sapiens
MELRVLLCWASLAAALEETLLNTKLETADLKWVTFPQVDGQWEELSGLDEEQHSVRTYEVCDVQRAPGQAHWLRTGWVPRRGAVHVYATLRFTMLECLSLPRAGRSCKETFTVFYYESDADTATALTPAWMENPYIKVDTVAAEHLTRKRPGAEATGKVNVKTLRLGPLSKAGFYLAFQDQGACMALLSLHLFYKKCAQLTVNLTRFPETVPRELVVPVAGSCVVDAVPAPGPSPSLYCREDGQWAEQPVTGCSCAPGFEAAEGNTKCRACAQGTFKPLSGEGSCQPCPANSHSNTIGSAVCQCRVGYFRARTDPRGAPCTTPPSAPRSVVSRLNGSSLHLEWSAPLESGGREDLTYALRCRECRPGGSCAPCGGDLTFDPGPRDLVEPWVVVRGLRPDFTYTFEVTALNGVSSLATGPVPFEPVNVTTDREVPPAVSDIRVTRSSPSSLSLAWAVPRAPSGAVLDYEVKYHEKGAEGPSSVRFLKTSENRAELRGLKRGASYLVQVRARSEAGYGPFGQEHHSQTQLDESEGWREQLALIAGTAVVGVVLVLVVIVVAVLCLRKQSNGREAEYSDKHGQYLIGHGTKVYIDPFTYEDPNEAVREFAKEIDVSYVKIEEVIGAGEFGEVCRGRLKAPGKKESCVAIKTLKGGYTERQRREFLSEASIMGQFEHPNIIRLEGVVTNSMPVMILTEFMENGALDSFLRLNDGQFTVIQLVGMLRGIASGMRYLAEMSYVHRDLAARNILVNSNLVCKVSDFGLSRFLEENSSDPTYTSSLGGKIPIRWTAPEAIAFRKFTSASDAWSYGIVMWEVMSFGERPYWDMSNQDVINAIEQDYRLPPPPDCPTSLHQLMLDCWQKDRNARPRFPQVVSALDKMIRNPASLKIVARENGGDLLRIGVTLAGHQKKILASVQHMKSQAKPGTPGGTGGPAPQY

SEQ ID NO: 7890 - protein, 740 aa, Homo sapiens
MSFGRDMELEHFDERDKAQRYSRGSRVNGLPSPTHSAHCSFYRTRTLQTLSSEKKAKKVRFYRNGDRYFKGIVYAISPDRFRSFEALLADLTRTLSDNVNLPQGVRTIYTIDGLKKISSLDQLVEGESYVCGSIEPFKKLEYTKNVNPNWSVNVKTTSASRAVSSLATAKGSPSEVRENKDFIRPKLVTIIRSGVKPRKAVRILLNKKTAHSFEQVLTDITDAIKLDSGVVKRLYTLDGKQVMCLQDFFGDDDIFIACGPEKFRYQDDFLLDESECRVVKSTSYTKIASSSRRSTTKSPGPSRRSKSPASTSSVNGTPGSQLSTPRSGKSPSPSPTSPGSLRKQRSSQHGGSSTSLASTKVCSSMDENDGPGEEVSEEGFQIPATITERYKVGRTIGDGNFAVVKECVERSTAREYALKIIKKSKCRGKEHMIQNEVSILRRVKHPNIVLLIEEMDVPTELYLVMELVKGGDLFDAITSTNKYTERDASGMLYNLASAIKYLHSLNIVHRDIKPENLLVYEHQDGSKSLKLGDFGLATIVDGPLYTVCGTPTYVAPEIIAETGYGLKVDIWAAGVITYILLCGFPPFRGSGDDQEVLFDQILMGQVDFPSPYWDNVSDSAKELITMMLLVDVDQRFSAVQVLEHPWVNDDGLPENEHQLSVAGKIKKHFNTGPKPNSTAAGVSVIATTALDKERQVFRRRRNQDVRSRYKAQPAPPELNSESEDYSPSSSETVRSPNSPF

SEQ ID NO: 7891 - protein, 1047 aa, Homo sapiens
MAEKRPLRTLGPVMYGKLPRLETDSGLEHSLPHSVGNQDPCTYKGSYFSCPMAGTPKAESEQLASWTPYPPLYSTGMAGPPLQADNLLTNCLFYRSPAEGPEKMQDSSPVELLPFSPQAHSYPGPPLAAPKPVYRNPLCYGLSTCLGEGAVKRPLDVDWTLATGPLLPSADPPCSLAPAPSKGQTLDGTFLRGVPAEGSSKDSSGSFSPCQPFLEKYQTIHSTGFLASRYTGPYPRNSKQAMSEGPSSPWTQLAQPLGPPCQDTGPTHYPPPHHPPPHPPQALPCPPACRHPEKQGSYSPALPLQPLGGHKGTGYQAGGLGSPYLRQQAAQAPYIPPLGLDAYPYPSAPLPAPSPGLKLEPPLTPRCPLDFAPQTLSFPYARDDLSLYGASPGLGGTPPSQNNVRAVPQPGAFQRACQPLPASQPCSEPVRPAQEAEEKTWLPSCRKEKLQPRLSEHSGPPIVIRDSPVPCTPPALPPCARECQSLPQKEGARPPSSPPMPVIDNVFSLAPYRDYLDVPAPEATTEPDSATAEPDSAPATSEGQDKGCRGTLPAQEGPSGSKPLRGSLKEEVALDLSVRKPTAEASPVKASRSVEHAKPTAAMDVPDVGNMVSDLPGLKKIDTEAPGLPGVPVTTDAMPRTNFHSSVAFMFRKFKILRPAPLPAAVVPSTPTSAPAPTQPAPTPTSGPIGLRILAQQPLSVTCFSLALPSPPAVAVASPAPAPAPSPAPARAQAPASARDPAPAPAPVAGPAPASTSAPGDSLEQHFTGLHASLCDAISGSVAHSPPEKLREWLETAGPWGQAAWQDCQGVQGLLAKLLSQLQRFDRTHRCPFPHVVRAGAIFVPIHLVKERLFPRLPPASVDHVLQEHRVELRPTTLSEERALRELALPGCTSRMLKLLALRQLPDIYPDLLGLQWRDCVRRQLGDFDTEAGAVSSSEPTVARGEPESLALAQKSPAPKVRKPGRKPPTPGPEKAEAAAGEESCGASPTPATSASPPGPTLKARFRSLLETAWLNGLALPTWGHKSSRPDQPSPCPQLLDSQSHHL

SEQ ID NO: 7892 - protein, 791 aa, Homo sapiens
MESEQLFHRGYYRNSYNSITSASSDEELLDGAGVIMDFQTSEDDNLLDGDTAVGTHYTMTNGGSINSSTHLLDLLDEPIPGVGTYDDFHTIDWVREKCKDRERHRRINSKKKESAWEMTKSLYDAWSGWLVVTLTGLASGALAGLIDIAADWMTDLKEGICLSALWYNHEQCCWGSNETTFEERDKCPQWKTWAELIIGQAEGPGSYIMNYIMYIFWALSFAFLAVSLVKVFAPYACGSGIPEIKTILSGFIIRGYLGKWTLMIKTITLVLAVASGLSLGKEGPLVHVACCCGNIFSYLFPKYSTNEAKKREVSYYFPLKTLWRSFFAALVAAFVLRSINPFGNSRLVLFYVEYHTPWYLFELFPFILLGVFGGLWGAFFIRANIAWCRRRKSTKFGKYPVLEVIIVAAITAVIAFPNPYTRLNTSELIKELFTDCGPLESSSLCDYRNDMNASKIVDDIPDRPAGIGVYSAIWQLCLALIFKIIMTVFTFGIKVPSGLFIPSMAIGAIAGRIVGIAVEQLAYYHHDWFIFKEWCEVGADCITPGLYAMVGAAACLGGVTRMTVSLVVIVFELTGGLEYIVPLMAAVMTSKWVGDAFGREGIYEAHIRLNGYPFLDAKEEFTHTTLAADVMRPRRNDPPLAVLTQDNMTVDDIENMINETSYNGFPVIMSKESQRLVGFALRRDLTIAIESARKKQEGIVGSSRVCFAQHTPSLPAESPRPLKLRSILDMSPFTVTDHTPMEIVVDIFRKLGLRQCLVTHNGRLLGIITKKDILRHMAQTANQDPASIMFN

SEQ ID NO: 7893 - protein, 794 aa, Homo sapiens
MNIDDKLEGLFLKCGGIDEMQSSRTMVVMGGVSGQSTVSGELQDSVLQDRSMPHQEILAADEVLQESEMRQQDMISHDELMVHEETVKNDEEQMETHERLPQGLQYALNVPISVKQEITFTDVSEQLMRDKKQIREPVDLQKKKKRKQRSPAKILTINEDGSLGLKTPKSHVCEHCNAAFRTNYHLQRHVFIHTGEKPFQCSQCDMRFIQKYLLQRHEKIHTGEKPFRCDECGMRFIQKYHMERHKRTHSGEKPYQCEYCLQYFSRTDRVLKHKRMCHENHDKKLNRCAIKGGLLTSEEDSGFSTSPKDNSLPKKKRQKTEKKSSGMDKESALDKSDLKKDKNDYLPLYSSSTKVKDEYMVAEYAVEMPHSSVGGSHLEDASGEIHPPKLVLKKINSKRSLKQPLEQNQTISPLSTYEESKVSKYAFELVDKQALLDSEGNADIDQVDNLQEGPSKPVHSSTNYDDAMQFLKKKRYLQAASNNSREYALNVGTIASQPSVTQAAVASVIDESTTASILESQALNVEIKSNHDKNVIPDEVLQTLLDHYSHKANGQHEISFSVADTEVTSSISINSSEVPEVTPSENVGSSSQASSSDKANMLQEYSKFLQQALDRTSQNDAYLNSPSLNFVTDNQTLPNQPAFSSIDKQVYATMPINSFRSGMNSPLRTTPDKSHFGLIVGDSQHSFPFSGDETNHASATSTQDFLDQVTSQKKAEAQPVHQAYQMSSFEQPFRAPYHGSRAGIATQFSTANGQVNLRGPGTSAEFSEFPLVNVNDNRAGMTSSPDATTGQTFG

SEQ ID NO: 7894 - protein, 580 aa, Homo sapiens
MSDGLDNEEKPPAPPLRMNSNNRDSSALNHSSKPLPMAPEEKNKKARLRSIFPGGGDKTNKKKEKERPEISLPSDFEHTIHVGFDAVTGEFTNSPFQTSRPVTVASSQSEGKMPDLYGSQMCPGKLPEGIPEQWARLLQTSNITKLEQKKNPQAVLDVLKFYDSKETVNNQKYMSFTSGDKSAHGYIAAHPSSTKTASEPPLAPPVSEEEDEEEEEEEDENEPPPVIAPRPEHTKSIYTRSVVESIASPAVPNKEVTPPSAENANSSTLYRNTDRQRKKSKMTDEEILEKLRSIVSVGDPKKKYTRFEKIGQGASGTVYTALDIATGQEVAIKQMNLQQQPKKELIINEILVMRENKNPNIVNYLDSYLVGDELWVVMEYLAGGSLTDVVTETCMDEGQIAAVCRECLQALDFLHSNQVIHRDIKSDNILLGMDGSVKLTDFGFCAQITPEQSKRSTMVGTPYWMAPEVVTRKAYGPKVDIWSLGIMAIEMVEGEPPYLNENPLRALYLIATNGTPELQNPERLSAVFRDFLNRCLEMDVDRRGSAKELLQHPFLKLAKPLSSLTPLIIAAKEAIKNSSR

SEQ ID NO: 7895 - protein, 2365 aa, Homo sapiens
MESVSESSQQQKRKPVIHGLEDQKRIYTDWANHYLAKSGHKRLIRDLQQDVTDGVLLAQIIQVVANEKIEDINGCPKNRSQMIENIDACLNFLAAKGINIQGLSAEEIRNGNLKAILGLFFSLSRYKQQQQQPQKQHLSSPLPPAVSQVAGAPSQCQAGTPQQQVPVTPQAPCQPHQPAPHQQSKAQAEMQSRLPGPTARVSAAGSEAKTRGGSTTANNRRSQSFNNYDKSKPVTSPPPPPSSHEKEPLASSASSHPGMSDNAPASLESGSSSTPTNCSTSSAIPQPGAATKPWRSKSLSVKHSATVSMLSVKPPGPEAPRPTPEAMKPAPNNQKSMLEKLKLFNSKGGSKAGEGPGSRDTSCERLETLPSFEESEELEAASRMLTTVGPASSSPKIALKGIAQRTFSRALTNKKSSLKGNEKEKEKQQREKDKEKSKDLAKRASVTERLDLKEEPKEDPSGAAVPEMPKKSSKIASFIPKGGKLNSAKKEPMAPSHSGIPKPGMKSMPGKSPSAPAPSKEGERSRSGKLSSGLPQQKPQLDGRHSSSSSSLASSEGKGPGGTTLNHSISSQTVSGSVGTTQTTGSNTVSVQLPQPQQQYNHPNTATVAPFLYRSQTDTEGNVTAESSSTGVSVEPSHFTKTGQPALEELTGEDPEARRLRTVKNIADLRQNLEETMSSLRGTQVTHSTLETTFDTNVTTEMSGRSILSLTGRPTPLSWRLGQSSPRLQAGDAPSMGNGYPPRANASRFINTESGRYVYSAPLRRQLASRGSSVCHVDVSDKAGDEMDLEGISMDAPGYMSDGDVLSKNIRTDDITSGYMTDGGLGLYTRRLNRLPDGMAVVRETLQRNTSLGLGDADSWDDSSSVSSGISDTIDNLSTDDINTSSSISSYANTPASSRKNLDVQTDAEKHSQVERNSLWSGDDVKKSDGGSDSGIKMEPGSKWRRNPSDVSDESDKSTSGKKNPVISQTGSWRRGMTAQVGITMPRTKPSAPAGALKTPGTGKTDDAKVSEKGRLSPKASQVKRSPSDAGRSSGDESKKPLPSSSRTPTANANSFGFKKQSGSAAGLAMITASGVTVTSRSATLGKIPKSSALVSRSAGRKSSMDGAQNQDDGYLALSSRTNLQYRSLPRPSKSNSRNGAGNRSSTSSIDSNISSKSAGLPVPKLREPSKTALGSSLPGLVNQTDKEKGISSDNESVASCNSVKVNPAAQPVSSPAQTSLQPGAKYPDVASPTLRRLFGGKPTKQVPIATAENMKNSVVISNPHATMTQQGNLDSPSGSGVLSSGSSSPLYSKNVDLNQSPLASSPSSAHSAPSNSLTWGTNASSSSAVSKDGLGFQSVSSLHTSCESIDISLSSGGVPSHNSSTGLIASSKDDSLTPFVRTNSVKTTLSESPLSSPAASPKFCRSTLPRKQDSDPHLDRNTLPKKGLRYTPTSQLRTQEDAKEWLRSHSAGGLQDTAANSPFSSGSSVTSPSGTRFNFSQLASPTTVTQMSLSNPTMLRTHSLSNADGQYDPYTDSRFRNSSMSLDEKSRTMSRSGSFRDGFEEVHGSSLSLVSSTSSVYSTPEEKCQSEIRKLRRELDASQEKVSALTTQLTANAHLVAAFEQSLGNMTIRLQSLTMTAEQKDSELNELRKTIELLKKQNAAAQAAINGVINTPELNCKGNGTAQSADLRIRRQHSSDSVSSINSATSHSSVGSNIESDSKKKKRKNWLRSSFKQAFGKKKSPKSASSHSDIEEMTDSSLPSSPKLPHNGSTGSTPLLRNSHSNSLISECMDSEAETVMQLRNELRDKEMKLTDIRLEALSSAHQLDQLREAMNRMQSEIEKLKAENDRLKSESQGSGCSRAPSQVSISASPRQSMGLSQHSLNLTESTSLDMLLDDTGECSARKEGGRHVKIVVSFQEEMKWKEDSRPHLFLIGCIGVSGKTKWDVLDGVVRRLFKEYIIHVDPVSQLGLNSDSVLGYSIGEIKRSNTSETPELLPCGYLVGENTTISVTVKGLAENSLDSLVFESLIPKPILQRYVSLLIEHRRIILSGPSGTGKTYLANRLSEYIVLREGRELTDGVIATFNVDHKSSKELRQYLSNLADQCNSENNAVDMPLVIILDNLHHVSSLGEIFNGLLNCKYHKCPYIIGTMNQATSSTPNLQLHHNFRWVLCANHTEPVKGFLGRFLRRKLMETEISGRVRNMELVKIIDWIPKVWHHLNRFLEAHSSSDVTIGPRLFLSCPIDVDGSRVWFTDLWNYSIIPYLLEAVREGLQLYGRRAPWEDPAKWVMDTYPWAASPQQHEWPPLLQLRPEDVGFDGYSMPREGSTSKQMPPSDAEGDPLMNMLMRLQEAANYSSPQSYDSDSNSNSHHDDILDSSLESTL

SEQ ID NO: 7896 - protein, 420 aa, Homo sapiens
MATKTELSPTARESKNAQDMQVDETLIPRKVPSLCSARYGIALVLHFCNFTTIAQNVIMNITMVAMVNSTSPQSQLNDSSEVLPVDSFGGLSKAPKSLPAKSSILGGQFAIWEKWGPPQERSRLCSIALSGMLLGCFTAILIGGFISETLGWPFVFYIFGGVGCVCCLLWFVVIYDDPVSYPWISTSEKEYIISSLKQQVGSSKQPLPIKAMLRSLPIWSICLGCFSHQWLVSTMVVYIPTYISSVYHVNIRDNGLLSALPFIVAWVIGMVGGYLADFLLTKKFRLITVRKIATILGSLPSSALIVSLPYLNSGYITATALLTLSCGLSTLCQSGIYINVLDIAPRYSSFLMGASRGFSSIAPVIVPTVSGFLLSQDPEFGWRNVFFLLFAVNLLGLLFYLIFGEADVQEWAKERKLTRL

SEQ ID NO: 7897 - protein, 1032 aa, Homo sapiens
MGFCRSALHPLSLLVQAIMLAMTLALGTLPAFLPCELQPHGLVNCNWLFLKSVPHFSMAAPRGNVTSLSLSSNRIHHLHDSDFAHLPSLRHLNLKWNCPPVGLSPMHFPCHMTIEPSTFLAVPTLEELNLSYNNIMTVPALPKSLISLSLSHTNILMLDSASLAGLHALRFLFMDGNCYYKNPCRQALEVAPGALLGLGNLTHLSLKYNNLTVVPRNLPSSLEYLLLSYNRIVKLAPEDLANLTALRVLDVGGNCRRCDHAPNPCMECPRHFPQLHPDTFSHLSRLEGLVLKDSSLSWLNASWFRGLGNLRVLDLSENFLYKCITKTKAFQGLTQLRKLNLSFNYQKRVSFAHLSLAPSFGSLVALKELDMHGIFFRSLDETTLRPLARLPMLQTLRLQMNFINQAQLGIFRAFPGLRYVDLSDNRISGASELTATMGEADGGEKVWLQPGDLAPAPVDTPSSEDFRPNCSTLNFTLDLSRNNLVTVQPEMFAQLSHLQCLRLSHNCISQAVNGSQFLPLTGLQVLDLSHNKLDLYHEHSFTELPRLEALDLSYNSQPFGMQGVGHNFSFVAHLRTLRHLSLAHNNIHSQVSQQLCSTSLRALDFSGNALGHMWAEGDLYLHFFQGLSGLIWLDLSQNRLHTLLPQTLRNLPKSLQVLRLRDNYLAFFKWWSLHFLPKLEVLDLAGNQLKALTNGSLPAGTRLRRLDVSCNSISFVAPGFFSKAKELRELNLSANALKTVDHSWFGPLASALQILDVSANPLHCACGAAFMDFLLEVQAAVPGLPSRVKCGSPGQLQGLSIFAQDLRLCLDEALSWDCFALSLLAVALGLGVPMLHHLCGWDLWYCFHLCLAWLPWRGRQSGRDEDALPYDAFVVFDKTQSAVADWVYNELRGQLEECRGRWALRLCLEERDWLPGKTLFENLWASVYGSRKTLFVLAHTDRVSGLLRASFLLAQQRLLEDRKDVVVLVILSPDGRRSRYVRLRQRLCRQSVLLWPHQPSGQRSFWAQLGMALTRDNHHFYNRNFCQGPTAE

SEQ ID NO: 7898 - protein, 524 aa, Homo sapiens
MAAPEPARAAPPPPPPPPPPPGADRVVKAVPFPPTHRLTSEEVFDLDGIPRVDVLKNHLVKEGRVDEEIALRIINEGAAILRREKTMIEVEAPITVCGDIHGQFFDLMKLFEVGGSPANTRYLFLGDYVDRGYFSIECVLYLWVLKILYPSTLFLLRGNHECRHLTEYFTFKQECKIKYSERVYEACMEAFDSLPLAALLNQQFLCVHGGLSPEIHTLDDIRRLDRFKEPPAFGPMCDLLWSDPSEDFGNEKSQEHFSHNTVRGCSYFYNYPAVCEFLQNNNLLSIIRAHEAQDAGYRMYRKSQTTGFPSLITIFSAPNYLDVYNNKAAVLKYENNVMNIRQFNCSPHPYWLPNFMDVFTWSLPFVGEKVTEMLVNVLSICSDDELMTEGEDQFDGSAAARKEIIRNKIRAIGKMARVFSVLREESESVLTLKGLTPTGMLPSGVLAGGRQTLQSATVEAIEAEKAIRGFSPPHRICSFEEAKGLDRINERMPPRKDAVQQDGFNSLNTAHATENHGTGNHTAQ

SEQ ID NO: 7899 - protein, 772 aa, Homo sapiens
MRLALLWALGLLGAGSPLPSWPLPNIGGTEEQQAESEKAPREPLEPQVLQDDLPISLKKVLQTSLPEPLRIKLELDGDSHILELLQNRELVPGRPTLVWYQPDGTRVVSEGHTLENCCYQGRVRGYAGSWVSICTCSGLRGLVVLTPERSYTLEQGPGDLQGPPIISRIQDLHLPGHTCALSWRESVHTQKPPEHPLGQRHIRRRRDVVTETKTVELVIVADHSEAQKYRDFQHLLNRTLEVALLLDTFFRPLNVRVALVGLEAWTQRDLVEISPNPAVTLENFLHWRRAHLLPRLPHDSAQLVTGTSFSGPTVGMAIQNSICSPDFSGGVNMDHSTSILGVASSIAHELGHSLGLDHDLPGNSCPCPGPAPAKTCIMEASTDFLPGLNFSNCSRRALEKALLDGMGSCLFERLPSLPPMAAFCGNMFVEPGEQCDCGFLDDCVDPCCDSLTCQLRPGAQCASDGPCCQNCQLRPSGWQCRPTRGDCDLPEFCPGDSSQCPPDVSLGDGEPCAGGQAVCMHGRCASYAQQCQSLWGPGAQPAAPLCLQTANTRGNAFGSCGRNPSGSYVSCTPRDAICGQLQCQTGRTQPLLGSIRDLLWETIDVNGTELNCSWVHLDLGSDVAQPLLTLPGTACGPGLVCIDHRCQRVDLLGAQECRSKCHGHGVCDSNRHCYCEEGWAPPDCTTQLKATSSLTTGLLLSLLVLLVLVMLGASYWYRARLHQRLCQLKGPTCQYSLRGQPSPHPQGSHCLPTPRAGAHRVTCPAQGLESRP

SEQ ID NO: 7900 - protein, 455 aa, Homo sapiens
MENKKKDKDKSDDRMARPSGRSGHNTRGTGSSSSGVLMVGPNFRVGKKIGCGNFGELRLGKNLYTNEYVAIKLEPMKSRAPQLHLEYRFYKQLGSGDGIPQVYYFGPCGKYNAMVLELLGPSLEDLFDLCDRTFSLKTVLMIAIQLISRMEYVHSKNLIYRDVKPENFLIGRPGNKTQQVIHIIDFGLAKEYIDPETKKHIPYREHKSLTGTARYMSINTHLGKEQSRRDDLEALGHMFMYFLRGSLPWQGLKADTLKERYQKIGDTKRATPIEVLCENFPEMATYLRYVRRLDFFEKPDYDYLRKLFTDLFDRKGYMFDYEYDWIGKQLPTPVGAVQQDPALSSNREAHQHRDKMQQSKNQSADHRAAWDSQQANPHHLRAHLAADRHGGSVQVVSSTNGELNTDDPTAGRSNAPITAPTEVEVMDETNCQKVLNMWCCCFFKRRKRKTIQRHK

SEQ ID NO: 7901 - protein, 575 aa, Homo sapiens
MRPWTGSWRWIMLILFAWGTLLFYIGGHLVRDNDHPDHSSRELSKILAKLERLKQQNEDLRRMAESLRIPEGPIDQGPAIGRVRVLEEQLVKAKEQIENYKKQTRNGLGKDHEILRRRIENGAKELWFFLQSELKKLKNLEGNELQRHADEFLLDLGHHERSIMTDLYYLSQTDGAGDWREKEAKDLTELVQRRITYLQNPKDCSKAKKLVCNINKGCGYGCQLHHVVYCFMIAYGTQRTLILESQNWRYATGGWETVFRPVSETCTDRSGISTGHWSGEVKDKNVQVVELPIVDSLHPRPPYLPLAVPEDLADRLVRVHGDPAVWWVSQFVKYLIRPQPWLEKEIEEATKKLGFKHPVIGVHVRRTDKVGTEAAFHPIEEYMVHVEEHFQLLARRMQVDKKRVYLATDDPSLLKEAKTKYPNYEFISDNSISWSAGLHNRYTENSLRGVILDIHFLSQADFLVCTFSSQVCRVAYEIMQTLHPDASANFHSLDDIYYFGGQNAHNQIAIYAHQPRTADEIPMEPGDIIGVAGNHWDGYSKGVNRKLGRTGLYPSYKVREKIETVKYPTYPEAEK

SEQ ID NO: 7902 - protein, 428 aa, Homo sapiens
MDKLDANVSSEEGFGSVEKVVLLTFLSTVILMAILGNLLVMVAVCWDRQLRKIKTNYFIVSLAFADLLVSVLVMPFGAIELVQDIWIYGEVFCLVRTSLDVLLTTASIFHLCCISLDRYYAICCQPLVYRNKMTPLRIALMLGGCWVIPTFISFLPIMQGWNNIGIIDLIEKRKFNQNSNSTYCVFMVNKPYAITCSVVAFYIPFLLMVLAYYRIYVTAKEHAHQIQMLQRAGASSESRPQSADQHSTHRMRTETKAAKTLCIIMGCFCLCWAPFFVTNIVDPFIDYTVPGQVWTAFLWLGYINSGLNPFLYAFLNKSFRRAFLIILCCDDERYRRPSILGQTVPCSTTTINGSTHVLRTDFLFDRDILARYWTKPARAGPFSGTLSIRCLTARKPVLGDAVECGGQWESQCHPPATSPLVAAQPSDT

SEQ ID NO: 7903 - protein, 741 aa, Homo sapiens
MDIEDEENMSSSSTDVKENRNLDNVSPKDGSTPGPGEGSQLSNGGGGGPGRKRPLEEGSNGHSKYRLKKRRKTPGPVLPKNALMQLNEIKPGLQYTLLSQTGPVHAPLFVMSVEVNGQVFEGSGPTKKKAKLHAAEKALRSFVQFPNASEAHLAMGRTLSVNTDFTSDQADFPDTLFNGFETPDKAEPPFYVGSNGDDSFSSSGDLSLSASPVPASLAQPPLPVLPPFPPPSGKNPVMILNELRPGLKYDFLSESGESHAKSFVMSVVVDGQFFEGSGRNKKLAKARAAQSALAAIFNLHLDQTPSRQPIPSEGLQLHLPQVLADAVSRLVLGKFGDLTDNFSSPHARRKVLAGVVMTTGTDVKDAKVISVSTGTKCINGEYMSDRGLALNDCHAEIISRRSLLRFLYTQLELYLNNKDDQKRSIFQKSERGGFRLKENVQFHLYISTSPCGDARIFSPHEPILEGSRSYTQAGVQWCNHGSLQPRPPGLLSDPSTSTFQGAGTTEPADRHPNRKARGQLRTKIESGEGTIPVRSNASIQTWDGVLQGERLLTMSCSDKIARWNVVGIQGSLLSIFVEPIYFSSIILGSLYHGDHLSRAMYQRISNIEDLPPLYTLNKPLLSGISNAEARQPGKAPNFSVNWTVGDSAIEVINATTGKDELGRASRLCKHALYCRWMRVHGKVPSHLLRSKITKPNVYHESKLAAKEYQAAKARLFTAFIKAGLGAWVEKPTEQDQFSLTP

SEQ ID NO: 7904 - protein, 807 aa, Homo sapiens
MDSGGGSLGLHTPDSRMAHTMIMQDFVAGMAGTAHIDGDHIVVSVPEAVLVSDVVTDDGITLDHGLAAEVVHGPDIITETDVVTEGVIVPEAVLEADVAIEEDLEEDDGDHILTSELITETVRVPEQVFVADLVTGPNGHLEHVVQDCVSGVDSPTMVSEEVLVTNSDTETVIQAAGGVPGSTVTIKTEDDDDDDVKSTSEDYLMISLDDVGEKLEHMGNTPLKIGSDGSQEDAKEDGFGSEVIKVYIFKAEAEDDVEIGGTEIVTESEYTSGHSVAGVLDQSRMQREKMVYMAVKDSSQEEDDISCAEIADEVYMEVIVGEEEGTSLPEIQLEDSDVNKTVVPVVWAAAYGDERRVSRRYEDCQASGNTLDSALESRSSTAAQYLQICDGINTNKVLKQKAKKRRRGETRQWQTAVIIGPDGQPLTVYPCHICTKKFKSRGFLKRHMKNHPDHLMRKKYQCTDCDFTTNKKVSFHNHLESHKLINKVDKTHEFTEYTRRYREASPLSSNKLILRDKEPKMHKCKYCDYETAEQGLLNRHLLAVHSKNFPHVCVECGKGFRHPSELKKHMRTHTGEKPYQCQYCIFRCADQSNLKTHIKSKHGNNLPYKCEHCPQAFGDERELQRHLDLFQGHKTHQCPHCDHKSTNSSDLKRHIISVHTKDFPHKCEVCDKGFHRPSELKKHSDIHKGRKIHQCRHCDFKTSDPFILSGHILSVHTKDQPLKCKRCKRGFRQQNELKKHMKTHTGRKIYQCEYCEYSTTDASGFKRHVISIHTKDYPHRCEFCKKGFRRPSEKNQHIMRHHKEALM

SEQ ID NO: 7905 - protein, 616 aa, Homo sapiens
MDVMLENYCHLISVGCHMTKPDVILKLERGEEPWTSFAGHTCLEENWKAEDFLVKFKEHQEKYSRSVVSINHKKLVKEKSKIYEKTFTLGKNPVNSKNLPPEYDTHGRILKNVSELIISNLNPARKRLSEYNGYGKSLLSTKQETTHPEVKSHNQSARAFSHNEVLMQYQKTETPAQSFGYNDCEKSFLQRGGLITHSRPYKGENPSVYNKKRRATNIEKKHTCNECGKSFCRKSVLILHQGIHSEEKPYQCHQCGNAFRRKSYLIDHQRTHTGEKPFVCNECGKSFRLKTALTDHQRTHTGEKSYECLQCRNAFRLKSHLIRHQRTHTGEKPYECNDCGKSFRQKTTLSLHQRIHTGEKPYICKECGKSFHQKANLTVHQRTHTGEKPYICNECGKSFSQKTTLALHEKTHNEEKPYICSECGKSFRQKTTLVAHQRTHTGEKSYECPHCGKAFRMKSYLIDHHRTHTGEKPYECNECGKSFSQKTNLNLHQRIHTGEKPYVCNECGKSFRQKATLTVHQKIHTGQKSYECPQCGKAFSRKSYLIHHQRTHTGEKPYKCSECGKCFRQKTNLIVHQRTHTGEKPYVCNECGKSFSYKRNLIVHQRTHKGENIEMQ

SEQ ID NO: 7906 - protein, 704 aa, Homo sapiens
MAEAAEPEGVAPGPQGPPEVPAPLAERPGEPGAAGGEAEGPEGSEGAEEAPRGAAAVKEAGGGGPDRGPEAEARGTRGAHGETEAEEGAPEGAEVPQGGEETSGAQQVEGASPGRGAQGEPRGEAQREPEDSAAPERQEEAEQRPEVPEGSASGEAGDSVDAEGPLGDNIEAEGPAGDSVEAEGRVGDSVDAEGPAGDSVDAEGPLGDNIQAEGPAGDSVDAEGRVGDSVDAEGPAGDSVDAEGRVGDSVEAGDPAGDGVEAGVPAGDSVEAEGPAGDSMDAEGPAGRARRVSGEPQQSGDGSLSPQAEAIEVAAGESAGRSPGELAWDAAEEAEVPGVKGSEEAAPGDARADAGEDRVGDGPQQEPGEDEERRERSPEGPREEEAAGGEEESPDSSPHGEASRGAAEPEAQLSNHLAEEGPAEGSGEAARVNGRREDGEASEPRALGQEHDITLFVKVKLTALGCSRIAIKKYLRAGYDGESIGNCPFSQRLFMILWLKGVIFNVTTVDLKRKPADLQNLAPGTNPPFMTFDGEVKTDVNKIEEFLEEKLAPPRYPKLGTQHPESNSAGNDVFAKFSAFIKNTKKDANEIHEKNLLKALRKLDNYLNSPLPDEIDAYSTEDVTVSGRKFLDGDELTLADCNLLPKLHIIKIVAKKYRDFEFPSEMTGIWRYLNNAYARDEFTNTCPADQEIEHAYSDVAKRMK

SEQ ID NO: 7907 - protein, 544 aa, Homo sapiens
MADRGGVGEAAAVGASPASVPGLNPTLGWRERLRAGLAGTGASLWFVAGLGLLYALRIPLRLCENLAAVTVFLNSLTPKFYVALTGTSSLISGLIFIFEWWYFHKHGTSFIEQVSVSHLQPLMGGTESSISEPGSPSRNRENETSRQNLSECKVWRNPLNLFRGAEYRRYTWVTGKEPLTYYDMNLSAQDHQTFFTCDTDFLRPSDTVMQKAWRERNPPARIKAAYQALELNNDCATAYVLLAEEEATTIVDAERLFKQALKAGETIYRQSQQCQHQSPQHEAQLRRDTNVLVYIKRRLAMCARKLGRIREAVKIMRDLMKEFPPLTMLNIHENLLESLLELQAYPDVQAVLAKYDDISLPKSAAICYTAALLKTRTVSEKFSPETASRRGLSTAEINAVEAIHRAVEFNPHVPKYLLEMKSLILPPEHILKRGDSEAIAYAFFHLQHWKRIEGALNLLQCTWEGTFHHVSVYPKKELPLFIHFTAGFCSSTAMIAILTHQFPEIMGIFAKAVLGLWCPQPWASSGFEENTQDLKSEDLGLSSG

SEQ ID NO: 7908 - protein, 314 aa, Homo sapiens
MKRQNQSCVVEFILLGFSNFPELQVQLFGVFLVIYVVTLMGNAIITVIISLNQSLHVPMYLFLLNLSVVEVSFSAVITPEMLVVLSTEKTMISFVGCFAQMYFILLFGGTECFLLGAMAYDRFAAICHPLNYPVIMNRGVFMKLVIFSWISGIMVATVQTTWVFSFPFCGPNEINHLFCETPPVLELVCADTFLFEIYAFTGTILIVMVPFLLILLSYIRVLFAILKMPSTTGRQKAFSTCASHLTSVTLFYGTANMTYLQPKSGYSPETKKLISLAYTLLTPLLNPLIYSLRNSEMKRTLIKLWRRKVILHTF

SEQ ID NO: 7909 - protein, 2261 aa, Homo sapiens
MDEEEDGAGAEESGQPRSFMRLNDLSGAGGRPGPGSAEKDPGSADSEAEGLPYPALAPVVFFYLSQDSRPRSWCLRTVCNPWFERISMLVILLNCVTLGMFRPCEDIACDSQRCRILQAFDDFIFAFFAVEMVVKMVALGIFGKKCYLGDTWNRLDFFIVIAGMLEYSLDLQNVSFSAVRTVRVLRPLRAINRVPSMRILVTLLLDTLPMLGNVLLLCFFVFFIFGIVGVQLWAGLLRNRCFLPENFSLPLSVDLERYYQTENEDESPFICSQPRENGMRSCRSVPTLRGDGGGGPPCGLDYEAYNSSSNTTCVNWNQYYTNCSAGEHNPFKGAINFDNIGYAWIAIFQVITLEGWVDIMYFVMDAHSFYNFIYFILLIIVGSFFMINLCLVVIATQFSETKQRESQLMREQRVRFLSNASTLASFSEPGSCYEELLKYLVYILRKAARRLAQVSRAAGVRVGLLSSPAPLGGQETQPSSSCSRSHRRLSVHHLVHHHHHHHHHYHLGNGTLRAPRASPEIQDRDANGSRRLMLPPPSTPALSGAPPGGAESVHSFYHADCHLEPVRCQAPPPRSPSEASGRTVGSGKVYPTVHTSPPPETLKEKALVEVAASSGPPTLTSLNIPPGPYSSMHKLLETQSTGACQSSCKISSPCLKADSGACGPDSCPYCARAGAGEVELADREMPDSDSEAVYEFTQDAQHSDLRDPHSRRQRSLGPDAEPSSVLAFWRLICDTFRKIVDSKYFGRGIMIAILVNTLSMGIEYHEQPEELTNALEISNIVFTSLFALEMLLKLLVYGPFGYIKNPYNIFDGVIVVISVWEIVGQQGGGLSVLRTFRLMRVLKLVRFLPALQRQLVVLMKTMDNVATFCMLLMLFIFIFSILGMHLFGCKFASERDGDTLPDRKNFDSLLWAIVTVFQILTQEDWNKVLYNGMASTSSWAALYFIALMTFGNYVLFNLLVAILVEGFQAEGDANKSESEPDFFSPSLDGDGDRKKCLALVSLGEHPELRKSLLPPLIIHTAATPMSLPKSTSTGLGEALGPASRRTSSSGSAEPGAAHEMKSPPSARSSPHSPWSAASSWTSRRSSRNSLGRAPSLKRRSPSGERRSLLSGEGQESQDEEESSEEERASPAGSDHRHRGSLEREAKSSFDLPDTLQVPGLHRTASGRGSASEHQDCNGKSASGRLARALRPDDPPLDGDDADDEGNLSKGERVRAWIRARLPACCLERDSWSAYIFPPQSRFRLLCHRIITHKMFDHVVLVIIFLNCITIAMERPKIDPHSAERIFLTLSNYIFTAVFLAEMTVKVVALGWCFGEQAYLRSSWNVLDGLLVLISVIDILVSMVSDSGTKILGMLRVLRLLRTLRPLRVISRAQGLKLVVETLMSSLKPIGNIVVICCAFFIIFGILGVQLFKGKFFVCQGEDTRNITNKSDCAEASYRWVRHKYNFDNLGQALMSLFVLASKDGWVDIMYDGLDAVGVDQQPIMNHNPWMLLYFISFLLIVAFFVLNMFVGVVVENFHKCRQHQEEEEARRREEKRLRRLEKKRRNLMLDDVIASGSSASAASEAQCKPYYSDYSRFRLLVHHLCTSHYLDLFITGVIGLNVVTMAMEHYQQPQILDEALKICNYIFTVIFVLESVFKLVAFGFRRFFQDRWNQLDLAIVLLSIMGITLEEIEVNASLPINPTIIRIMRVLRIARVLKLLKMAVGMRALLDTVMQALPQVGNLGLLFMLLFFIFAALGVELFGDLECDETHPCEGLGRHATFRNFGMAFLTLFRVSTGDNWNGIMKDTLRDCDQESTCYNTVISPIYFVSFVLTAQFVLVNVVIAVLMKHLEESNKEAKEEAELEAELELEMKTLSPQPHSPLGSPFLWPGVEGPDSPDSPKPGALHPAAHARSASHFSLEHPTMQPHPTELPGPDLLTVRKSGVSRTHSLPNDSYMCRHGSTAEGPLGHRGWGLPKAQSGSVLSVHSQPADTSYILQLPKDAPHLLQPHSAPTWGTIPKLPPPGRSPLAQRPLRRQAAIRTDSLDVQGLGSREDLLAEVSGPSPPLARAYSFWGQSSTQAQQHSRSHSKISKHMTPPAPCPGPEPNWGKGPPETRSSLELDTELSWISGDLLPPGGQEEPPSPRDLKKCYSVEAQSCQRRPTSWLDEQRRHSIAVSCLDSGSQPHLGTDPSNLGGQPLGGPGSRPKKKLSPPSITIDPPESQGPRTPPSPGICLRRRAPSSDSKDPLASGPPDSMAASPSPKKDVLSLSGLSSDPADLDP

SEQ ID NO: 7910 - protein, 2022 aa, Homo sapiens
MKEQPVLERLQSQKSWIKGVFDKRECSTIIPSSKNPHRCTPVCQVCQNLIRCYCGRLIGDHAGIDYSWTISAAKGKESEQWSVEKHTTKSPTDTFGTINFQDGEHTHHAKYIRTSYDTKLDHLLHLMLKEWKMELPKLVISVHGGIQNFTMPSKFKEIFSQGLVKAAETTGAWIITEGINTGVSKHVGDALKSHSSHSLRKIWTVGIPPWGVIENQRDLIGKDVVCLYQTLDNPLSKLTTLNSMHSHFILSDDGTVGKYGNEMKLRRNLEKYLSLQKIHCRSRQGVPVVGLVVEGGPNVILSVWETVKDKDPVVVCEGTGRAADLLAFTHKHLADEGMLRPQVKEEIICMIQNTFNFSLKQSKHLFQILMECMVHRDCITIFDADSEEQQDLDLAILTALLKGTNLSASEQLNLAMAWDRVDIAKKHILIYEQHWKPDALEQAMSDALVMDRVDFVKLLIEYGVNLHRFLTIPRLEELYNTKQGPTNTLLHHLVQDVKQHTLLSGYRITLIDIGLVVEYLIGRAYRSNYTRKHFRALYNNLYRKYKHQRHSSGNRNESAESTLHSQFIRTAQPYKFKEKSIVLHKSRKKSKEQNVSDDPESTGFLYPYNDLLVWAVLMKRQKMAMFFWQHGEEATVKAVIACILYRAMAHEAKESHMVDDASEELKNYSKQFGQLALDLLEKAFKQNERMAMTLLTYELRNWSNSTCLKLAVSGGLRPFVSHTCTQMLLTDMWMGRLKMRKNSWLKIIISIILPPTILTLEFKSKAEMSHVPQSQDFQFMWYYSDQNASSSKESASVKEYDLERGHDEKLDENQHFGLESGHQHLPWTRKVYEFYSAPIVKFWFYTMAYLAFLMLFTYTVLVEMQPQPSVQEWLVSIYIFTNAIEVVREICISEPGKFTQKVKVWISEYWNLTETVAIGLFSAGFVLRWGDPPFHTAGRLIYCIDIIFWFSRLLDFFAVNQHAGPYVTMIAKMTANMFYIVIIMAIVLLSFGVARKAILSPKEPPSWSLARDIVFEPYWMIYGEVYAGEIDVCSSQPSCPPGSFLTPFLQAVYLFVQYIIMVNLLIAFFNNVYLDMESISNNLWKYNRYRYIMTYHEKPWLPPPLILLSHVGLLLRRLCCHRAPHDQEEGDVGLKLYLSKEDLKKLHDFEEQCVEKYFHEKMEDVNCSCEERIRVTSERVTEMYFQLKEMNEKVSFIKDSLLSLDSQVGHLQDLSALTVDTLKVLSAVDTLQEDEALLAKRKHSTCKKLPHSWSNVICAEVLGSMEIAGEKKYQYYSMPSSLLRSLAGGRHPPRVQRGALLEITNSKREATNVRNDQERQETQSSIVVSGVSPNRQAHSKYGQFLLVPSNLKRVPFSAETVLPLSRPSVPDVLATEQDIQTEVLVHLTGQTPVVSDWASVDEPKEKHEPIAHLLDGQDKAEQVLPTLSCTPEPMTMSSPLSQAKIMQTGGGYVNWAFSEGDETGVFSIKKKWQTCLPSTCDSDSSRSEQHQKQAQDSSLSDNSTRSAQSSECSEVGPWLQPNTSFWINPLRRYRPFARSHSFRFHKEEKLMKICKIKNLSGSSEIGQGAWVKAKMLTKDRRLSKKKKNTQGLQVPIITVNACSQSDQLNPEPGENSISEEEYSKNWFTVSKFSHTGVEPYIHQKMKTKEIGQCAIQISDYLKQSQEDLSKNSLWNSRSTNLNRNSLLKSSIGVDKISASLKSPQEPHHHYSAIERNNLMRLSQTIPFTPVQLFAGEEITVYRLEESSPLNLDKSMSSWSQRGRAAMIQVLSREEMDGGLRKAMRVVSTWSEDDILKPGQVFIVKSFLPEVVRTWHKIFQESTVLHLCLREIQQQRAAQKLIYTFNQVKPQTIPYTPRFLEVFLIYCHSANQWLTIEKYMTGEFRKYNNNNGDEITPTNTLEELMLAFSHWTYEYTRGELLVLDLQGVGENLTDPSVIKPEVKQSRGMVFGPANLGEDAIRNFIAKHHCNSCCRKLKLPDLKRNDYSPERINSTFGLEIKIESAEEPPARETGRNSPEDDMQL

SEQ ID NO: 7911 - protein, 902 aa, Homo sapiens
MNISGSSCGSPNSADTSSDFKDLWTKLKECHDREVQGLQVKVTKLKQERILDAQRLEEFFTKNQQLREQQKVLHETIKVLEDRLRAGLCDRCAVTEEHMRKKQQEFENIRQQNLKLITELMNERNTLQEENKKLSEQLQQKIENDQQHQAAELECEEDVIPDSPITAFSFSGVNRLRRKENPHVRYIEQTHTKLEHSVCANEMRKVSKSSTHPQHNPNENEILVADTYDQSQSPMAKAHGTSSYTPDKSSFNLATVVAETLGLGVQEESETQGPMSPLGDELYHCLEGNHKKQPFEESTRNTEDSLRFSDSTSKTPPQEELPTRVSSPVFGATSSIKSGLDLNTSLSPSLLQPGKKKHLKTLPFSNTCISRLEKTRSKSEDSALFTHHSLGSEVNKIIIQSSNKQILINKNISESLGEQNRTEYGKDSNTDKHLEPLKSLGGRTSKRKKTEEESEHEVSCPQASFDKENAFPFPMDNQFSMNGDCVMDKPLDLSDRFSAIQRQEKSQGSETSKNKFRQVTLYEALKTIPKGFSSSRKASDGNCTLPKDSPGEPCSQECIILQPLNKCSPDNKPSLQIKEENAVFKIPLRPRESLETENVLDDIKSAGSHEPIKIQTRSDHGGCELASVLQLNPCRTGKIKSLQNNQDVSFENIQWSIDPGADLSQYKMDVTVIDTKDGSQSKLGGETVDMDCTLVSETVLLKMKKQEQKGEKSSMLFYIDEERKMNDSLEDMFDRTTHEEYESCLADSFSQAADEEEELSTATKKLHTHGDKQDKVKQKAFVEPYFKGDERETSLQNFPHIEVVRKKEERRKLLGHTCKECEIYYADMPAEEREKKLASCSRHRFRYIPPNTPENFWEVGFPSTQTCMERGYIKEDLDPCPRPKRRQPYNAIFSPKGKEQKT

SEQ ID NO: 7912 - protein, 1119 aa, Homo sapiens
MMTSVSSDHCRGAREKPQISAAQSTQPQKQVVQATAEQMRLAQVIFDKNDSDFEAKVKQLMEVTGKNQDECIVALHDCNGDVNKAINILLEGNSDTTSWETVGCKKKNFAKENSENKENREKKSEKESSRGRGNNNRKGRGGNRGREFRGEENGIDCNQVDKPSDRGKRARGRGFGRGRGRGAGRFSTQGMGTFNPADYSDSTSTDVCGTKLVVWEAAQNGADEGTELASNTHNIAQDLSNKSSYGLKGAWKNSVEEWTTEDWTEDLSETKVFTASSAPAENHILPGQSIDLVALLQKPVPHSQASEANSFETSQQQGFGQALVFTNSQHNNQMAPGTGSSTAVNSCSPQSLSSVLGSGFGELAPPKMANITSSQILDQLKAPSLGQFTTTPSTQQNSTSHPTTTTSWDLKPPTSQSSVLSHLDFKSQPEPSPVLSQLSQRQQHQSQAVTVPPPGLESFPSQAKLRESTPGDSPSTVNKLLQLPSTTIENISVSVHQPQPKHIKLAKRRIPPASKIPASAVEMPGSADVTGLNVQFGALEFGSEPSLSEFGSAPSSENSNQIPISLYSKSLSEPLNTSLSMTSAVQNSTYTTSVITSCSLTSSSLNSASPVAMSSSYDQSSVHNRIPYQSPVSSSESAPGTIMNGHGGGRSQQTLDTPKTTGPPSALPSVSSLPSTTSCTALLPSTSQHTGDLTSSPLSQLSSSLSSHQSSLSAHAALSSSTSHTHASVESASSHQSSATFSTAATSVSSSASSGASLSSSMNTANSLCLGGTPASASSSSSRAAPLVTSGKAPPNLPQGVPPLLHNQYLVGPGGLLPAYPIYGYDELQMLQSRLPVDYYGIPFAAPTALASRDGSLANNPYPGDVTKFGRGDSASPAPATTPAQPQQSQSQTHHTAQQPFVNPALPPGYSYTGLPYYTGMPSAFQYGPTMFVPPASAKQHGVNLSTPTPPFQQASGYGQHGYSTGYDDLTQGTAAGDYSKGGYAGSSQAPNKSAGSGPGKGVSVSSSTTGLPDMTGSVYNKTQTFDKQGFHAGTPPPFSLPSVLGSTGPLASGAAPGYAPPPFLHILPAHQQPHSQLLHHHLPQDAQSGSGQRSQPSSLQPKSQASKPAYGNSPYWTN

SEQ ID NO: 7913 - protein, 929 aa, Homo sapiens
MESMLNKLKSTVTKVTADVTSAVMGNPVTREFDVGRHIASGGNGLAWKIFNGTKKSTKQEVAVFVFDKKLIDKYQKFEKDQIIDSLKRGVQQLTRLRHPRLLTVQHPLEESRDCLAFCTEPVFASLANVLGNWENLPSPISPDIKDYKLYDVETKYGLLQVSEGLSFLHSSVKMVHGNITPENIILNKSGAWKIMGFDFCVSSTNPSEQEPKFPCKEWDPNLPSLCLPNPEYLAPEYILSVSCETASDMYSLGTVMYAVFNKGKPIFEVNKQDIYKSFSRQLDQLSRLGSSSLTNIPEEVREHVKLLLNVTPTVRPDADQMTKIPFFDDVGAVTLQYFDTLFQRDNLQKSQFFKGLPKVLPKLPKRVIVQRILPCLTSEFVNPDMVPFVLPNVLLIAEECTKEEYVKLILPELGPVFKQQEPIQILLIFLQKMDLLLTKTPPDEIKNSVLPMVYRALEAPSIQIQELCLNIIPTFANLIDYPSMKNALIPRIKNACLQTSSLAVRVNSLVCLGKILEYLDKWFVLDDILPFLQQIPSKEPAVLMGILGIYKCTFTHKKLGITKEQLAGKVLPHLIPLSIENNLNLNQFNSFISVIKEMLNRLESEHKTKLEQLHIMQEQQKSLDIGNQMNVSEEMKVTNIGNQQIDKVFNNIGADLLTGSESENKEDGLQNKHKRASLTLEEKQKLAKEQEQAQKLKSQQPLKPQVHTPVATVKQTKDLTDTLMDNMSSLTSLSVSTPKSSASSTFTSVPSMGIGMMFSTPTDNTKRNLTNGLNANMGFQTSGFNMPVNTNQNFYSSPSTVGVTKMTLGTPPTLPNFNALSVPPAGAKQTQQRPTDMSALNNLFGPQKPKVSMNQLSQQKPNQWLNQFVPPQGSPTMGSSVMGTQMNVIGQSAFGMQGNPFFNPQNFAQPPTTMTNSSSASNDLKDLFG

SEQ ID NO: 7914 - protein, 1663 aa, Homo sapiens
MMDLVLEEDVTVPGTLSGCSGLVPSVPDDLDGINPNAGLGNGLLPNVSEETVSPTRARNMKDFENQITELKKENFNLKLRIYFLEERMQQEFHGPTEHIYKTNIELKVEVESLKRELQEREQLLIKASKAVESLAEAGGSEIQRVKEDARKKVQQVEDLLTKRILLLEKDVTAAQAELEKAFAGTETEKALRLRLESKLSEMKKMHEGDLAMALVLDEKDRLIEELKLSLKSKEALIQCLKEEKSQMACPDENVSSGELRGLCAAPREEKERETEAAQMEHQKERNSFEERIQALEEDLREKEREIATEKKNSLKRDKAIQGLTMALKSKEKKVEELNSEIEKLSAAFAKAREALQKAQTQEFQGSEDYETALSGKEALSAALRSQNLTKSTENHRLRRSIKKITQELSDLQQERERLEKDLEEAHREKSKGDCTIRDLRNEVEKLRNEVNEREKAMENRYKSLLSESNKKLHNQEQVIKHLTESTNQKDVLLQKFNEKDLEVIQQNCYLMAAEDLELRSEGLITEKCSSQQPPGSKTIFSKEKKQSSDYEELIQVLKKEQDIYTHLVKSLQESDSINNLQAELNKIFALRKQLEQDVLSYQNLRKTLEEQISEIRRREESFSLYSDQTSYLSICLEENNRFQVEHFSQEELKKKVSDLIQLVKELYTDNQHLKKTIFDLSCMGFQGNGFPDRLASTEQTEEAKKSRLPILIKPSRSLGNMYRLPATQEVVTQLQSQILELQGELKEFKTCNKQLHQKLILAEAVMEGRPTPDKTLLNAQPPVGAAYQDSPGEQKGIKTTSSVWRDKEMDSDQQRSYEIDSEICPPDDLASLPSCKENPEDVLSPTSVATYLSSKSQPSAKVSVMGTDQSESINTSNETEYLKQKIHDLETELEGYQNFIFQLQKHSQCSEAIITVLCGTEGAQDGLSKPKNGSDGEEMTFSSLHQVRYVKHVKILGPLAPEMIDSRVLENLKQQLEEQEYKLQKEQNLNMQLFSEIHNLQNKFRDLSPPRYDSLVQSQARELSLQRQQIKDGHGICVISRQHMNTMIKAFEELLQASDVDYCVAEGFQEQLNQCAELLEKLEKLFLNGKSVGVEMNTQNELMERIEEDNLTYQHLLPESPEPSASHALSDYETSEKSFFSRDQKQDNETEKTSVMVNSFSQDLLMEHIQEIRTLRKRLEESIKTNEKLRKQLERQGSEFVQGSTSIFASGSELHSSLTSEIHFLRKQNQALNAMLIKGSRDKQKENDKLRESLSRKTVSLEHLQREYASVKEENERLQKEGSEKERHNQQLIQEVRCSGQELSRVQEEVKLRQQLLSQNDKLLQSLRVELKAYEKLDEEHRRLREASGEGWKGQDPFRDLHSLLMEIQALRLQLERSIETSSTLQSRLKEQLARGAEKAQEGALTLAVQAVSIPEVPLQPDKHDGDKYPMESDNSFDLFDSSQAVTPKSVSETPPLSGNDTDSLSCDSGSSATSTPCVSRLVTGHHLWASKNGRHVLGLIEDYEALLKQISQGQRLLAEMDIQTQEAPSSTSQELGTKGPHPAPLSKFVSSVSTAKLTLEEAYRRLKLLWRVSLPEDGQCPLHCEQIGEMKAEVTKLHKKLFEQEKKLQNTMKLLQLSKRQEKVIFDQLVVTHKILRKARGNLELRPGGAHPGTCSPSRPGS

SEQ ID NO: 7915 - protein, 443 aa, Homo sapiens
MAAAVPDEAVARDVQRLLVQFQDEGGQLLGSPFDVPVDITPDRLQLVCNALLAQEDPLPLAFFVHDAEIVSSLGKTLESQAVETEKVLDIIYQPQAIFRVRAVTRCTSSLEGHSEAVISVAFSPTGKYLASGSGDTTILLWDPSTGKQVGRTLAGHSKWITGLSWEPLHANPECRYVASSSKDGSVRIWDTTAGRCERILTGHTQSVTCLRWGGDGLLYSASQDRTIKVWRAHDGVLCRTLQGHGHWVNTMALSTDYALRTGAFEPAEASVNPQDLQGSLQELKERALSRYNLVRGQGPERLVSGSDDFTLFLWSPAEDKKPLTRMTGHQALINQVLFSPDSRIVASASFDKSIKLWDGRTGKYLASLRGHVAAVYQIAWSADSRLLVSGSSDSTLKVWDVKAQKLAMDLPGHADEVYAVDWSPDGQRVASGGKDKCLRIWRR

SEQ ID NO: 7916 - protein, 988 aa, Homo sapiens
MGAAAVRWHLCVLLALGTRGRLAGGSGLPGSVDVDECSEGTDDCHIDAICQNTPKSYKCLCKPGYKGEGKQCEDIDECENDYYNGGCVHECINIPGNYRCTCFDGFMLAHDGHNCLDVDECQDNNGGCQQICVNAMGSYECQCHSGFFLSDNQHTCIHRSNEGMNCMNKDHGCAHICRETPKGGVACDCRPGFDLAQNQKDCTLTCNYGNGGCQHSCEDTDTGPTCGCHQKYALHSDGRTCIETCAVNNGGCDRTCKDTATGVRCSCPVGFTLQPDGKTCKDINECLVNNGGCDHFCRNTVGSFECGCRKGYKLLTDERTCQDIDECSFERTCDHICINSPGSFQCLCHRGYILYGTTHCGDVDECSMSNGSCDQGCVNTKGSYECVCPPGRRLHWNGKDCVETGKCLSRAKTSPRAQLSCSKAGGVESCFLSCPAHTLFVPDSENSYVLSCGVPGPQGKALQKRNGTSSGLGPSCSDAPTTPIKQKARFKIRDAKCHLRPHSQARAKETARQPLLDHCHVTFVTLKCDSSKKRRRGRKSPSKEVSHITAEFEIETKMEEASDTCEADCLRKRAEQSLQAAIKTLRKSIGRQQFYVQVSGTEYEVAQRPAKALEGQGACGAGQVLQDSKCVACGPGTHFGGELGQCVSCMPGTYQDMEGQLSCTPCPSSDGLGLPGARNVSECGGQCSPGFFSADGFKPCQACPVGTYQPEPGRTGCFPCGGGLLTKHEGTTSFQDCEAKVHCSPGHHYNTTTHRCIRCPVGTYQPEFGQNHCITCPGNTSTDFDGSTNVTHCKNQHCGGELGDYTGYIESPNYPGDYPANAECVWHIAPPPKRRILIVVPEIFLPIEDECGDVLVMRKSASPTSITTYETCQTYERPIAFTSRSRKLWIQFKSNEGNSGKGFQVPYVTYDEDYQQLIEDIVRDGRLYASENHQEILKDKKLIKALFDVLAHPQNYFKYTAQESKEMFPRSFIKLLRSKVSRFLRPYK

SEQ ID NO: 7917 - protein, 2542 aa, Homo sapiens
MLTDSGGGGTSFEEDLDSVAPRSAPAGASEPPPPGGVGLGIRTVRLFGEAGPASGVGSSGGGGSGSGTGGGDAALDFKLAAAVLRTGGGGGASGSDEDEVSEVESFILDQEDLDNPVLKTTSEIFLSSTAEGADLRTVDPETQARLEALLEAAGIGKLSTADGKAFADPEVLRRLTSSVSCALDEAAAALTRMKAENSHNAGQVDTRSLAEACSDGDVNAVRKLLDEGRSVNEHTEEGESLLCLACSAGYYELAQVLLAMHANVEDRGNKGDITPLMAASSGGYLDIVKLLLLHDADVNSQSATGNTALTYACAGGFVDIVKVLLNEGANIEDHNENGHTPLMEAASAGHVEVARVLLDHGAGINTHSNEFKESALTLACYKGHLDMVRFLLEAGADQEHKTDEMHTALMEACMDGHVEVARLLLDSGAQVNMPADSFESPLTLAACGGHVELAALLIERGANLEEVNDEGYTPLMEAAREGHEEMVALLLAQGANINAQTEETQETALTLACCGGFSEVADFLIKAGADIELGCSTPLMEASQEGHLELVKYLLASGANVHATTATGDTALTYACENGHTDVADVLLQAGADLEHESEGGRTPLMKAARAGHLCTVQFLISKGANVNRATANNDHTVVSLACAGGHLAVVELLLAHGADPTHRLKDGSTMLIEAAKGGHTNVVSYLLDYPNNVLSVPTTDVSQLPPPSQDQSQVPRVPTHTLAMVVPPQEPDRTSQENSPALLGVQKGTSKQKSSSLQVADQDLLPSFHPYQPLECIVEETEGKLNELGQRISAIEKAQLKSLELIQGEPLNKDKIEELKKNREEQVQKKKKILKELQKVERQLQMKTQQQFTKEYLETKGQKDTVSLHQQCSHRGVFPEGEGDGSLPEDHFSELPQVDTILFKDNDVDDEQQSPPSAEQIDFVPVQPLSSPQCNFSSDLGSNGTNSLELQKVSGNQQIVGQPQIAITGHDQGLLVQEPDGLMVATPAQTLTDTLDDLIAAVSTRVPTGSNSSSQTTECLTPESCSQTTSNVASQSMPPVYPSVDIDAHTESNHDTALTLACAGGHEELVSVLIARDAKIEHRDKKGFTPLILAATAGHVGVVEILLDKGGDIEAQSERTKDTPLSLACSGGRQEVVDLLLARGANKEHRNVSDYTPLSLAASGGYVNIIKILLNAGAEINSRTGSKLGISPLMLAAMNGHVPAVKLLLDMGSDINAQIETNRNTALTLACFQGRAEVVSLLLDRKANVEHRAKTGLTPLMEAASGGYAEVGRVLLDKGADVNAPPVPSSRDTALTIAADKGHYKFCELLIHRGAHIDVRNKKGNTPLWLASNGGHFDVVQLLVQAGADVDAADNRKITPLMSAFRKGHVKVVQYLVKEVNQFPSDIECMRYIATITDKELLKKCHQCVETIVKAKDQQAAEANKNASILLKELDLEKSREESRKQALAAKREKRKEKRKKKKEEQKRKQEEDEENKPKENSELPEDEDEEENDEDVEQEVPIEPPSATTTTTIGISATSATFTNVFGKKRANVVTTPSTNRKNKKNKTKETPPTAHLILPEQHMSLAQQKADKNKINGEPRGGGAGGNSDSDNLDSTDCNSESSSGGKSQELNFVMDVNSSKYPSLLLHSQEEKTSTATSKTQTRLEGEVTPNSLSTSYKTVSLPLSSPNIKLNLTSPKRGQKREEGWKEVVRRSKKLSVPASVVSRIMGRGGCNITAIQDVTGAHIDVDKQKDKNGERMITIRGGTESTRYAVQLINALIQDPAKELEDLIPKNHIRTPASTKSIHANFSSGVGTTAASSKNAFPLGAPTLVTSQATTLSTFQPANKLNKNVPTNVRSSFPVSLPLAYPHPHFALLAAQTMQQIRHPRLPMAQFGGTFSPSPNTWGPFPVRPVNPGNTNSSPKHNNTSRLPNQNGTVLPSESAGLATASCPITVSSVVAASQQLCVTNTRTPSSVRKQLFACVPKTSPPATVISSVTSTCSSLPSVSSAPITSGQAPTTFLPASTSQAQLSSQKMESFSAVPPTKEKVSTQDQPMANLCTPSSTANSCSSSASNTPGAPETHPSSSPTPTSSNTQEEAQPSSVSDLSPMSMPFASNSEPAPLTLTSPRMVAADNQDTSNLPQLAVPAPRVSHRMQPRGSFYSMVPNATIHQDPQSIFVTNPVTLTPPQGPPAAVQLSSAVNIMNGSQMHINPANKSLPPTFGPATLFNHFSSLFDSSQVPANQGWGDGPLSSRVATDASFTVQSAFLGNSVLGHLENMHPDNSKAPGFRPPSQRVSTSPVGLPSIDPSGSSPSSSSAPLASFSGIPGTRVFLQGPAPVGTPSFNRQHFSPHPWTSASNSSTSAPPTLGQPKGVSASQDRKIPPPIGTERLARIRQGGSVAQAPAGTSFVAPVGHSGIWSFGVNAVSEGLSGWSQSVMGNHPMHQQLSDPSTFSQHQPMERDDSGMVAPSNIFHQPMASGFVDFSKGLPISMYGGTIIPSHPQLADVPGGPLFNGLHNPDPAWNPMIKVIQNSTECTDAQQIWPGTWAPHIGNMHLKYVN

SEQ ID NO: 7918 - protein, 787 aa, Homo sapiens
MSVQSSSGSLEGPPSWSQLSTSPTPGSAAAARSLLNHTPPSGRPREGAMDELHSLDPRRQELLEARFTGVASGSTGSTGSCSVGAKASTNNESSNHSFGSLGSLSDKESETPEKKQSESSRGRKRKAENQNESSQGFPNLPVFQSLAYWEMGRTAGGKSIGGRGHKISDYFEYQGGNGSSPVRGIPPAIRSPQNSHSHSTPSSSVRPNSPSPTALAFGDHPIVQPKQLSFKIIQTDLTMLKLAALESNKIQDLEKKEGRIDDLLRANCDLRRQIDEQQKLLEKYKERLNKCISMSKKLLIEKSTQEKLSSREKSMQDRLRLGHFTTVRHGASFTEQWTDGFAFQNLVKQQEWVNQQREDIERQRKLLAKRKPPTANNSQAPSTNSEPKQRKNKAVNGAENDPFVRPNLPQLLTLAEYHEQEEIFKLRLGHLKKEEAEIQAELERLERVRNLHIRELKRINNEDNSQFKDHPTLNERYLLLHLLGRGGFSEVYKAFDLYEQRYAAVKIHQLNKSWRDEKKENYHKHACREYRIHKELDHPRIVKLYDYFSLDTDTFCTVLEYCEGNDLDFYLKQHKLMSEKEARSIVMQIVNALRYLNEIKPPIIHYDLKPGNILLVDGTACGEIKITDFGLSKIMDDDSYGVDGMDLTSQGAGTYWYLPPECFVVGKEPPKISNKVDVWSVGVIFFQCLYGRKPFGHNQSQQDILQENTILKATEVQFPVKPVVSSEAKAFIRRCLAYRKEDRFDVHQLANDPYLLPHMRRSNSSGNLHMAGLTASPTPPSSSIITY

SEQ ID NO: 7919 - protein, 768 aa, Homo sapiens
MKLLWQAKMSSIQDWGEEVEEGAVYHVTLKRVQIQQAANKGARWLGVEGDQLPPGHTVSQYETCKIRTIKAGTLEKLVENLLTAFGDNDFTYISIFLSTYRGFASTKEVLELLLDRYGNLTSPNCEEDGSQSSSESKMVIRNAIASILRAWLDQCAEDFREPPHFPCLQKLLDYLTRMMPGSDPERRAQNLLEQFQKQEVETDNGLPNTISFSLEEEEELEGGESAEFTCFSEDLVAEQLTYMDAQLFKKVVPHHCLGCIWSRRDKKENKHLAPTIRATISQFNTLTKCVVSTILGGKELKTQQRAKIIEKWINIAHECRLLKNFSSLRAIVSALQSNSIYRLKKTWAAVPRDRMLMFEELSDIFSDHNNHLTSRELLMKEGTSKFANLDSSVKENQKRTQRRLQLQKDMGVMQGTVPYLGTFLTDLTMLDTALQDYIEGGLINFEKRRREFEVIAQIKLLQSACNSYCMTPDQKFIQWFQRQQLLTEEESYALSCEIEAAADASTTSPKPRKSMVKRLSLLFLGSDMITSPTPTKEQPKSTASGSSGESMDSVSVSSCESNHSEAEEGSITPMDTPDEPQKKLSESSSSCSSIHSMDTNSSGMSSLINPLSSPPSCNNNPKIHKRSVSVTSITSTVLPPVYNQQNEDTCIIRISVEDNNGNMYKSIMLTSQDKTPAVIQRAMLKHNLDSDPAEEYELVQVISEDKELVIPDSANVFYAMNSQVNFDFILRKKNSMEEQVKLRSRTSLTLPRTAKRGCWSNRHSKITL

SEQ ID NO: 7920 - protein, 177 aa, Homo sapiens
MIVAEIKNRTKIHKEDGDILASNFSVDTQVAYILSLGVVKEFRKHGIGSLLLESLKDHISTTAQDHCKAIYLHVLTTNNTAINFYENRDFKQHHYLPYYYSIRGVLKDGFTYVLYINGGHPPWTILDYIQHLGSALASLSPCSIPHRVYRQAHSLLCSFLPWSGISSKSGIEYSRTM

SEQ ID NO: 7921 - protein, 1264 aa, Homo sapiens
MPEKRLTAEPPTITEEEFEDSLATDDFLVDYFNEFLSLPTFSEAIRFNADYGVFEVANDAPQFLEKQLKKILQNQQPRNPIYDVVRKGKNEVKPVQMNAPDEDETINVNYNIMCLSREEGIKWIKKERLPAFLESDCYFEYRLAKLVSQVRWSKSGMNFTVGSNFSPWIVKKPPSLPPPATEEDNLVIMKKFYVSLGEASYTQTKDWFALAKQSQQTVSTFSLPCCVPYNKLKSPAISSVSENFIFDDGVHPRTKKDPSKTNKLISEFEEEEGEEEEVSVSLQDTPSQALLRVYLEKKQDVDESLTMHFSTCEEFLSSYIYFILRGAIQQIVGKPVGETPDYINFNNITKVSFDDCFESIHGKNFLSELVQTTKERSEEIEQTSLSSKNESAGPESRADWCISHRTYDIGNRKEFERFKKFIKGTLGERYWWLWMDIERLKVLKDPGRHQRHLEKMKKCYLVSNGDYYLSAEILSKFKLLDGSQWNEEHLRNIQSEVLKPLLLYWAPRFCVTHSASTKYASAELKFWHLRQAKPRKDIDPFPQMATLLPLRPKSCIPQIPEIQKEEFSLSQPPKSPNKSPEVKTATQKPWKRELLYPGSSKDDVIEKGSKYMSESSKVIHLTSFTDISECLKPQLDRRYAYTEEPRVKTVSDVGALGGSDMENLLQSLYVENRAGFFFTKFCEHSGNKLWKNSVYFWFDLQAYHQLFYQETLQPFKVCKQAQYLFATYVAPSATLDIGLQQEKKKEIYMKIQPPFEDLFDTAEEYILLLLLEPWTKMVKSDQIAYKKVELVEETRQLDSTYFRKLQALHKETFSKKAEDTTCEIGTGILSLSNVSKRTEYWDNVPAEYKHFKFSDLLNNKLEFEHFRQFLETHSSSMDLMCWTDIEQFRRITYRDRNQRKAKSIYIKNKYLNKKYFFGPNSPASLYQQNQVMHLSGGWGKILHEQLDAPVLVEIQKHVQNRLENVWLPLFLASEQFAARQKIKVQMKDIAEELLLQKAEKKIGVWKPVESKWISSSCKIIAFRKALLNPVTSRQFQRFVALKGDLLENGLLFWQEVQKYKDLCHSHCDESVIQKKITTIINCFINSSIPPALQIDIPVEQAQKIIEHRKELGPYVFREAQMTIFGVLFKFWPQFCEFRKNLTDENIMSVLERRQEYNKQKKKLAVLEDEKSGKDGIKQYANTSVPAIKTALLSDSFLGLQPYGRQPTWCYSKYIEALEQERILLKIQEELEKKLFAGLQPLTNFKASSSTMSLKKNMSAHSSQK

SEQ ID NO: 7922 - protein, 5604 aa, Homo sapiens
MTTQAPTFTQPLQSVVVLEGSTATFEAHISGFPVPEVSWFRDGQVISTSTLPGVQISFSDGRAKLTIPAVTKANSGRYSLKATNGSGQATSTAELLVKAETAPPNFVQRLQSMTVRQGSQVRLQVRVTGIPTPVVKFYRDGAEIQSSLDFQISQEGDLYSLLIAEAYPEDSGTYSVNATNSVGRATSTAELLVQGEEEVPAKKTKTIVSTAQISESRQTRIEKKIEAHFDARSIATVEMVIDGAAGQQLPHKTPPRIPPKPKSRSPTPPSIAAKAQLARQQSPSPIRHSPSPVRHVRAPTPSPVRSVSPAARISTSPIRSVRSPLLMRKTQASTVATGPEVPPPWKQEGYVASSSEAEMRETTLTTSTQIRTEERWEGRYGVQEQVTISGAAGAAASVSASASYAAEAVATGAKEVKQDADKSAAVATVVAAVDMARVREPVISAVEQTAQRTTTTAVHIQPAQEQVRKEAEKTAVTKVVVAADKAKEQELKSRTKEVITTKQEQMHVTHEQIRKETEKTFVPKVVISAAKAKEQETRISEEITKKQKQVTQEAIRQETEITAASMVVVATAKSTKLETVPGAQEETTTQQDQMHLSYEKIMKETRKTVVPKVIVATPKVKEQDLVSRGREGITTKREQVQITQEKMRKEAEKTALSTIAVATAKAKEQETILRTRETMATRQEQIQVTHGKVDVGKKAEAVATVVAAVDQARVREPREPGHLEESYAQQTTLEYGYKERISAAKVAEPPQRPASEPHVVPKAVKPRVIQAPSETHIKTTDQKGMHISSQIKKTTDLTTERLVHVDKRPRTASPHFTVSKISVPKTEHGYEASIAGSAIATLQKELSATSSAQKITKSVKAPTVKPSETRVRAEPTPLPQFPFADTPDTYKSEAGVEVKKEVGVSITGTTVREERFEVLHGREAKVTETARVPAPVEIPVTPPTLVSGLKNVTVIEGESVTLECHISGYPSPTVTWYREDYQIESSIDFQITFQSGIARLMIREAFAEDSGRFTCSAVNEAGTVSTSCYLAVQVSEEFEKETTAVTEKFTTEEKRFVESRDVVMTDTSLTEEQAGPGEPAAPYFITKPVVQKLVEGGSVVFGCQVGGNPKPHVYWKKSGVPLTTGYRYKVSYNKQTGECKLVISMTFADDAGEYTIVVRNKHGETSASASLLEEADYELLMKSQQEMLYQTQVTAFVQEPKVGETAPGFVYSEYEKEYEKEQALIRKKMAKDTVVVRTYVEDQEFHISSFEERLIKEIEYRIIKTTLEELLEEDGEEKMAVDISESEAVESGFDSRIKNYRILEGMGVTFHCKMSGYPLPKIAWYKDGKRIKHGERYQMDFLQDGRASLRIPVVLPEDEGIYTAFASNIKGNAICSGKLYVEPAAPLGAPTYIPTLEPVSRIRSLSPRSVSRSPIRMSPARMSPARMSPARMSPARMSPGRRLEETDESQLERLYKPVFVLKPVSFKCLEGQTARFDLKVVGRPMPETFWFHDGQQIVNDYTHKVVIKEDGTQSLIIVPATPSDSGEWTVVAQNRAGRSSISVILTVEAVEHQVKPMFVEKLKNVNIKEGSRLEMKVRATGNPNPDIVWLKNSDIIVPHKYPKIRIEGTKGEAALKIDSTVSQDSAWYTATAINKAGRDTTRCKVNVEVEFAEPEPERKLIIPRGTYRAKEIAAPELEPLHLRYGQEQWEEGDLYDKEKQQKPFFKKKLTSLRLKRFGPAHFECRLTPIGDPTMVVEWLHDGKPLEAANRLRMINEFGYCSLDYGVAYSRDSGIITCRATNKYGTDHTSATLIVKDEKSLVEESQLPEGRKGLQRIEELERMAHEGALTGVTTDQKEKQKPDIVLYPEPVRVLEGETARFRCRVTGYPQPKVNWYLNGQLIRKSKRFRVRYDGIHYLDIVDCKSYDTGEVKVTAENPEGVIEHKVKLEIQQREDFRSVLRRAPEPRPEFHVHEPGKLQFEVQKVDRPVDTTETKEVVKLKRAERITHEKVPEESEELRSKFKRRTEEGYYEAITAVELKSRKKDESYEELLRKTKDELLHWTKELTEEEKKALAEEGKITIPTFKPDKIELSPSMEAPKIFERIQSQTVGQGSDAHFRVRVVGKPDPECEWYKNGVKIERSDRIYWYWPEDNVCELVIRDVTAEDSASIMVKAINIAGETSSHAFLLVQAKQLITFTQELQDVVAKEKDTMATFECETSEPFVKVKWYKDGMEVHEGDKYRMHSDRKVHFLSILTIDTSDAEDYSCVLVEDENVKTTAKLIVEGAVVEFVKELQDIEVPESYSGELECIVSPENIEGKWYHNDVELKSNGKYTITSRRGRQNLTVKDVTKEDQGEYSFVIDGKKTTCKLKMKPRPIAILQGLSDQKVCEGDIVQLEVKVSLESVEGVWMKDGQEVQPSDRVHIVIDKQSHMLLIEDMTKEDAGNYSFTIPALGLSTSGRVSVYSVDVITPLKDVNVIEGTKAVLECKVSVPDVTSVKWYLNDEQIKPDDRVQAIVKGTKQRLVINRTHASDEGPYKLIVGRVETNCNLSVEKIKIIRGLRDLTCTETQNVVFEVELSHSGIDVLWNFKDKEIKPSSKYKIEAHGKIYKLTVLNMMKDDEGKYTFYAGENMTSGKLTVAGGAISKPLTDQTVAESQEAVFECEVANPDSKGEWLRDGKHLPLTNNIRSESDGHKRRLIIAATKLDDIGEYTYKVATSKTSAKLKVEAVKIKKTLKNLTVTETQDAVFTVELTHPNVKGVQWIKNGVVLESNEKYAISVKGTIYSLRIKNCAIVDESVYGFRLGRLGASARLHVETVKIIKKPKDVTALENATVAFEVSVSHDTVPVKWFHKSVEIKPSDKHRLVSERKVHKLMLQNISPSDAGEYTAVVGQLECKAKLFVETLHITKTMKNIEVPETKTASFECEVSHFNVPSMWLKNGVEIEMSEKFKIVVQGKLHQLIIMNTSTEDSAEYTFVCGNDQVSATLTVTPIMITSMLKDINAEEKDTITFEVTVNYEGISYKWLKNGVEIKSTDKCQMRTKKLTHSLNIRNVHFGDAADYTFVAGKATSTATLYVEARHIEFRKHIKDIKVLEKKRAMFECEVSEPDITVQWMKDDQELQITDRIKIQKEKYVHRLLIPSTRMSDAGKYTVVAGGNVSTAKLFVEGRDVRIRSIKKEVQVIEKQRAVVEFEVNEDDVDAHWYKDGIEINFQVQERHKYVVERRIHRMFISETRQSDAGEYTFVAGRNRSSVTLYVNAPEPPQVLQELQPVTVQSGKPARFCAVISGRPQPKISWYKEEQLLSTGFKCKFLHDGQEYTLLLIEAFPEDAAVYTCEAKNDYGVATTSASLSVEVPEVVSPDQEMPVYPPAIITPLQDTVTSEGQPARFQCRVSGTDLKVSWYSKDKKIKPSRFFRMTQFEDTYQLEIAEAYPEDEGTYTFVASNAVGQVSSTANLSLEAPESILHERIEQEIEMEMKELFSEGESEHSERDTRDAFSDSEDIDHKSMAAKRYASRISSTSSWPEYFKPSFTQKLTFKYVLEGEPVVFTCRLIACPTPEMTWFHNNRPIPTGLRRIIKAESDLHHHSSSLEIKRVQDRDSGSYRLLAINSEGSAESTASLLVIQKGQDEKYLEFLKRAERTHENVEALVERGEDRIKVDLRFTGSPFNKKQDVEQKGMMRTIHFKTMSSAKKTDYMYDEEYLESKSDIRGWLNVGESFLDKETKVKLQRLREARKTLMEKKKLSLLDTSSEISSRTLRSEASDKDILFSREDMKIRSMSDLAESYKVDHSAESIVQNPHALSNQMDQNIESEELPTSFQTIVDEEIFQTEIRMSQEALVKESLPKDHLYGEILVNENTQARGQLEEIMANTTIGESSTYITNVCEKEEVYETPENVSQAITPHASESFGTLVNVEESEEIASERIKKDDLRELQLSASTRIDEFKTEQKEENMRFFENSFRKRPQRCPPSFLQEIESQEVYEGDSCNFVCHFQGYPQPIVTWYNNDMPIPRNQNFIIHSLENYSILTLSSVHHQNEGSITCVLFNQYGTVKTTSMLKVKAKQKHDVKAHKVPVFHDYLDEEEELALVFDQAKGAHPSMSQEGQTNLHLLKTNPPVPPSGDTELLSFPVEIQVTAATPIPEQDKESKEVFQTEELEPKAMPQDQVTQSPKHRFVFLSDITNEPPKMLQEMPKHARCREGDSIILECLISGEPQPVVTWFQNGVLLKQNQKFQFEEVNCSHQLYIKDVNSQDSGKYKCVAENNSGAVESVSDLTVEPVTYRENSQFENIGEIYGKYSRDQQLQDQGESVRAHFYDYPAGPFTPWTNVKEYSVRDYFQSLETIEQIDQKEQVRCIPSREKIPRFVHGASRTIKISKPIRAEFIQCQAEGKERHVSEKSKLHQAEGTVYPFVDDFSDVTIKKEIRNNFGKLGRSEKENVQECAQSDYLPNIHSERISDSYNTKDSSAIVYEESLGEEIHYPGKKVKHRIIEFEKLHVEKGVLEKRPTRTSIVNPPQKKIDDKAFSLKQRESRSSNLNANMYQAEKMSPNTESDSSNIAINLKLLSSQTHKEFDAQEREQQEKISLIDKPAISKRAEHESPITFDLKQFHTQIKHTDVKFQELDSGQPEEAYFKIQHPADTENIVFDLKQMYSHIGDPALEFQGQETREQQEIHYKEKIPSPETLQPDTHNISKSVQNNVFASQEISSSQELSNRTMVEKSSIDENSISLEKEVRHVQEQNLDILKTDLSLKSFSEEIYSESCALLPTSSADIEETDLSEKSCPLENGGRSSISHLKKAASEEKPLGVGEMEEECTLEPELAAFPKQDGGTQEYTDATLEDHRGDVQEADTLHRQLSLSQCFPLLMTEEQQNPGEQISTNIHASGEEKCYEEVQVQNEASFSTLEGEMIETSFSQNIPKLDEAHTTEAAESETSLTQYLLAAGKREVPETKDTRDQAKLVQSESITSMEVEEVTFNTVYEYYNQKQESLGRPLSPESDISIGVGSTTSEEISELDQFYTPPSSVEYFESPKSPDLYFNPSDITKQSSIHSGGETVERYSTPLGEVAERYSTPSEGEVGERYSTPPGETLERYSTPPGETLERYSTPPGETLERYSTPPGETLERYSTPPGETLERYSTPPGEALERYSIPTGGPNPTGTFKTYPSKIEREDGTPNEHFYTPTEERGSAYEIWRSDSFGTPNEAIEPKDNEMPPSFIEPLTKRKVYENTTLGFIVEVEGLPVPGVKWYRNKSLLEPDERIKMERVGNVCSLEISNIQKGEGGEYMCHAVNIIGEAKSFANVDIMPQEERVVALPPPVTHQHVMEFDLEHTTSSRTPSPQEIVLEVELSEKDVKEFEKQVKIVTVPEFTPDHKSMIVSLDVLPFNFVDPNMDSREGEDKELKIDLEVFEMPPRFIMPICDFKIPENSDAVFKCSVIGIPTPEVKWYKEYMCIEPDNIKYVISEEKGSHTLKIRNVCLSDSATYRCRAVNCVGEAICRGFLTMGDSEIFAVIAKKSKVTLSSLMEELVLKSNYTDSFFEFQVVEGPPRFIKGISDCYAPIGTAAYFQCLVRGSPRPTVYWYKDGKLVQGRRFTVEESGTGFHNLFITSLVKSDEGEYRCVATNKSGMAESFAALTLT

SEQ ID NO: 7923 - protein, 814 aa, Homo sapiens
MQDAENVAVPEAAEERAEPGQQQPAAEPPPAEGLLRPAGPGAPEAAGTEASSEEVGIAEAGPESEVRTEPAAEAEAASGPSESPSPPAAEELPGSHAEPPVPAQGEAPGEQARDERSDSRAQAVSEDAGGNEGRAAEAEPRALENGDADEPSFSDPEDFVDDVSEEELLGDVLKDRPQEADGIDSVIVVDNVPQVGPDRLEKLKNVIHKIFSKFGKITNDFYPEEDGKTKGYIFLEYASPAHAVDAVKNADGYKLDKQHTFRVNLFTDFDKYMTISDEWDIPEKQPFKDLGNLRYWLEEAECRDQYSVIFESGDRTSIFWNDVKDPVSIEERARWTETYVRWSPKGTYLATFHQRGIALWGGEKFKQIQRFSHQGVQLIDFSPCERYLVTFSPLMDTQDDPQAIIIWDILTGHKKRGFHCESSAHWPIFKWSHDGKFFARMTLDTLSIYETPSMGLLDKKSLKISGIKDFSWSPGGNIIAFWVPEDKDIPARVTLMQLPTRQEIRVRNLFNVVDCKLHWQKNGDYLCVKVDRTPKGTQGVVTNFEIFRMREKQVPVDVVEMKETIIAFAWEPNGSKFAVLHGEAPRISVSFYHVKNNGKIELIKMFDKQQANTIFWSPQGQFVVLAGLRSMNGALAFVDTSDCTVMNIAEHYMASDVEWDPTGRYVVTSVSWWSHKVDNAYWLWTFQGRLLQKNNKDRFCQLLWRPRPPTLLSQEQIKQIKKDLKKYSKIFEQKDRLSQSKASKELVERRRTMMEDFRKYRKMAQELYMEQKNERLELRGGVDTDELDSNVDDWEEETIEFFVTEEIIPLGNQE

SEQ ID NO: 7924 - protein, 466 aa, Homo sapiens
MAEEQDLSEVELSPVGSEEPRCLSPGSAPSLGPDGGGGGSGLRASPGPGELGKVKKEQQDGEADDDKFPVCIREAVSQVLSGYDWTLVPMPVRVNGASKSKPHVKRPMNAFMVWAQAARRKLADQYPHLHNAELSKTLGKLWRLLNESDKRPFIEEAERLRMQHKKDHPDYKYQPRRRKNGKAAQGEAECPGGEAEQGGTAAIQAHYKSAHLDHRHPGEGSPMSDGNPEHPSGQSHGPPTPPTTPKTELQSGKADPKRDGRSMGEGGKPHIDFGNVDIGEISHEVMSNMETFDVAELDQYLPPNGHPGHVSSYSAAGYGLGSALAVASGHSAWISKPPGVALPTVSPPGVDAKAQVKTETAGPQGPPHYTDQPSTSQIAYTSLSLPHYGSAFPSISRPQFDYSDHQPSGPYYGHSGQASGLYSAFSYMGPSQRPLYTAISDPSPSGPQSHSPTHWEQPVYTTLSRP

SEQ ID NO: 7925 - protein, 654 aa, Homo sapiens
MEAEDLSKAEDRNEDPGSKNEGQLAAVQPDVPHGGQSSSPTALWDMLERKFLEYQQLTHKSPIERQKSLLSLLPLFLKAWEHSVGIICFPSLQRLAEDVSDQLAQQLQKALVGKPAEQARLAAGQLLWWKGDVDQDGYLLLKSVYVLTGTDSETLGRVAESGLPALLLQCLYLFFVFPLDKDELLESDLQVQKMFVQMLLNICSDSQGLEGLLSGSELQSLLIATTCLREHSCCFWKEPTFCVLRAISKAQNLSIIQYLQATDCVRLSLQNLSRLTDTLPAPEVSEAVSLILGFVKDSYPVSSALFLEFENSEGYPLLLKVLLRYDGLTQSEVDPHLEELLGLVVWLTTCGRSELKVFDSITYPQLEGFKFHHEASGVTVKNLQAFQVLQNVFHKASDSVLCIQVLSVIRTMWAWNARNFFLLEWTLQPISQFVEIMPLKPAPVQEHFFQLLEALVFELHYVPHEILRKVQHLIKESPGPSCTLMALQSILSIAGGDPLFTDIFRDSGLLGLLLAQLRKQAKIMRKSGNKVSTPGVQDPERELTCVMLRIVVTLLKGSVRNAVVLKDHGMVPFIKIFLDDECYREASLSILEQLSAINAEEYMSIIVGALCSSTQGELQLKLDLLKVISSPPLRLASLWICTKRSTFAQAFVFM

SEQ ID NO: 7926 - protein, 1116 aa, Homo sapiens
MYGSARSVGKVEPSSQSPGRSPRLPRSPRLGHRRTNSTGGSSGSSVGGGSGKTLSMENIQSLNAAYATSGPMYLSDHENVGSETPKSTMTLGRSGGRLPYGVRMTAMGSSPNIASSGVASDTIAFGEHHLPPVSMASTVPHSLRQARDNTIMDLQTQLKEVLRENDLLRKDVEVKESKLSSSMNSIKTFWSPELKKERALRKDEASKITIWKEQYRVVQEENQHMQMTIQALQDELRIQRDLNQLFQQDSSSRTGEPCVAELTEENFQRLHAEHERQAKELFLLRKTLEEMELRIETQKQTLNARDESIKKLLEMLQSKGLSAKATEEDHERTRRLAEAEMHVHHLESLLEQKEKENSMLREEMHRRFENAPDSAKTKALQTVIEMKDSKISSMERGLRDLEEEIQMLKSNGALSTEEREEEMKQMEVYRSHSKFMKNKVEQLKEELSSKEAQWEELKKKAAGLQAEIGQVKQELSRKDTELLALQTKLETLTNQFSDSKQHIEVLKESLTAKEQRAAILQTEVDALRLRLEEKETMLNKKTKQIQDMAEEKGTQAGEIHDLKDMLDVKERKVNVLQKKIENLQEQLRDKEKQMSSLKERVKSLQADTTNTDTALTTLEEALAEKERTIERLKEQRDRDEREKQEEIDNYKKDLKDLKEKVSLLQGDLSEKEASLLDLKEHASSLASSGLKKDSRLKTLEIALEQKKEECLKMESQLKKAHEAALEARASPEMSDRIQHLEREITRYKDESSKAQAEVDRLLEILKEVENEKNDKDKKIAELERQVKDQNKKVANLKHKEQVEKKKSAQMLEEARRREDNLNDSSQQLQDSLRKKDDRIEELEEALRESVQITAEREMVLAQEESARTNAEKQVEELLMAMEKVKQELESMKAKLSSTQQSLAEKETHLTNLRAERRKHLEEVLEMKQEALLAAISEKDANIALLELSSSKKKTQEEVAALKREKDRLVQQLKQQTQNRMKLMADNYEDDHFKSSHSNQTNHKPSPDQIIQPLLELDQNRSKLKLYIGHLTTLCHDRDPLILRGLTPPASYNLDDDQAAWENELQKMTRGQLQDELEKGERDNAELQEFANAILQQIADHCPDILEQVVNALEESS

SEQ ID NO: 7927 - protein, 1024 aa, Homo sapiens
MNFIKDNSRALIQRMGMTVIKQITDDLFVWNVLNREEVNIICCEKVEQDAARGIIHMILKKGSESCNLFLKSLKEWNYPLFQDLNGQSLFHQTSEGDLDDLAQDLKDLYHTPSFLNFYPLGEDIDIIFNLKSTFTEPVLWRKDQHHHRVEQLTLNGLLQALQSPCIIEGESGKGKSTLLQRIAMLWGSGKCKALTKFKFVFFLRLSRAQGGLFETLCDQLLDIPGTIRKQTFMAMLLKLRQRVLFLLDGYNEFKPQNCPEIEALIKENHRFKNMVIVTTTTECLRHIRQFGALTAEVGDMTEDSAQALIREVLIKELAEGLLLQIQKSRCLRNLMKTPLFVVITCAIQMGESEFHSHTQTTLFHTFYDLLIQKNKHKHKGVAASDFIRSLDHCGDLALEGVFSHKFDFELQDVSSVNEDVLLTTGLLCKYTAQRFKPKYKFFHKSFQEYTAGRRLSSLLTSHEPEEVTKGNGYLQKMVSISDITSTYSSLLRYTCGSSVEATRAVMKHLAAVYQHGCLLGLSIAKRPLWRQESLQSVKNTTEQEILKAININSFVECGIHLYQESTSKSALSQEFEAFFQGKSLYINSGNIPDYLFDFFEHLPNCASALDFIKLDFYGGAMASWEKAAEDTGGIHMEEAPETYIPSRAVSLFFNWKQEFRTLEVTLRDFSKLNKQDIRYLGKIFSSATSLRLQIKRCAGVAGSLSLVLSTCKNIYSLMVEASPLTIEDERHITSVTNLKTLSIHDLQNQRLPGGLTDSLGNLKNLTKLIMDNIKMNEEDAIKLAEGLKNLKKMCLFHLTHLSDIGEGMDYIVKSLSSEPCDLEEIQLVSCCLSANAVKILAQNLHNLVKLSILDLSENYLEKDGNEALHELIDRMNVLEQLTALMLPWGCDVQGSLSSLLKHLEEVPQLVKLGLKNWRLTDTEIRILGAFFGKNPLKNFQQLNLAGNRVSSDGWLAFMGVFENLKQLVFFDFSTKEFLPDPALVRKLSQVLSKLTFLQEARLVGWQFDDDDLSVITGAFKLVTA

SEQ ID NO: 7928 - protein, 1068 aa, Homo sapiens
MAPRKRGGRGISFIFCCFRNNDHPEITYRLRNDSNFALQTMEPALPMPPVEELDVMFSELVDELDLTDKHREAMFALPAEKKWQIYCSKKKDQEENKGATSWPEFYIDQLNSMAARKSLLALEKEEEEERSKTIESLKTALRTKPMRFVTRFIDLDGLSCILNFLKTMDYETSESRIHTSLIGCIKALMNNSQGRAHVLAHSESINVIAQSLSTENIKTKVAVLEILGAVCLVPGGHKKVLQAMLHYQKYASERTRFQTLINDLDKSTGRYRDEVSLKTAIMSFINAVLSQGAGVESLDFRLHLRYEFLMLGIQPVIDKLREHENSTLDRHLDFFEMLRNEDELEFAKRFELVHIDTKSATQMFELTRKRLTHSEAYPHFMSILHHCLQMPYKRSGNTVQYWLLLDRIIQQIVIQNDKGQDPDSTPLENFNIKNVVRMLVNENEVKQWKEQAEKMRKEHNELQQKLEKKERECDAKTQEKEEMMQTLNKMKEKLEKETTEHKQVKQQVADLTAQLHELSRRAVCASIPGGPSPGAPGGPFPSSVPGSLLPPPPPPPLPGGMLPPPPPPLPPGGPPPPPGPPPLGAIMPPPGAPMGLALKKKSIPQPTNALKSFNWSKLPENKLEGTVWTEIDDTKVFKILDLEDLERTFSAYQRQQKEADAIDDTLSSKLKVKELSVIDGRRAQNCNILLSRLKLSNDEIKRAILTMDEQEDLPKDMLEQLLKFVPEKSDIDLLEEHKHELDRMAKADRFLFEMSRINHYQQRLQSLYFKKKFAERVAEVKPKVEAIRSGSEEVFRSGALKQLLEVVLAFGNYMNKGQRGNAYGFKISSLNKIADTKSSIDKNITLLHYLITIVENKYPSVLNLNEELRDIPQAAKVNMTELDKEISTLRSGLKAVETELEYQKSQPPQPGDKFVSVVSQFITVASFSFSDVEDLLAEAKDLFTKAVKHFGEEAGKIQPDEFFGIFDQFLQAVSEAKQENENMRKKKEEEERRARMEAQLKEQRERERKMRKAKENSEESGEFDDLVSALRSGEVFDKDLSKLKRNRKRITNQMTDSSRERPITKLNF

SEQ ID NO: 7929 - protein, 1135 aa, Homo sapiens
MHPQSLAEEEIKTEQEVVEGMDISTRSKDPGSAERTAQKRKFPSPPHSSNGHSPQDTSTSPIKKKKKPGLLNSNNKEQDGRNDFYCWVCHREGQVLCCELCPRVYHAKCLRLTSEPEGDWFCPECEKITVAECIETQSKAMTMLTIEQLSYLLKFAIQKMKQPGTDAFQKPVPLEQHPDYAEYIFHPMDLCTLEKNAKKKMYGCTEAFLADAKWILHNCIIYNGGNHKLTQIAKVVIKICEHEMNEIEVCPECYLAACQKRDNWFCEPCSNPHPLVWAKLKGFPFWPAKALRDKDGQVDARFFGQHDRAWVPINNCYLMSKEIPFSVKKTKSIFNSAMQEMEVYVENIRRKFGVFNYSPFRTPYTPNSQYQMLLDPTNPSAGTAKIDKQEKVKLNFDMTASPKILMSKPVLSGGTGRRISLSDMPRSPMSTNSSVHTGSDVEQDAEKKATSSHFSASEESMDFLDKSTASPASTKTGQAGSLSGSPKPFSPQLSAPITTKTDKTSTTGSILNLNLDRSKAEMDLKELSESVQQQSTPVPLISPKRQIRSRFQLNLDKTIESCKAQLGINEISEDVYTAVEHSDSEDSEKSDSSDSEYISDDEQKSKNEPEDTEDKEGCQMDKEPSAVKKKPKPTNPVEIKEELKSTSPASEKADPGAVKDKASPEPEKDFSEKAKPSPHPIKDKLKGKDETDSPTVHLGLDSDSESELVIDLGEDHSGREGRKNKKEPKEPSPKQDVVGKTPPSTTVGSHSPPETPVLTRSSAQTSAAGATATTSTSSTVTVTAPAPAATGSPVKKQRPLLPKETAPAVQRVVWNSSTVQQKEITQSPSTSTITLVTSTQSSPLVTSSGSMSTLVSSVNADLPIATASADVAADIAKYTSKMMDAIKGTMTEIYNDLSKNTTGSTIAEIRRLRIEIEKLQWLHQQELSEMKHNLELTMAEMRQSLEQERDRLIAEVKKQLELEKQQAVDETKKKQWCANCKKEAIFYCCWNTSYCDYPCQQAHWPEHMKSCTQSATAPQQEADAEVNTETLNKSSQGSSSSTQSAPSETASASKEKETSAEKSKESGSTLDLSGSRETPSSILLGSNQGSDHSRSNKSSWSSSDEKRGSTRSDHNTSTSTKSLLPKESRLDTFWD

SEQ ID NO: 7930 - protein, 949 aa, Homo sapiens
MPAARPPAAGLRGISLFLALLLGSPAAALERDALPEGDASPLGPYLLPSGAPERGSPGKEHPEERVVTAPPSSSQSAEVLGELVLDGTAPSAHHDIPALSPLLPEEARPKHALPPKKKLPSLKQVNSARKQLRPKATSAATVQRAGSQPASQGLDLLSSSTEKPGPPGDPDPIVASEEASEVPLWLDRKESAVPTTPAPLQISPFTSQPYVAHTLPQRPEPGEPGPDMAQEAPQEDTSPMALMDKGENELTGSASEESQETTTSTIITTTVITTEQAPALCSVSFSNPEGYIDSSDYPLLPLNNFLECTYNVTVYTGYGVELQVKSVNLSDGELLSIRGVDGPTLTVLANQTLLVEGQVIRSPTNTISVYFRTFQDDGLGTFQLHYQAFMLSCNFPRRPDSGDVTVMDLHSGGVAHFHCHLGYELQGAKMLTCINASKPHWSSQEPICSAPCGGAVHNATIGRVLSPSYPENTNGSQFCIWTIEAPEGQKLHLHFERLLLHDKDRMTVHSGQTNKSALLYDSLQTESVPFEGLLSEGNTIRIEFTSDQARAASTFNIRFEAFEKGHCYEPYIQNGNFTTSDPTYNIGTIVEFTCDPGHSLEQGPAIIECINVRDPYWNDTEPLCRAMCGGELSAVAGVVLSPNWPEPYVEGEDCIWKIHVGEEKRIFLDIQFLNLSNSDILTIYDGDEVMPHILGQYLGNSGPQKLYSSTPDLTIQFHSDPAGLIFGKGQGFIMNYIEVSRNDSCSDLPEIQNGWKTTSHTELVRGARITYQCDPGYDIVGSDTLTCQWDLSWSSDPPFCEKTEESLACDNPGLPENGYQILYKRLYLPGESLTFMCYEGFELMGEVTIRCILGQPSHWNGPLPVCKVAEAAAETSLEGGNMALAIFIPVLIISLLLGGAYIYITRCRYYSNLRLPLMYSHPYSQITVETEFDNPIYETGETREYEVSI

SEQ ID NO: 7931 - protein, 751 aa, Homo sapiens
MPALGWAVAAILMLQTAMAEPSPGTLPRKAGVFSDLSNQELKAVHSFLWSKKELRLQPSSTTTMAKNTVFLIEMLLPKKYHVLRFLDKGERHPVREARAVIFFGDQEHPNVTEFAVGPLPGPCYMRALSPRPGYQSSWASRPISTAEYALLYHTLQEATKPLHQFFLNTTGFSFQDCHDRCLAFTDVAPRGVASGQRRSWLIIQRYVEGYFLHPTGLELLVDHGSTDAGHWAVEQVWYNGKFYGSPEELARKYADGEVDVVVLEDPLPGGKGHDSTEEPPLFSSHKPRGDFPSPIHVSGPRLVQPHGPRFRLEGNAVLYGGWSFAFRLRSSSGLQVLNVHFGGERIAYEVSVQEAVALYGGHTPAGMQTKYLDVGWGLGSVTHELAPGIDCPETATFLDTFHYYDADDPVHYPRALCLFEMPTGVPLRRHFNSNFKGGFNFYAGLKGQVLVLRTTSTVYNYDYIWDFIFYPNGVMEAKMHATGYVHATFYTPEGLRHGTRLHTHLIGNIHTHLVHYRVDLDVAGTKNSFQTLQMKLENITNPWSPRHRVVQPTLEQTQYSWERQAAFRFKRKLPKYLLFTSPQENPWGHKRTYRLQIHSMADQVLPPGWQEEQAITWARYPLAVTKYRESELCSSSIYHQNDPWHPPVVFEQFLHNNENIENEDLVAWVTVGFLHIPHSEDIPNTATPGNSVGFLLRPFNFFPEDPSLASRDTVIVWPRDNGPNYVQRWIPEDRDCSMPPPFSYNGTYRPV

SEQ ID NO: 7932 - protein, 354 aa, Homo sapiens
MAESPTEEAATAGAGAAGPGASSVAGVVGVSGSGGGFGPPFLPDVWAAAAAAGGAGGPGSGLAPLPGLPPSAAAHGAALLSHWDPTLSSDWDGERTAPQCLLRIKRDIMSIYKEPPPGMFVVPDTVDMTKIHALITGPFDTPYEGGFFLFVFRCPPDYPIHPPRVKLMTTGNNTVRFNPNFYRNGKVCLSILGTWTGPAWSPAQSISSVLISIQSLMTENPYHNEPGFEQERHPGDSKNYNECIRHETIRVAVCDMMEGKCPCPEPLRGVMEKSFLEYYDFYEVACKDRLHLQGQTMQDPFGEKRGHFDYQSLLMRLGLIRQKVLERLHNENAEMDSDSSSSGTETDLHGSLRV

SEQ ID NO: 7933 - protein, 839 aa, Homo sapiens
MDVSLCPAKCSFWRIFLLGSVWLDYVGSVLACPANCVCSKTEINCRRPDDGNLFPLLEGQDSGNSNGNASINITDISRNITSIHIENWRSLHTLNAVDMELYTGLQKLTIKNSGLRSIQPRAFAKNPHLRYINLSSNRLTTLSWQLFQTLSLRELQLEQNFFNCSCDIRWMQLWQEQGEAKLNSQNLYCINADGSQLPLFRMNISQCDLPEISVSHVNLTVREGDNAVITCNGSGSPLPDVDWIVTGLQSINTHQTNLNWTNVHAINLTLVNVTSEDNGFTLTCIAENVVGMSNASVALTVYYPPRVVSLEEPELRLEHCIEFVVRGNPPPTLHWLHNGQPLRESKIIHVEYYQEGEISEGCLLFNKPTHYNNGNYTLIAKNPLGTANQTINGHFLKEPFPESTDNFILFDEVSPTPPITVTHKPEEDTFGVSIAVGLAAFACVLLVVLFVMINKYGRRSKFGMKGPVAVISGEEDSASPLHHINHGITTPSSLDAGPDTVVIGMTRIPVIENPQYFRQGHNCHKPDTYVQHIKRRDIVLKRELGEGAFGKVFLAECYNLSPTKDKMLVAVKALKDPTLAARKDFQREAELLTNLQHEHIVKFYGVCGDGDPLIMVFEYMKHGDLNKFLRAHGPDAMILVDGQPRQAKGELGLSQMLHIASQIASGMVYLASQHFVHRDLATRNCLVGANLLVKIGDFGMSRDVYSTDYYRLFNPSGNDFCIWCEVGGHTMLPIRWMPPESIMYRKFTTESDVWSFGVILWEIFTYGKQPWFQLSNTEVIECITQGRVLERPRVCPKEVYDVMLGCWQREPQQRLNIKEIYKILHALGKATPIYLDILG

SEQ ID NO: 7934 - protein, 390 aa, Homo sapiens
MGQRLSGGRSCLDVPGRLLPQPPPPPPPVRRKLALLFAMLCVWLYMFLYSCAGSCAAAPGLLLLGSGSRAAHDPPALATAPDGTPPRLPFRAPPATPLASGKEMAEGAASPEEQSPEVPDSPSPISSFFSGSGSKQLPQAIIIGVKKGGTRALLEFLRVHPDVRAVGAEPHFFDRSYDKGLAWYRDLMPRTLDGQITMEKTPSYFVTREAPARISAMSKDTKLIVVVRDPVTRAISDYTQTLSKRPDIPTFESLTFKNRTAGLIDTSWSAIQIGIYAKHLEHWLRHFPIRQMLFVSGERLISDPAGELGRVQDFLGLKRIITDKHFYFNKTKGFPCLKKAEGSSRPHCLGKTKGRTHPEIDREVVRRLREFYRPFNLKFYQMTGHDFGWD

SEQ ID NO: 7935 - protein, 828 aa, Homo sapiens
MDSEAFQSARDFLDMNFQSLAMKHMDLKQMELDTAAAKVDELTKQLESLWSDSPAPPGPQAGPPSRPPRYSSSSIPEPFGSRGSPRKAATDGADTPFGRSESAPTLHPYSPLSPKGRPSSPRTPLYLQPDAYGSLDRATSPRPRAFDGAGSSLGRAPSPRPGPGPLRQQGPPTPFDFLGRAGSPRGSPLAEGPQAFFPERGPSPRPPATAYDAPASAFGSSLLGSGGSAFAPPLRAQDDLTLRRRPPKAWNESDLDVAYEKKPSQTASYERLDVFARPASPSLQLLPWRESSLDGLGGTGKDNLTSATLPRNYKVSPLASDRRSDAGSYRRSLGSAGPSGTLPRSWQPVSRIPMPPSSPQPRGAPRQRPIPLSMIFKLQNAFWEHGASRAMLPGSPLFTRAPPPKLQPQPQPQPQPQSQPQPQLPPQPQTQPQTPTPAPQHPQQTWPPVNEGPPKPPTELEPEPEIEGLLTPVLEAGDVDEGPVARPLSPTRLQPALPPEAQSVPELEEVARVLAEIPRPLKRRGSMEQAPAVALPPTHKKQYQQIISRLFHRHGGPGPGGPEPELSPITEGSEARAGPPAPAPPAPIPPPAPSQSSPPEQPQSMEMRSVLRKAGSPRKARRARLNPLVLLLDAALTGELEVVQQAVKEMNDPSQPNEEGITALHNAICGANYSIVDFLITAGANVNSPDSHGWTPLHCAASCNDTVICMALVQHGAAIFATTLSDGATAFEKCDPYREGYADCATYLADVEQSMGLMNSGAVYALWDYSAEFGDELSFREGESVTVLRRDGPEETDWWWAALHGQEGYVPRNYFGLFPRVKPQRSKV

SEQ ID NO: 7936 - protein, 1076 aa, Homo sapiens
MQHWARRLEQEVDGVMRIFGGVQQLREIYKDNRNLFEVQENEPQKLVEKVAGDIESLLDRKVQALKRLADAAENFQKAHRWQDNIKEEDIVYYDAKADAELDDPESEDVERGSKASTLRLDFIEDPNFKNKVNYSYAAVQIPTDIYKGSTVILNELNWTEALENVFMENRRQDPTLLWQVFGSATGVTRYYPATPWRAPKKIDLYDVRRRPWYIQGASSPKDMVIIVDVSGSVSGLTLKLMKTSVCEMLDTLSDDDYVNVASFNEKAQPVSCFTHLVQANVRNKKVFKEAVQGMVAKGTTGYKAGFEYAFDQLQNSNITRANCNKMIMMFTDGGEDRVQDVFEKYNWPNRTVRVFTFSVGQHNYDVTPLQWMACANKGYYFEIPSIGAIRINTQEYLDVLGRPMVLAGKEAKQVQWTNVYEDALGLGLVVTGTLPVFNLTQDGPGEKKNQLILGVMGIDVALNDIKRLTPNYTLGANGYVFAIDLNGYVLLHPNLKPQTTNFREPVTLDFLDAELEDENKEEIRRSMIDGNKGHKQIRTLVKSLDERYIDEVTRNYTWVPIRSTNYSLGLVLPPYSTFYLQANLSDQILQVKYFEFLLPSSFESEGHVFIAPREYCKDLNASDNNTEFLKNFIELMEKVTPDSKQCNNFLLHNLILDTGITQQLVERVWRDQDLNTYSLLAVFAATDGGITRVFPNKAAEDWTENPEPFNASFYRRSLDNHGYVFKPPHQDALLRPLELENDTVGILVSTAVELSLGRRTLRPAVVGVKLDLEAWAEKFKVLASNRTHQDQPQKCGPNSHCEMDCEVNNEDLLCVLIDDGGFLVLSNQNHQWDQVGRFFSEVDANLMLALYNNSFYTRKESYDYQAACAPQPPGNLGAAPRGVFVPTVADFLNLAWWTSAAAWSLFQQLLYGLIYHSWFQADPAEAEGSPETRESSCVMKQTQYYFGSVNASYNAIIDCGNCSRLFHAQRLTNTNLLFVVAEKPLCSQCEAGRLLQKETHCPADGPEQCELVQRPRYRRGPHICFDYNATEDTSDCGRGASFPPSLGVLVSLQLLLLLGLPPRPQPQVLVHASRRL

SEQ ID NO: 7937 - protein, 1134 aa, Homo sapiens
MSRSVLQPSQQKLAEKLTILNDRGVGMLTRLYNIKKQGQVWKACGDPKAKPSYLIDKNLESAVKFIVRKFPAVETRNNNQQLAQLQKEKSEILKNLALYYFTFVDVMEFKDHVCELLNTIDVCQVFFDITVNFDLTKNYLDLIITYTTLMILLSRIEERKAIIGLYNYAHEMTHGASDREYPRLGQMIVDYENPLKKMMEEFVPHSKSLSDALISLQMVYPRRNLSADQWRNAQLLSLISAPSTMLNPAQSDTMPCEYLSLDAMEKWIIFGFILCHGILNTDATALNLWKLALQSSSCLSLFRDEVFHIHKAAEDLFVNIRGYNKRINDIRECKEAAVSHAGSMHRERRKFLRSALKELATVLSDQPGLLGPKALFVFMALSFARDEIIWLLRHADNMPKKSADDFIDKHIAELIFYMEELRAHVRKYGPVMQRYYVQYLSGFDAVVLNELVQNLSVCPEDESIIMSSFVNTMTSLSVKQVEDGEVFDFRGMRLDWFRLQAYTSVSKASLGLADHRELGKMMNTIIFHTKMVDSLVEMLVETSDLSIFCFYSRAFEKMFQQCLELPSQSRYSIAFPLLCTHFMSCTHELCPEERHHIGDRSLSLCNMFLDEMAKQARNLITDICTEQCTLSDQLLPKHCAKTISQAVNKKSKKQTGKKGEPEREKPGVESMRKNRLVVTNLDKLHTALSELCFSINYVPNMVVWEHTFTPREYLTSHLEIRFTKSIVGMTMYNQATQEIAKPSELLTSVRAYMTVLQSIENYVQIDITRVFNNVLLQQTQHLDSHGEPTITSLYTNWYLETLLRQVSNGHIAYFPAMKAFVNLPTENELTFNAEEYSDISEMRSLSELLGPYGMKFLSESLMWHISSQVAELKKLVVENVDVLTQMRTSFDKPDQMAALFKRLSSVDSVLKRMTIIGVILSFRSLAQEALRDVLSYHIPFLVSSIEDFKDHIPRETDMKVAMNVYELSSAAGLPCEIDPALVVALSSQKSENISPEEEYKIACLLMVFVAVSLPTLASNVMSQYSPAIEGHCNNIHCLAKAINQIAAALFTIHKGSIEDRLKEFLALASSSLLKIGQETDKTTTRNRESVYLLLDMIVQESPFLTMDLLESCFPYVLLRNAYHAVYKQSVTSSA

SEQ ID NO: 7938 - protein, 652 aa, Homo sapiens
MPPPLPLLLLTVLVVAAARPGCEFERNPAGECHRPPAADSATCVDLQLRTCSDAAYNHTTFPNLLQHRSWEVVEASSEYILLSVLHQLLEGQCNPDLRLLGCAVLAPRCEGGWVRRPCRHICEGLREVCQPAFDAIDMAWPYFLDCHRYFTREDEGCYDPLEKLRGGLEADEALPSGLPPTFIRFSHHSYAQMVRVLRRTASRCAHVARTYSIGRSFDGRELLVIEFSSRPGQHELMEPEVKLIGNIHGNEVAGREMLIYLAQYLCSEYLLGNPRIQRLLNTTRIHLLPSMNPDGYEVAAAEGAGYNGWTSGRQNAQNLDLNRNFPDLTSEYYRLAETRGARSDHIPIPQHYWWGKVAPETKAIMKWMQTIPFVLSASLHGGDLVVSYPFDFSKHPQEEKMFSPTPDEKMFKLLSRAYADVHPMMMDRSENRCGGNFLKRGSIINGADWYSFTGGMSDFNYLHTNCFEITVELGCVKFPPEEALYILWQHNKESLLNFVETVHRGIKGVVTDKFGKPVKNARISVKGIRHDITTAPDGDYWRLLPPGIHIVIAQAPGYAKVIKKVIIPARMKRAGRVDFILQPLGMGPKNFIHGLRRTGPHDPLGGASSLGEATEPDPLRARRQPSADGSKPWWWSYFTSLSTHRPRWLLKY

SEQ ID NO: 7939 - protein, 144 aa, Homo sapiens
MYSEIQRERADIGGLMARPEYREWNPELIKPKKLLNPVKASRSHQELHRELLMNHRRGLGVDSKPELQRVLEHRRRNQLIKKKKEELEAKRLQCPFEQELLRRQQRLNQLEKPPEKEEDHAPEFIKVRENLRRIATLTSEEREL

SEQ ID NO: 7940 - protein, 658 aa, Homo sapiens
MVKHSTIYPSPEELEAVQNMVSTVECALKHVSDWLDETNKGTKTEGETEVKKDEAGENYSKDQGGRTLCGVMRIGLVAKGLLIKDDMDLELVLMCKDKPTETLLNTVKDNLPIQIQKLTEEKYQVEQCVNEASIIIRNTKEPTLTLKVILTSPLIRDELEKKDGENVSMKDPPDLLDRQKCLNALASLRHAKWFQARANGLKSCVIVLRILRDLCNRVPTWAPLKGWPLELICEKSIGTCNRPLGAGEALRRVMECLASGILLPGGPGLHDPCERDPTDALSYMTIQQKEDITHSAQHALRLSAFGQIYKVLEMDPLPSSKPFQKYSWSVTDKEGAGSSALKRPFEDGLGDDKDPNKKMKRNLRKILDSKAIDLMNALMRLNQIRPGLQYKLLSQSGPVHAPVFTMSVDVDGTTYEASGPSKKTAKLHVAVKVLQAMGYPTGFDADIECMSSDEKSDNESKNETVSSNSSNNTGNSTTETSSTLEVRTQGPILTASGKNPVMELNEKRRGLKYELISETGGSHDKRFVMEVEVDGQKFRGAGPNKKVAKASAALAALEKLFSGPNAANNKKKKIIPQAKGVVNTAVSAAVQAVRGRGRGTLTRGAFVGATAAPGYIAPGYGTPYGYSTAAPAYGLPKRMVLLPVMKFPTYPVPHYSFF

SEQ ID NO: 7941 - protein, 729 aa, Homo sapiens
MSKRLRSSEVCADCSGPDPSWASVNRGTFLCDECCSVHRSLGRHISQVRHLKHTPWPPTLLQMVETLYNNGANSIWEHSLLDPASIMSGRRKANPQDKVHPNKAEFIRAKYQMLAFVHRLPCRDDDSVTAKDLSKQLHSSVRTGNLETCLRLLSLGAQANFFHPEKGNTPLHVASKAGQILQAELLAVYGADPGTQDSSGKTPVDYARQGGHHELAERLVEIQYELTDRLAFYLCGRKPDHKNGQHFIIPQMADSSLDLSELAKAAKKKLQSLSNHLFEELAMDVYDEVDRRETDAVWLATQNHSALVTETTVVPFLPVNPEYSSTRNQGRQKLARFNAHEFATLVIDILSDAKRRQQGSSLSGSKDNVELILKTINNQHSVESQDNDQPDYDSVASDEDTDLETTASKTNRQKSLDSDLSDGPVTVQEFMEVKNALVASEAKIQQLMKVNNNLSDELRIMQKKLQTLQSENSNLRKQATTNVYQVQTGSEYTDTSNHSSLKRRPSARGSRPMSMYETGSGQKPYLPMGEASRPEESRMRLQPFPAHASRLEKQNSTPESDYDNTPNDMEPDGMGSSRKGRQRSMVWPGDGLVPDTAEPHVAPSPTLPSTEDVIRKTEQITKNIQELLRAAQENKHDSYIPCSERIHVAVTEMAALFPKKPKSDMVRTSLRLLTSSAYRLQSECKKTLPGDPGSPTDVQLVTQQVIQCAYDIAKAAKQLVTITTKENNN

SEQ ID NO: 7942 - protein, 696 aa, Homo sapiens
GKTPDSEDKLFSPVIARNLADEIESYMNLKSPLGSKSSSMELHREENRESGMTTAFIHALERRSSLPLDHGSPAQENPESEKSSPAVSRSKTFTGRFKQQTPSRTHKERSTSLSALVRSSPHGSLGSVVNSLSGLKLDNILSGPKIDVLKSGMKQAATVASKMWVAVASAYSYSDDEEETNRDYSFPAGLEDHILGENISPNTSISGLVPSELTQSNTSLGSSSSSGDVGKLHYPTGEVPFPRGMKGQDFEKSDHGSSQNTSMSSIYQNCAMEVLMSSCSQCRACGALVYDEEIMAGWTADDSNLNTACPFCKSNFLPLLNIEFKDLRGSASFFLKPSTSGDSLQSGSIPLANESLEHKPVSSLAEPDLINFMDFPKHNQIITEETGSAVEPSDEIKRASGDVQTMKISSVPNSLSKRNVSLTRSHSVGGPLQNIDFTQRPFHGISTVSLPNSLQEVVDPLGKRPNPPPVSVPYLSPLVLRKELESLLENEGDQVIHTSSFINQHPIIFWNLVWYFRRLDLPSNLPGLILTSEHCNEGVQLPLSSLSQDSKLVYIQLLWDNINLHQEPREPLYVSWRNFNSEKKSSLLSEEQQETSTLVETIRQSIQHNNVLKPINLLSQQMKPGMKRQRSLYREILFLSLVSLGRENIDIEAFDNEYGIAYNSLSSEILERLQKIDAPPSASVEWCRKCFGAPLI

SEQ ID NO: 7943 - protein, 604 aa, Homo sapiens
MASTWAIQAHMDQDEPLEVKIEEEKYTTRQDWDLRKNNTHSREVFRQYFRQFCYQETSGPREALSRLRELCHQWLRPETHTKEQILELLVLEQFLTILPEELQAWVQEQHPESGEEVVTVLEDLERELDEPGEQVSVHTGEQEMFLQETVRLRKEGEPSMSLQSMKAQPKYESPELESQQEQVLDVETGNEYGNLKQEVSEEMEPHGKTSSKFENDMSKSARCGETREPEEITEEPSACSREDKQPTCDENGVSLTENSDHTEHQRICPGEESYGCDDCGKAFSQHSHLIEHQRIHTGDRPYKCEECGKAFRGRTVLIRHKIIHTGEKPYKCNECGKAFGRWSALNQHQRLHTGEKHYHCNDCGKAFSQKAGLFHHIKIHTRDKPYQCTQCNKSFSRRSILTQHQGVHTGAKPYECNECGKAFVYNSSLVSHQEIHHKEKCYQCKECGKSFSQSGLIQHQRIHTGEKPYKCDVCEKAFIQRTSLTEHQRIHTGERPYKCDKCGKAFTQRSVLTEHQRIHTGERPYKCDECGNAFRGITSLIQHQRIHTGEKPYQCDECGKAFRQRKKTSYKEILLKNHSEPQAGVNLLLSSLIPEWQSCFRRDL

SEQ ID NO: 7944 - protein, 364 aa, Homo sapiens
MEDKMWSECEGPEMSLVCLTDFQAHAREQLSKSTRDFIEGGADDSITRDDNIAAFKRIRLRPRYLRDVSEVDTRTTIQGEEISAPICIAPTGFHCLVWPDGEMSTARAAQAAGICYITSTFASCSLEDIVIAAPEGLRWFQLYVHPDLQLNKQLIQRVESLGFKALVITLDTPVCGNRRHDIRNQLRRNLTLTDLQSPKKGNAIPYFQMTPISTSLCWNDLSWFQSITRLPIILKGILTKEDAELAVKHNVQGIIVSNHGGRQLDEVLASIDALTEVVAAVKGKIEVYLDGGVRTGNDVLKALALGAKCIFLGRPILWGLACKGEHGVKEVLNILTNEFHTSMALTGCRSVAEINRNLVQFSRL

SEQ ID NO: 7945 - protein, 1529 aa, Homo sapiens
MLPCKKRRTTVTESLQHKGNQEENNVDLESAVKPESDQVKDLSSVSLSWDPSHGRVAGFEVQSLQDAGNQLGMEDTSLSSGMLTQNTNVPILEGVDVAISQGITLPSLESFHPLNIHIGKGKLHATGSKRGKKMTLRPGPVTQEDRCDHLTLKEPFSGEPSEEVKEEGGKPQMNSEGEIPSLPSGSQSAKPVSQPRKSTQPDVCASPQEKPLRTLFHQPEEEIEDGGLFIPMEEQDNEESEKRRKKKKGTKRKRDGRGQEGTLAYDLKLDDMLDRTLEDGAKQHNLTAVNVRNILHEVITNEHVVAMMKAAISETEDMPMFEPKMTRSKLKEVVEKGVVIPTWNISPIKKANEIKPPQFVDIHLEEDDSSDEEYQPDDEEEDETAEESLLESDVESTASSPRGAKKSRLRQSSEMTETDEESGILSEAEKVTTPAIRHISAEVVPMGPPPPPKPKQTRDSTFMEKLHAVDEELASSPVCMDSFQPMDDSLIAFRTRSKMPLKDVPLGQLEAELQAPDITPDMYDPNTADDEDWKMWLGGLMNDDVGNEDEADDDDDPEYNFLEDLDEPDTEDFRTDRAVRITKKEVNELMEELFETFQDEMGFSNMEDDGPEEEECVAEPRPNFNTPQALRFEEPLANLLNEQHRTVKELFEQLKMKKSSAKQLQEVEKVKPQSEKVHQTLILDPAQRKRLQQQMQQHVQLLTQIHLLATCNPNLNPEATTTRIFLKELGTFAQSSIALHHQYNPKFQTLFQPCNLMGAMQLIEDFSTHVSIDCSPHKTVKKTANEFPCLPKQVAWILATSKVFMYPELLPVCSLKAKNPQDKIVFTKAEDNLLALGLKHFEGTEFPNPLISKYLLTCKTAHQLTVRIKNLNMNRAPDNIIKFYKKTKQLPVLGKCCEEIQPHQWKPPIEREEHRLPFWLKASLPSIQEELRHMADGAREVGNMTGTTEINSDRSLEKDNLELGSESRYPLLLPKGVVLKLKPVATRFPRKAWRQKRSSVLKPLLIQPSPSLQPSFNPGKTPARSTHSEAPPSKMVLRIPHPIQPATVLQTVPGVPPLGVSGGESFESPAALPAVPPEARTSFPLSESQTLLSSAPVPKVMLPSLAPSKFRKPYVRRRPSKRRGVKASPCMKPAPVIHHPASVIFTVPATTVKIVSLGGGCNMIQPVNAAVAQSPQTIPITTLLVNPTSFPCPLNQSLVASSVSPLIVSGNSVNLPIPSTPEDKAHVNVDIACAVADGENAFQGLEPKLEPQELSPLSATVFPKVEHSPGPPLADAECQEGLSENSACRWTVVKTEEGRQALEPLPQGIQESLNNPTPGDLEEIVKMEPEEAREEISGSPERDICDDIKVEHAVELDTGAPSEELSSAGEVTKQTVLQKEEERSQPTKTPSSSQEPPDEGTSGTDVNKGSSKNALSSMDPEVRLSSPPGKPEDSSSVDGQSVGTPVGPETGGEKNGPEEEEEEDFDDLTQDEEDEMSSASEESVLSVPELQVRAGEYSQVFRGLSNMYHLLICHLLACCTMDSPKIICI

SEQ ID NO: 7946 - protein, 499 aa, Homo sapiens
MPLVKRNIEPRHLCRGALPEGITSELECVTNSTLAAIIRQLSSLSKHAEDIFGELFNEANNFYIRANSLQDRIDRLAVKVTQLDSTVEEVSLQDINMKKAFKSSTVQDQQVVSKNSIPNPVADIYNQSDKPPPLNILTPYRDDKKDGLKFYTDPSYFFDLWKEKMLQDTEDKRKEKRRQKREKHKLNPNRNQQVNVRKVRTRKEEWERRKMGIEFMSDAKKLEQAGSAKEDRVPSGSHASDVTDYSYPATPNHSLHPQPVTPSYAAGDVPPHGPASQAAEHEYRPPSASARHMALNRPQQPPPPPPPQAPEGSQASAPMAPADYGMLPAQIIEYYNPSGPPPPPPPPVIPSAQTAFVSPLQMPMQPPFPASASSTHAAPPHPPSTGLLVTAPPPPGPPPPPPGPPGPGSSLSSSPMHGPPVAEAKRQEPAQPPISDARSDLLAAIRMGIQLKKVQEQREQEAKREPVGNDVATILSRRIAVEYSDSDDDSEFDENDWSD

SEQ ID NO: 7947 - protein, 363 aa, Homo sapiens
MEPKPQKSPGKQFTFSYENEVCKQDYFIKSPPSQLFSSVTSWKKRFFILSKAGEKSFSLSYYKDHHHRGSIEIDQNSSVEVGISSQEKMQSVQKMFKCHPDEVMSIRTTNREYFLIGHDREKIKDWVSFMSSFRQDIKATQQNTEEELSLGNKRTLFYSSPLLGPSSTSEAVGSSSPRNGLQDKHLMEQSSPGFRQTHLQDLSEATQDVKEENHYLTPRSVLLELDNIIASSDSGESIETDGPDQVSGRIECHYEPMESYFFKETSHESVDSSKEEPQTLPETQDGDLHLQEQGSGIDWCLSPADVEAQTTNDQKGSASLTVVQLSILINNIPDESQVEKLNVFLSPPDVINYLALTEATGRI

SEQ ID NO: 7948 - protein, 716 aa, Homo sapiens
MNNFRATILFWAAAAWAKSGKPSGEMDEVGVQKCKNALKLPVLEVLPGGGWDNLRNVDMGRVMELTYSNCRTTEDGQYIIPDEIFTIPQKQSNLEMNSEILESWANYQSSTSYSINTELSLFSKVNGKFSTEFQRMKTLQVKDQAITTRVQVRNLVYTVKINPTLELSSGFRKELLDISDRLENNQTRMATYLAELLVLNYGTHVTTSVDAGAALIQEDHLRASFLQDSQSSRSAVTASAGLAFQNTVNFKFEENYTSQNVLTKSYLSNRTNSRVQSIGGVPFYPGITLQAWQQGITNHLVAIDRSGLPLHFFINPNMLPDLPGPLVKKVSKTVETAVKRYYTFNTYPGCTDLNSPNFNFQANTDDGSCEGKMTNFSFGGVYQECTQLSGNRDVLLCQKLEQKNPLTGDFSCPSGYSPVHLLSQIHEEGYNHLECHRKCTLLVFCKTVCEDVFQVAKAEFRAFWCVASSQVPENSGLLFGGLFSSKSINPMTNAQSCPAGYFPLRLFENLKVCVSQDYELGSRFAVPFGGFFSCTVGNPLVDPAISRDLGAPSLKKCPGGFSQHPALISDGCQVSYCVKSGLFTGGSLPPARLPPFTRPPLMSQAATNTVIVTNSENARSWIKDSQTHQWRLGEPIELRRAMNVIHGDGGGLSGGAAAGVTVGVTTILAVVITLAIYGTRKFKKKAYQAIEERQSLVPGTAATGDTTYQEQGQSPA

SEQ ID NO: 7949 - protein, 525 aa, Homo sapiens
MRVFCVGLLLFSVTWAAPTFQPQTEKTKQSCVEEQRQEEKNKDNIGFHHLGKRINQELSSKENIVQERKKDLSLSEASENKGSSKSQNYFTNRQRLNKEYSISNKENTHNGLRMSIYPKSTGNKGFEDGDDAISKLHDQEEYGAALIRNNMQHIMGPVTAIKLLGEENKENTPRNVLNIIPASMNYAKAHSKDKKKPQRDSQAQKSPVKSKSTHRIQHNIDYLKHLSKVKKIPSDFEGSGYTDLQERGDNDISPFSGDGQPFKDIPGKGEATGPDLEGKDIQTGFAGPSEAESTHLDTKKPGYNEIPEREENGGNTIGTRDETAKEADAVDVSLVEGSNDIMGSTNFKELPGREGNRVDAGSQNAHQGKVEFHYPPAPSKEKRKEGSSDAAESTNYNEIPKNGKGSTRKGVDHSNRNQATLNEKQRFPSKGKSQGLPIPSRGLDNEIKNEMDSFNGPSHENIITHGRKYHYVPHRQNNSTRNKGMPQGKGSWGRQPHSNRRFSSRRRDDSSESSDSGSSSESDGD

SEQ ID NO: 7950 - protein, 847 aa, Homo sapiens
MSKSFQQSSLSRDSQGHGRDLSAAGIGLLAAATQSLSMPASLGRMNQGTARLASLMNLGMSSSLNQQGAHSALSSASTSSHNLQSIFNIGSRGPLPLSSQHRGDADQASNILASFGLSARDLDELSRYPEDKITPENLPQILLQLKRRRTEEGPTLSYGRDGRSATREPPYRVPRDDWEEKRHFRRDSFDDRGPSLNPVLDYDHGSRSQESGYYDRMDYEDDRLRDGERCRDDSFFGETSHNYHKFDSEYERMGRGPGPLQERSLFEKKRGAPPSSNIEDFHGLLPKGYPHLCSICDLPVHSNKEWSQHINGASHSRRCQLLLEIYPEWNPDNDTGHTMGDPFMLQQSTNPAPGILGPPPPSFHLGGPAVGPRGNLGAGNGNLQGPRHMQKGRVETSRVVHIMDFQRGKNLRYQLLQLVEPFGVISNHLILNKINEAFIEMATTEDAQAAVDYYTTTPALVFGKPVRVHLSQKYKRIKKPEGKPDQKFDQKQELGRVIHLSNLPHSGYSDSAVLKLAEPYGKIKNYILMRMKSQAFIEMETREDAMAMVDHCLKKALWFQGRCVKVDLSEKYKKLVLRIPNRGIDLLKKDKSRKRSYSPDGKESPSDKKSKTDGSQKTESSTEGKEQEEKSGEDGEKDTKDDQTEQEPNMLLESEDELLVDEEEAAALLESGSSVGDETDLANLGDVASDGKKEPSDKAVKKDGSASAAAKKKLKKVDKIEELDQENEAALENGIKNEENTEPGAESSENADDPNKDTSENADGQSDENKDDYTIPDEYRIGPYQPNVPVGIDYVIPKTGFYCKLCSLFYTNEEVAKNTHCSSLPHYQKLKKFLNKLAEERRQKKET

SEQ ID NO: 7951 - protein, 1575 aa, Homo sapiens
MAAAALLLGLALLAPRAAGAGMGACYDGAGRPQRCLPVFENAAFGRLAQASHTCGSPPEDFCPHVGAAGAGAHCQRCDAADPQRHHNASYLTDFHSQDESTWWQSPSMAFGVQYPTSVNITLRLGKAYEITYVRLKFHTSRPESFAIYKRSRADGPWEPYQFYSASCQKTYGRPEGQYLRPGEDERVAFCTSEFSDISPLSGGNVAFSTLEGRPSAYNFEESPGLQEWVTSTELLISLDRLNTFGDDIFKDPKVLQSYYYAVSDFSVGGRCKCNGHASECGPDVAGQLACRCQHNTTGTDCERCLPFFQDRPWARGTAEAAHECLPCNCSGRSEECTFDRELFRSTGHGGRCHHCRDHTAGPHCERCQENFYHWDPRMPCQPCDCQSAGSLHLQCDDTGTCACKPTVTGWKCDRCLPGFHSLSEGGCRPCTCNPAGSLDTCDPRSGRCPCKENVEGNLCDRCRPGTFNLQPHNPAGCSSCFCYGHSKVCASTAQFQVHHILSDFHQGAEGWWARSVGGSEHPPQWSPNGVLLSPEDEEELTAPEKFLGDQRFSYGQPLILTFRVPPGDSPLPVQLRLEGTGLALSLRHSSLSGPQDAGHPREVELRFHLQETSEDVAPPLPPFHFQRLLANLTSLRLRVSPGPSPAGPVFLTEVRLTSARPGLSPPASWVEICSCPTGYTGQFCESCAPGYKREMPQGGPYASCVPCTCNQHGTCDPNTGICVCSHHTEGPSCERCLPGFYGNPFAGQADDCQPCPCPGQSACTTIPESREVVCTHCPPGQRGRRCEVCDDGFFGDPLGLFGHPQPCHQCQCSGNVDPNAVGNCDPLSGHCLRCLHNTTGDHCEHCQEGFYGSALAPRPADKCMPCSCHPQGSVSEQMPCDPVTGQCSCLPHVTARDCSRCYPGFFDLQPGRGCRSCKCHPLGSQEDQCHPKTGQCTCRPGVTGQACDRCQLGFFGFSIKGCRACRCSPLGAASAQCHENGTCVCRPGFEGYKCDRCHDNFFLTADGTHCQQCPSCYALVKEEAAKLKARLTLTEGWLQGSDCGSPWGPLDILLGEAPRGDVYQGHHLLPGAREAFLEQMMSLEGAVKAAREQLQRLNKGARCAQAGSQKTCTQLADLEAVLESSEEEILHAAAILASLEIPQEGPSQPTKWSHLATEARALARSHRDTATKIAATAWRALLASNTSYALLWNLLEGRVALETQRDLEDRYQEVQAAQKALRTAVAEVLPEAESVLATVQQVGADTAPYLALLASPGALPQKSRAEDLGLKAKALEKTVASWQHMATEAARTLQTAAQATLRQTEPLTKLHQEARAALTQASSSVQAATVTVMGARTLLADLEGMKLQFPRPKDQAALQRKADSVSDRLLADTRKKTKQAERMLGNAAPLSSSAKKKGREAEVLAKDSAKLAKALLRERKQAHRRASRLTSQTQATLQQASQQVLASEARRQELEEAERVGAGLSEMEQQIRESRISLEKDIETLSELLARLGSLDTHQAPAQALNETQWALERLRLQLGSPGSLQRKLSLLEQESQQQELQIQGFESDLAEIRADKQNLEAILHSLPENCASWQ

SEQ ID NO: 7952 - protein, 774 aa, Homo sapiens
MAHEAMEYDVQVQLNHAEQQPAPAGMASSQGGPALLQPVPADVVSSQGVPSILQPAPAEVISSQATPPLLQPAPQLSVDLTEVEVLGEDTVENINPRTSEQHRQGSDGNHTIPASSLHSMTNFISGLQRLHGMLEFLRPSSSNHSVGPMRTRRRVSASRRARAGGSQRTDSARLRAPLDAYFQVSRTQPDLPATTYDSETRNPVSEELQVSSSSDSDSDSSAEYGGVVDQAEESGAVILEEQLAGVSAEQEVTCIDGGKTLPKQPSPQKSEPLLPSASMDEEEGDTCTICLEQWTNAGDHRLSALRCGHLFGYRCISTWLKGQVRKCPQCNKKARHSDIVVLYARTLRALDTSEQERMKSSLLKEQMLRKQAELESAQCRLQLQVLTDKCTRLQRRVQDLQKLTSHQSQNLQQPRGSQAWVLSCSPSSQGQHKHKYHFQKTFTVSQAGNCRIMAYCDALSCLVISQPSPQASFLPGFGVKMLSTANMKSSQYIPMHGKQIRGLAFSSYLRGLLLSASLDNTIKLTSLETNTVVQTYNAGRPVWSCCWCLDEANYIYAGLANGSILVYDVRNTSSHVQELVAQKARCPLVSLSYMPRAASAAFPYGGVLAGTLEDASFWEQKMDFSHWPHVLPLEPGGCIDFQTENSSRHCLVTYRPDKNHTTIRSVLMEMSYRLDDTGNPICSCQPVHTFFGGPTCKLLTKNAIFQSPENDGNILVCTGDEAANSALLWDAASGSLLQDLQTDQPVLDICPFEVNRNSYLATLTEKMVHIYKWE

SEQ ID NO: 7953 - protein, 1008 aa, Homo sapiens
MSQPIMVQRRSGQGFHGNSEVNAILSPRSESGGLGVSMVEYVLSSSPADKLDSRFRKGNFGTRDAETDGPEKGDQKGKASPFEEDQNRDLKQGDDDDSKINGRGLPNGMDADCKDFNRTPGSRQASPTEVVERLGPNTNPSEGLGPLPNPTANKPLVEEFSNPETQNLDAMEQVGLESLQFDYPGNQVPMDSSGATVGLFDYNSQQQLFQRTNALTVQQLTAAQQQQYALAAAQQPHIAGVFSAGLAPAAFVPNPYIISAAPPGTDPYTAAGLAAAATLAGPAVVPPQYYGVPWGVYPANLFQQQAAAAANNTASQQAASQAQPGQQQVLRAGAGQRPLTPNQGQQGQQAESLAAAAAANPTLAFGQGLATGMPGYQVLAPTAYYDQTGALVVGPGARTGLGAPVRLMAPTPVLISSAAAQAAAAAAAGGTASSLTGSTNGLFRPIGTQPPQQQQQQPSTNLQSNSFYGSSSLTNSSQSSSLFSHGPGQPGSTSLGFGSGNSLGAAIGSALSGFGSSVGSSASSSATRRESLSTSSDLYKRSSSSLAPIGQPFYNSLGFSSSPSPIGMPLPSQTPGHSLTPPPSLSSHGSSSSLHLGGLTNGSGRYISAAPGAEAKYRSASSTSSLFSSSSQLFPPSRLRYNRSDIMPSGRSRLLEDFRNNRFPNLQLRDLIGHIVEFSQDQHGSRFIQQKLERATPAERQMVFNEILQAAYQLMTDVFGNYVIQKFFEFGSLDQKLALATRIRGHVLPLALQMYGCRVIQKALESISSDQQSEMVKELDGHVLKCVKDQNGNHVVQKCIECVQPQSLQFIIDAFKGQVFVLSTHPYGCRVIQRILEHCTAEQTLPILEELHQHTEQLVQDQYGNYVIQHVLEHGRPEDKSKIVSEIRGKVLALSQHKFASNVVEKCVTHASRAERALLIDEVCCQNDGPHSALYTMMKDQYANYVVQKMIDMAEPAQRKIIMHKIRPHITTLRKYTYGKHILAKLEKYYLKNSPDLGPIGGPPNGML

SEQ ID NO: 7954 - protein, 750 aa, Homo sapiens
MSQWYELQQLDSKFLEQVHQLYDDSFPMEIRQYLAQWLEKQDWEHAANDVSFATIRFHDLLSQLDDQYSRFSLENNFLLQHNIRKSKRNLQDNFQEDPIQMSMIIYSCLKEERKILENAQRFNQAQSGNIQSTVMLDKQKELDSKVRNVKDKVMCIEHEIKSLEDLQDEYDFKCKTLQNREHETNGVAKSDQKQEQLLLKKMYLMLDNKRKEVVHKIIELLNVTELTQNALINDELVEWKRRQQSACIGGPPNACLDQLQNWFTIVAESLQQVRQQLKKLEELEQKYTYEHDPITKNKQVLWDRTFSLFQQLIQSSFVVERQPCMPTHPQRPLVLKTGVQFTVKLRLLVKLQELNYNLKVKVLFDKDVNERNTVKGFRKFNILGTHTKVMNMEESTNGSLAAEFRHLQLKEQKNAGTRTNEGPLIVTEELHSLSFETQLCQPGLVIDLETTSLPVVVISNVSQLPSGWASILWYNMLVAEPRNLSFFLTPPCARWAQLSEVLSWQFSSVTKRGLNVDQLNMLGEKLLGPNASPDGLIPWTRFCKENINDKNFPFWLWIESILELIKKHLLPLWNDGCIMGFISKERERALLKDQQPGTFLLRFSESSREGAITFTWVERSQNGGEPDFHAVEPYTKKELSAVTFPDIIRNYKVMAAENIPENPLKYLYPNIDKDHAFGKYYSRPKEAPEPMELDGPKGTGYIKTELISVSEVHPSRLQTTDNLLPMSPEEFDEVSRIVGSVEFDSMMNTV

SEQ ID NO: 7955 - protein, 1068 aa, Homo sapiens
MPPGVDCPMEFWTKEENQSVVVDFLLPTGVYLNFPVSRNANLSTIKQLLWHRAQYEPLFHMLSGPEAYVFTCINQTAEQQELEDEQRRLCDVQPFLPVLRLVAREGDRVKKLINSQISLLIGKGLHEFDSLCDPEVNDFRAKMCQFCEEAAARRQQLGWEAWLQYSFPLQLEPSAQTWGPGTLRLPNRALLVNVKFEGSEESFTFQVSTKDVPLALMACALRKKATVFRQPLVEQPEDYTLQVNGRHEYLYGSYPLCQFQVQKPRAKPPPIPAKKPSSVSLWSLEQPFRIELIQGSKVNADERMKLVVQAGLFHGNEMLCKTVSSSEVSVCSEPVWKQRLEFDINICDLPRMARLCFALYAVIEKAKKARSTKKKSKKADCPIAWANLMLFDYKDQLKTGERCLYMWPSVPDEKGELLNPTGTVRSNPNTDSAAALLICLPEVAPHPVYYPALEKLPGGMLLASREWRPELLWMRLHAEDSAPSRMIGVAMPGLGVLPGLVQAPGDAECSRLLQILELGRHSECVHVTEEEQLQLREILERRGSGELYEHEKDLVWKLRHEVQEHFPEALARLLLVTKWNKHEDVAQMLYLLCSWPELPVLSALELLDFSFPDCHVGSFAIKSLRKLTDDELFQYLLQLVQVLKYESYLDCELTKFLLDRALANRKIGHFLFWHLRSEMHVPSVALRFGLILEAYCRGSTHHMKVLMKQGEALSKLKALNDFVKLSSQKTPKPQTKELMHLCMRQEAYLEALSHLQSPLDPSTLLAEVCVEQCTFMDSKMKPLWIMYSNEEAGSGGSVGIIFKNGDDLRQDMLTLQMIQLMDVLWKQEGLDLRMTPYGCLPTGDRTGLIEVVLRSDTIANIQLNKSNMAATAAFNKDALLNWLKSKNPGEALDRAIEEFTLSCAGYCVATYVLGIGDRHSDNIMIRESGQLFHIDFGHFLGNFKTKFGINRERVPFILTYDFVHVIQQGKTNNSEKFERFRGYCERAYTILRRHGLLFLHLFALMRAAGLPELSCSKDIQYLKDSLALGKTEEEALKHFRVKFNEALRESWKTKVNWLAHNVSKDNRQ

SEQ ID NO: 7956 - protein, 461 aa, Homo sapiens
MDSVAFEDVAVNFTLEEWALLDPSQKNLYRDVMRETFRNLASVGKQWEDQNIEDPFKIPRRNISHIPERLCESKEGGQGEETFSQIPDGILNKKTPGVKPCESSVCGEVGMGPSSLNRHIRDHTGREPNEYQEYGKKSYTRNQCGRALSYHRSFPVRERTHPGGKPYDCKECGETFISLVSIRRHMLTHRGGVPYKCKVCGKAFDYPSLFRIHERSHTGEKPYECKQCGKAFSCSSYIRIHERTHTGDKPYECKQCGKAFSCSKYIRIHERTHTGEKPYECKQCGKAFRCASSVRSHERTHTGEKLFECKECGKALTCLASVRRHMIKHTGNGPYKCKVCGKAFDFPSSFRIHERTHTGEKPYDCKQCGKAFSCSSSFRKHERIHTGEKPYKCTKCGKAFSRSSYFRIHERTHTGEKPYECKQCGKAFSRSTYFRVHEKIHTGEKPYENPNPNASVVPVLS

SEQ ID NO: 7957 - protein, 791 aa, Homo sapiens
MEEKRRKYSISSDNSDTTDSHATSTSASRCSKLPSSTKSGWPRQNEKKPSEVFRTDLITAMKIPDSYQLSPDDYYILADPWRQEWEKGVQVPAGAEAIPEPVVRILPPLEGPPAQASPSSTMLGEGSQPDWPGGSRYDLDEIDAYWLELINSELKEMERPELDELTLERVLEELETLCHQNMARAIETQEGLGIEYDEDVVCDVCRSPEGEDGNEMVFCDKCNVCVHQACYGILKVPTGSWLCRTCALGVQPKCLLCPKRGGALKPTRSGTKWVHVSCALWIPEVSIGCPEKMEPITKISHIPASRWALSCSLCKECTGTCIQCSMPSCVTAFHVTCAFDHGLEMRTILADNDEVKFKSFCQEHSDGGPRNEPTSEPTEPSQAGEDLEKVTLRKQRLQQLEEDFYELVEPAEVAERLDLAEALVDFIYQYWKLKRKANANQPLLTPKTDEVDNLAQQEQDVLYRRLKLFTHLRQDLERVRNLCYMVTRRERTKHAICKLQEQIFHLQMKLIEQDLCRAGLSTSFPIDGTFFNSWLAQSVQITAENMAMSEWPLNNGHREDPAPGLLSEELLQDEETLLSFMRDPSLRPGDPARKARGRTRLPAKKKPPPPPPQDGPGSRTTPDKAPKKTWGQDAGSGKGGQGPPTRKPPRRTSSHLPSSPAAGDCPILATPESPPPLAPETPDEAASVAADSDVQVPGPAASPKPLGRLRPPRESKVTRRLPGARPDAGMGPPSAVAERPKVSLHFDTETDGYFSDGEMSDSDVEAEDGGVQRGPREAGAEEVVRMGVLAS

SEQ ID NO: 7958 - protein, 960 aa, Homo sapiens
MWRLRRAAVACEVCQSLVKHSSGIKGSLPLQKLHLVSRSIYHSHHPTLKLQRPQLRTSFQQFSSLTNLPLRKLKFSPIKYGYQPRRNFWPARLATRLLKLRYLILGSAVGGGYTAKKTFDQWKDMIPDLSEYKWIVPDIVWEIDEYIDFEKIRKALPSSEDLVKLAPDFDKIVESLSLLKDFFTSGSPEETAFRATDRGSESDKHFRKVSDKEKIDQLQEELLHTQLKYQRILERLEKENKELRKLVLQKDDKGIHHRKLKKSLIDMYSEVLDVLSDYDASYNTQDHLPRVVVVGDQSAGKTSVLEMIAQARIFPRGSGEMMTRSPVKVTLSEGPHHVALFKDSSREFDLTKEEDLAALRHEIELRMRKNVKEGCTVSPETISLNVKGPGLQRMVLVDLPGVINTVTSGMAPDTKETIFSISKAYMQNPNAIILCIQDGSVDAERSIVTDLVSQMDPHGRRTIFVLTKVDLAEKNVASPSRIQQIIEGKLFPMKALGYFAVVTGKGNSSESIEAIREYEEEFFQNSKLLKTSMLKAHQVTTRNLSLAVSDCFWKMVRESVEQQADSFKATRFNLETEWKNNYPRLRELDRNELFEKAKNEILDEVISLSQVTPKHWEEILQQSLWERVSTHVIENIYLPAAQTMNSGTFNTTVDIKLKQWTDKQLPNKAVEVAWETLQEEFSRFMTEPKGKEHDDIFDKLKEAVKEESIKRHKWNDFAEDSLRVIQHNALEDRSISDKQQWDAAIYFMEEALQARLKDTENAIENMVGPDWKKRWLYWKNRTQEQCVHNETKNELEKMLKCNEEHPAYLASDEITTVRKNLESRGVEVDPSLIKDTWHQVYRRHFLKTALNHCNLCRRGFYYYQRHFVDSELECNDVVLFWRIQRMLAITANTLRQQLTNTEVRRLEKNVKEVLEDFAEDGEKKIKLLTGKRVQLAEDLKKVREIQEKLDAFIEALHQEK

SEQ ID NO: 7959 - protein, 1341 aa, Homo sapiens
MTKRKKTINLNIQDAQKRTALHWACVNGHEEVVTFLVDRKCQLDVLDGEHRTPLMKALQCHQEACANILIDSGADINLVDVYGNTALHYAVYSEILSVVAKLLSHGAVIEVHNKASLTPLLLSITKRSEQIVEFLLIKNANANAVNKYKCTALMLAVCHGSSEIVGMLLQQNVDVFAADICGVTAEHYAVTCGFHHIHEQIMEYIRKLSKNHQNTNPEGTSAGTPDEAAPLAERTPDTAESLVEKTPDEAAPLVERTPDTAESLVEKTPDEAASLVEGTSDKIQCLEKATSGKFEQSAEETPREITSPAKETSEKFTWPAKGRPRKIAWEKKEDTPREIMSPAKETSEKFTWAAKGRPRKIAWEKKETPVKTGCVARVTSNKTKVLEKGRSKMIACPTKESSTKASANDQRFPSESKQEEDEEYSCDSRSLFESSAKIQVCIPESIYQKVMEINREVEEPPKKPSAFKPAIEMQNSVPNKAFELKNEQTLRADPMFPPESKQKDYEENSWDSESLCETVSQKDVCLPKATHQKEIDKINGKLEESPNKDGLLKATCGMKVSIPTKALELKDMQTFKAEPPGKPSAFEPATEMQKSVPNKALELKNEQTLRADEILPSESKQKDYEENSWDTESLCETVSQKDVCLPKAAHQKEIDKINGKLEGSPVKDGLLKANCGMKVSIPTKALELMDMQTFKAEPPEKPSAFEPAIEMQKSVPNKALELKNEQTLRADEILPSESKQKDYEESSWDSESLCETVSQKDVCLPKATHQKEIDKINGKLEESPDNDGFLKAPCRMKVSIPTKALELMDMQTFKAEPPEKPSAFEPAIEMQKSVPNKALELKNEQTLRADQMFPSESKQKKVEENSWDSESLRETVSQKDVCVPKATHQKEMDKISGKLEDSTSLSKILDTVHSCERARELQKDHCEQRTGKMEQMKKKFCVLKKKLSEAKEIKSQLENQKVKWEQELCSVRLTLNQEEEKRRNADILNEKIREELGRIEEQHRKELEVKQQLEQALRIQDIELKSVESNLNQVSHTHENENYLLHENCMLKKEIAMLKLEIATLKHQYQEKENKYFEDIKILKEKNAELQMTLKLKEESLTKRASQYSGQLKVLIAENTMLTSKLKEKQDKEILEAEIESHHPRLASAVQDHDQIVTSRKSQEPAFHIAGDACLQRKMNVDVSSTIYNNEVLHQPLSEAQRKSKSLKINLNYAGDALRENTLVSEHAQRDQRETQCQMKEAEHMYQNEQDNVNKHTEQQESLDQKLFQLQSKNMWLQQQLVHAHKKADNKSKITIDIHFLERKMQHHLLKEKNEEIFNYNNHLKNRIYQYEKEKAETENS

SEQ ID NO: 7960 - protein, 588 aa, Homo sapiens
MGLYGQACPSVTSLRMTSELESSLTSMDWLPQLTMRAAIQKSDATQNAHGTGISKKNALLDPNTTLDQEEVQQHKDGKPPYSYASLITFAINSSPKKKMTLSEIYQWICDNFPYYREAGSGWKNSIRHNLSLNKCFLKVPRSKDDPGKGSYWAIDTNPKEDVLPTRPKKRARSVERVTLYNTDQDGSDSPRSSLNNSLSDQSLASVNLNSVGSVHSYTPVTSHPESVSQSLTPQQQPQYNLPERDKQLLFSEYNFEDLSASFRSLYKSVFEQSLSQQGLMNIPSESSQQSHTSCTYQHSPSSTVSTHPHSNQSSLSNSHGSGLNTTGSNSVAQVSLSHPQMHTQPSPHPPHRPHGLPQHPQRSPHPAPHPQQHSQLQSPHPQHPSPHQHIQHHPNHQHQTLTHQAPPPPQQVSCNSGVSNDWYATLDMLKESCRIASSVNWSDVDLSQFQGLMESMRQADLKNWSLDQVQFADLCSSLNQFFTQTGLIHSQSNVQQNVCHGAMHPTKPSQHIGTGNLYIDSRQNLPPSVMPPPGYPHIPQALSTPGTTMAGHHRAMNQQHMMPSQAFQMRRSLPPDDIQDDFDWDSIV

SEQ ID NO: 7961 - protein, 1631 aa, Homo sapiens
MERRAAGPGWAAYERLTAEEMDEQRRQNVAYQYLCRLEEAKRWMEACLKEELPSPVELEESLRNGVLLAKLGHCFAPSVVPLKKIYDVEQLRYQATGLHFRHTDNINFWLSAIAHIGLPSTFFPETTDIYDKKNMPRVVYCIHALSLFLFRLGLAPQIHDLYGKVKFTAEELSNMASELAKYGLQLPAFSKIGGILANELSVDEAAVHAAVLAINEAVERGVVEDTLAALQNPSALLENLREPLAAVYQEMLAQAKMEKAANARNHDDRESQDIYDHYLTQAEIQGNINHVNVHGALEVVDDALERQSPEALLKALQDPALALRGVRRDFADWYLEQLNSDREQKAQELGLVELLEKEEVQAGVAAANTKGDQEQAMLHAVQRINKAIRRRVAADTVKELMCPEAQLPPVYPVASSMYQLELAVLQQQQGELGQEELFVAVEMLSAVVLINRALEARDASGFWSSLVNPATGLAEVEGENAQRYFDALLKLRQERGMGEDFLSWNDLQATVSQVNAQTQEETDRVLAVSLINEALDKGSPEKTLSALLLPAAGLDDVSLPVAPRYHLLLVAAKRQKAQVTGDPGAVLWLEEIRQGVVRANQDTNTAQRMALGVAAINQAIKEGKAAQTERVLRNPAVALRGVVPDCANGYQRALESAMAKKQRPADTAFWVQHDMKDGTAYYFHLQTFQGIWEQPPGCPLNTSHLTREEIQSAVTKVTAAYDRQQLWKANVGFVIQLQARLRGFLVRQKFAEHSHFLRTWLPAVIKIQAHWRGYRQRKIYLEWLQYFKANLDAIIKIQAWARMWAARRQYLRRLHYFQKNVNSIVKIQAFFRARKAQDDYRILVHAPHPPLSVVRRFAHLLNQSQQDFLAEAELLKLQEEVVRKIRSNQQLEQDLNIMDIKIGLLVKNRITLQEVVSHCKKLTKRNKEQLSDMMVLDKQKGLKSLSKEKRQKLEAYQHLFYLLQTQPIYLAKLIFQMPQNKTTKFMEAVIFSLYNYASSRREAYLLLQLFKTALQEEIKSKVEQPQDVVTGNPTVVRLVVRFYRNGRGQSALQEILGKVIQDVLEDKVLSVHTDPVHLYKNWINQTEAQTGQRSHLPYDVTPEQALSHPEVQRRLDIALRNLLAMTDKFLLAITSSVDQIPYGMRYVAKVLKATLAEKFPDATDSEVYKVVGNLLYYRFLNPAVVAPDAFDIVAMAAGGALAAPQRHALGAVAQLLQHAAAGKAFSGQSQHLRVLNDYLEETHLKFRKFIHRACQVPEPEERFAVDEYSDMVAVAKPMVYITVGELVNTHRLLLEHQDCIAPDHQDPLHELLEDLGELPTIPDLIGESIAADGHTDLSKLEVSLTLTNKFEGLEADADDSNTRSLLLSTKQLLADIIQFHPGDTLKEILSLSASREQEAAHKQLMSRRQACTAQTPEPLRRHRSLTAHSLLPLAEKQRRVLRNLRRLEALGLVSARNGYQGLVDELAKDIRNQHRHRHRRKAELVKLQATLQGLSTKTTFYEEQGDYYSQYIRACLDHLAPDSKSSGKGKKQPSLHYTAAQLLEKGVLVEIEDLPASHFRNVIFDITPGDEAGKFEVNAKFLGVDMERFQLHYQDLLQLQYEGVAVMKLFNKAKVNVNLLIFLLNKKFLRK

SEQ ID NO: 7962 - protein, 461 aa, Homo sapiens
MEREGIWHSTLGETWEPNNWLEGQQDSHLSQVGVTHKETFTEMRVCGGNEFERCSSQDSILDTQQSIPMVKRPHNCNSHGEDATQNSELIKTQRMFVGKKIYECNQCSKTFSQSSSLLKHQRIHTGEKPYKCNVCGKHFIERSSLTVHQRIHTGEKPYKCNECGKAFSQSMNLTVHQRTHTGEKPYQCKECGKAFHKNSSLIQHERIHTGEKPYKCNECGKAFTQSMNLTVHQRTHTGEKPYECNECGKAFSQSMHLIVHQRSHTGEKPYECSQCGKAFSKSSTLTLHQRNHTGEKPYKCNKCGKSFSQSTYLIEHQRLHSGVKPFECNECGKAFSKNSSLTQHRRIHTGEKPYECMVCGKHFTGRSSLTVHQVIHTGEKPYECNECGKAFSQSAYLIEHQRIHTGEKPYECDQCGKAFIKNSSLTVHQRTHTGEKPYQCNECGKAFSRSTNLTRHQRTHT

SEQ ID NO: 7963 - protein, 584 aa, Homo sapiens
MFAVVFFILSLMTCQPGVTAQEKVNQRVRRAATPAAVTCQLSNWSEWTDCFPCQDKKYRHRSLLQPNKFGGTICSGDIWDQASCSSSTTCVRQAQCGQDFQCKETGRCLKRHLVCNGDQDCLDGSDEDDCEDVRAIDEDCSQYEPIPGSQKAALGYNILTQEDAQSVYDASYYGGQCETVYNGEWRELRYDSTCERLYYGDDEKYFRKPYNFLKYHFEALADTGISSEFYDNANDLLSKVKKDKSDSFGVTIGIGPAGSPLLVGVGVSHSQDTSFLNELNKYNEKKFIFTRIFTKVQTAHFKMRKDDIMLDEGMLQSLMELPDQYNYGMYAKFINDYGTHYITSGSMGGIYEYILVIDKAKMESLGITSRDITTCFGGSLGIQYEDKINVGGGLSGDHCKKFGGGKTERARKAMAVEDIISRVRGGSSGWSGGLAQNRSTITYRSWGRSLKYNPVVIDFEMQPIHEVLRHTSLGPLEAKRQNLRRALDQYLMEFNACRCGPCFNNGVPILEGTSCRCQCRLGSLGAACEQTQTEGAKADGSWSCWSSWSVCRAGIQERRRECDNPAPQNGGASCPGRKVQTQAC

SEQ ID NO: 7964 - protein, 262 aa, Homo sapiens
MAPGSPPGPAIATMKLNERSLAFYATCDAPVDNAGFLYKKGGRHAAYHRRWFVLRGNMLFYFEDAASREPVGVIILEGCTVELVEAAEEFAFAVRFAGTRARTYVLAAESQDAMEGWVKALSRASFDYLRLVVRELEQQLAAVRGGGGMALPQPQPQSLPLPPSLPSALAPVPSLPSAPAPVPALPLPRRPSALPPKENGCAVWSTEATFRPGPEPPPPPPRRRASAPHGPLDMAPFARLHECYGQEIRALRGQWLSSRVQP

SEQ ID NO: 7965 - protein, 622 aa, Homo sapiens
MREQLKGHETQTTCWDHPKMTELYQSLADLNNVRFSAYRTAMKLRRLQKALCLDLLSLSAACDALDQHNLKQNDQPMDILQIINCLTTIYDRLEQEHNNLVNVPLCVDMCLNWLLNVYDTGRTGRIRVLSFKTGIISLCKAHLEDKYRYLFKQVASSTGFCDQRRLGLLLHDSIQIPRQLGEVASFGGSNIEPSVRSCFQFANNKPEIEAALFLDWMRLEPQSMVWLPVLHRVAAAETAKHQAKCNICKECPIIGFRYRSLKHFNYDICQSCFFSGRVAKGHKMHYPMVEYCTPTTSGEDVRDFAKVLKNKFRTKRYFAKHPRMGYLPVQTVLEGDNMETPASSPQLSHDDTHSRIEHYASRLAEMENSNGSYLNDSISPNESIDDEHLLIQHYCQSLNQDSPLSQPRSPAQILISLESEERGELERILADLEEENRNLQAEYDRLKQQHEHKGLSPLPSPPEMMPTSPQSPRDAELIAEAKLLRQHKGRLEARMQILEDHNKQLESQLHRLRQLLEQPQAEAKVNGTTVSSPSTSLQRSDSSQPMLLRVVGSQTSDSMGEEDLLSPPQDTSTGLEEVMEQLNNSFPSSRGHNVGSLFHMADDLGRAMESLVSVMTDEEGAE

SEQ ID NO: 7966 - protein, 1141 aa, Homo sapiens
MDDSGELGGLETMETLTELGDELTLGDIDEMLQFVSNQVGEFPDLFSEQLCSSFPGSGGSGSSSGSSGSSSSSSNGRGSSSGAVDPSVQRSFTQVTLPSFSPSAASPQAPTLQVKVSPTSVPTTPRATPILQPRPQPQPQPQTQLQQQTVMITPTFSTTPQTRIIQQPLIYQNAATSFQVLQPQVQSLVTSSQVQPVTIQQQVQTVQAQRVLTQTANGTLQTLAPATVQTVAAPQVQQVPVLVQPQIIKTDSLVLTTLKTDGSPVMAAVQNPALTALTTPIQTAALQVPTLVGSSGTILTTMPVMMGQEKVPIKQVPGGVKQLEPPKEGERRTTHNIIEKRYRSSINDKIIELKDLVMGTDAKMHKSGVLRKAIDYIKYLQQVNHKLRQENMVLKLANQKNKLLKGIDLGSLVDNEVDLKIEDFNQNVLLMSPPASDSGSQAGFSPYSIDSEPGSPLLDDAKVKDEPDSPPVALGMVDRSRILLCVLTFLCLSFNPLTSLLQWGGAHDSDQHPHSGSGRSVLSFESGSGGWFDWMMPTLLLWLVNGVIVLSVFVKLLVHGEPVIRPHSRSSVTFWRHRKQADLDLARGDFAAAAGNLQTCLAVLGRALPTSRLDLACSLSWNVIRYSLQKLRLVRWLLKKVFQCRRATPATEAGFEDEAKTSARDAALAYHRLHQLHITGKLPAGSACSDVHMALCAVNLAECAEEKIPPSTLVEIHLTAAMGLKTRCGGKLGFLASYFLSRAQSLCGPEHSAVPDSLRWLCHPLGQKFFMERSWSVKSAAKESLYCAQRNPADPIAQVHQAFCKNLLERAIESLVKPQAKKKAGDQEEESCEFSSALEYLKLLHSFVDSVGVMSPPLSRSSVLKSALGPDIICRWWTSAITVAISWLQGDDAAVRSHFTKVERIPKALEVTESPLVKAIFHACRAMHASLPGKADGQQSSFCHCERASGHLWSSLNVSGATSDPALNHVVQLLTCDLLLSLRTALWQKQASASQAVGETYHASGAELAGFQRDLGSLRRLAHSFRPAYRKVFLHEATVRLMAGASPTRTHQLLEHSLRRRTTQSTKHGEVDAWPGQRERATAILLACRHLPLSFLSSPGQRAVLLAEAARTLEKVGDRRSCNDCQQMIVKLGGGTAIAAS

SEQ ID NO: 7967 - protein, 783 aa, Homo sapiens
MRWQCGTRFRGLRPAVAPWTALLALGLPGWVLAVSATAAAVVPEQHASVAGQHPLDWLLTDRGPFHRAQEYADFMERYRQGFTTRYRIYREFARWKVNNLALERKDFFSLPLPLAPEFIRNIRLLGRRPNLQQVTENLIKKYGTHFLLSATLGGEESLTIFVDKQKLGRKTETTGGASIIGGSGNSTAVSLETLHQLAASYFIDRESTLRRLHHIQIATGAIKVTETRTGPLGCSNYDNLDSVSSVLVQSPENKVQLLGLQVLLPEYLRERFVAAALSYITCSSEGELVCKENDCWCKCSPTFPECNCPDADIQAMEDSLLQIQDSWATHNRQFEESEEFQALLKRLPDDRFLNSTAISQFWAMDTSLQHRYQQLGAGLKVLFKKTHRILRRLFNLCKRCHRQPRFRLPKERSLSYWWNRIQSLLYCGESTFPGTFLEQSHSCTCPYDQSSCQGPIPCALGEGPACAHCAPDNSTRCGSCNPGYVLAQGLCRPEVAESLENFLGLETDLQDLELKYLLQKQDSRIEVHSIFISNDMRLGSWFDPSWRKRMLLTLKSNKYKPGLVHVMLALSLQICLTKNSTLEPVMAIYVNPFGGSHSESWFMPVNEGSFPDWERTNVDAAAQCQNWTITLGNRWKTFFETVHVYLRSRIKSLDDSSNETIYYEPLEMTDPSKNLGYMKINTLQVFGYSLPFDPDAIRDLILQLDYPYTQGSQDSALLQLIELRDRVNQLSPPGKVRLDLFSCLLRHRLKLANNEVGRIQSSLRAFNSKLPNPVEYETGKLCS

SEQ ID NO: 7968 - protein, 490 aa, Homo sapiens
MLAATCNKIGSPSPSPSSLSDSSSSFGKGFHPWKRSSSSSSASCNVVGSSLSSFGVSGASRNGGSSSAAAAAAAAAAAAAALVSDSFSCGGSPGSSAFSLTSSSAAAAAAAAAAAASSSPFANDYSVFQAPGVSGGSGGGGGGGGGGSSAHSQDGSHQPVFISKVHTSVDGLQGIYPRVGMAHPYESWFKPSHPGLGAAGEVGSAGASSWWDVGAGWIDVQNPNSAAALPGSLHPAAGGLQTSLHSPLGGYNSDYSGLSHSAFSSGASSHLLSPAGQHLMDGFKPVLPGSYPDSAPSPLAGAGGSMLSAGPSAPLGGSPRSSARRYSGRATCDCPNCQEAERLGPAGASLRRKGLHSCHIPGCGKVYGKTSHLKAHLRWHTGERPFVCNWLFCGKRFTRSDELQRHLRTHTGEKRFACPVCNKRFMRSDHLSKHVKTHSGGGGGGGSAGSGSGGKKGSDTDSEHSAAGSPPCHSPELLQPPEPGHRNGLE

SEQ ID NO: 7969 - protein, 2230 aa, Homo sapiens
MFKKLKQKISEEQQQLQQALAPAQASSNSSTPTRMRSRTSSFTEQLDEGTPNRESGDTQSFAQKLQLRVPSVESLFRSPIKESLFRSSSKESLVRTSSRESLNRLDLDSSTASFDPPSDMDSEAEDLVGNSDSLNKEQLIQRLRRMERSLSSYRGKYSELVTAYQMLQREKKKLQGILSQSQDKSLRRIAELREELQMDQQAKKHLQEEFDASLEEKDQYISVLQTQVSLLKQRLRNGPMNVDVLKPLPQLEPQAEVFTKEENPESDGEPVVEDGTSVKTLETLQQRVKRQENLLKRCKETIQSHKEQCTLLTSEKEALQEQLDERLQELEKIKDLHMAEKTKLITQLRDAKNLIEQLEQDKGMVIAETKRQMHETLEMKEEEIAQLRSRIKQMTTQGEELREQKEKSERAAFEELEKALSTAQKTEEARRKLKAEMDEQIKTIEKTSEEERISLQQELSRVKQEVVDVMKKSSEEQIAKLQKLHEKELARKEQELTKKLQTREREFQEQMKVALEKSQSEYLKISQEKEQQESLALEELELQKKAILTESENKLRDLQQEAETYRTRILELESSLEKSLQENKNQSKDLAVHLEAEKNKHNKEITVMVEKHKTELESLKHQQDALWTEKLQVLKQQYQTEMEKLREKCEQEKETLLKDKEIIFQAHIEEMNEKTLEKLDVKQTELESLSSELSEVLKARHKLEEELSVLKDQTDKMKQELEAKMDEQKNHHQQQVDSIIKEHEVSIQRTEKALKDQINQLELLLKERDKHLKEHQAHVENLEADIKRSEGELQQASAKLDVFQSYQSATHEQTKAYEEQLAQLQQKLLDLETERILLTKQVAEVEAQKKDVCTELDAHKIQVQDLMQQLEKQNSEMEQKVKSLTQVYESKLEDGNKEQEQTKQILVEKENMILQMREGQKKEIEILTQKLSAKEDSIHILNEEYETKFKNQEKKMEKVKQKAKEMQETLKKKLLDQEAKLKKELENTALELSQKEKQFNAKMLEMAQANSAGISDAVSRLETNQKEQIESLTEVHRRELNDVISIWEKKLNQQAEELQEIHEIQLQEKEQEVAELKQKILLFGCEKEEMNKEITWLKEEGVKQDTTLNELQEQLKQKSAHVNSLAQDETKLKAHLEKLEVDLNKSLKENTFLQEQLVELKMLAEEDKRKVSELTSKLKTTDEEFQSLKSSHEKSNKSLEDKSLEFKKLSEELAIQLDICCKKTEALLEAKTNELINISSSKTNAILSRISHCQHRTTKVKEALLIKTCTVSELEAQLRQLTEEQNTLNISFQQATHQLEEKENQIKSMKADIESLVTEKEALQKEGGNQQQAASEKESCITQLKKELSENINAVTLMKEELKEKKVEISSLSKQLTDLNVQLQNSISLSEKEAAISSLRKQYDEEKCELLDQVQDLSFKVDTLSKEKISALEQVDDWSNKFSEWKKKAQSRFTQHQNTVKELQIQLELKSKEAYEKDEQINLLKEELDQQNKRFDCLKGEMEDDKSKMEKKESNLETELKSQTARIMELEDHITQKTIEIESLNEVLKNYNQQKDIEHKELVQKLQHFQELGEEKDNRVKEAEEKILTLENQVYSMKAELETKKKELEHVNLSVKSKEEELKALEDRLESESAAKLAELKRKAEQKIAAIKKQLLSQMEEKEEQYKKGTESHLSELNTKLQEREREVHILEEKLKSVESSQSETLIVPRSAKNVAAYTEQEEADSQGCVQKTYEEKISVLQRNLTEKEKLLQRVGQEKEETVSSHFEMRCQYQERLIKLEHAEAKQHEDQSMIGHLQEELEEKNKKYSLIVAQHVEKEGGKNNIQAKQNLENVFDDVQKTLQEKELTCQILEQKIKELDSCLVRQKEVHRVEMEELTSKYEKLQALQQMDGRNKPTELLEENTEEKSKSHLVQPKLLSNMEAQHNDLEFKLAGAEREKQKLGKEIVRLQKDLRMLRKEHQQELEILKKEYDQEREEKIKQEQEDLELKHNSTLKQLMREFNTQLAQKEQELEMTIKETINKAQEVEAELLESHQEETNQLLKKIAEKDDDLKRTAKRYEEILDAREEEMTAKVRDLQTQLEELQKKYQQKLEQEENPGNDNVTIMELQTQLAQKTTLISDSKLKEQEFREQIHNLEDRLKKYEKNVYATTVGTPYKGGNLYHTDVSLFGEPTEFEYLRKVLFEYMMGRETKTMAKVITTVLKFPDDQTQKILEREDARLMFTSPRSGIF

SEQ ID NO: 7970 - protein, 1125 aa, Homo sapiens
MADGPRCKRRKQANPRRNNVTNYNTVVETNSDSDDEDKLHIVEEESVTDAADCEGVPEDDLPTDQTVLPGRSSEREGNAKNCWEDDTGKEGQEILGPEAQADEAGCTVKDDECESDAENEQNHDPNVEEFLQQQDTAVIFPEAPEEDQRQGTPEASGHDENGTPDAFSQLLTCPYCDRGYKRFTSLKEHIKYRHEKNEDNFSCSLCSYTFAYRTQLERHMTSHKSGRDQRHVTQSGCNRKFKCTECGKAFKYKHHLKEHLRIHSGEKPYECPNCKKRFSHSGSYSSHISSKKCISLIPVNGRPRTGLKTSQCSSPSLSASPGSPTRPQIRQKIENKPLQEQLSVNQIKTEPVDYEFKPIVVASGINCSTPLQNGVFTGGGPLQATSSPQGMVQAVVLPTVGLVSPISINLSDIQNVLKVAVDGNVIRQVLENNQANLASKEQETINASPIQQGGHSVISAISLPLVDQDGTTKIIINYSLEQPSQLQVVPQNLKKENPVATNSCKSEKLPEDLTVKSEKDKSFEGGVNDSTCLLCDDCPGDINALPELKHYDLKQPTQPPPLPAAEAEKPESSVSSATGDGNLSPSQPPLKNLLSLLKAYYALNAQPSAEELSKIADSVNLPLDVVKKWFEKMQAGQISVQSSEPSSPEPGKVNIPAKNNDQPQSANANEPQDSTVNLQSPLKMTNSPVLPVGSTTNGSRSSTPSPSPLNLSSSRNTQGYLYTAEGAQEEPQVEPLDLSLPKQQGELLERSTITSVYQNSVYSVQEEPLNLSCAKKEPQKDSCVTDSEPVVNVIPPSANPINIAIPTVTAQLPTIVAIADQNSVPCLRALAANKQTILIPQVAYTYSTTVSPAVQEPPLKVIQPNGNQDERQDTSSEGVSNVEDQNDSDSTPPKKKMRKTENGMYACDLCDKIFQKSSSLLRHKYEHTGKRPHECGICKKAFKHKHHLIEHMRLHSGEKPYQCDKCGKRFSHSGSYSQHMNHRYSYCKREAEERDSTEQEEAGPEILSNEHVGARASPSQGDSDERESLTREEDEDSEKEEEEEDKEMEELQEEKECEKPQGDEEEEEEEEEVEEEEVEEAENEGEEAKTEGLMKDDRAESQASSLGQKVGESSEQVSEEKTNEA

SEQ ID NO: 7971 - protein, 1020 aa, Homo sapiens
MGRGAGREYSPAATTAENGGGKKKQKEKELDELKKEVAMDDHKLSLDELGRKYQVDLSKGLTNQRAQDVLARDGPNALTPPPTTPEWVKFCRQLFGGFSILLWIGAILCFLAYGIQAAMEDEPSNDNLYLGVVLAAVVIVTGCFSYYQEAKSSKIMDSFKNMVPQQALVIREGEKMQINAEEVVVGDLVEVKGGDRVPADLRIISSHGCKVDNSSLTGESEPQTRSPEFTHENPLETRNICFFSTNCVEGTARGIVIATGDRTVMGRIATLASGLEVGRTPIAMEIEHFIQLITGVAVFLGVSFFVLSLILGYSWLEAVIFLIGIIVANVPEGLLATVTVCLTLTAKRMARKNCLVKNLEAVETLGSTSTICSDKTGTLTQNRMTVAHMWFDNQIHEADTTEDQSGATFDKRSPTWTALSRIAGLCNRAVFKAGQENISVSKRDTAGDASESALLKCIELSCGSVRKMRDRNPKVAEIPFNSTNKYQLSIHEREDSPQSHVLVMKGAPERILDRCSTILVQGKEIPLDKEMQDAFQNAYMELGGLGERVLGFCQLNLPSGKFPRGFKFDTDELNFPTEKLCFVGLMSMIDPPRAAVPDAVGKCRSAGIKVIMVTGDHPITAKAIAKGVGIISEGNETVEDIAARLNIPMSQVNPREAKACVVHGSDLKDMTSEQLDEILKNHTEIVFARTSPQQKLIIVEGCQRQGAIVAVTGDGVNDSPALKKADIGIAMGISGSDVSKQAADMILLDDNFASIVTGVEEGRLIFDNLKKSIAYTLTSNIPEITPFLLFIIANIPLPLGTVTILCIDLGTDMVPAISLAYEAAESDIMKRQPRNSQTDKLVNERLISMAYGQIGMIQALGGFFTYFVILAENGFLPSRLLGIRLDWDDRTMNDLEDSYGQEWTYEQRKVVEFTCHTAFFASIVVVQWADLIICKTRRNSVFQQGMKNKILIFGLLEETALAAFLSYCPGMGVALRMYPLKVTWWFCAFPYSLLIFIYDEVRKLILRRYPGGWVEKETYY

SEQ ID NO: 7972 - protein, 748 aa, Homo sapiens
MKTSPRRPLILKRRRLPLPVQNAPSETSEEEPKRSPAQQESNQAEASKEVAESNSCKFPAGIKIINHPTMPNTQVVAIPNNANIHSIITALTAKGKESGSSGPNKFILISCGGAPTQPPGLRPQTQTSYDAKRTEVTLETLGPKPAARDVNLPRPPGALCEQKRETCADGEAAGCTINNSLSNIQWLRKMSSDGLGSRSIKQEMEEKENCHLEQRQVKVEEPSRPSASWQNSVSERPPYSYMAMIQFAINSTERKRMTLKDIYTWIEDHFPYFKHIAKPGWKNSIRHNLSLHDMFVRETSANGKVSFWTIHPSANRYLTLDQVFKQQKRPNPELRRNMTIKTELPLGARRKMKPLLPRVSSYLVPIQFPVNQSLVLQPSVKVPLPLAASLMSSELARHSKRVRIAPKVLLAEEGIAPLSSAGPGKEEKLLFGEGFSPLLPVQTIKEEEIQPGEEMPHLARPIKVESPPLEEWPSPAPSFKEESSHSWEDSSQSPTPRPKKSYSGLRSPTRCVSEMLVIQHRERRERSRSRRKQHLLPPCVDEPELLFSEGPSTSRWAAELPFPADSSDPASQLSYSQEVGGPFKTPIKETLPISSTPSKSVLPRTPESWRLTPPAKVGGLDFSPVQTSQGASDPLPDPLGLMDLSTTPLQSAPPLESPQRLLSSEPLDLISVPFGNSSPSDIDVPKPGSPEPQVSGLAANRSLTEGLVLDTMNDSLSKILLDISFPGLDEDPLGPDNINWSQFIPELQ

SEQ ID NO: 7973 - protein, 1017 aa, Homo sapiens
MMSEGKPPDKKRPRRSLSISKNKKKASNSIISCFNNAPPAKLACPVCSKMVPRYDLNRHLDEMCANNDFVQVDPGQVGLINSNVSMVDLTSVTLEDVTPKKSPPPKTNLTPGQSDSAKREVKQKISPYFKSNDVVCKNQDELRNRSVKVICLGSLASKLSRKYVKAKKSIDKDEEFAGSSPQSSKSTVVKSLIDNSSEIEDEDQILENSSQKENVFKCDSLKEECIPEHMVRGSKIMEAESQKATRECEKSALTPGFSDNAIMLFSPDFTLRNTLKSTSEDSLVKQECIKEVVEKREACHCEEVKMTVASEAKIQLSDSEAKSHSSADDASAWSNIQEAPLQDDSCLNNDIPHSIPLEQGSSCNGPGQTTGHPYYLRSFLVVLKTVLENEDDMLLFDEQEKGIVTKFYQLSATGQKLYVRLFQRKLSWIKMTKLEYEEIALDLTPVIEELTNAGFLQTESELQELSEVLELLSAPELKSLAKTFHLVNPNGQKQQLVDAFLKLAKQRSVCTWGKNKPGIGAVILKRAKALAGQSVRICKGPRAVFSRILLLFSLTDSMEDEDAACGGQGQLSTVLLVNLGRMEFPSYTINRKTHIFQDRDDLIRYAAATHMLSDISSAMANGNWEEAKELAQCAKRDWNRLKNHPSLRCHEDLPLFLRCFTVGWIYTRILSRFVEILQRLHMYEEAVRELESLLSQRIYCPDSRGRWWDRLALNLHQHLKRLEPTIKCITEGLADPEVRTGHRLSLYQRAVRLRESPSCKKFKHLFQQLPEMAVQDVKHVTITGRLCPQRGMCKSVFVMEAGEAADPTTVLCSVEELALAHYRRSGFDQGIHGEGSTFSTLYGLLLWDIIFMDGIPDVFRNACQAFPLDLCTDSFFTSRRPALEARLQLIHDAPEESLRAWVAATWHEQEGRVASLVSWDRFTSLQQAQDLVSCLGGPVLSGVCRHLAADFRHCRGGLPDLVVWNSQSRHFKLVEVKGPNDRLSHKQMIWLAELQKLGAEVEVCHVVAVGAKSQSLS

SEQ ID NO: 7974 - protein, 1377 aa, Homo sapiens
MDALNRNQIGPGCQTQTMVQKGPLDLIETGKGLKVQTDKPHLVSLGSGRLSTAITLLPLEEGRTVIGSAARDISLQGPGLAPEHCYIENLRGTLTLYPCGNACTIDGLPVRQPTRLTQGCMLCLGQSTFLRFNHPAEAKWMKSMIPAGGRAPGPPYSPVPAESESLVNGNHTPQTATRGPSACASHSSLVSSIEKDLQEIMDSLVLEEPGAAGKKPAATSPLSPMANGGRYLLSPPTSPGAMSVGSSYENTSPAFSPLSSPASSGSCASHSPSGQEPGPSVPPLVPARSSSYHLALQPPQSRPSGARSESPRLSRKGGHERPPSPGLRGLLTDSPAATVLAEARRATESPRLGGQLPVVAISLSEYPASGALSQPTSIPGSPKFQPPVPAPRNKIGTLQDRPPSPFREPPGSERVLTTSPSRQLVGRTFSDGLATRTLQPPESPRLGRRGLDSMRELPPLSPSLSRRALSPLPTRTTPDPKLNREVAESPRPRRWAAHGASPEDFSLTLGARGRRTRSPSPTLGESLAPHKGSFSGRLSPAYSLGSLTGASPCQSPCVQRKLSSGDLRVPVTRERKNSITEISDNEDDLLEYHRRQRQERLREQEMERLERQRLETILNLCAEYSRADGGPEAGELPSIGEATAALALAGRRPSRGLAGASGRSSEEPGVATQRLWESMERSDEENLKEECSSTESTQQEHEDAPSTKLQGEVLALEEERAQVLGHVEQLKVRVKELEQQLQESAREAEMERALLQGEREAERALLQKEQKAVDQLQEKLVALETGIQKERDKEAEALETETKLFEDLEFQQLERESRVEEERELAGQGLLRSKAELLRSIAKRKERLAILDSQAGQIRAQAVQESERLARDKNASLQLLQKEKEKLTVLERRYHSLTGGRPFPKTTSTLKEMEKLLLPAVDLEQWYQELMAGLGTGPAAASPHSSPPPLPAKASRQLQVYRSKMDGEATSPLPRTRSGPLPSSSGSSSSSSQLSVATLGRSPSPKSALLTQNGTGSLPRNLAATLQDIETKRQLALQQKGQQVIEEQRRRLAELKQKAAAEAQCQWDALHGAAPFPAGPSGFPPLMHHSILHHLPAGRERGEEGEHAYDTLSLESSDSMETSISTGGNSACSPDNMSSASGLDMGKIEEMEKMLKEAHAEKNRLMESREREMELRRQALEEERRRREQVERRLQSESARRQQLVEKEVKMREKQFSQARPLTRYLPIRKEDFDLKTHIESSGHGVDTCLHVVLSSKVCRGYLVKMGGKIKSWKKRWFVFDRLKRTLSYYVDKHETKLKGVIYFQAIEEVYYDHLRSAAKKRFFRFTMVTESPNPALTFCVKTHDRLYYMVAPSAEAMRIWMDVIVTGAEGYTQFMN

SEQ ID NO: 7975 - protein, 1288 aa, Homo sapiens
MAAAGARLSPGPGSGLRGRPRLCFHPGPPPLLPLLLLFLLLLPPPPLLAGATAAASREPDSPCRLKTVTVSTLPALRESDIGWSGARAGAGAGTGAGAAAAAASPGSPGSAGTAAESRLLLFVRNELPGRIAVQDDLDNTELPFFTLEMSGTAADISLVHWRQQWLENGTLYFHVSMSSSGQLAQATAPTLQEPSEIVEEQMHILHISVMGGLIALLLLLLVFTVALYAQRRWQKRRRIPQKSASTEATHEIHYIPSVLLGPQARESFRSSRLQTHNSVIGVPIRETPILDDYDCEEDEEPPRRANHVSREDEFGSQVTHTLDSLGHPGEEKVDFEKKGGISFGRAKGTSGSEADDETQLTFYTEQYRSRRRSKGLLKSPVNKTALTLIAVSSCILAMVCGSQMSCPLTVKVTLHVPEHFIADGSSFVVSEGSYLDISDWLNPAKLSLYYQINATSPWVRDLCGQRTTDACEQLCDPETGECSCHEGYAPDPVHRHLCVRSDWGQSEGPWPYTTLERGYDLVTGEQAPEKILRSTFSLGQGLWLPVSKSFVVPPVELSINPLASCKTDVLVTEDPADVREEAMLSTYFETINDLLSSFGPVRDCSRNNGGCTRNFKCVSDRQVDSSGCVCPEELKPMKDGSGCYDHSKGIDCSDGFNGGCEQLCLQQTLPLPYDATSSTIFMFCGCVEEYKLAPDGKSCLMLSDVCEGPKCLKPDSKFNDTLFGEMLHGYNNRTQHVNQGQVFQMTFRENNFIKDFPQLADGLLVIPLPVEEQCRGVLSEPLPDLQLLTGDIRYDEAMGYPMVQQWRVRSNLYRVKLSTITLAAGFTNVLKILTKESSREELLSFIQHYGSHYIAEALYGSELTCIIHFPSKKVQQQLWLQYQKETTELGSKKELKSMPFITYLSGLLTAQMLSDDQLISGVEIRCEEKGRCPSTCHLCRRPGKEQLSPTPVLLEINRVVPLYTLIQDNGTKEAFKSALMSSYWCSGKGDVIDDWCRCDLSAFDANGLPNCSPLLQPVLRLSPTVEPSSTVVSLEWVDVQPAIGTKVSDYILQHKKVDEYTDTDLYTGEFLSFADDLLSGLGTSCVAAGRSHGEVPEVSIYSVIFKCLEPDGLYKFTLYAVDTRGRHSELSTVTLRTACPLVDDNKAEEIADKIYNLYNGYTSGKEQQMAYNTLMEVSASMLFRVQHHYNSHYEKFGDFVWRSEDELGPRKAHLILRRLERVSSHCSSLLRSAYIQSRVETVPYLFCRSEEVRPAGMVWYSILKDTKITCEEKMVSMARNTYGESKGR

SEQ ID NO: 7976 - protein, 1685 aa, Homo sapiens
MKLRGVSLAAGLFLLALSLWGQPAEAAACYGCSPGSKCDCSGIKGEKGERGFPGLEGHPGLPGFPGPEGPPGPRGQKGDDGIPGPPGPKGIRGPPGLPGFPGTPGLPGMPGHDGAPGPQGIPGCNGTKGERGFPGSPGFPGLQGPPGPPGIPGMKGEPGSIIMSSLPGPKGNPGYPGPPGIQGLPGPTGIPGPIGPPGPPGLMGPPGPPGLPGPKGNMGLNFQGPKGEKGEQGLQGPPGPPGQISEQKRPIDVEFQKGDQGLPGDRGPPGPPGIRGPPGPPGGEKGEKGEQGEPGKRGKPGKDGENGQPGIPGLPGDPGYPGEPGRDGEKGQKGDTGPPGPPGLVIPRPGTGITIGEKGNIGLPGLPGEKGERGFPGIQGPPGLPGPPGAAVMGPPGPPGFPGERGQKGDEGPPGISIPGPPGLDGQPGAPGLPGPPGPAGPHIPPSDEICEPGPPGPPGSPGDKGLQGEQGVKGDKGDTCFNCIGTGISGPPGQPGLPGLPGPPGSLGFPGQKGEKGQAGATGPKGLPGIPGAPGAPGFPGSKGEPGDILTFPGMKGDKGELGSPGAPGLPGLPGTPGQDGLPGLPGPKGEPGGITFKGERGPPGNPGLPGLPGNIGPMGPPGFGPPGPVGEKGIQGVAGNPGQPGIPGPKGDPGQTITQPGKPGLPGNPGRDGDVGLPGDPGLPGQPGLPGIPGSKGEPGIPGIGLPGPPGPKGFPGIPGPPGAPGTPGRIGLEGPPGPPGFPGPKGEPGFALPGPPGPPGLPGFKGALGPKGDRGFPGPPGPPGRTGLDGLPGPKGDVGPNGQPGPMGPPGLPGIGVQGPPGPPGIPGPIGQPGLHGIPGEKGDPGPPGLDVPGPPGERGSPGIPGAPGPIGPPGSPGLPGKAGASGFPGTKGEMGMMGPPGPPGPLGIPGRSGVPGLKGDDGLQGQPGLPGPTGEKGSKGEPGLPGPPGPMDPNLLGSKGEKGEPGLPGIPGVSGPKGYQGLPGDPGQPGLSGQPGLPGPPGPKGNPGLPGQPGLIGPPGLKGTIGDMGFPGPQGVEGPPGPSGVPGQPGSPGLPGQKGDKGDPGISSIGLPGLPGPKGEPGLPGYPGNPGIKGSVGDPGLPGLPGTPGAKGQPGLPGFPGTPGPPGPKGISGPPGNPGLPGEPGPVGGGGHPGQPGPPGEKGKPGQDGIPGPAGQKGEPGQPGFGNPGPPGLPGLSGQKGDGGLPGIPGNPGLPGPKGEPGFHGFPGVQGPPGPPGSPGPALEGPKGNPGPQGPPGRPGLPGPEGPPGLPGNGGIKGEKGNPGQPGLPGLPGLKGDQGPPGLQGNPGRPGLNGMKGDPGLPGVPGFPGMKGPSGVPGSAGPEGEPGLIGPPGPPGLPGPSGQSIIIKGDAGPPGIPGQPGLKGLPGPQGPQGLPGPTGPPGDPGRNGLPGFDGAGGRKGDPGLPGQPGTRGLDGPPGPDGLQGPPGPPGTSSVAHGFLITRHSQTTDAPQCPQGTLQVYEGFSLLYVQGNKRAHGQDLGTAGSCLRRFSTMPFMFCNINNVCNFASRNDYSYWLSTPEPMPMSMQPLKGQSIQPFISRCAVCEAPAVVIAVHSQTIQIPHCPQGWDSLWIGYSFMMHTSAGAEGSGQALASPGSCLEEFRSAPFIECHGRGTCNYYANSYSFWLATVDVSDMFSKPQSETLKAGDLRTRISRCQVCMKRT

SEQ ID NO: 7977 - protein, 7461 aa, Homo sapiens
MAGYLSPAAYLYVEEQEYLQAYEDVLERYKDERDKVQKKTFTKWINQHLMKVRKHVNDLYEDLRDGHNLISLLEVLSGDTLPREKGRMRFHRLQNVQIALDYLKRRQVKLVNIRNDDITDGNPKLTLGLIWTIILHFQISDIHVTGESEDMSAKERLLLWTQQATEGYAGIRCENFTTCWRDGKLFNAIIHKYRPDLIDMNTVAVQSNLANLEHAFYVAEKIGVIRLLDPEDVDVSSPDEKSVITYVSSLYDAFPKVPEGGEGIGANDVEVKWIEYQNMVNYLIQWIRHHVTTMSERTFPNNPVELKALYNQYLQFKETEIPPKETEKSKIKRLYKLLEIWIEFGRIKLLQGYHPNDIEKEWGKLIIAMLEREKALRPEVERLEMLQQIANRVQRDSVICEDKLILAGNALQSDSKRLESGVQFQNEAEIAGYILECENLLRQHVIDVQILIDGKYYQADQLVQRVAKLRDEIMALRNECSSVYSKGRILTTEQTKLMISGITQSLNSGFAQTLHPSLTSGLTQSLTPSLTSSSMTSGLSSGMTSRLTPSVTPAYTPGFPSGLVPNFSSGVEPNSLQTLKLMQIRKPLLKSSLLDQNLTEEEINMKFVQDLLNWVDEMQVQLDRTEWGSDLPSVESHLENHKNVHRAIEEFESSLKEAKISEIQMTAPLKLTYAEKLHRLESQYAKLLNTSRNQERHLDTLHNFVSRATNELIWLNEKEEEEVAYDWSERNTNIARKKDYHAELMRELDQKEENIKSVQEIAEQLLLENHPARLTIEAYRAAMQTQWSWILQLCQCVEQHIKENTAYFEFFNDAKEATDYLRNLKDAIQRKYSCDRSSSIHKLEDLVQESMEEKEELLQYKSTIANLMGKAKTIIQLKPRNSDCPLKTSIPIKAICDYRQIEITIYKDDECVLANNSHRAKWKVISPTGNEAMVPSVCFTVPPPNKEAVDLANRIEQQYQNVLTLWHESHINMKSVVSWHYLINEIDRIRASNVASIKTMLPGEHQQVLSNLQSRFEDFLEDSQESQVFSGSDITQLEKEVNVCKQYYQELLKSAEREEQEESVYNLYISEVRNIRLRLENCEDRLIRQIRTPLERDDLHESVFRITEQEKLKKELERLKDDLGTITNKCEEFFSQAAASSSVPTLRSELNVVLQNMNQVYSMSSTYIDKLKTVNLVLKNTQAAEALVKLYETKLCEEEAVIADKNNIENLISTLKQWRSEVDEKRQVFHALEDELQKAKAISDEMFKTYKERDLDFDWHKEKADQLVERWQNVHVQIDNRLRDLEGIGKSLKYYRDTYHPLDDWIQQVETTQRKIQENQPENSKTLATQLNQQKMLVSEIEMKQSKMDECQKYAEQYSATVKDYELQTMTYRAMVDSQQKSPVKRRRMQSSADLIIQEFMDLRTRYTALVTLMTQYIKFAGDSLKRLEEEEKSLEEEKKEHVEKAKELQKWVSNISKTLKDAEKAGKPPFSKQKISSEEISTKKEQLSEALQTIQLFLAKHGDKMTDEERNELEKQVKTLQESYNLLFSESLKQLQESQTSGDVKVEEKLDKVIAGTIDQTTGEVLSVFQAVLRGLIDYDTGIRLLETQLMISGLISPELRKCFDLKDAKSHGLIDEQILCQLKELSKAKEIISAASPTTIPVLDALAQSMITESMAIKVLEILLSTGSLVIPATGEQLTLQKAFQQNLVSSALFSKVLERQNMCKDLIDPCTSEKVSLIDMVQRSTLQENTGMWLLPVRPQEGGRITLKCGRNISILRAAHEGLIDRETMFRLLSAQLLSGGLINSNSGQRMTVEEAVREGVIDRDTASSILTYQVQTGGIIQSNPAKRLTVDEAVQCDLITSSSALLVLEAQRGYVGLIWPHSGEIFPTSSSLQQELITNELAYKILNGRQKIAALYIPESSQVIGLDAAKQLGIIDNNTASILKNITLPDKMPDLGDLEACKNARRWLSFCKFQPSTVHDYRQEEDVFDGEEPVTTQTSEETKKLFLSYLMINSYMDANTGQRLLLYDGDLDEAVGMLLEGCHAEFDGNTAIKECLDVLSSSGVFLNNASGREKDECTATPSSFNKCHCGEPEHEETPENRKCAIDEEFNEMRNTVINSEFSQSGKLASTISIDPKVNSSPSVCVPSLISYLTQTELADISMLRSDSENILTNYENQSRVETNERANECSHSKNIQNFPSDLIENPIMKSKMSKFCGVNETENEDNTNRDSPIFDYSPRLSALLSHDKLMHSQGSFNDTHTPESNGNKCEAPALSFSDKTMLSGQRIGEKFQDQFLGIAAINISLPGEQYGQKSLNMISSNPQVQYHNDKYISNTSGEDEKTHPGFQQMPEDKEDESEIEEYSCAVTPGGDTDNAIVSLTCATPLLDETISASDYETSLLNDQQNNTGTDTDSDDDFYDTPLFEDDDHDSLLLDGDDRDCLHPEDYDTLQEENDETASPADVFYDVSKENENSMVPQGAPVGSLSVKNKAHCLQDFLMDVEKDELDSGEKIHLNPVGSDKVNGQSLETGSERECTNILEGDESDSLTDYDIVGGKESFTASLKFDDSGSWRGRKEEYVTGQEFHSDTDHLDSMQSEESYGDYIYDSNDQDDDDDDGIDEEGGGIRDENGKPRCQNVAEDMDIQLCASILNENSDENENINTMILLDKMHSCSSLEKQQRVNVVQLASPSENNLVTEKSNLPEYTTEIAGKSKENLLNHEMVLKDVLPPIIKDTESEKTFGPASISHDNNNISSTSELGTDLANTKVKLIQGSELPELTDSVKGKDEYFKNMTPKVDSSLDHIICTEPDLIGKPAEESHLSLIASVTDKDPQGNGSDLIKGRDGKSDILIEDETSIQKMYLGEGEVLVEGLVEEENRHLKLLPGKNTRDSFKLINSQFPFPQITNNEELNQKGSLKKATVTLKDEPNNLQIIVSKSPVQFENLEEIFDTSVSKEISDDITSDITSWEGNTHFEESFTDGPEKELDLFTYLKHCAKNIKAKDVAKPNEDVPSHVLITAPPMKEHLQLGVNNTKEKSTSTQKDSPLNDMIQSNDLCSKESISGGGTEISQFTPESIEATLSILSRKHVEDVGKNDFLQSERCANGLGNDNSSNTLNTDYSFLEINNKKERIEQQLPKEQALSPRSQEKEVQIPELSQVFVEDVKDILKSRLKEGHMNPQEVEEPSACADTKILIQNLIKRITTSQLVNEASTVPSDSQMSDSSGVSPMTNSSELKPESRDDPFCIGNLKSELLLNILKQDQHSQKITGVFELMRELTHMEYDLEKRGITSKVLPLQLENIFYKLLADGYSEKIEHVGDFNQKACSTSEMMEEKPHILGDIKSKEGNYYSPNLETVKEIGLESSTVWASTLPRDEKLKDLCNDFPSHLECTSGSKEMASGDSSTEQFSSELQQCLQHTEKMHEYLTLLQDMKPPLDNQESLDNNLEALKNQLRQLETFELGLAPIAVILRKDMKLAEEFLKSLPSDFPRGHVEELSISHQSLKTAFSSLSNVSSERTKQIMLAIDSEMSKLAVSHEEFLHKLKSFSDWVSEKSKSVKDIEIVNVQDSEYVKKRLEFLKNVLKDLGHTKMQLETTAFDVQFFISEYAQDLSPNQSKQLLRLLNTTQKCFLDVQESVTTQVERLETQLHLEQDLDDQKIVAERQQEYKEKLQGICDLLTQTENRLIGHQEAFMIGDGTVELKKYQSKQEELQKDMQGSAQALAEVVKNTENFLKENGEKLSQEDKALIEQKLNEAKIKCEQLNLKAEQSKKELDKVVTTAIKEETEKVAAVKQLEESKTKIENLLDWLSNVDKDSERAGTKHKQVIEQNGTHFQEGDGKSAIGEEDEVNGNLLETDVDGQVGTTQENLNQQYQKVKAQHEKIISQHQAVIIATQSAQVLLEKQGQYLSPEEKEKLQKNMKELKVHYETALAESEKKMKLTHSLQEELEKFDADYTEFEHWLQQSEQELENLEAGADDINGLMTKLKRQKSFSEDVISHKGDLRYITISGNRVLEAAKSCSKRDGGKVDTSATHREVQRKLDHATDRFRSLYSKCNVLGNNLKDLVDKYQHYEDASCGLLAGLQACEATASKHLSEPIAVDPKNLQRQLEETKALQGQISSQQVAVEKLKKTAEVLLDARGSLLPAKNDIQKTLDDIVGRYEDLSKSVNERNEKLQITLTRSLSVQDGLDEMLDWMGNVESSLKEQGQVPLNSTALQDIISKNIMLEQDIAGRQSSINAMNEKVKKFMETTDPSTASSLQAKMKDLSARFSEASHKHKETLAKMEELKTKVELFENLSEKLQTFLETKTQALTEVDVPGKDVTELSQYMQESTSEFLEHKKHLEVLHSLLKEISSHGLPSDKALVLEKTNNLSKKFKEMEDTIKEKKEAVTSCQEQLDAFQVLVKSLKSWIKETTKKVPIVQPSFGAEDLGKSLEDTKKLQEKWSLKTPEIQKVNNSGISLCNLISAVTTPAKAIAAVKSGGAVLNGEGTATNTEEFWANKGLTSIKKDMTDISHGYEDLGLLLKDKIAELNTKLSKLQKAQEESSAMMQWLQKMNKTATKWQQTPAPTDTEAVKTQVEQNKSFEAELKQNVNKVQELKDKLTELLEENPDTPEAPRWKQMLTEIDSKWQELNQLTIDRQQKLEESSNNLTQFQTVEAQLKQWLVEKELMVSVLGPLSIDPNMLNTQRQQVQILLQEFATRKPQYEQLTAAGQGILSRPGEDPSLRGIVKEQLAAVTQKWDSLTGQLSDRCDWIDQAIVKSTQYQSLLRSLSDKLSDLDNKLSSSLAVSTHPDAMNQQLETAQKMKQEIQQEKKQIKVAQALCEDLSALVKEEYLKAELSRQLEGILKSFKDVEQKAENHVQHLQSACASSHQFQQMSRDFQAWLDTKKEEQNKSHPISAKLDVLESLIKDHKDFSKTLTAQSHMYEKTIAEGENLLLKTQGSEKAALQLQLNTIKTNWDTFNKQVKERENKLKESLEKALKYKEQVETLWPWIDKCQNNLEEIKFCLDPAEGENSIAKLKSLQKEMDQHFGMVELLNNTANSLLSVCEIDKEVVTDENKSLIQKVDMVTEQLHSKKFCLENMTQKFKEFQEVSKESKRQLQCAKEQLDIHDSLGSQAYSNKYLTMLQTQQKSLQALKHQVDLAKRLAQDLVVEASDSKGTSDVLLQVETIAQEHSTLSQQVDEKCSFLETKLQGIGHFQNTIREMFSQFAEFDDELDSMAPVGRDAETLQKQKETIKAFLKKLEALMASNDNANKTCKMMLATEETSPDLVGIKRDLEALSKQCNKLLDRAQAREEQVEGTIKRLEEFYSKLKEFSILLQKAEEHEESQGPVGMETETINQQLNMFKVFQKEEIEPLQGKQQDVNWLGQGLIQSAAKSTSTQGLEHDLDDVNARWKTLNKKVAQRAAQLQEALLHCGRFQDALESLLSWMVDTEELVANQKPPSAEFKVVKAQIQEQKLLQRLLDDRKSTVEVIKREGEKIATTAEPADKVKILKQLSLLDSRWEALLNKAETRNRQLEGISVVAQQFHETLEPLNEWLTTIEKRLVNCEPIGTQASKLEEQIAQHKVLQEDILLRKQNVDQALLNGLELLKQTTGDEVLIIQDKLEAIKARYKDITKLSTDVAKTLEQALQLARRLHSTHEELCTWLDKVEVELLSYETQVLKGEEASQAQMRPKELKKEAKNNKALLDSLNEVSSALLELVPWRAREGLEKMVAEDNERYRLVSDTITQKVEEIDAAILRSQQFDQAADAELSWITETEKKLMSLGDIRLEQDQTSAQLQVQKTFTMEILRHKDIIDDLVKSGHKIMTACSEEEKQSMKKKLDKVLKNYDTICQINSERYLQLERAQSLVNQFWETYEELWPWLTETQSIISQLPAPALEYETLRQQQEEHRQLRELIAEHKPHIDKMNKTGPQLLELSPGEGFSIQEKYVAADTLYSQIKEDVKKRAVALDEAISQSTQFHDKIDQILESLERIVERLRQPPSISAEVEKIKEQISENKNVSVDMEKLQPLYETLKQRGEEMIARSGGTDKDISAKAVQDKLDQMVFIWENIHTLVEEREAKLLDVMELAEKFWCDHMSLIVTIKDTQDFIRDLEDPGIDPSVVKQQQEAAETIREEIDGLQEELDIVINLGSELIAACGEPDKPIVKKSIDELNSAWDSLNKAWKDRIDKLEEAMQAAVQYQDGLQAVFDWVDIAGGKLASMSPIGTDLETVKQQIEELKQFKSEAYQQQIEMERLNHQAELLLKKVTEESDKHTVQDPLMELKLIWDSLEERIINRQHKLEGALLALGQFQHALDELLAWLTHTEGLLSEQKPVGGDPKAIEIELAKHHVLQNDVLAHQSTVEAVNKAGNDLIESSAGEEASNLQNKLEVLNQRWQNVLEKTEQRKQQLDGALRQAKGFHGEIEDLQQWLTDTERHLLASKPLGGLPETAKEQLNVHMEVCAAFEAKEETYKSLMQKGQQMLARCPKSAETNIDQDINNLKEKWESVETKLNERKTKLEEALNLAMEFHNSLQDFINWLTQAEQTLNVASRPSLILDTVLFQIDEHKVFANEVNSHREQIIELDKTGTHLKYFSQKQDVVLIKNLLISVQSRWEKVVQRLVERGRSLDDARKRAKQFHEAWSKLMEWLEESEKSLDSELEIANDPDKIKTQLAQHKEFQKSLGAKHSVYDTTNRTGRSLKEKTSLADDNLKLDDMLSELRDKWDTICGKSVERQNKLEEALLFSGQFTDALQALIDWLYRVEPQLAEDQPVHGDIDLVMNLIDNHKAFQKELGKRTSSVQALKRSARELIEGSRDDSSWVKVQMQELSTRWETVCALSISKQTRLEAALRQAEEFHSVVHALLEWLAEAEQTLRFHGVLPDDEDALRTLIDQHKEFMKKLEEKRAELNKATTMGDTVLAICHPDSITTIKHWITIIRARFEEVLAWAKQHQQRLASALAGLIAKQELLEALLAWLQWAETTLTDKDKEVIPQEIEEVKALIAEHQTFMEEMTRKQPDVDKVTKTYKRRAADPSSLQSHIPVLDKGRAGRKRFPASSLYPSGSQTQIETKNPRVNLLVSKWQQVWLLALERRRKLNDALDRLEELREFANFDFDIWRKKYMRWMNHKKSRVMDFFRRIDKDQDGKITRQEFIDGILSSKFPTSRLEMSAVADIFDRDGDGYIDYYEFVAALHPNKDAYKPITDADKIEDEVTRQVAKCKCAKRFQVEQIGDNKYRFFLGNQFGDSQQLRLVRILRSTVMVRVGGGWMALDEFLVKNDPCRVHHHGSKMLRSESNSSITTTQPTIAKGRTNMELREKFILADGASQGMAAFRPRGRRSRPSSRGASPNRSTSVSSQAAQAASPQVPATTTPKGTPIQGSKLRLPGYLSGKGFHSGEDSGLITTAAARVRTQFADSKKTPSRPGSRAGSKAGSRASSRRGSDASDFDISEIQSVCSDVETVPQTHRPTPRAGSRPSTAKPSKIPTPQRKSPASKLDKSSKR

SEQ ID NO: 7978 - protein, 271 aa, Homo sapiens
MPEAPPLLLAAVLLGLVLLVVLLLLLRHWGWGLCLIGWNEFILQPIHNLLMGDTKEQRILNHVLQHAEPGNAQSVLEAIDTYCEQKEWAMNVGDKKGKIVDAVIQEHQPSVLLELGAYCGYSAVRMARLLSPGARLITIEINPDCAAITQRMVDFAGVKDKVTLVVGASQDIIPQLKKKYDVDTLDMVFLDHWKDRYLPDTLLLEECGLLRKGTVLLADNVICPGAPDFLAHVRGSSCFECTHYQSFLEYREVVDGLEKAIYKGPGSEAGP

SEQ ID NO: 7979 - protein, 538 aa, Homo sapiens
MDDFERRRELRRQKREEMRLEAERIAYQRNDDDEEEAARERRRRARQERLRQKQEEESLGQVTDQVEVNAQNSVPDEEAKTTTTNTQVEGDDEAAFLERLARREERRQKRLQEALERQKEFDPTITDASLSLPSRRMQNDTAENETTEKEEKSESRQERYEIEETETVTKSYQKNDWRDAEENKKEDKEKEEEEEEKPKRGSIGENQIKDEKIKKDKEPKEEVKSFMDRKKGFTEVKSQNGEFMTHKLKHTENTFSRPGGRASVDTKEAEGAPQVEAGKRLEELRRRRGETESEEFEKLKQKQQEAALELEELKKKREERRKVLEEEEQRRKQEEADRKLREEEEKRRLKEEIERRRAEAAEKRQKMPEDGLSDDKKPFKCFTPKGSSLKIEERAEFLNKSVQKSSGVKSTHQAAIVSKIDSRLEQYTSAIEGTKSAKPTKPAASDLPVPAEGVRNIKSMWEKGNVFSSPTAAGTPNKETAGLKVGVSSRINEWLTKTPDGNKSPAPKPSDLRPGDVSSKRNLWEKQSVDKVTSPTKV

SEQ ID NO: 7980 - protein, 372 aa, Homo sapiens
MASSASARTPAGKRVINQEELRRLMKEKQRLSTSRKRIESPFAKYNRLGQLSCALCNTPVKSELLWQTHVLGKQHREKVAELKGAKEASQGSSASSAPHSVKRKAPDADDQDVKRAKATLVPQVQPSTSAWTTNFDKIGKEFIRATPSKPSGLSLLPDYEDEEEEEEEEEGDGERKRGDASKPLSDAQGKEHSVSSSREVTSSVLPNDFFSTNPPKAPIIPHSGSIEKAEIHEKVVERRENTAEALPEGFFDDPEVDARVRKVDAPKDQMDKEWDEFQKAMRQVNTISEAIVAEEDEEGRLDRQIGEIDEQIECYRRVEKLRNRQDEIKNKLKEILTIKELQKKEEENADSDDEGELQDLLSQDWRVKGALL

SEQ ID NO: 7981 - protein, 765 aa, Homo sapiens
MSGDHLHNDSQIEADFRLNDSHKHKDKHKDREHRHKEHKKEKDREKSKHSNSEHKDSEKKHKEKEKTKHKDGSSEKHKDKHKDRDKEKRKEEKVRASGDAKIKKEKENGFSSPPQIKDEPEDDGYFVPPKEDIKPLKRPRDEDDADYKPKKIKTEDTKKEKKRKLEEEEDGKLKKPKNKDKDKKVPEPDNKKKKPKKEEEQKWKWWEEERYPEGIKWKFLEHKGPVFAPPYEPLPENVKFYYDGKVMKLSPKAEEVATFFAKMLDHEYTTKEIFRKNFFKDWRKEMTNEEKNIITNLSKCDFTQMSQYFKAQTEARKQMSKEEKLKIKEENEKLLKEYGFCIMDNHKERIANFKIEPPGLFRGRGNHPKMGMLKRRIMPEDIIINCSKDAKVPSPPPGHKWKEVRHDNKVTWLVSWTENIQGSIKYIMLNPSSRIKGEKDWQKYETARRLKKCVDKIRNQYREDWKSKEMKVRQRAVALYFIDKLALRAGNEKEEGETADTVGCCSLRVEHINLHPELDGQEYVVEFDFLGKDSIRYYNKVPVEKRVFKNLQLFMENKQPEDDLFDRLNTGILNKHLQDLMEGLTAKVFRTYNASITLQQQLKELTAPDENIPAKILSYNRANRAVAILCNHQRAPPKTFEKSMMNLQTKIDAKKEQLADARRDLKSAKADAKVMKDAKTKKVVESKKKAVQRLEEQLMKLEVQATDREENKQIALGTSKLNYLDPRITVAWCKKWGVPIEKIYNKTQREKFAWAIDMADEDYEF

SEQ ID NO: 7982 - protein, 401 aa, Homo sapiens
YGDYDPSVHKRGFLAQEELLPKRVINLYQMTPEMWEERITAWYAEHRGRARDEAEMEYLKIAQDLEMYGVNYFAIRFTIKPLDKKIDVFKFNSSKLRVNKLILQLCIGNHDLFMRRRKADSLEVQQMKAQAREEKARKQMERQRLAREKQMREEAERTRDELERRLLQMKEEATMANEALMRSEETADLLAEKAQITEEEAKLLAQKAAEAEQEMQRIKATAIRTEEEKRLMEQKVLEAEVLALKMAEESERRAKEADQLKQDLQEAREAERRAKQKLLEIATKPTYPPMNPIPAPLPPDIPSFNLIGDSLSFDFKDTDMKRLSMEIEKEKVEYMEKSKHLQEQLNELKTEIEALKLKERETALDILHNENSDRGGSSKHNTIKKLTLQSAKSRVAFFEEL

SEQ ID NO: 7983 - protein, 1294 aa, Homo sapiens
MALAGLCALLACCWGPAAVLATAAGDVDPSKELECKLKSITVSALPFLRENDLSIMHSPSASEPKLLFSVRNDFPGEMVVVDDLENTELPYFVLEISGNTEDIPLVRWRQQWLENGTLLFHIHHQDGAPSLPGQDPTEEPQHESAEEELRILHISVMGGMIALLLSILCLVMILYTRRRWCKRRRVPQPQKSASAEAANEIHYIPSVLIGGHGRESLRNARVQGHNSSGTLSIRETPILDGYEYDITDLRHHLQRECMNGGEDFASQVTRTLDSLQGCNEKSGMDLTPGSDNAKLSLMNKYKDNIIATSPVDSNHQQATLLSHTSSSQRKRINNKARAGSAFLNPEGDSGTEAENDPQLTFYTDPSRSRRRSRVGSPRSPVNKTTLTLISITSCVIGLVCSSHVNCPLVVKITLHVPEHLIADGSRFILLEGSQLDASDWLNPAQVVLFSQQNSSGPWAMDLCARRLLDPCEHQCDPETGECLCYEGYMKDPVHKHLCIRNEWGTNQGPWPYTIFQRGFDLVLGEQPSDKIFRFTYTLGEGMWLPLSKSFVIPPAELAINPSAKCKTDMTVMEDAVEVREELMTSSSFDSLEVLLDSFGPVRDCSKDNGGCSKNFRCISDRKLDSTGCVCPSGLSPMKDSSGCYDRHIGVDCSDGFNGGCEQLCLQQMAPFPDDPTLYNILMFCGCIEDYKLGVDGRSCQLITETCPEGSDCGESRELPMNQTLFGEMFFGYNNHSKEVAAGQVLKGTFRQNNFARGLDQQLPDGLVVATVPLENQCLEEISEPTPDPDFLTGMVNFSEVSGYPVLQHWKVRSVMYHIKLNQVAISQALSNALHSLDGATSRADFVALLDQFGNHYIQEAIYGFEESCSIWYPNKQVQRRLWLEYEDISKGNSPSDESEERERDPKVLTFPEYITSLSDSGTKHMAAGVRMECHSKGRCPSSCPLCHVTSSPDTPAEPVLLEVTKAAPIYELVTNNQTQRLLQEATMSSLWCSGTGDVIEDWCRCDSTAFGADGLPTCAPLPQPVLRLSTVHEPSSTLVVLEWEHSEPPIGVQIVDYLLRQEKVTDRMDHSKVETETVLSFVDDIISGAKSPCAMPSQVPDKQLTTISLIIRCLEPDTIYMFTLWGVDNTGRRSRPSDVIVKTPCPVVDDVKAQEIADKIYNLFNGYTSGKEQQTAYNTLLDLGSPTLHRVLYHYNQHYESFGEFTWRCEDELGPRKAGLILSQLGDLSSWCNGLLQEPKISLRRSSLKYLGCRYSEIKPYGLDWAELSRDLRKTCEEQTLSIPYNDYGDSKEI

SEQ ID NO: 7984 - protein, 823 aa, Homo sapiens
MALPRCTWPNYVWRAVMACLVHRGLGAPLTLCMLGCLLQAGHVLSQKLDDVDPLVATNFGKIRGIKKELNNEILGPVIQFLGVPYAAPPTGERRFQPPEPPSPWSDIRNATQFAPVCPQNIIDGRLPEVMLPVWFTNNLDVVSSYVQDQSEDCLYLNIYVPTEDDIRDSGGPKPVMVYIHGGSYMEGTGNLYDGSVLASYGNVIVITVNYRLGVLGFLSTGDQAAKGNYGLLDLIQALRWTSENIGFFGGDPLRITVFGSGAGGSCVNLLTLSHYSEGNRWSNSTKGLFQRAIAQSGTALSSWAVSFQPAKYARMLATKVGCNVSDTVELVECLQKKPYKELVDQDIQPARYHIAFGPVIDGDVIPDDPQILMEQGEFLNYDIMLGVNQGEGLKFVENIVDSDDGISASDFDFAVSNFVDNLYGYPEGKDVLRETIKFMYTDWADRHNPETRRKTLLALFTDHQWVAPAVATADLHSNFGSPTYFYAFYHHCQTDQVPAWADAAHGDEVPYVLGIPMIGPTELFPCNFSKNDVMLSAVVMTYWTNFAKTGDPNQPVPQDTKFIHTKPNRFEEVAWTRYSQKDQLYLHIGLKPRVKEHYRANKVNLWLELVPHLHNLNDISQYTSTTTKVPSTDITFRPTRKNSVPVTSAFPTAKQDDPKQQPSPFSVDQRDYSTELSVTIAVGASLLFLNILAFAALYYKKDKRRHDVHRRCSPQRTTTNDLTHAQEEEIMSLQMKHTDLDHECESIHPHEVVLRTACPPDYTLAMRRSPDDVPLMTPNTITMIPNTIPGIQPLHTFNTFTGGQNNTLPHPHPHPHSHSTTRV

SEQ ID NO: 7985 - protein, 780 aa, Homo sapiens
MSKMPAKKKSCFQITSVTTAQVATSITEDTESLDDPDESRTEDVSSEIFDVSRATDYGPEEVCERSSSEETLNNVGDAETPGTVSPNLLLDGQLAAAAAAPANGGGVVSARSVSGALASTLAAAATSAPAPGAPGGPQLAGSSAGPVTAAPSQPPTTCSSRFRVIKLDHGSGEPYRRGRWTCMEYYERDSDSSVLTRSGDCIRHSSTFDQTAERDSGLGATGGSVVVVVASMQGAHGPESGTDSSLTAVSQLPPSEKMSQPTPAQPQSFSVGQPQPPPPPVGGAVAQSSAPLPPFPGAATGPQPMMAAAQPSQPQGAGPGGQTLPPTNVTLAQPAMSLPPQPGPAVGAPAAQQPQQFAYPQPQIPPGHLLPVQPSGQSEYLQQHVAGLQPPSPAQPSSTGAAASPATAATLPVGTGQNASSVGAQLMGASSQPSEAMAPRTGPAQGGQVAPCQPTGVPPATVGGVVQPCLGPAGAGQPQSVPPPQMGGSGPLSAVPGGPHAVVPGVPNVPAAVPAPSVPSVSTTSVTMPNVPAPLAQSQQLSSHTPVSRSSSIIQHVGLPLAPGTHSAPTSLPQSDLSQFQTQTQPLVGQVDDTRRKSEPLPQPPLSLIAENKPVVKPPVADSLANPLQLTPMNSLATSVFSIAIPVDGDEDRNPSTAFYQAFHLNTLKESKSLWDSASGGGVVAIDNKIEQAMDLVKSHLMYAVREEVEVLKEQIKELVERNSLLERENALLKSLSSNDQLSQLPTQQANPGSTSQQQAVIAQPPQPTQPPQQPNVSSA

SEQ ID NO: 7986 - protein, 563 aa, Homo sapiens
MSRPSSRAIYLHRKEYSQNLTSEPTLLQHRVEHLMTCKQGSQRVQGPEDALQKLFEMDAQGRVWSQDLILQVRDGWLQLLDIETKEELDSYRLDSIQAMNVALNTCSYNSILSITVQEPGLPGTSTLLFQCQEVGAERLKTSLQKALEEELEQRPRLGGLQPGQDRWRGPAMERPLPMEQARYLEPGIPPEQPHQRTLEHSLPPSPRPLPRHTSAREPSAFTLPPPRRSSSPEDPERDEEVLNHVLRDIELFMGKLEKAQAKTSRKKKFGKKNKDQGGLTQAQYIDCFQKIKHSFNLLGRLATWLKETSAPELVHILFKSLNFILARCPEAGLAAQVISPLLTPKAINLLQSCLSPPESNLWMGLGPAWTTSRADWTGDEPLPYQPTFSDDWQLPEPSSQAPLGYQDPVSLRPSSPKPAQPALKMQVLYEFEARNPRELTVVQGEKLEVLDHSKRWWLVKNEAGRSGYIPSNILEPLQPGTPGTQGQSPSRVPMLRLSSRPEEVTDWLQAENFSTATVRTLGSLTGSQLLRIRPGELQMLCPQEAPRILSRLEAVRRMLGISP

SEQ ID NO: 7987 - protein, 406 aa, Homo sapiens
MRGSVECTWGWGHCAPSPLLLWTLLLFAAPFGLLGEKTRQVSLEVIPNWLGPLQNLLHIRAVGTNSTLHYVWSSLGPLAVVMVATNTPHSTLSVNWSLLLSPEPDGGLMVLPKDSIQFSSALVFTRLLEFDSTNVSDTAAKPLGRPYPPYSLADFSWNNITDSLDPATLSATFQGHPMNDPTRTFANGSLAFRVQAFSRSSRPAQPPRLLHTADTCQLEVALIGASPRGNRSLFGLEVATLGQGPDCPSMQEQHSIDDEYAPAVFQLDQLLWGSLPSGFAQWRPVAYSQKPGGRESALPCQASPLHPALAYSLPQSPIVRAFFGSQNNFCAFNLTFGASTGPGYWDQHYLSWSMLLGVGFPPVDGLSPLVLGIMAVALGAPGLMLLGGGLVLLLHHKKYSEYQSIN

SEQ ID NO: 7988 - protein, 448 aa, Homo sapiens
MDQTPPARPEYLVSGIRTPPVRRNSKLATLGRIFKPWKWRKKKNEKLKQTTSALEKKMAGRQGREELIKKGLLEMMEQDAESKTCNPDGGPRSVQSEPPTPKSETLTSEDAQPGSPLATGTDQVSLDKPLSSAAHLDDAGQATLFQASSMKSADPSLRGQLSTPTGSPHLTTVHRPLPPSRVIEELHRALATKHRQDSFQGRESKGSPKKRLDVRLSRTSSVERGKEREEAWSFDGALENKRTAAKESEENKENLIINSELKDDLLLYQDEEALNDSIISGTLPRKCKKELLAVKLRNRPSKQELEDRNIFPRRTDEERQEIRQQIEMKLSKRLSQRPAVEELERRNILKQRNDQTEQEERREIKQRLTRKLNQRPTVDELRDRKILIRFSDYVEVAKAQDYDRRADKPWTRLSAADKAAIRKELNEYKSNEMEVHASSKHLTRFHRP

SEQ ID NO: 7989 - protein, 2549 aa, Homo sapiens
MLGTGPAAATTAATTSSNVSVLQQFASGLKSRNEETRAKAAKELQHYVTMELREMSQEESTRFYDQLNHHIFELVSSSDANERKGGILAIASLIGVEGGNATRIGRFANYLRNLLPSNDPVVMEMASKAIGRLAMAGDTFTAEYVEFEVKRALEWLGADRNEGRRHAAVLVLRELAISVPTFFFQQVQPFFDNIFVAVWDPKQAIREGAVAALRACLILTTQREPKEMQKPQWYRHTFEEAEKGFDETLAKEKGMNRDDRIHGALLILNELVRISSMEGERLREEMEEITQQQLVHDKYCKDLMGFGTKPRHITPFTSFQAVQPQQSNALVGLLGYSSHQGLMGFGTSPSPAKSTLVESRCCRDLMEEKFDQVCQWVLKCRNSKNSLIQMTILNLLPRLAAFRPSAFTDTQYLQDTMNHVLSCVKKEKERTAAFQALGLLSVAVRSEFKVYLPRVLDIIRAALPPKDFAHKRQKAMQVDATVFTCISMLARAMGPGIQQDIKELLEPMLAVGLSPALTAVLYDLSRQIPQLKKDIQDGLLKMLSLVLMHKPLRHPGMPKGLAHQLASPGLTTLPEASDVGSITLALRTLGSFEFEGHSLTQFVRHCADHFLNSEHKEIRMEAARTCSRLLTPSIHLISGHAHVVSQTAVQVVADVLSKLLVVGITDPDPDIRYCVLASLDERFDAHLAQAENLQALFVALNDQVFEIRELAICTVGRLSSMNPAFVMPFLRKMLIQILTELEHSGIGRIKEQSARMLGHLVSNAPRLIRPYMEPILKALILKLKDPDPDPNPGVINNVLATIGELAQVSGLEMRKWVDELFIIIMDMLQDSSLLAKRQVALWTLGQLVASTGYVVEPYRKYPTLLEVLLNFLKTEQNQGTRREAIRVLGLLGALDPYKHKVNIGMIDQSRDASAVSLSESKSSQDSSDYSTSEMLVNMGNLPLDEFYPAVSMVALMRIFRDQSLSHHHTMVVQAITFIFKSLGLKCVQFLPQVMPTFLNVIRVCDGAIREFLFQQLGMLVSFVKSHIRPYMDEIVTLMREFWVMNTSIQSTIILLIEQIVVALGGEFKLYLPQLIPHMLRVFMHDNSPGRIVSIKLLAAIQLFGANLDDYLHLLLPPIVKLFDAPEAPLPSRKAALETVDRLTESLDFTDYASRIIHPIVRTLDQSPELRSTAMDTLSSLVFQLGKKYQIFIPMVNKVLVRHRINHQRYDVLICRIVKGYTLADEEEDPLIYQHRMLRSGQGDALASGPVETGPMKKLHVSTINLQKAWGAARRVSKDDWLEWLRRLSLELLKDSSSPSLRSCWALAQAYNPMARDLFNAAFVSCWSELNEDQQDELIRSIELALTSQDIAEVTQTLLNLAEFMEHSDKGPLPLRDDNGIVLLGERAAKCRAYAKALHYKELEFQKGPTPAILESLISINNKLQQPEAAAGVLEYAMKHFGELEIQATWYEKLHEWEDALVAYDKKMDTNKDDPELMLGRMRCLEALGEWGQLHQQCCEKWTLVNDETQAKMARMAAAAAWGLGQWDSMEEYTCMIPRDTHDGAFYRAVLALHQDLFSLAQQCIDKARDLLDAELTAMAGESYSRAYGAMVSCHMLSELEEVIQYKLVPERREIIRQIWWERLQGCQRIVEDWQKILMVRSLVVSPHEDMRTWLKYASLCGKSGRLALAHKTLVLLLGVDPSRQLDHPLPTVHPQVTYAYMKNMWKSARKIDAFQHMQHFVQTMQQQAQHAIATEDQQHKQELHKLMARCFLKLGEWQLNLQGINESTIPKVLQYYSAATEHDRSWYKAWHAWAVMNFEAVLHYKHQNQARDEKKKLRHASGANITNATTAATTAATATTTASTEGSNSESEAESTENSPTPSPLQKKVTEDLSKTLLMYTVPAVQGFFRSISLSRGNNLQDTLRVLTLWFDYGHWPDVNEALVEGVKAIQIDTWLQVIPQLIARIDTPRPLVGRLIHQLLTDIGRYHPQALIYPLTVASKSTTTARHNAANKILKNMCEHSNTLVQQAMMVSEELIRVAILWHEMWHEGLEEASRLYFGERNVKGMFEVLEPLHAMMERGPQTLKETSFNQAYGRDLMEAQEWCRKYMKSGNVKDLTQAWDLYYHVFRRISKQLPQLTSLELQYVSPKLLMCRDLELAVPGTYDPNQPIIRIQSIAPSLQVITSKQRPRKLTLMGSNGHEFVFLLKGHEDLRQDERVMQLFGLVNTLLANDPTSLRKNLSIQRYAVIPLSTNSGLIGWVPHCDTLHALIRDYREKKKILLNIEHRIMLRMAPDYDHLTLMQKVEVFEHAVNNTAGDDLAKLLWLKSPSSEVWFDRRTNYTRSLAVMSMVGYILGLGDRHPSNLMLDRLSGKILHIDFGDCFEVAMTREKFPEKIPFRLTRMLTNAMEVTGLDGNYRITCHTVMEVLREHKDSVMAVLEAFVYDPLLNWRLMDTNTKGNKRSRTRTDSYSAGQSVEILDGVELGEPAHKKTGTTVPESIHSFIGDGLVKPEALNKKAIQIINRVRDKLTGRDFSHDDTLDVPTQVELLIKQATSHENLCQCYIGWCPFW

SEQ ID NO: 7990 - protein, 792 aa, Homo sapiens
MQGEDARYLKRKVKGGNIDVHPSEKALIVHYEVEATILGEMGDPMLGERKECQKIIRLKSLNANTDITSLARKVVEECKLIHPSKLNEVEQLLYYLQNRRDSLSGKEKKEKSSKPKDPPPFEGMEIDEVANINDMDEYIELLYEDIPDKVRGSALILQLARNPDNLEELLLNETALGALARVLREDWKQSVELATNIIYIFFCFSSFSQFHGLITHYKIGALCMNIIDHELKRHELWQEELSKKKKAVDEDPENQTLRKDYEKTFKKYQGLVVKQEQLLRVALYLLLNLAEDTRTELKMRNKNIVHMLVKALDRDNFELLILVVSFLKKLSIFMENKNDMVEMDIVEKLVKMIPCEHEDLLNITLRLLLNLSFDTGLRNKMVQVGLLPKLTALLGNDNYKQIAMCVLYHISMDDRFKSMFAYTDCIPQLMKMLFECSDERIDLELISFCINLAANKRNVQLICEGNGLKMLMKRALKFKDPLLMKMIRNISQHDGPTKNLFIDYVGDLAAQISNDEEEEFVIECLGTLANLTIPDLDWELVLKEYKLVPYLKDKLKPGAAEDDLVLEVVIMIGTVSMDDSCAALLAKSGIIPALIELLNAQQEDDEFVCQIIYVFYQMVFHQATRDVIIKETQAPAYLIDLMHDKNNEIRKVCDNTLDIIAEYDEEWAKKIQSEKFRWHNSQWLEMVESRQMDESEQYLYGDDRIEPYIHEGDILERPDLFYNSDGLIASEGAISPDFFNDYHLQNGDVVGQHSFPGSLGMDGFGQPVGILGRPATAYGFRPDEPYYYGYGS

SEQ ID NO: 7991 - protein, 1670 aa, Homo sapiens
MMAQFPTAMNGGPNMWAITSEERTKHDRQFDNLKPSGGYITGDQARNFFLQSGLPAPVLAEIWALSDLNKDGKMDQQEFSIAMKLIKLKLQGQQLPVVLPPIMKQPPMFSPLISARFGMGSMPNLSIPQPLPPAAPITSLSSATSGTNLPPLMMPTPLVPSVSTSSLPNGTASLIQPLPIPYSSSTLPHGSSYSLMMGGFGGASIQKAQSLIDLGSSSSTSSTASLSGNSPKTGTSEWAVPQPTRLKYRQKFNTLDKSMSGYLSGFQARNALLQSNLSQTQLATIWTLADVDGDGQLKAEEFILAMHLTDMAKAGQPLPLTLPPELVPPSFRGGKQIDSINGTLPSYQKMQEEEPQKKLPVTFEDKRKANYERGNMELEKRRQALMEQQQREAERKAQKEKEEWERKQRELQEQEWKKQLELEKRLEKQRELERQREEERRKDIERREAAKQELERQRRLEWERIRRQELLNQKNREQEEIVRLNSKKKNLHLELEALNGKHQQISGRLQDVRLKKQTQKTELEVLDKQCDLEIMEIKQLQQELQEYQNKLIYLVPEKQLLNERIKNMQFSNTPDSGVSLLHKKSLEKEELCQRLKEQLDALEKETASKLSEMDSFNNQLKELRETYNTQQLALEQLYKIKRDKLKEIERKRLELMQKKKLEDEAARKAKQGKENLWKENLRKEEEEKQKRLQEEKTQEKIQEEERKAEEKQRKDKDTLKAEEKKRETASVLVNYRALYPFEARNHDEMSFNSGDIIQVDEKTVGEPGWLYGSFQGNFGWFPCNYVEKMPSSENEKAVSPKKALLPPTVSLSATSTSSEPLSSNQPASVTDYQNVSFSNLTVNTSWQKKSAFTRTVSPGSVSPIHGQGQVVENLKAQALCSWTAKKDNHLNFSKHDIITVLEQQENWWFGEVHGGRGWFPKSYVKIIPGSEVKREEPEALYAAVNKKPTSAAYSVGEEYIALYPYSSVEPGDLTFTEGEEILVTQKDGEWWTGSIGDRSGIFPSNYVKPKDQESFGSASKSGASNKKPEIAQVTSAYVASGSEQLSLAPGQLILILKKNTSGWWQGELQARGKKRQKGWFPASHVKLLGPSSERATPAFHPVCQVIAMYDYAANNEDELSFSKGQLINVMNKDDPDWWQGEINGVTGLFPSNYVKMTTDSDPSQQWCADLQTLDTMQPIERKRQGYIHELIQTEERYMADLQLVVEVFQKRMAESGFLTEGEMALIFVNWKELIMSNTKLLKALRVRKKTGGEKMPVQMIGDILAAELSHMQAYIRFCSCQLNGAALLQQKTDEDTDFKEFLKKLASDPRCKGMPLSSFLLKPMQRITRYPLLIRSILENTPESHADHSSLKLALERAEELCSQVNEGVREKENSDRLEWIQAHVQCEGLAEQLIFNSLTNCLGPRKLLHSGKLYKTKSNKELHGFLFNDFLLLTYMVKQFAVSSGSEKLFSSKSNAQFKMYKTPIFLNEVLVKLPTDPSSDEPVFHISHIDRVYTLRTDNINERTAWVQKIKAASEQYIDTEKKKREKAYQARSQKTSGIGRLMVHVIEATELKACKPNGKSNPYCEISMGSQSYTTRTIQDTLNPKWNFNCQFFIKDLYQDVLCLTLFDRDQFSPDDFLGRTEIPVAKIRTEQESKGPMTRRLLLHEVPTGEVWVRFDLQLFEQKTLL

SEQ ID NO: 7992 - protein, 947 aa, Homo sapiens
MSLPSRQTAIIVNPPPPEYINTKKNGRLTNQLQYLQKVVLKDLWKHSFSWPFQRPVDAVKLQLPDYYTIIKNPMDLNTIKKRLENKYYAKASECIEDFNTMFSNCYLYNKPGDDIVLMAQALEKLFMQKLSQMPQEEQVVGVKERIKKGTQQNIAVSSAKEKSSPSATEKVFKQQEIPSVFPKTSISPLNVVQGASVNSSSQTAAQVTKGVKRKADTTTPATSAVKASSEFSPTFTEKSVALPPIKENMPKNVLPDSQQQYNVVKTVKVTEQLRHCSEILKEMLAKKHFSYAWPFYNPVDVNALGLHNYYDVVKNPMDLGTIKEKMDNQEYKDAYKFAADVRLMFMNCYKYNPPDHEVVTMARMLQDVFETHFSKIPIEPVESMPLCYIKTDITETTGRENTNEASSEGNSSDDSEDERVKRLAKLQEQLKAVHQQLQVLSQVPFRKLNKKKEKSKKEKKKEKVNNSNENPRKMCEQMRLKEKSKRNQPKKRKQQFIGLKSEDEDNAKPMNYDEKRQLSLNINKLPGDKLGRVVHIIQSREPSLSNSNPDEIEIDFETLKASTLRELEKYVSACLRKRPLKPPAKKIMMSKEELHSQKKQELEKRLLDVNNQLNSRKRQTKSDKTQPSKAVENVSRLSESSSSSSSSSESESSSSDLSSSDSSDSESEMFPKFTEVKPNDSPSKENVKKMKNECIPPEGRTGVTQIGYCVQDTTSANTTLVHQTTPSHVMPPNHHQLAFNYQELEHLQTVKNISPLQILPPSGDSEQLSNGITVMHPSGDSDTTMLESECQAPVQKDIKIKNADSWKSLGKPVKPSGVMKSSDELFNQFRKAAIEKEVKARTQELIRKHLEQNTKELKASQENQRDLGNGLTVESFSNKIQNKCSGEEQKEHQQSSEAQDKSKLWLLKDRDLARQKEQERRRREAMVGTIDMTLQSDIMTMFENNFD

SEQ ID NO: 7993 - protein, 5430 aa, Homo sapiens
MSSSDEETLSERSCRSERSCRSERSYRSERSGSLSPCPPGDTLPWNLPLHEQKKRKSQDSVLDPAERAVVRVADERDRVQKKTFTKWVNKHLMKVRKHINDLYEDLRDGHNLISLLEVLSGIKLPREKGRMRFHRLQNVQIALDFLKQRQVKLVNIRNDDITDGNPKLTLGLIWTIILHFQISDIYISGESGDMSAKEKLLLWTQKVTAGYTGIKCTNFSSCWSDGKMFNALIHRYRPDLVDMERVQIQSNRENLEQAFEVAERLGVTRLLDAEDVDVPSPDEKSVITYVSSIYDAFPKVPEGGEGISATEVDSRWQEYQSRVDSLIPWIKQHTILMSDKTFPQNPVELKALYNQYIHFKETEILAKEREKGRIEELYKLLEVWIEFGRIKLPQGYHPNDVEEEWGKLIIEMLEREKSLRPAVERLELLLQIANKIQNGALNCEEKLTLAKNTLQADAAHLESGQPVQCESDVIMYIQECEGLIRQLQVDLQILRDENYYQLEELAFRVMRLQDELVTLRLECTNLYRKGHFTSLELVPPSTLTTTHLKAEPLTKATHSSSTSWFRKPMTRAELVAISSSEDEGNLRFVYELLSWVEEMQMKLERAEWGNDLPSVELQLETQQHIHTSVEELGSSVKEARLYEGKMSQNFHTSYAETLGKLETQYCKLKETSSFRMRHLQSLHKFVSRATAELIWLNEKEEEELAYDWSDNNSNISAKRNYFSELTMELEEKQDVFRSLQDTAELLSLENHPAKQTVEAYSAAVQSQLQWMKQLCLCVEQHVKENTAYFQFFSDARELESFLRNLQDSIKRKYSCDHNTSLSRLEDLLQDSMDEKEQLIQSKSSVASLVGRSKTIVQLKPRSPDHVLKNTISVKAVCDYRQIEITICKNDECVLEDNSQRTKWKVISPTGNEAMVPSVCFLIPPPNKDAIEMASRVEQSYQKVMALWHQLHVNTKSLISWNYLRKDLDLVQTWNLEKLRSSAPGECHQIMKNLQAHYEDFLQDSRDSVLFSVADRLRLEEEVEACKARFQHLMKSMENEDKEETVAKMYISELKNIRLRLEEYEQRVVKRIQSLASSRTDRDAWQDNALRIAEQEHTQEDLQQLRSDLDAVSMKCDSFLHQSPSSSSVPTLRSELNLLVEKMDHVYGLSTVYLNKLKTVDVIVRSIQDAELLVKGYEIKLSQEEVVLADLSALEAHWSTLRHWLSDVKDKNSVFSVLDEEIAKAKVVAEQMSRLTPERNLDLERYQEKGSQLQERWHRVIAQLEIRQSELESIQEVLGDYRACHGTLIKWIEETTAQQEMMKPGQAEDSRVLSEQLSQQTALFAEIERNQTKLDQCQKFSQQYSTIVKDYELQLMTYKAFVESQQKSPGKRRRMLSSSDAITQEFMDLRTRYTALVTLTTQHVKYISDALRRLEEEEKVVEEEKQEHVEKVKELLGWVSTLARNTQGKATSSETKESTDIEKAILEQQVLSEELTTKKEQVSEAIKTSQIFLAKHGHKLSEKEKKQISEQLNALNKAYHDLCDGSANQLQQLQSQLAHQTEQKTLQKQQNTCHQQLEDLCSWVGQAERALAGHQGRTTQQDLSALQKNQSDLKDLQDDIQNRATSFATVVKDIEGFMEENQTKLSPRELTALREKLHQAKEQYEALQEETRVAQKELEEAVTSALQQETEKSKAAKELAENKKKIDALLDWVTSVGSSGGQLLTNLPGMEQLSGASLEKGALDTTDGYMGVNQAPEKLDKQCEMMKARHQELLSQQQNFILATQSAQAFLDQHGHNLTPEEQQMLQQKLGELKEQYSTSLAQSEAELKQVQTLQDELQKFLQDHKEFESWLERSEKELENMHKGGSSPETLPSLLKRQGSFSEDVISHKGDLRFVTISGQKVLDMENSFKEGKEPSEIGNLVKDKLKDATERYTALHSKCTRLGSHLNMLLGQYHQFQNSADSLQAWMQACEANVEKLLSDTVASDPGVLQEQLATTKQLQEELAEHQVPVEKLQKVARDIMEIEGEPAPDHRHVQETTDSILSHFQSLSYSLAERSSLLQKAIAQSQSVQESLESLLQSIGEVEQNLEGKQVSSLSSGVIQEALATNMKLKQDIARQKSSLEATREMVTRFMETADSTTAAVLQGKLAEVSQRFEQLCLQQQEKESSLKKLLPQAEMFEHLSGKLQQFMENKSRMLASGNQPDQDITHFFQQIQELNLEMEDQQENLDTLEHLVTELSSCGFALDLCQHQDRVQNLRKDFTELQKTVKEREKDASSCQEQLDEFRKLVRTFQKWLKETEGSIPPTETSMSAKELEKQIEHLKSLLDDWASKGTLVEEINCKGTSLENLIMEITAPDSQGKTGSILPSVGSSVGSVNGYHTCKDLTEIQCDMSDVNLKYEKLGGVLHERQESLQAILNRMEEVHKEANSVLQWLESKEEVLKSMDAMSSPTKTETVKAQAESNKAFLAELEQNSPKIQKVKEALAGLLVTYPNSQEAENWKKIQEELNSRWERATEVTVARQRQLEESASHLACFQAAESQLRPWLMEKELMMGVLGPLSIDPNMLNAQKQQVQFMLKEFEARRQQHEQLNEAAQGILTGPGDVSLSTSQVQKELQSINQKWVELTDKLNSRSSQIDQAIVKSTQYQELLQDLSEKVRAVGQRLSVQSAISTQPEAVKQQLEETSEIRSDLEQLDHEVKEAQTLCDELSVLIGEQYLKDELKKRLETVALPLQGLEDLAADRINRLQAALASTQQFQQMFDELRTWLDDKQSQQAKNCPISAKLERLQSQLQENEEFQKSLNQHSGSYEVIVAEGESLLLSVPPGEEKRTLQNQLVELKNHWEELSKKTADRQSRLKDCMQKAQKYQWHVEDLVPWIEDCKAKMSELRVTLDPVQLESSLLRSKAMLNEVEKRRSLLEILNSAADILINSSEADEDGIRDEKAGINQNMDAVTEELQAKTGSLEEMTQRLREFQESFKNIEKKVEGAKHQLEIFDALGSQACSNKNLEKLRAQQEVLQALEPQVDYLRNFTQGLVEDAPDGSDASQLLHQAEVAQQEFLEVKQRVNSGCVMMENKLEGIGQFHCRVREMFSQLADLDDELDGMGAIGRDTDSLQSQIEDVRLFLNKIHVLKLDIEASEAECRHMLEEEGTLDLLGLKRELEALNKQCGKLTERGKARQEQLELTLGRVEDFYRKLKGLNDATTAAEEAEALQWVVGTEVEIINQQLADFKMFQKEQVDPLQMKLQQVNGLGQGLIQSAGKDCDVQGLEHDMEEINARWNTLNKKVAQRIAQLQEALLHCGKFQDALEPLLSWLADTEELIANQKPPSAEYKVVKAQIQEQKLLQRLLDDRKATVDMLQAEGGRIAQSAELADREKITGQLESLESRWTELLSKAAARQKQLEDILVLAKQFHETAEPISDFLSVTEKKLANSEPVGTQTAKIQQQIIRHKALEEDIENHATDVHQAVKIGQSLSSLTSPAEQGVLSEKIDSLQARYSEIQDRCCRKAALLDQALSNARLFGEDEVEVLNWLAEVEDKLSSVFVKDFKQDVLHRQHADHLALNEEIVNRKKNVDQAIKNGQALLKQTTGEEVLLIQEKLDGIKTRYADITVTSSKALRTLEQARQLATKFQSTYEELTGWLREVEEELATSGGQSPTGEQIPQFQQRQKELKKEVMEHRLVLDTVNEVSRALLELVPWRAREGLDKLVSDANEQYKLVSDTIGQRVDEIDAAIQRSQQYEQAADAELAWVAETKRKLMALGPIRLEQDQTTAQLQVQKAFSIDIIRHKDSMDELFSHRSEIFGTCGEEQKTVLQEKTESLIQQYEAISLLNSERYARLERAQVLVNQFWETYEELSPWIEETRALIAQLPSPAIDHEQLRQQQEEMRQLRESIAEHKPHIDKLLKIGPQLKELNPEEGEMVEEKYQKAENMYAQIKEEVRQRALALDEAVSQSTQITEFHDKIEPMLETLENLSSRLRMPPLIPAEVDKIRECISDNKSATVELEKLQPSFEALKRRGEELIGRSQGADKDLAAKEIQDKLDQMVFFWEDIKARAEEREIKFLDVLELAEKFWYDMAALLTTIKDTQDIVHDLESPGIDPSIIKQQVEAAETIKEETDGLHEELEFIRILGADLIFACGETEKPEVRKSIDEMNNAWENLNKTWKERLEKLEDAMQAAVQYQDTLQAMFDWLDNTVIKLCTMPPVGTDLNTVKDQLNEMKEFKVEVYQQQIEMEKLNHQGELMLKKATDETDRDIIREPLTELKHLWENLGEKIAHRQHKLEGALLALGQFQHALEELMSWLTHTEELLDAQRPISGDPKVIEVELAKHHVLKNDVLAHQATVETVNKAGNELLESSAGDDASSLRSRLEAMNQCWESVLQKTEEREQQLQSTLQQAQGFHSEIEDFLLELTRMESQLSASKPTGGLPETAREQLDTHMELYSQLKAKEETYNQLLDKGRLMLLSRDDSGSGSKTEQSVALLEQKWHVVSSKMEERKSKLEEALNLATEFQNSLQEFINWLTLAEQSLNIASPPSLILNTVLSQIEEHKVFANEVNAHRDQIIELDQTGNQLKFLSQKQDVVLIKNLLVSVQSRWEKVVQRSIERGRSLDDARKRAKQFHEAWKKLIDWLEDAESHLDSELEISNDPDKIKLQLSKHKEFQKTLGGKQPVYDTTIRTGRALKEKTLLPEDSQKLDNFLGEVRDKWDTVCGKSVERQHKLEEALLFSGQFMDALQALVDWLYKVEPQLAEDQPVHGDLDLVMNLMDAHKVFQKELGKRTGTVQVLKRSGRELIENSRDDTTWVKGQLQELSTRWDTVCKLSVSKQSRLEQALKQAEVFRDTVHMLLEWLSEAEQTLRFRGALPDDTEALQSLIDTHKEFMKKVEEKRVDVNSAVAMGEVILAVCHPDCITTIKHWITIIRARFEEVLTWAKQHQQRLETALSELVANAELLEELLAWIQWAETTLIQRDQEPIPQNIDRVKALIAEHQTFMEEMTRKQPDVDRVTKTYKRKNIEPTHAPFIEKSRSGGRKSLSQPTPPPMPILSQSEAKNPRINQLSARWQQVWLLALERQRKLNDALDRLEELKEFANFDFDVWRKKYMRWMNHKKSRVMDFFRRIDKDQDGKITRQEFIDGILASKFPTTKLEMTAVADIFDRDGDGYIDYYEFVAALHPNKDAYRPTTDADKIEDEVTRQVAQCKCAKRFQVEQIGENKYRFGDSQQLRLVRILRSTVMVRVGGGWMALDEFLVKNDPCRARGRTNIELREKFILPEGASQGMTPFRSRGRRSKPSSRAASPTRSSSSASQSNHSCTSMPSSPATPASGTKVIPSSGSKLKRPTPTFHSSRTSLAGDTSNSSSPASTGAKTNRADPKKSASRPGSRAGSRAGSRASSRRGSDASDFDLLETQSACSDTSESSAAGGQGNSRRGLNKPSKIPTMSKKTTTASPRTPGPKR

SEQ ID NO: 7994 - protein, 221 aa, Homo sapiens
MFQQFQASCLVLFFLVGFAQQTLKPQNRKVDCNKGVTGTIYEYGALTLNGEEYIQFKQFAGKHVLFVNVAAYUGLAAQYPELNALQEELKNFGVIVLAFPCNQFGKQEPGTNSEILLGLKYVCPGSGFVPSFQLFEKGDVNGEKEQKVFTFLKNSCPPTSDLLGSSSQLFWEPMKVHDIRWNFEKFLVGPDGVPVMHWFHQAPVSTVKSDILEYLKQFNTH

SEQ ID NO: 7995 - protein, 1586 aa, Homo sapiens
METSASATASEKQEAKSGILEAAGFPDPGKKASPLVVAAAAAAAVAAQGVPQHLLPPFHAPLPIDMRHQEGRYHYEPHSVHGVHGPPALSGSPVISDISLIRLSPHPAGPGESPFNAPHPYVNPHMEHYLRSVHSSPTLSMISAARGLSPADVAQEHLKERGLFGLPAPGTTPSDYYHQMTLVAGHPAPYGDLLMQSGGAASAPHLHDYLNPVDVSRFSSPRVTPRLSRKRALSISPLSDASLDLQRMIRTSPNSLVAYINNSRSSSAASGSYGHLSAGALSPAFTFPHPINPVAYQQILSQQRGLGSAFGHTPPLIQPSPTFLAQQPMALTSINATPTQLSSSSNCLSDTNQNKQSSESAVSSTVNPVAIHKRSKVKTEPEGLRPASPLALTQGQVSGHGSCGCALPLSQEQLADLKEDLDRDDCKQEAEVVIYETNCHWEDCTKEYDTQEQLVHHINNEHIHGEKKEFVCRWQACTREQKPFKAQYMLVVHMRRHTGEKPHKCTFEGCSKAYSRLENLKTHLRSHTGEKPYVCEHEGCNKAFSNASDRAKHQNRTHSNEKPYICKIPGCTKRYTDPSSLRKHVKTVHGPDAHVTKKQRNDVHLRTPLLKENGDSEAGTEPGGPESTEASSTSQAVEDCLHVRAIKTESSGLCQSSPGAQSSCSSEPSPLGSAPNNDSGVEMPGTGPGSLGDLTALDDTPPGADTSALAAPSAGGLQLRKHMTTMHRFEQLKKEKLKSLKDSCSWAGPTPHTRNTKLPPLPGSGSILENFSGSGGGGPAGLLPNPRLSELSASEVTMLSQLQERRDSSTSTVSSAYTVSRRSSGISPYFSSRRSSEASPLGAGRPHNASSADSYDPISTDASRRSSEASQCSGGSGLLNLTPAQQYSLRAKYAAATGGPPPTPLPGLERMSLRTRLALLDAPERTLPAGCPRPLGPRRGSDGPTYGHGHAGAAPAFPHEAPGGGARRASDPVRRPDALSLPRVQRFHSTHNVNPGPLPPCADRRGLRLQSHPSTDGGLARGAYSPRPPSISENVAMEAVAAGVDGAGPEADLGLPEDDLVLPDDVVQYIKAHASGALDEGTGQVYPTESTGFSDNPRLPSPGLHGQRRMVAADSNVGPSAPMLGGCQLGFGAPSSLNKNNMPVQWNEVSSGTVDALASQVKPPPFPQGNLAVVQQKPAFGQYPGYSPQGLQASPGGLDSTQPHLQPRSGAPSQGIPRVNYMQQLRQPVAGSQCPGMTTTMSPHACYGQVHPQLSPSTISGALNQFPQSCSNMPAKPGHLGHPQQTEVAPDPTTMGNRHRELGVPDSALAGVPPPHPVQSYPQQSHHLAASMSQEGYHQVPSLLPARQPGFMEPQTGPMGVATAGFGLVQPRPPLEPSPTGRHRGVRAVQQQLAYARATGHAMAAMPSSQETAEAVPKGAMGNMGSVPPQPPPQDAGGAPDHSMLYYYGQIHMYEQDGGLENLGSCQVMRSQPPQPQACQDSIQPQPLPSPGVNQVSSTVDSQLLEAPQIDFDAIMDDGDHSSLFSGALSPSLLHSLSQNSSRLTTPRNSLTLPSIPAGISNMAVGDMSSMLTSLAEESKFLNMMT

SEQ ID NO: 7996 - protein, 1496 aa, Homo sapiens
MAEERPPRLVDYFVVAGLAGNGAPIPEETWVPEPSGPLRPPRPAEPITDVAVIARALGEEVPQGYTCIQASAGGHPLELSAGLLGGTQPVICYRRGRDKPPLVELGVLYEGKERPKPGFQVLDTTPYSHSANLAPPGPGHPRTYLTYRRAAEGAGLHALGITDLCLVLPSKGEGTPHTYCRLPRNLNPGMWGPAVYLCYKVGLAKANTLVYEAELLGRYPEEDNEAFPLPESVPVFCLPMGATIECWPAQTKYPVPVFSTFVLTGAAGDKVYGAALQFYEAFPRARLSERQARALGLLSAVERGRALGGRAVRSRRAIAVLSRWPAFPAFRAFLTFLYRYSVSGPHRLPLEAHISHFIHNVPFPSPQRPRILVQMSPYDNLLLCQPVSSPLPLSGASFLQLLQSLGPELAITLLLAVLTEHKLLVHSLRPDLLTSVCEALVSMIFPLHWQCPYIPLCPLVLADVLSAPVPFIVGIHSSYFDLHDPPADVICVDLDTNTLFQTEEKKLLSPRTLPRRPYKVLLATLTNLYQQLDQTYTGPEEEASLEFLLTDYEAVCGRRARLEREVQGAFLRFMACLLKGYRVFLRPLTQAPSEGARDVDNLFFLQGFLKSRERSSHKLYSQLLHTQMFSQFIEECSFGSARHAALEFFDSCVEKVHPEQEKPEPTPLVELEELSGSELTVFITPPEEPALPEGSESTPQYCYDGFPELRAELFESLQEQPGALPVPGPSRSAPSSPAPRRTKQEMKVAQRMAQKSAAVPELWARCLLGHCYGLWFLCLPAYVRSAPSRVQALHTAYHVLRQMESGKVVLPDEVCYRVLMQLCSHYGQPVLSVRVMLEMRQAGIVPNTITYGYYNKAVLESKWPSGTPGGRLRWAKLRNVVLGAAQFRQPLRERQQQQQQQQQQQQQQQQEQVSAHQEAGSSQAEPYLERPSPTRPLQRQTTWAGRSLRDPASPPGRLVKSGSLGSARGAQPTVEAGVAHMIEALGVLEPRGSPVPWHDGSLSDLSLTGEEPLPGGSPGGSGSALSAQSTEALEGLSGRGPKAGGRQDEAGTPRRGLGARLQQLLTPSRHSPASRIPPPELPPDLPPPARRSPMDSLLHPRERPGSTASESSASLGSEWDLSESSLSNLSLRRSSERLSDTPGSFQSPSLEILLSSCSLCRACDSLVYDEEIMAGWAPDDSNLNTTCPFCACPFVPLLSVQTLDSRPSVPSPKSAGASGSKDAPVPGGPGPVLSDRRLCLALDEPQLCNGHMGGASRRVESGAWAYLSPLVLRKELESLVENEGSEVLALPELPSAHPIIFWNLLWYFQRLRLPSILPGLVLASCDGPSHSQAPSPWLTPDPASVQVRLLWDVLTPDPNSCPPLYVLWRVHSQIPQRVVWPGPVPASLSLALLESVLRHVGLNEVHKAVGLLLETLGPPPTGLHLQRGIYREILFLTMAALGKDHVDIVAFDKKYKSAFNKLASSMGKEELRHRRAQMPTPKAIDCRKCFGAPPEC

SEQ ID NO: 7997 - protein, 713 aa, Homo sapiens
MEPVETWTPGKVATWLRGLDDSLQDYPFEDWQLPGKNLLQLCPQSLEALAVRSLGHQELILGGVEQLQALSSRLQTENLQSLTEGLLGATHDFQSIVQGCLGDCAKTPIDVLCAAVELLHEADALLFWLSRYLFSHLNDFSACQEIRDLLEELSQVLHEDGPAAEKEGTVLRICSHVAGICHNILVCCPKELLEQKAVLEQVQLDSPLGLEIHTTSNCQHFVSQVDTQVPTDSRLQIQPGDEVVQINEQVVVGWPRKNMVRELLREPAGLSLVLKKIPIPETPPQTPPQVLDSPHQRSPSLSLAPLSPRAPSEDVFAFDLSSNPSPGPSPAWTDSASLGPEPLPIPPEPPAILPAGVAGTPGLPESPDKSPVGRKKSKGLATRLSRRRVSCRELGRPDCDGWLLLRKAPGGFMGPRWRRRWFVLKGHTLYWYRQPQDEKAEGLINVSNYSLESGHDQKKKYVFQLTHDVYKPFIFAADTLTDLSMWVRHLITCISKYQSPGRAPPPREEDCYSETEAEDPDDEAGSHSASPSPAQAGSPLHGDTSPAATPTQRSPRTSFGSLTDSSEEALEGMVRGLRQGGVSLLGQPQPLTQEQWRSSFMRRNRDPQLNERVHRVRALQSTLKAKLQELQVLEEVLGDPELTGEKFRQWKEQNRELYSEGLGAWGVAQAEGSSHILTSDSTEQSPHSLPSDPEEHSHLCPLTSESSLRPPDL

SEQ ID NO: 7998 - protein, 511 aa, Homo sapiens
MKFFLLLFTIGFCWAQYSPNTQQGRTSIVHLFEWRWVDIALECERYLAPKGFGGVQVSPPNENVAIHNPFRPWWERYQPVSYKLCTRSGNEDEFRNMVTRCNNVGVRIYVDAVINHMSGNAVSAGTSSTCGSYFNPGSRDFPAVPYSGWDFNDGKCKTGSGDIENYNDATQVRDCRLVGLLDLALEKDYVRSKIAEYMNHLIDIGVAGFRLDASKHMWPGDIKAILDKLHNLNSNWFPAGSKPFIYQEVIDLGGEPIKSSDYFGNGRVTEFKYGAKLGTVIRKWNGEKMSYLKNWGEGWGFMPSDRALVFVDNHDNQRGHGAGGASILTFWDARLYKMAVGFMLAHPYGFTRVMSSYRWPRQFQNGNDVNDWVGPPNNNGVIKEVTINPDTTCGNDWVCEHRWRQIRNMVNFRNVVDGQPFTNWYDNGSNQVAFGRGNRGFIVFNNDDWTFSLTLQTGLPAGTYCDVISGDKINGNCTGIKIYVSDDGKAHFSISNSAEDPFIAIHAESKL

SEQ ID NO: 7999 - protein, 599 aa, Homo sapiens
MSRSLLLWFLLFLLLLPPLPVLLADPGAPTPVNPCCYYPCQHQGICVRFGLDRYQCDCTRTGYSGPNCTIPGLWTWLRNSLRPSPSFTHFLLTHGRWFWEFVNATFIREMLMRLVLTVRSNLIPSPPTYNSAHDYISWESFSNVSYYTRILPSVPKDCPTPMGTKGKKQLPDAQLLARRFLLRRKFIPDPQGTNLMFAFFAQHFTHQFFKTSGKMGPGFTKALGHGVDLGHIYGDNLERQYQLRLFKDGKLKYQVLDGEMYPPSVEEAPVLMHYPRGIPPQSQMAVGQEVFGLLPGLMLYATLWLREHNRVCDLLKAEHPTWGDEQLFQTTRLILIGETIKIVIEEYVQQLSGYFLQLKFDPELLFGVQFQYRNRIAMEFNHLYHWHPLMPDSFKVGSQEYSYEQFLFNTSMLVDYGVEALVDAFSRQIAGRIGGGRNMDHHILHVAVDVIRESREMRLQPFNEYRKRFGMKPYTSFQELVGEKEMAAELEELYGDIDALEFYPGLLLEKCHPNSIFGESMIEIGAPFSLKGLLGNPICSPEYWKPSTFGGEVGFNIVKTATLKKLVCLNTKTCPYVSFRVPDASQDDGPAVERPSTEL

SEQ ID NO: 8000 - protein, 375 aa, Homo sapiens
MLDRDVGPTPMYPPTYLEPGIGRHTPYGNQTDYRIFELNKRLQNWTEECDNLWWDAFTTEFFEDDAMLTITFCLEDGPKRYTIGRTLIPRYFRSIFEGGATELYYVLKHPKEAFHSNFVSLDCDQGSMVTQHGKPMFTQVCVEGRLYLEFMFDDMMRIKTWHFSIRQHRELIPRSILAMHAQDPQMLDQLSKNITRCGLSNSTLNYLRLCVILEPMQELMSRHKTYSLSPRDCLKTCLFQKWQRMVAPPAEPTRQQPSKRRKRKMSGGSTMSSGGGNTNNSNSKKKSPASTFALSSQVPDVMVVGEPTLMGGEFGDEDERLITRLENTQFDAANGIDDEDSFNNSPALGANSPWNSKPPSSQESKSENPTSQASQ

SEQ ID NO: 8001 - protein, 622 aa, Homo sapiens
MGLYGQACPSVTSLRMTSELESSLTSMDWLPQLTMRAAIQKSDATQNAHGTGISKKNALLDPNTTLDQEEVQQHKDGKPPYSYASLITFAINSSPKKKMTLSEIYQWICDNFPYYREAGSGWKNSIRHNLSLNKCFLKVPRSKDDPGKGSYWAIDTNPKEDVLPTRPKKRARSVERASTPYSIDSDSLGMECIISGSASPTLAINTVTNKVTLYNTDQDGSDSPRSSLNNSLSDQSLASVNLNSVGSVHSYTPVTSHPESVSQSLTPQQQPQYNLPERDKQLLFSEYNFEDLSASFRSLYKSVFEQSLSQQGLMNIPSESSQQSHTSCTYQHSPSSTVSTHPHSNQSSLSNSHGSGLNTTGSNSVAQVSLSHPQMHTQPSPHPPHRPHGLPQHPQRSPHPAPHPQQHSQLQSPHPQHPSPHQHIQHHPNHQHQTLTHQAPPPPQQVSCNSGVSNDWYATLDMLKESCRIASSVNWSDVDLSQFQGLMESMRQADLKNWSLDQVQFADLCSSLNQFFTQTGLIHSQSNVQQNVCHGAMHPTKPSQHIGTGNLYIDSRQNLPPSVMPPPGYPHIPQALSTPGTTMAGHHRAMNQQHMMPSQAFQMRRSLPPDDIQDDFDWDSIV

SEQ ID NO: 8002 - protein, 907 aa, Homo sapiens
MNAPLDGLSVSSSSTGSLGSAAGAGGGGGAGLRLLSANVRQLHQALTALLSEAEREQFTHCLNAYHARRNVFDLVRTLRVLLDSPVKRRLLPMLRLVIPRSDQLLFDQYTAEGLYLPATTPYRQPAWGGPDSAGPGEVRLVSLRRAKAHEGLGFSIRGGSEHGVGIYVSLVEPGSLAEKEGLRVGDQILRVNDKSLARVTHAEAVKALKGSKKLVLSVYSAGRIPGGYVTNHIYTWVDPQGRSISPPSGLPQPHGGALRQQEGDRRSTLHLLQGGDEKKVNLVLGDGRSLGLTIRGGAEYGLGIYITGVDPGSEAEGSGLKVGDQILEVNGRSFLNILHDEAVRLLKSSRHLILTVKDVGRLPHARTTVDETKWIASSRIRETMANSAGFLGDLTTEGINKPGFYKGPAGSQVTLSSLGNQTRVLLEEQARHLLNEQEHATMAYYLDEYRGGSVSVEALVMALFKLLNTHAKFSLLSEVRGTISPQDLERFDHLVLRREIESMKARQPPGPGAGDTYSMVSYSDTGSSTGSHGTSTTVSSARNTLDLEETGEAVQGNINALPDVSVDDVRSTSQGLSSFKPLPRPPPLAQGNDLPLGQPRKLGREDLQPPSSMPSCSGTVFSAPQNRSPPAGTAPTPGTSSAQDLPSSPIYASVSPANPSSKRPLDAHLALVNQHPIGPFPRVQSPPHLKSPSAEATVAGGCLLPPSPSGHPDQTGTNQHFVMVEVHRPDSEPDVNEVRALPQTRTASTLSQLSDSGQTLSEDSGVDAGEAEASAPGRGRQSVSTKSRSSKELPRNERPTDGANKPPGLLEPTSTLVRVKKSAATLGIAIEGGANTRQPLPRIVTIQRGGSAHNCGQLKVGHVILEVNGLTLRGKEHREAARIIAEAFKTKDRDYIDFLVTEFNVML

SEQ ID NO: 8003 - protein, 1522 aa, Homo sapiens
MSVRLPQSIDRLSSLSSLGDSAPERKSPSHHRQPSDASETTGLVQRCVIIQKDQHGFGFTVSGDRIVLVQSVRPGGAAMKAGVKEGDRIIKVNGTMVTNSSHLEVVKLIKSGAYVALTLLGSSPSSMGISGLQQDPSPAGAPRITSVIPSPPPPPPLPPPQRITGPKPLQDPEVQKHATQILRNMLRQEEKELQDILPLYGDTSQRPSEGRLSLDSQEGDSGLDSGTERFPSLSESLMNRNSVLSDPGLDSPRTSPVIMARVAQHHRRQGSDAAVPSTGDQGVDQSPKPLIIGPEEDYDPGYFNNESDIIFQDLEKLKSRPAHLGVFLRYIFSQADPSPLLFYLCAEVYQQASPKDSRSLGKDIWNIFLEKNAPLRVKIPEMLQAEIDSRLRNSEDARGVLCEAQEAAMPEIQEQIHDYRTKRTLGLGSLYGENDLLDLDGDPLRERQVAEKQLAALGDILSKYEEDRSAPMDFALNTYMSHAGIRLREARPSNTAEKAQSAPDKDKWLPFFPKTKKSSNSKKEKDALEDKKRNPILKYIGKPKSSSQSTFHIPLSPVEVKPGNVRNIIQHFENNQQYDAPEPGTQRLSTGSFPEDLLESDSSRSEIRLGRSESLKGREEMKRSRKAENVPRSRSDVDMDAAAEATRLHQSASSSTSSLSTRSLENPTPPFTPKMGRRSIESPSLGFCTDTLLPHLLEDDLGQLSDLEPEPDAQNWQHTVGKDVVAGLTQREIDRQEVINELFVTEASHLRTLRVLDLIFYQRMKKENLMPREELARLFPNLPELIEIHNSWCEAMKKLREEGPIIKEISDLMLARFDGPAREELQQVAAQFCSYQSIALELIKTKQRKESRFQLFMQEAESHPQCRRLQLRDLIISEMQRLTKYPLLLESIIKHTEGGTSEHEKLCRARDQCREILKYVNEAVKQTENRHRLEGYQKRLDATALERASNPLAAEFKSLDLTTRKMIHEGPLTWRISKDKTLDLHVLLLEDLLVLLQKQDEKLLLKCHSKTAVGSSDSKQTFSPVLKLNAVLIRSVATDKRAFFIICTSKLGPPQIYELVALTSSDKNTWMELLEEAVRNATRHPGAAPMPVHPPPPGPREPAQQGPTPSRVELDDSDVFHGEPEPEELPGGTGSQQRVQGKHQVLLEDPEQEGSAEEEELGVLPCPSTSLDGENRGIRTRNPIHLAFPGPLFMEGLADSALEDVENLRHLILWSLLPGHTMETQAAQEPEDDLTPTPSVISVTSHPWDPGSPGQAPPGGEGDNTQLAGLEGERPEQEDMGLCSLEHLPPRTRNSGIWESPELDRNLAEDASSTEAAGGYKVVRKAEVAGSKVVPALPESGQSEPGPPEVEGGTKATGNCFYVSMPSGPPDSSTDHSEAPMSPPQPDSLPAGQTEPQPQLQGGNDDPRRPSRSPPSLALRDVGMIFHTIEQLTLKLNRLKDMELAHRELLKSLGGESSGGTTPVGSFHTEAARWTDGSLSPPAKEPLASDSRNSHELGPCPEDGSDAPLEDSTADAAASPGP

SEQ ID NO: 8004 - protein, 507 aa, Homo sapiens
MSSPNIWSTGSSVYSTPVFSQKMTVWILLLLSLYPGFTSQKSDDDYEDYASNKTWVLTPKVPEGDVTVILNNLLEGYDNKLRPDIGVKPTLIHTDMYVNSIGPVNAINMEYTIDIFFAQTWYDRRLKFNSTIKVLRLNSNMVGKIWIPDTFFRNSKKADAHWITTPNRMLRIWNDGRVLYTLRLTIDAECQLQLHNFPMDEHSCPLEFSSWSRSIAQAGMCSGVISAHYSLRFWGSTDPPTLASRVAGISDGYPREEIVYQWKRSSVEVGDTRSWRLYQFSFVGLRNTTEVVKTTSGDYVVMSVYFDLSRRMGYFTIQTYIPCTLIVVLSWVSFWINKDAVPARTSLGITTVLTMTTLSTIARKSLPKVSYVTAMDLFVSVCFIFVFSALVEYGTLHYFVSNRKPSKDKDKKKKNPAPTIDIRPRSATIQMNNATHLQERDEEYGYECLDGKDCASFFCCFEDCRTGAWRHGRIHIRIAKMDSYARIFFPTAFCLFNLVYWVSYLYL

SEQ ID NO: 8005 - protein, 384 aa, Homo sapiens
MNSTLFSQVENHSVHSNFSEKNAQLLAFENDDCHLPLAMIFTLALAYGAVIILGVSGNLALIIIILKQKEMRNVTNILIVNLSFSDLLVAIMCLPFTFVYTLMDHWVFGEAMCKLNPFVQCVSITVSIFSLVLIAVERHQLIINPRGWRPNNRHAYVGIAVIWVLAVASSLPFLIYQVMTDEPFQNVTLDAYKDKYVCFDQFPSDSHRLSYTTLLLVLQYFGPLCFIFICYFKIYIRLKRRNNMMDKMRDNKYRSSETKRINIMLLSIVVAFAVCWLPLTIFNTVFDWNHQIIATCNHNLLFLLCHLTAMISTCVNPIFYGFLNKNFQRDLQFFFNFCDFRSRDDDYETIAMSTMHTDVSKTSLKQASPVAFKKINNNDDNEKI

SEQ ID NO: 8006 - protein, 406 aa, Homo sapiens
MGLLVFVRNLLLALCLFLVLGFLYYSAWKLHLLQWEEDSNSVVLSFDSAGQTLGSEYDRLGFLLNLDSKLPAELATKYANFSEGACKPGYASALMTAIFPRFSKPAPMFLDDSFRKWARIREFVPPFGIKGQETGFNHVAQAGLKLLSSSNPPSLASQSAGITDNLIKAILSVTKEYRLTPALDSLRCRRCIIVGNGGVLANKSLGSRIDDYDIVVRLNSAPVKGFEKDVGSKTTLRITYPEGAMQRPEQYERDSLFVLAGFKWQDFKWLKYIVYKERVSASDGFWKSVATRVPKEPPEIRILNPYFIQEAAFTLIGLPFNNGLMGRGNIPTLGSVAVTMALHGCDEVAVAGFGYDMSTPNAPLHYYETVRMAAIKESWTHNIQREKEFLRKLVKARVITDLSSGI

SEQ ID NO: 8007 - protein, 373 aa, Homo sapiens
MPPVPGVPFRNVDNDSPTSVELEDWVDAQHPTDEEEEEASSASSTLYLVFSPSSFSTSSSLILGGPEEEEVPSGVIPNLTESIPSSPPQGPPQGPSQSPLSSCCSSFSWSSFSEESSSQKGEDTGTCQGLPDSESSFTYTLDEKVAELVEFLLLKYEAEEPVTEAEMLMIVIKYKDYFPVILKRAREFMELLFGLALIEVGPDHFCVFANTVGLTDEGSDDEGMPENSLLIIILSVIFIKGNCASEEVIWEVLNAVGVYAGREHFVYGEPRELLTKVWVQGHYLEYREVPHSSPPYYEFLWGPRAHSESIKKKVLEFLAKLNNTVPSSFPSWYKDALKDVEERVQATIDTADDATVMASESLSVMSSNVSFSE

SEQ ID NO: 8008 - protein, 828 aa, Homo sapiens
MQNSVSVPPKDEGESNIPSGTIQSRKGLQNKSQFRTIAPKIVPKVLTSRMLPCHSPSRSDQVNLGPSINSKLLGMSTQNYALMQVAGQEGTFSLVALPHVASAQPIQKPRMSLPENLKLPIPRYQPPRNSKASRKKPILIFPKSGCSKAPAQTQMCPQMSPSPPHHPELLYKPSPFEEVPSLEQAPASISTAALTNGSDHGDLRPPVTNTHGSLNPPATPASSTPEEPAKQDLTALSGKAHFVSKITSSKPSAVASEKFKEQVDLAKTMTNLSPTILGNAVQLISSVPKGKLPIPPYSRMKTMEVYKIKSDANIAGFSLPGPKADCDKIPSTTEGFNAATKVASRLPVPQVSQQSACESAFCPPTKLDLNHKTKLNSGAAKRKGRKRKVPDEILAFQGKRRKYIINKCRDGKERVKNDPQEFRDQKLGTLKKYRSIMPKPIMVIPTLASLASPTTLQSQMLGGLGQDVLLNNSLTPKYLGCKQDNSSSPKPSSVFRNGFSGIKKPWHRCHVCNHHFQFKQHLRDHMNTHTNRRPYSCRICRKSYVRPGSLSTHMKLHHGENRLKKLMCCEFCAKVFGHIRVYFGHLKEVHRVVISTEPAPSELQPGDIPKNRDMSVRGMEGSLERENKSNLEEDFLLNQADEVKLQIKCGRCQITAQSFAEIKFHLLDVHGEEIEGRLQEGTFPGSKGTQEELVQHASPDWKRHPERGKPEKVHSSSEESHACPRLKRQLHLHQNGVEMLMENEGPQSGTNKPRETCQGPECPGLHTFLLWSHSGFNCLLCAEMLGRKEDLLHHWKHQHNCEDPSKLWAILNTVSNQGVIELSSEAEK

SEQ ID NO: 8009 - protein, 517 aa, Homo sapiens
MLLGPPPFNESTKPSPSPCHSFASQAWLRQVPEVSKHLQCPSAKSLLTMEYHQPEDPAPGKAGTAEAVIPENHEVLAGPDEHPQDTDARDADGEAREREPADQALLPSQCGDNLESPLPEASSAPPGPTLGTLPEVETIRACSMPQELPQSPRTRQPEPDFYCVKWIPWKGEQTPIITQSTNGPCPLLAIMNILFLQWKVKLPPQKEVITSDELMAHLGNCLLSIKPQEKSEGLQLNFQQNVDDAMTVLPKLATGLDVNVRFTGVSDFEYTPECSVFDLLGIPLYHGWLVDPQSPEAVRAVGKLSYNQLVERIITCKHSSDTNLVTEGLIAEQFLETTAAQLTYHGLCELTAAAKEGELSVFFRNNHFSTMTKHKSHLYLLVTDQGFLQEEQVVWESLHNVDGDSCFCDSDFHLSHSLGKGPGAEGGSGSPETQLQVDQDYLIALSLQQQQPRGPLGLTDLELAQQLQQEEYQQQQAAQPVRMRTRVLSLQGRGATSGRPAGERRQRPKHESDCILL

SEQ ID NO: 8010 - protein, 1798 aa, Homo sapiens
MKRSRCRDRPQPPPPDRREDGVQRAAELSQSLPPRRRAPPGRQRLEERTGPAGPEGKEQDVVTGVSPLLFRKLSNPDIFSSTGKVKLQRQLSQDDCKLWRGNLASSLSGKQLLPLSSSVHSSVGQVTWQSSGEASNLVRMRNQSLGQSAPSLTAGLKELSLPRRGSFCRTSNRKSLIVTSSTSPTLPRPHSPLHGHTGNSPLDSPRNFSPNAPAHFSFVPARRTDGRRWSLASLPSSGYGTNTPSSTVSSSCSSQEKLHQLPFQPTADELHFLTKHFSTESVPDEEGRQSPAMRPRSRSLSPGRSPVSFDSEIIMMNHVYKERFPKATAQMEERLAEFISSNTPDSVLPLADGALSFIHHQVIEMARDCLDKSRSGLITSQYFYELQDNLEKLLQDAHERSESSEVAFVMQLVKKLMIIIARPARLLECLEFDPEEFYHLLEAAEGHAKEGQGIKCDIPRYIVSQLGLTRDPLEEMAQLSSCDSPDTPETDDSIEGHGASLPSKKTPSEEDFETIKLISNGAYGAVFLVRHKSTRQRFAMKKINKQNLILRNQIQQAFVERDILTFAENPFVVSMFCSFDTKRHLCMVMEYVEGGDCATLLKNIGALPVDMVRLYFAETVLALEYLHNYGIVHRDLKPDNLLITSMGHIKLTDFGLSKIGLMSLTTNLYEGHIEKDAREFLDKQVCGTPEYIAPEVILRQGYGKPVDWWAMGIILYEFLVGCVPFFGDTPEELFGQVISDEIVWPEGDEALPPDAQDLTSKLLHQNPLERLGTGSAYEVKQHPFFTGLDWTGLLRQKAEFIPQLESEDDTSYFDTRSERYHHMDSEDEEEVSEDGCLEIRQFSSCSPRFNKVYSSMERLSLLEERRTPPPTKRSLSEEKEDHSDGLAGLKGRDRSWVIGSPEILRKRLSVSESSHTESDSSPPMTVRRRCSGLLDAPRFPEGPEEASSTLRRQPQEGIWVLTPPSGEGVSGPVTEHSGEQRPKLDEEAVGRSSGSSPAMETRGRGTSQLAEGATAKAISDLAVRRARHRLLSGDSTEKRTARPVNKVIKSASATALSLLIPSEHHTCSPLASPMSPHSQSSNPSSRDSSPSRDFLPALGSMRPPIIIHRAGKKYGFTLRAIRVYMGDSDVYTVHHMVWHVEDGGPASEAGLRQGDLITHVNGEPVHGLVHTEVVELILKSGNKVAISTTPLENTSIKVGPARKGSYKAKMARRSKRSRGKDGQESRKRSSLFRKITKQASLLHTSRSLSSLNRSLSSGESGPGSPTHSHSLSPRSPTQGYRVTPDAVHSVGGNSSQSSSPSSSVPSSPAGSGHTRPSSLHGLAPKLQRQYRSPRRKSAGSIPLSPLAHTPSPPPPTASPQRSPSPLSGHVAQAFPTKLHLSPPLGRQLSRPKSAEPPRSPLLKRVQSAEKLAAALAASEKKLATSRKHSLDLPHSELKKELPPREVSPLEVVGARSVLSGKGALPGKGVLQPAPSRALGTLRQDRAERRESLQKQEAIREVDSSEDDTEEGPENSQGAQELSLAPHPEVSQSVAPKGAGESGEEDPFPSRDPRSLGPMVPSLLTGITLGPPRMESPSGPHRRLGSPQAIEEAASSSSAGPNLGQSGATDPIPPEGCWKAQHLHTQALTALSPSTSGLTPTSSCSPPSSTSGKLSMWSWKSLIEGPDRASPSRKATMAGGLANLQDLENTTPAQPKNLSPREQGKTQPPSAPRLAHPSYEDPSQGWLWESECAQAVKEDPALSITQVPDASGDRRQDVPCRGCPLTQKSEPSLRRGQEPGGHQKHRDLALVPDELLKQT

SEQ ID NO: 8011 - protein, 671 aa, Homo sapiens
KGERWSGLRHEGQWSPGRGPVLALQARKKRTKAKKDKAQRKSETQHRGSAPHSESDLPEQEEEILGSDDDEQEDPNDYCKGGYHLVKIGDLFNGRYHVIRKLGWGHFSTVWLSWDIQGKKFVAMKVVKSAEHYTETALDEIRLLKSVRNSDPNDPNREMVVQLLDDFKISGVNGTHICMVFEVLGHHLLKWIIKSNYQGLPLPCVKKIIQQVLQGLDYLHTKCRIIHTDIKPENILLSVNEQYIRRLAAEATEWQRSGAPPPSGSAVSTAPQPKPADKMSKNKKKKLKKKQKRQAELLEKRMQEIEEMEKESGPGQKRPNKQEESESPVERPLKENPPNKMTQEKLEESSTIGQDQTLMERDTEGGAAEINCNGVIEVINYTQNSNNETLRHKEDLHNANDCDVQNLNQESSFLSSQNGDSSTSQETDSCTPITSEVSDTMVCQSSSTVGQSFSEQHISQLQESIRAEIPCEDEQEQEHNGPLDNKGKSTAGNFLVNPLEPKNAEKLKVKIADLGNACWVHKHFTEDIQTRQYRSLEVLIGSGYNTPADIWSTACMAFELATGDYLFEPHSGEEYTRDEDHIALIIELLGKVPRKLIVAGKYSKEFFTKKGDLKHITKLKPWGLFEVLVEKYEWSQEEAAGFTDFLLPMLELIPEKRATAAECLRHPWLNS

SEQ ID NO: 8012 - protein, 606 aa, Homo sapiens
MRRSEVLAEESIVCLQKALNHLREIWELIGIPEDQRLQRTEVVKKHIKELLDMMIAEEESLKERLIKSISVCQKELNTLCSELHVEPFQEEGETTILQLEKDLRTQVELMRKQKKERKQELKLLQEQDQELCEILCMPHYDIDSASVPSLEELNQFRQHVTTLRETKASRREEFVSIKRQIILCMEALDHTPDTSFERDVVCEDEDAFCLSLENIATLQKLLRQLEMQKSQNEAVCEGLRTQIRELWDRLQIPEEEREAVATIMSGSKAKVRKALQLEVDRLEELKMQNMKKVIEAIRVELVQYWDQCFYSQEQRQAFAPFCAEDYTESLLQLHDAEIVRLKNYYEVHKELFEGVQKWEETWRLFLEFERKASDPNRFTNRGGNLLKEEKQRAKLQKMLPKLEEELKARIELWEQEHSKAFMVNGQKFMEYVAEQWEMHRLEKERAKQERQLKNKKQTETEMLYGSAPRTPSKRRGLAPNTPGKARKLNTTTMSNATANSSIRPIFGGTVYHSPVSRLPPSGSKPVAASTCSGKKTPRTGRHGANKENLELNGSILSGGYPGSAPLQRNFSINSVASTYSEFARELSKASKSDATSGILNSTNIQS

SEQ ID NO: 8013 - protein, 997 aa, Homo sapiens
MWRLRRAAVACEVCQSLVKHSSGIKGSLPLQKLHLVSRSIYHSHHPTLKLQRPQLRTSFQQFSSLTNLPLRKLKFSPIKYGYQPRRNFWPARLATRLLKLRYLILGSAVGGGYTAKKTFDQWKDMIPDLSEYKWIVPDIVWEIDEYIDFEKIRKALPSSEDLVKLAPDFDKIVESLSLLKDFFTSGSPEETAFRATDRGSESDKHFRKGLLGELILLQQQIQEHEEEARRAAGQYSTSYAQQKRKVSDKEKIDQLQEELLHTQLKYQRILERLEKENKELRKLVLQKDDKGIHHRKLKKSLIDMYSEVLDVLSDYDASYNTQDHLPRVVVVGDQSAGKTSVLEMIAQARIFPRGSGEMMTRSPVKVTLSEGPHHVALFKDSSREFDLTKEEDLAALRHEIELRMRKNVKEGCTVSPETISLNVKGPGLQRMVLVDLPGVINTVTSGMAPDTKETIFSISKAYMQNPNAIILCIQDGSVDAERSIVTDLVSQMDPHGRRTIFVLTKVDLAEKNVASPSRIQQIIEGKLFPMKALGYFAVVTGKGNSSESIEAIREYEEEFFQNSKLLKTSMLKAHQVTTRNLSLAVSDCFWKMVRESVEQQADSFKATRFNLETEWKNNYPRLRELDRNELFEKAKNEILDEVISLSQVTPKHWEEILQQSLWERVSTHVIENIYLPAAQTMNSGTFNTTVDIKLKQWTDKQLPNKAVEVAWETLQEEFSRFMTEPKGKEHDDIFDKLKEAVKEESIKRHKWNDFAEDSLRVIQHNALEDRSISDKQQWDAAIYFMEEALQARLKDTENAIENMVGPDWKKRWLYWKNRTQEQCVHNETKNELEKMLKCNEEHPAYLASDEITTVRKNLESRGVEVDPSLIKDTWHQVYRRHFLKTALNHCNLCRRGFYYYQRHFVDSELECNDVVLFWRIQRMLAITANTLRQQLTNTEVRRLEKNVKEVLEDFAEDGEKKIKLLTGKRVQLAEDLKKVREIQEKLDAFIEALHQEK

SEQ ID NO: 8014 - protein, 977 aa, Homo sapiens
MLLWVILLVLAPVSGQFARTPRPIIFLQPPWTTVFQGERVTLTCKGFRFYSPQKTKWYHRYLGKEILRETPDNILEVQESGEYRCQAQGSPLSSPVHLDFSSASLILQAPLSVFEGDSVVLRCRAKAEVTLNNTIYKNDNVLAFLNKRTDFHIPHACLKDNGAYRCTGYKESCCPVSSNTVKIQVQEPFTRPVLRASSFQPISGNPVTLTCETQLSLERSDVPLRFRFFRDDQTLGLGWSLSPNFQITAMWSKDSGFYWCKAATMPYSVISDSPRSWIQVQIPASHPVLTLSPEKALNFEGTKVTLHCETQEDSLRTLYRFYHEGVPLRHKSVRCERGASISFSLTTENSGNYYCTADNGLGAKPSKAVSLSVTVPVSHPVLNLSSPEDLIFEGAKVTLHCEAQRGSLPILYQFHHEGAALERRSANSAGGVAISFSLTAEHSGNYYCTADNGFGPQRSKAVSLSVTVPVSHPVLTLSSAEALTFEGATVTLHCEVQRGSPQILYQFYHEDMPLWSSSTPSVGRVSFSFSLTEGHSGNYYCTADNGFGPQRSEVVSLFVTVPVSRPILTLRVPRAQAVVGDLLELHCEAPRGSPPILYWFYHEDVTLGSSSAPSGGEASFNLSLTAEHSGNYSCEANNGLVAQHSDTISLSVIVPVSRPILTFRAPRAQAVVGDLLELHCEALRGSSPILYWFYHEDVTLGKISAPSGGGASFNLSLTTEHSGIYSCEADNGLEAQRSEMVTLKVAVPVSRPVLTLRAPGTHAAVGDLLELHCEALRGSPLILYRFFHEDVTLGNRSSPSGGASLNLSLTAEHSGNYSCEADNGLGAQRSETVTLYITGLTANRSGPFATGVAGGLLSIAGLAAGALLLYCWLSRKAGRKPASDPARSPSDSDSQEPTYHNVPAWEELQPVYTNANPRGENVVYSEVRIIQEKKKHAVASDPRHLRNKGSPIIYSEVKVASTPVSGSLFLASSAPHR

SEQ ID NO: 8015 - protein, 376 aa, Homo sapiens
MSPEVALNRISPMLSPFISSVVRNGKVGLDATNCLRITDLKSGCTSLTPGPNCDRFKLHIPYAGETLKWDIIFNAQYPELPPDFIFGEDAEFLPDPSALQNLASWNPSNPECLLLVVKELVQQYHQFQCSRLRESSRLMFEYQTLLEEPQYGENMEIYAGKKNNWTGEFSARFLLKLPVDFSNIPTYLLKDVNEDPGEDVALLSVSFEDTEATQVYPKLYLSPRIEHALGGSSALHIPAFPGGGCLIDYVPQVCHLLTNKVQYVIQGYHKRREYIAAFLSHFGTGVVEYDAEGFTKLTLLLMWKDFCFLVHIDLPLFFPRDQPTLTFQSVYHFTNSGQLYSQAQKNYPYSPRWDGNEMAKRAKRESNRDGEESSSA

SEQ ID NO: 8016 - protein, 313 aa, Homo sapiens
MGQTNVTSWRDFVFLGFSSSGELQLLLFALFLSLYLVTLTSNVFIIIAIRLDSHLHTPMYLFLSFLSFSETCYTLGIIPRMLSGLAGGDQAISYVGCAAQMFFSASWACTNCFLLAAMGFDRYVAICAPLHYASHMNPTLCAQLVITSFLTGYLFGLGMTLVIFHLSFCSSHEIQHFFCDTPPVLSLACGDTGPSELRIFILSLLVLLVSFFFITISYAYILAAILRIPSAEGQKKAFSTCASHLTVVIIHYGCASFVYLRPKASYSLERDQLIAMTYTVVTPLLNPIVYSLRNRAIQTALRNAFRGRLLGKG

SEQ ID NO: 8017 - protein, 1248 aa, Homo sapiens
MVVALRYVWPLLLCSPCLLIQIPEELMEPPVITEQSPRRLVVFPTDDISLKCEASGKPEVQFRWTRDGVHFKPKEELGVTVYQSPHSGSFTITGNNSNFAQRFQGIYRCFASNKLGTAMSHEIRLMAEGAPKWPKETVKPVEVEEGESVVLPCNPPPSAEPLRIYWMNSKILHIKQDERVTMGQNGNLYFANVLTSDNHSDYICHAHFPGTRTIIQKEPIDLRVKATNSMIDRKPRLLFPTNSSSHLVALQGQPLVLECIAEGFPTPTIKWLRPSGPMPADRVTYQNHNKTLQLLKVGEEDDGEYRCLAENSLGSARHAYYVTVEAAPYWLHKPQSHLYGPGETARLDCQVQGRPQPEVTWRINGIPVEELAKDQKYRIQRGALILSNVQPSDTMVTQCEARNRHGLLLANAYIYVVQLPAKILTADNQTYMAVQGSTAYLLCKAFGAPVPSVQWLDEDGTTVLQDERFFPYANGTLGIRDLQANDTGRYFCLAANDQNNVTIMANLKVKDATQITQGPRSTIEKKGSRVTFTCQASFDPSLQPSITWRGDGRDLQELGDSDKYFIEDGRLVIHSLDYSDQGNYSCVASTELDVVESRAQLLVVGSPGPVPRLVLSDLHLLTQSQVRVSWSPAEDHNAPIEKYDIEFEDKEMAPEKWYSLGKVPGNQTSTTLKLSPYVHYTFRVTAINKYGPGEPSPVSETVVTPEAAPEKNPVDVKGEGNETTNMVITWKPLRWMDWNAPQVQYRVQWRPQGTRGPWQEQIVSDPFLVVSNTSTFVPYEIKVQAVNSQGKGPEPQVTIGYSGEDYPQAIPELEGIEILNSSAVLVKWRPVDLAQVKGHLRGYNVTYWREGSQRKHSKRHIHKDHVVVPANTTSVILSGLRPYSSYHLEVQAFNGRGSGPASEFTFSTPEGVPGHPEALHLECQSNTSLLLRWQPPLSHNGVLTGYVLSYHPLDEGGKGQLSFNLRDPELRTHNLTDLSPHLRYRFQLQATTKEGPGEAIVREGGTMALSGISDFGNISATAGENYSVVSWVPKEGQCNFRFHILFKALGEEKGGASLSPQYVSYNQSSYTQWDLQPDTDYEIHLFKERMFRHQMAVKTNGTGRVRLPPAGFATEGWFIGFVSAIILLLLVLLILCFIKRSKGGKYSVKDKEDTQVDSEARPMKDETFGEYSDNEEKAFGSSQPSLNGDIKPLGSDDSLADYGGSVDVQFNEDGSFIGQYSGKKEKEAAGGNDSSGATSPINPAVALE

SEQ ID NO: 8018 - protein, 2817 aa, Homo sapiens
MKLNPQQAPLYGDCVVTVLLAEEDKAEDDVVFYLVFLGSTLRHCTSTRKVSSDTLETIAPGHDCCETVKVQLCASKEGLPVFVVAEEDFHFVQDEAYDAAQFLATSAGNQQALNFTRFLDQSGPPSGDVNSLDKKLVLAFRHLKLPTEWNVLGTDQSLHDAGPRETLMHFAVRLGLLRLTWFLLQKPGGRGALSIHNQEGATPVSLALERGYHKLHQLLTEENAGEPDSWSSLSYEIPYGDCSVRHHRELDIYTLTSESDSHHEHPFPGDGCTGPIFKLMNIQQQLMKTNLKQMDSLMPLMMTAQDPSSAPETDGQFLPCAPEPTDPQRLSSSEETESTQCCPGSPVAQTESPCDLSSIVEEENTDRSCRKKNKGVERKGEEVEPAPIVDSGTVSDQDSCLQSLPDCGVKGTEGLSSCGNRNEETGTKSSGMPTDQESLSSGDAVLQRDLVMEPGTAQYSSGGELGGISTTNVSTPDTAGEMEHGLMNPDATVWKNVLQGGESTKERFENSNIGTAGASDVHVTSKPVDKISVPNCAPAASSLDGNKPAESSLAFSNEETSTEKTAETETSRSREESADAPVDQNSVVIPAAAKDKISDGLEPYTLLAAGIGEAMSPSDLALLGLEEDVMPHQNSETNSSHAQSQKGKSSPICSTTGDDKLCADSACQQNTVTSSGDLVAKLCDNIVSESESTTARQPSSQDPPDASHCEDPQAHTVTSDPVRDTQERADFCPFKVVDNKGQRKDVKLDKPLTNMLEVVSHPHPVVPKMEKELVPDQAVISDSTFSLANSPGSESVTKDDALSFVPSQKEKGTATPELHTATDYRDGPDGNSNEPDTRPLEDRAVGLSTSSTAAELQHGMGNTSLTGLGGEHEGPAPPAIPEALNIKGNTDSSLQSVGKATLALDSVLTEEGKLLVVSESSAAQEQDKDKAVTCSSIKENALSSGTLQEEQRTPPPGQDTQQFHEKSISADCAKDKALQLSNSPGASSAFLKAETEHNKEVAPQVSLLTQGGAAQSLVPPGASLATESRQEALGAEHNSSALLPCLLPDGSDGSDALNCSQPSPLDVGVKNTQSQGKTSACEVSGDVTVDVTGVNALQGMAEPRRENISHNTQDILIPNVLLSQEKNAVLGLPVALQDKAVTDPQGVGTPEMIPLDWEKGKLEGADHSCTMGDAEEAQIDDEAHPVLLQPVAKELPTDMELSAHDDGAPAGVREVMRAPPSGRERSTPSLPCMVSAQDAPLPKGADLIEEAASRIVDAVIEQVKAAGALLTEGEACHMSLSSPELGPLTKGLESAFTEKVSTFPPGESLPMGSTPEEATGSLAGCFAGREEPEKIILPVQGPEPAAEMPDVKAEDEVDFRASSISEEVAVGSIAATLKMKQGPMTQAINRENWCTIEPCPDAASLLASKQSPECENFLDVGLGRECTSKQGVLKRESGSDSDLFHSPSDDMDSIIFPKPEEEHLACDITGSSSSTDDTASLDRHSSHGSDVSLSQILKPNRSRDRQSLDGFYSHGMGAEGRESESEPADPGDVEEEEMDSITEVPANCSVLRSSMRSLSPFRRHSWGPGKNAASDAEMNHRSMSWCPSGVQYSAGLSADFNYRSFSLEGLTGGAGVGNKPSSSLEVSSANAEELRHPFSGEERVDSLVSLSEEDLESDQREHRMFDQQICHRSKQQGFNYCTSAISSPLTKSISLMTISHPGLDNSRPFHSTFHNTSANLTESITEENYNFLPHSPSKKDSEWKSGTKVSRTFSYIKNKMSSSKKSKEKEKEKDKIKEKEKDSKDKEKDKKTVNGHTFSSIPVVGPISCSQCMKPFTNKDAYTCANCSAFVHKGCRESLASCAKVKMKQPKGSLQAHDTSSLPTVIMRNKPSQPKERPRSAVLLVDETATTPIFANRRSQQSVSLSKSVSIQNITGVGNDENMSNTWKFLSHSTDSLNKISKVNESTESLTDEGVGTDMNEGQLLGDFEIESKQLEAESWSRIIDSKFLKQQKKDVVKRQEVIYELMQTEFHHVRTLKIMSGVYSQGMMADLLFEQQMVEKLFPCLDELISIHSQFFQRILERKKESLVDKSEKNFLIKRIGDVLVNQFSGENAERLKKTYGKFCGQHNQSVNYFKDLYAKDKRFQAFVKKKMSSSVVRRLGIPECILLVTQRITKYPVLFQRILQCTKDNEVEQEDLAQSLSLVKDVIGAVDSKVASYEKKVRLNEIYTKTDSKSIMRMKSGQMFAKEDLKRKKLVRDGSVFLKNAAGRLKEVQAVLLTDILVFLQEKDQKYIFASLDQKSTVISLKKLIVREVAHEEKGLFLISMGMTDPEMVEVHASSKEERNSWIQIIQDTINTLNRDEDEGIPSENEEEKKMLDTRARELKEQLHQKDQKILLLLEEKEMIFRDMAECSTPLPEDCSPTHSPRVLFRSNTEEALKGGPLMKSAINEVEILQGLVSGNLGGTLGPTVSSPIEQDVVGPVSLPRRAETFGGFDSHQMNASKGGEKEEGDDGQDLRRTESDSGLKKGGNANLVFMLKRNSEQVVQSVVHLYELLSALQGVVLQQDSYIEDQKLVLSERALTRSLSRPSSLIEQEKQRSLEKQRQDLANLQKQQAQYLEEKRRREREWEARERELREREALLAQREEEVQQGQQDLEKEREELQQKKGTYQYDLERLRAAQKQLEREQEQLRREAERLSQRQTERDLCQVSHPHTKLMRIPSFFPSPEEPPSPSAPSIAKSGSLDSELSVSPKRNSISRTHKDKGPFHILSSTSQTNKGPEGQSQAPASTSASTRLFGLTKPKEKKEKKKKNKTSRSQPGDGPASEVSAEGEEIFC

SEQ ID NO: 8019 - protein, 1217 aa, Homo sapiens
MYIKQVIIQGFRSYRDQTIVDPFSSKHNVIVGRNGSGKSNFFYAIQFVLSDEFSHLRPEQRLALLHEGTGPRVISAFVEIIFDNSDNRLPIDKEEVSLRRVIGAKKDQYFLDKKMVTKNDVMNLLESAGFSRSNPYYIVKQGKINQMATAPDSQRLKLLREVAGTRVYDERKEESISLMKETEGKREKINELLKYIEERLHTLEEEKEELAQYQKWDKMRRALEYTIYNQELNETRAKLDELSAKRETSGEKSRQLRDAQQDARDKMEDIERQVRELKTKISAMKEEKEQLSAERQEQIKQRTKLELKAKDLQDELAGNSEQRKRLLKERQKLLEKIEEKQKELAETEPKFNSVKEKEERGIARLAQATQERTDLYAKQGRGSQFTSKEERDKWIKKELKSLDQAINDKKRQIAAIHKDLEDTEANKEKNLEQYNKLDQDLNEVKARVEELDRKYYEVKNKKDELQSERNYLWREENAEQQALAAKREDLEKKQQLLRAATGKAILNGIDSINKVLDHFRRKGINQHVQNGYHGIVMNNFECEPAFYTCVEVTAGNRLFYHIVDSDEVSTKILMEFNKMNLPGEVTFLPLNKLDVRDTAYPETNDAIPMISKLRYNPRFDKAFKHVFGKTLICRSMEVSTQLARAFTMDCITLEGDQVSHRGALTGGYYDTRKSRLELQKDVRKAEEELGELEAKLNENLRRNIERINNEIDQLMNQMQQIETQQRKFKASRDSILSEMKMLKEKRQQSEKTFMPKQRSLQSLEASLHAMESTRESLKAELGTDLLSQLSLEDQKRVDALNDEIRQLQQENRQLLNERIKLEGIITRVETYLNENLRKRLDQVEQELNELRETEGGTVLTATTSELEAINKRVKDTMARSEDLDNSIDKTEAGIKELQKSMERWKNMEKEHMDAINHDTKELEKMTNRQGMLLKKKEECMKKIRELGSLPQEAFEKYQTLSLKQLFRKLEQCNTELKKYSHVNKKALDQFVNFSEQKEKLIKRQEELDRGYKSIMELMNVLELRKYEAIQLTFKQVSKNFSEVFQKLVPGGKATLVMKKGDVEGSQSQDEGEGSGESERGSGSQSSVPSVDQFTGVGIRVSFTGKQGEMREMQQLSGGQKSLVALALIFAIQKCDPAPFYLFDEIDQALDAQHRKAVSDMIMELAVHAQFITTTFRPELLESADKFYGVKFRNKVSHIDVITAEMAKDFVEDDTTHG

SEQ ID NO: 8020 - protein, 701 aa, Homo sapiens
MDESPEPLQQGRGPVPVRRQRPAPRGLREMLKARLWCSCSCSVLCVRALVQDLLPATRWLRQYRPREYLAGDVMSGLVIGIILVPQAIAYSLLAGLQPIYSLYTSFFANLIYFLMGTSRHVSVGIFSLLCLMVGQVVDRELQLAGFDPSQDGLQPGANSSTLNGSAAMLDCGRDCYAIRVATALTLMTGLYQVLMGVLRLGFVSAYLSQPLLDGFAMGASVTILTSQLKHLLGVRIPRHQGPGMVVLTWLSLLRGAGQANVCDVVTSTVCLAVLLAAKELSDRYRHRLRVPLPTELLVIVVATLVSHFGQLHKRFGSSVAGDIPTGFMPPQVPEPRLMQRVALDAVALALVAAAFSISLAEMFARSHGYSVRANQELLAVGCCNVLPAFLHCFATSAALAKSLVKTATGCRTQLSSVVSATVVLLVLLALAPLFHDLQRSVLACVIVVSLRGALRKVWDLPRLWRMSPADALVWAGTAATCMLVSTEAGLLAGVILSLLSLAGRTQRPRTALLARIGDTAFYEDATEFEGLVPEPGVRVFRFGGPLYYANKDFFLQSLYSLTGLDAGCMAARRKEGGSETGVGEGGPAQGEDLGPVSTRAALVPAAAGFHTVVIDCAPLLFLDAAGVSTLQDLRRDYGALGISLLLACCSPPVRDILSRGGFLGEGPGDTAEEEQLFLSVHDAVQTARARHRELEATDAHL

SEQ ID NO: 8021 - protein, 812 aa, Homo sapiens
MEAFQELRKPSARLECDHCSFRGTDYENVQIHMGTIHPEFCDEMDAGGLGKMIFYQKSAKLFHCHKCFFTSKMYSNVYYHITSKHASPDKWNDKPKNQLNKETDPVKSPPLPEHQKIPCNSAEPKSIPALSMETQKLGSVLSPESPKPTPLTPLEPQKPGSVVSPELQTPLPSPEPSKPASVSSPEPPKSVPVCESQKLAPVPSPEPQKPAPVSPESVKATLSNPKPQKQSHFPETLGPPSASSPESPVLAASPEPWGPSPAASPESRKSARTTSPEPRKPSPSESPEPWKPFPAVSPEPRRPAPAVSPGSWKPGPPGSPRPWKSNPSASSGPWKPAKPAPSVSPGPWKPIPSVSPGPWKPTPSVSSASWKSSSVSPSSWKSPPASPESWKSGPPELRKTAPTLSPEHWKAVPPVSPELRKPGPPLSPEIRSPAGSPELRKPSGSPDLWKLSPDQRKTSPASLDFPESQKSSRGGSPDLWKSSFFIEPQKPVFPETRKPGPSGPSESPKAASDIWKPVLSIDTEPRKPALFPEPAKTAPPASPEARKRALFPEPRKHALFPELPKSALFSESQKAVELGDELQIDAIDDQKCDILVQEELLASPKKLLEDTLFPSSKKLKKDNQESSDAELSSSEYIKTDLDAMDIKGQESSSDQEQVDVESIDFSKENKMDMTSPEQSRNVLQFTEEKEAFISEEEIAKYMKRGKGKYYCKICCCRAMKKGAVLHHLVNKHNVHSPYKCTICGKAFLLESLLKNHVAAHGQSLLKCPRCNFESNFPRGFKKHLTHCQSRHNEEANKKLMEALEPPLEEQQI

SEQ ID NO: 8022 - protein, 564 aa, Homo sapiens
MRTLRRLKFMSSPSLSDLGKREPAAAADERGTQQRRACANATWNSIHNGVIAVFQRKGLPDQELFSLNEGVRQLLKTELGSFFTEYLQNQLLTKGMVILRDKIRFYEELQRDKAAAAAVLGAVRKRPSVVPMAGQDPALSTSHPFYDVARHGILQVAGDDRFGRRVVTFSCCRMPPSHELDHQRLLEYLKYTLDQYVENDYTIVYFHYGLNSRNKPSLGWLQSAYKEFDRKYKKNLKALYVVHPTSFIKVLWNILKPLISHKFGKKVIYFNYLSELHEHLKYDQLVIPPEVLRYDEKLQSLHEGRTPPPTKTPPPRPPLPTQQFGVSLQYLKDKNQGELIPPVLRFTVTYLREKGLRTEGLFRRSASVQTVREIQRLYNQGKPVNFDDYGDIHIPAVILKTFLRELPQPLLTFQAYEQILGITCVESSLRVTGCRQILRSLPEHNYVVLRYLMGFLHAVSRESIFNKMNSSNLACVFGLNLIWPSQGVSSLSALVPLNMFTELLIEYYEKIFSTPEAPGEHGLAPWEQGSRAAPLQEAVPRTQATGLTKPTLPPSPLMAARRRL

SEQ ID NO: 8023 - protein, 1366 aa, Homo sapiens
MLAVGPAMDRDYPQHEPPPAGSLLYSPPPLQSAMLHCPYWNTFSLPPYPAFSSDSRPFMSSASFLGSQPCPDTSYAPVATASSLPPKTCDFAQDSSYFEDFSNISIFSSSVDSLSDIVDTPDFLPADSLNQVSTIWDDNPAPSTHDKLFQLSRPFAGFEDFLPSHSTPLLVSYQEQSVQSQPEEEDEAEEEEAEELGHTETYADYVPSKSKIGKQHPDRVVETSTLSSVPPPDITYTLALPSDSGALSALQLEAITYACQQHEVLLPSGQRAGFLIGDGAGVGKGRTVAGVILENHLRGRKKALWFSVSNDLKYDAERDLRDIEATGIAVHALSKIKYGDTTTSEGVLFATYSALIGESQAGGQHRTRLRQILDWCGEAFEGVIVFDECHKAKNAGSTKMGKAVLDLQNKLPLARVVYASATGASEPRNMIYMSRLGIWGEGTPFRNFEEFLHAIEKRGVGAMEIVAMDMKVSGMYIARQLSFSGVTFRIEEIPLAPAFECVYNRAALLWAEALNVFQQAADWIGLESRKSLWGQFWSAHQRFFKYLCIAAKVRRLVELAREELARDKCVVIGLQSTGEARTREVLGENDGHLNCFVSAAEGVFLSLIQKHFPSTKRKRDRGAGSKRKRRPRGRGAKAPRLACETAGVIRISDDSSTESDPGLDSDFNSSPESLVDDDVVIVDAVGLPSDDRGPLCLLQRDPHGPGVLERVERLKQDLLDKVRRLGRELPVNTLDELIDQLGGPQRVAEMTGRKGRVVSRPDGTVAFESRAEQGLSIDHVNLREKQRFMSGEKLVAIISEASSSGVSLQADRRVQNQRRRVHMTLELPWSADRAIQQFGRTHRSNQVSAPEYVFLISELAGERRFASIVAKRLESLGALTHGDRRATESRDLSKYNFENKYGTRALHCVLTTILSQTENKVPVPQGYPGGVPTFFRDMKQGLLSVGIGGRESRNGCLDVEKDCSITKFLNRILGLEVHKQNALFQYFSDTFDHLIEMDKREGKYDMGILDLAPGIEEIYEESQQVFLAPGHPQDGQVVFYKISVDRGLKWEDAFAKSLALTGPYDGFYLSYKVRGNKPSCLLAEQNRGQFFTVYKPNIGRQSQLEALDSLRRKFHRVTAEEAKEPWESGYALSLTHCSHSAWNRHCRLAQEGKDCLQGLRLRHHYMLCGALLRVWGRIAAVMADVSSSSYLQIVRLKTKDRKKQVGIKIPEGCVRRVLQELRLMDADVKRRQAPALGCPAPPAPRPLALPCGPGEVLDLTYSPPAEAFPPPPHFSFPAPLSLDAGPGVVPLGTPDAQADPAALAHQGCDINFKEVLEDMLRSLHAGPPSEGALGEGAGAGGAAGGGPERQSVIQFSPPFPGAQAPL

SEQ ID NO: 8024 - protein, 1041 aa, Homo sapiens
MAAAAAAGAASGLPGPVAQGLKEALVDTLTGILSPVQEVRAAAEEQIKVLEVTEEFGVHLAELTVDPQGALAIRQLASVILKQYVETHWCAQSEKFRPPETTERAKIVIRELLPNGLRESISKVRSSVAYAVSAIAHWDWPEAWPQLFNLLMEMLVSGDLNAVHGAMRVLTEFTREVTDTQMPLVAPVILPEMYKIFTMAEVYGIRTRSRAVEIFTTCAHMICNMEELEKGAAKVLIFPVVQQFTEAFVQALQIPDGPTSDSGFKMEVLKAVTALVKNFPKHMVSSMQQILPIVWNTLTESAAFYVRTEVNYTEEVEDPVDSDGEVLGFENLVFSIFEFVHALLENSKFKSTVKKALPELIYYIILYMQITEEQIKVWTANPQQFVEDEDDDTFSYTVRIAAQDLLLAVATDFQNESAAALAAAATRHLQEAEQTKNSGTEHWWKIHEACMLALGSVKAIITDSVKNGRIHFDMHGFLTNVILADLNLSVSPFLLGRALWAASRFTVAMSPELIQQFLQATVSGLHETQPPSVRISAVRAIWGYCDQLKVSESTHVLQPFLPSILDGLIHLAAQFSSEVLNLVMETLCIVCTVDPEFTASMESKICPFTIAIFLKYSNDPVVASLAQDIFKELSQIEACQGPMQMRLIPTLVSIMQAPADKIPAGLCATAIDILTTVVRNTKPPLSQLLICQAFPAVAQCTLHTDDNATMQNGGECLRAYVSVTLEQVAQWHDEQGHNGLWYVMQVVSQLLDPRTSEFTAAFVGRLVSTLISKAGRELGENLDQILRAILSKMQQAETLSVMQSLIMVFAHLVHTQLEPLLEFLCSLPGPTGKPALEFVMAEWTSRQHLFYGQYEGKVSSVALCKLLQHGINADDKRLQDIRVKGEEIYSMDEGIRTRSKSAKNPERWTNIPLLVKILKLIINELSNVMEANAARQATPAEWSQDDSNDMWEDQEEEEEEEEDGLAGQLLSDILATSKYEEDYYEDDEEDDPDALKDPLYQIDLQAYLTDFLCQFAQQPCYIMFSGHLNDNERRVLQTIGI

SEQ ID NO: 8025 - protein, 359 aa, Homo sapiens
MGLLVFVRNLLLALCLFLVLGFLYYSAWKLHLLQWEEDSKYDRLGFLLNLDSKLPAELATKYANFSEGACKPGYASALMTAIFPRFSKPAPMFLDDSFRKWARIREFVPPFGIKGQDNLIKAILSVTKEYRLTPALDSLRCRRCIIVGNGGVLANKSLGSRIDDYDIVVRLNSAPVKGFEKDVGSKTTLRITYPEGAMQRPEQYERDSLFVLAGFKWQDFKWLKYIVYKERVSASDGFWKSVATRVPKEPPEIRILNPYFIQEAAFTLIGLPFNNGLMGRGNIPTLGSVAVTMALHGCDEVAVAGFGYDMSTPNAPLHYYETVRMAAIKESWTHNIQREKEFLRKLVKARVITDLSSGI

SEQ ID NO: 8026 - protein, 426 aa, Homo sapiens
MERPIKDSMFSLALKCLISLSTIILLGLIIAYHTREVQLFVIDNGADDWRIAMTYERILYISLEMLVCAIHPIPGEYKFFWTARLAFSYTPSRAEADVDIILSIPMFLRLYLIARVMLLHSKLFTDASSRSIGALNKINFNTRFVMKTLMTICPGTVLLVFSISLWIIAAWTVRVCERYHDQQDVTSNFLGAMWLISITFLSIGYGDMVPHTYCGKGVCLLTGIMGAGCTALVVAVVARKLELTKAEKHVHNFMMDTQLTKRIKNAAANVLRETWLIYKHTKLLKKIDHAKVRKHQRKFLQAIHQLRSVKMEQRKLSDQANTLVDLSKMQNVMYDLITELNDRSEDLEKQIGSLESKLEHLTASFNSLPLLIADTLRQQQQQLLSAIIEARGVSVAVGTTHTPISDSPIGVSSTSFPTPYTSSSSC

SEQ ID NO: 8027 - protein, 226 aa, Homo sapiens
MPGFLSFLSVSLRSPGSGIASSFPGQPATDPVGRRAAKAQLEAQFMAAWGKKHAGKDPVRDECEERNRFTETREEDVTDEHGEREPFAETDEHTGANTKKPEDTAVGANNFKNYPVHIGVSSEQHILLDCSLSRQKRDYIHSLKLLNVLEEYITDEQKEEEEEEGEEEELIRIFQEQQKKWQQYRSVRRERLKEMKLLRDQFVKALEDFEDLCDRVFSDEDSELDN

SEQ ID NO: 8028 - protein, 708 aa, Homo sapiens
MSQYTEKEPAAMDQESGKAVWPKPAGGYQTITGRRYGRRHAYVSFKPCMTRHERSLGRAGDDYEVLELDDVPKENSSGSSPLDQVDSSLPSEPIFEKSETEIPTCGSALNQTTESSQSFVAVHHSEEGRDTLGSSTNLHNHSEGEYIPGACSASSVQNGIALVHTDSYDPDGKHGEDNDHLQLSAEVVEGSRYQESLGNTVFELENREAEAYTGLSPPVPSFNCEVRDEFEELDSVPLVKSSAGDTEFVHQNSQEIQRSSQDEMVSTKQQNNTSQERQTEHSPEDAACGPGHICSEQNTNDREKNHGSSPEQVVRPKVRKLISSSQVDQETGFNRHEAKQRSVQRWREALEVEESGSDDLLIKCEEYDGEHDCMFLDPPYSRVITQRETENNQMTSESGATAGRQEVDNTFWNGCGDYYQLYDKDEDSSECSDGEWSASLPHRFSGTEKDQSSSDESWETLPGKDENEPELQSDSSGPEEENQELSLQEGEQTSLEEGEIPWLQYNEVNESSSDEGNEPANEFAQPAFMLDGNNNLEDDSSVSEDLDVDWSLFDGFADGLGVAEAISYVDPQFLTYMALEERLAQAMETALAHLESLAVDVEVANPPASKESIDGLPETLVLEDHTAIGQEQCCPICCSEYIKDDIATELPCHHFFHKPCVSIWLQKSGTCPVCRRHFPPAVIEASAAPSSEPDPDAPPSNDSIAEAP

SEQ ID NO: 8029 - protein, 1331 aa, Homo sapiens
MQAAPRAGCGAALLLWIVSSCLCRAWTAPSTSQKCDEPLVSGLPHVAFSSSSSISGSYSPGYAKINKRGGAGGWSPSDSDHYQWLQVDFGNRKQISAIATQGRYSSSDWVTQYRMLYSDTGRNWKPYHQDGNIWAFPGNINSDGVVRHELQHPIIARYVRIVPLDWNGEGRIGLRIEVYGCSYWADVINFDGHVVLPYRFRNKKMKTLKDVIALNFKTSESEGVILHGEGQQGDYITLELKKAKLVLSLNLGSNQLGPIYGHTSVMTGSLLDDHHWHSVVIERQGRSINLTLDRSMQHFRTNGEFDYLDLDYEITFGGIPFSGKPSSSSRKNFKGCMESINYNGVNITDLARRKKLEPSNVGNLSFSCVEPYTVPVFFNATSYLEVPGRLNQDLFSVSFQFRTWNPNGLLVFSHFADNLGNVEIDLTESKVGVHINITQTKMSQIDISSGSGLNDGQWHEVRFLAKENFAILTIDGDEASAVRTNSPLQVKTGEKYFFGGFLNQMNNSSHSVLQPSFQGCMQLIQVDDQLVNLYEVAQRKPGSFANVSIDMCAIIDRCVPNHCEHGGKCSQTWDSFKCTCDETGYSGATCHNSIYEPSCEAYKHLGQTSNYYWIDPDGSGPLGPLKVYCNMTEDKVWTIVSHDLQMQTPVVGYNPEKYSVTQLVYSASMDQISAITDSAEYCEQYVSYFCKMSRLLNTPDGSPYTWWVGKANEKHYYWGGSGPGIQKCACGIERNCTDPKYYCNCDADYKQWRKDAGFLSYKDHLPVSQVVVGDTDRQGSEAKLSVGPLRCQGDRNYWNAASFPNPSSYLHFSTFQGETSADISFYFKTLTPWGVFLENMGKEDFIKLELKSATEVSFSFDVGNGPVEIVVRSPTPLNDDQWHRVTAERNVKQASLQVDRLPQQIRKAPTEGHTRLELYSQLFVGGAGGQQGFLGCIRSLRMNGVTLDLEERAKVTSGFISGCSGHCTSYGTNCENGGKCLERYHGYSCDCSNTAYDGTFCNKDVGAFFEEGMWLRYNFQAPATNARDSSSRVDNAPDQQNSHPDLAQEEIRFSFSTTKAPCILLYISSFTTDFLAVLVKPTGSLQIRYNLGGTREPYNIDVDHRNMANGQPHSVNITRHEKTIFLKLDHYPSVSYHLPSSSDTLFNSPKSLFLGKVIETGKIDQEIHKYNTPGFTGCLSRVQFNQIAPLKAALRQTNASAHVHIQGELVESNCGASPLTLSPMSSATDPWHLDHLDSASADFPYNPGQGQAIRNGVNRNSAIIGGVIAVVIFTILCTLVFLIRYMFRHKGTYHTNEAKGAESAESADAAIMNNDPNFTETIDESKKEWLI

SEQ ID NO: 8030 - protein, 961 aa, Homo sapiens
MWRLRRAAVACEVCQSLVKHSSGIKGSLPLQKLHLVSRSIYHSHHPTLKLQRPQLRTSFQQFSSLTNLPLRKLKFSPIKYGYQPRRNFWPARLATRLLKLRYLILGSAVGGGYTAKKTFDQWKDMIPDLSEYKWIVPDIVWEIDEYIDFGSPEETAFRATDRGSESDKHFRKGLLGELILLQQQIQEHEEEARRAAGQYSTSYAQQKRKVSDKEKIDQLQEELLHTQLKYQRILERLEKENKELRKLVLQKDDKGIHHRKLKKSLIDMYSEVLDVLSDYDASYNTQDHLPRVVVVGDQSAGKTSVLEMIAQARIFPRGSGEMMTRSPVKVTLSEGPHHVALFKDSSREFDLTKEEDLAALRHEIELRMRKNVKEGCTVSPETISLNVKGPGLQRMVLVDLPGVINTVTSGMAPDTKETIFSISKAYMQNPNAIILCIQDGSVDAERSIVTDLVSQMDPHGRRTIFVLTKVDLAEKNVASPSRIQQIIEGKLFPMKALGYFAVVTGKGNSSESIEAIREYEEEFFQNSKLLKTSMLKAHQVTTRNLSLAVSDCFWKMVRESVEQQADSFKATRFNLETEWKNNYPRLRELDRNELFEKAKNEILDEVISLSQVTPKHWEEILQQSLWERVSTHVIENIYLPAAQTMNSGTFNTTVDIKLKQWTDKQLPNKAVEVAWETLQEEFSRFMTEPKGKEHDDIFDKLKEAVKEESIKRHKWNDFAEDSLRVIQHNALEDRSISDKQQWDAAIYFMEEALQARLKDTENAIENMVGPDWKKRWLYWKNRTQEQCVHNETKNELEKMLKCNEEHPAYLASDEITTVRKNLESRGVEVDPSLIKDTWHQVYRRHFLKTALNHCNLCRRGFYYYQRHFVDSELECNDVVLFWRIQRMLAITANTLRQQLTNTEVRRLEKNVKEVLEDFAEDGEKKIKLLTGKRVQLAEDLKKVREIQEKLDAFIEALHQEK

SEQ ID NO: 8031 - protein, 941 aa, Homo sapiens
MDDSEVESTASILASVKEQEAQFEKLTRALEEERRHVSAQLERVRVSPQDANPLMANGTLTRRHQNGRFVGDADLERQKFSDLKLNGPQDHSHLLYSTIPRMQEPGQIVETYTEEDPEGAMSVVSVETSDDGTTRRTETTVKKVVKTVTTRTVQPVAMGPDGLPVDASSVSNNYIQTLGRDFRKNGNGGPGPYVGQAGTATLPRNFHYPPDGYSRHYEDGYPGGSDNYGSLSRVTRIEERYRPSMEGYRAPSRQDVYGPQPQVRVGGSSVDLHRFHPEPYGLEDDQRSMGYDDLDYGMMSDYGTARRTGTPSDPRRRLRSYEDMIGEEVPSDQYYWAPLAQHERGSLASLDSLRKGGPPPPNWRQPELPEVIAMLGFRLDAVKSNAAAYLQHLCYRNDKVKTDVRKLKGIPVLVGLLDHPKKEVHLGACGALKNISFGRDQDNKIAIKNCDGVPALVRLLRKARDMDLTEVITGTLWNLSSHDSIKMEIVDHALHALTDEVIIPHSGWEREPNEDCKPRHIEWESVLTNTAGCLRNVSSERSEARRKLRECDGLVDALIFIVQAEIGQKDSDSKLVENCVCLLRNLSYQVHREIPQAERYQEAAPNVANNTGPHAASCFGAKKGKGKKPIEDPANDTVDFPKRTSPARGYELLFQPEVVRIYISLLKESKTPAILEASAGAIQNLCAGRWTYGRYIRSALRQEKALSAIADLLTNEHERVVKAASGALRNLAVDARNKELIGKHAIPNLVKNLPGGQQNSSWNFSEDTVISILNTINEVIAENLEAAKKLRETQGIEKLVLINKSGNRSEKEVRAAALVLQTIWGYKELRKPLEKEGWKKSDFQVNLNNASRSQSSHSYDDSTLPLIDRNQKSDNNYSTPNERGDHNRTLDRSGDLGDMEPLKGTTPLMQDEGQESLEEELDVLVLDDEGGQVSYPSMQKI

SEQ ID NO: 8032 - protein, 1278 aa, Homo sapiens
MAQSKRHVYSRTPSGSRMSAEASARPLRVGSRVEVIGKGHRGTVAYVGATLFATGKWVGVILDEAKGKNDGTVQGRKYFTCDEGHGIFVRQSQIQVFEDGADTTSPETPDSSASKVLKREGTDTTAKTSKLRGLKPKKAPTARKTTTRRPKPTRPASTGVAGASSSLGPSGSASAGELSSSEPSTPAQTPLAAPIIPTPVLTSPGAVPPLPSPSKEEEGLRAQVRDLEEKLETLRLKRAEDKAKLKELEKHKIQLEQVQEWKSKMQEQQADLQRRLKEARKEAKEALEAKERYMEEMADTADAIEMATLDKEMAEERAESLQQEVEALKERVDELTTDLEILKAEIEEKGSDGAASSYQLKQLEEQNARLKDALVRMRDLSSSEKQEHVKLQKLMEKKNQELEVVRQQRERLQEELSQAESTIDELKEQVDAALGAEEMVEMLTDRNLNLEEKVRELRETVGDLEAMNEMNDELQENARETELELREQLDMAGARVREAQKRVEAAQETVADYQQTIKKYRQLTAHLQDVNRELTNQQEASVERQQQPPPETFDFKIKFAETKAHAKAIEMELRQMEVAQANRHMSLLTAFMPDSFLRPGGDHDCVLVLLLMPRLICKAELIRKQAQEKFELSENCSERPGLRGAAGEQLSFAAGLVYSLSLLQATLHRYEHALSQCSVDVYKKVGSLYPEMSAHERSLDFLIELLHKDQLDETVNVEPLTKAIKYYQHLYSIHLAEQPEDCTMQLADHIKFTQSALDCMSVEVGRLRAFLQGGQEATDIALLLRDLETSCSDIRQFCKKIRRRMPGTDAPGIPAALAFGPQVSDTLLDCRKHLTWVVAVLQEVAAAAAQLIAPLAENEGLLVAALEELAFKASEQIYGTPSSSPYECLRQSCNILISTMNKLATAMQEGEYDAERPPSKPPPVELRAAALRAEITDAEGLGLKLEDRETVIKELKKSLKIKGEELSEANVRLSLLEKKLDSAAKDADERIEKVQTRLEETQALLRKKEKEFEETMDALQADIDQLEAEKAELKQRLNSQSKRTIEGLRGPPPSGIATLVSGIAGEEQQRGAIPGQAPGSVPGPGLVKDSPLLLQQISAMRLHISQLQHENSILKGAQMKASLASLPPLHVAKLSHEGPGSELPAGALYRKTSQLLETLNQLSTHTHVVDITRTSPAAKSPSAQLMEQVAQLKSLSDTVEKLKDEVLKETVSQRPGATVPTDFATFPSSAFLRAKEEQQDDTVYMGKVTFSCAAGFGQRHRLVLTQEQLHQLHSRLIS

SEQ ID NO: 8033 - protein, 1311 aa, Homo sapiens
MSRRKQAKPRSLKDPNCKLEDKTEDGEALDCKKRPEDGEELEDEAVHSCDSCLQVFESLSDITEHKINQCQLTDGVDVEDDPTCSWPASSPSSKDQTSPSHGEGCDFGEEEGGPGLPYPCQFCDKSFSRLSYLKHHEQSHSDKLPFKCTYCSRLFKHKRSRDRHIKLHTGDKKYHCSECDAAFSRSDHLKIHLKTHTSNKPYKCAICRRGFLSSSSLHGHMQVHERNKDGSQSGSRMEDWKMKDTQKCSQCEEGFDFPEDLQKHIAECHPECSPNEDRAALQCVYCHELFVEETSLMNHMEQVHSGEKKNSCSICSESFHTVEELYSHMDSHQQPESCNHSNSPSLVTVGYTSVSSTTPDSNLSVDSSTMVEAAPPIPKSRGRKRAAQQTPDMTGPSSKQAKVTYSCIYCNKQLFSSLAVLQIHLKTMHLDKPEQAHICQYCLEVLPSLYNLNEHLKQVHEAQDPGLIVSAMPAIVYQCNFCSEVVNDLNTLQEHIRCSHGFANPAAKDSNAFFCPHCYMGFLTDSSLEEHIRQVHCDLSGSRFGSPVLGTPKEPVVEVYSCSYCTNSPIFNSVLKLNKHIKENHKNIPLALNYIHNGKKSRALSPLSPVAIEQTSLKMMQAVGGAPARPTGEYICNQCGAKYTSLDSFQTHLKTHLDTVLPKLTCPQCNKEFPNQESLLKHVTIHFMITSTYYICESCDKQFTSVDDLQKHLLDMHTFVFFRCTLCQEVFDSKVSIQLHLAVKHSNEKKVYRCTSCNWDFRNETDLQLHVKHNHLENQGKVHKCIFCGESFGTEVELQCHITTHSKKYNCKFCSKAFHAIILLEKHLREKHCVFETKTPNCGTNGASEQVQKEEVELQTLLTNSQESHNSHDGSEEDVDTSEPMYGCDICGAAYTMETLLQNHQLRDHNIRPGESAIVKKKAELIKGNYKCNVCSRTFFSENGLREHMQTHLGPVKHYMCPICGERFPSLLTLTEHKVTHSKSLDTGNCRICKMPLQSEEEFLEHCQMHPDLRNSLTGFRCVVCMQTVTSTLELKIHGTFHMQKTGNGSAVQTTGRGQHVQKLYKCASCLKEFRSKQDLVKLDINGLPYGLCAGCVNLSKSASPGINVPPGTNRPGLGQNENLSAIEGKGKVGGLKTRCSSCNVKFESESELQNHIQTIHRELVPDSNSTQLKTPQVSPMPRISPSQSDEKKTYQCIKCQMVFYNEWDIQVHVANHMIDEGLNHECKLCSQTFDSPAKLQCHLIEHSFEGMGGTFKCPVCFTVFVQANKLQQHIFSAHGQEDKIYDCTQCPQKFFFQTELQNHTMTQHSS

SEQ ID NO: 8034 - protein, 348 aa, Homo sapiens
MNDDPSMEENGVERVCPESLLQSREYSSLPLPRHTSSTDGTITSSDPGLEILNMASCDLDRNSLCKKEEDTRSASPTIEAQGTSPAHDNIAFQDSTSKDKTILNLEAKEEPETIEEHKKEHASGDSVVSPLPVTTVKSVNLRQSENTSANEKEVEAEFLRLSLGFKCDWFTLEKRVKLEERSRDLAEENLKKEITNCLKLLESLTPLCEDDNQAQEIIKKLEKSIKFLSQCAARVASRAEMLGAINQESRVSKAVEVMIQHVENLKRMYAKEHAELEELKQVLLQNERSFNPLEDDDDCQIKKRSASLNSKPSSLRRVTIASLPRNIGNAGMVAGMENNDRFSRRSSS

SEQ ID NO: 8035 - protein, 376 aa, Homo sapiens
MAERGRKRPCGPGEHGQRIEWRKWKQQKKEEKKKWKDLKLMKKLERQRAQEEQAKRLEEEEAAAEKEDRGRPYTLSVALPGSILDNAQSPELRTYLAGQIARACAIFCVDEIVVFDEEGQDAKTVEGEFTGVGKKGQACVQLARILQYLECPQYLRKAFFPKHQDLQFAGLLNPLDSPHHMRQDEESEFREGIVVDRPTRPGHGSFVNCGMKKEVKIDKNLEPGLRVTVRLNQQQHPDCKTYHGKVVSSQDPRTKAGLYWGYTVRLASCLSAVFAEAPFQDGYDLTIGTSERGSDVASAQLPNFRHALVVFGGLQGLEAGADADPNLEVAEPSVLFDLYVNTCPGQGSRTIRTEEAILISLAALQPGLIQAGARHT

SEQ ID NO: 8036 - protein, 469 aa, Homo sapiens
MEYHQPEDPAPGKAGTAEAVIPENHEVLAGPDEHPQDTDARDADGEAREREPADQALLPSQCGDNLESPLPEASSAPPGPTLGTLPEVETIRACSMPQELPQSPRTRQPEPDFYCVKWIPWKGEQTPIITQSTNGPCPLLAIMNILFLQWKVKLPPQKEVITSDELMAHLGNCLLSIKPQEKSEGLQLNFQQNVDDAMTVLPKLATGLDVNVRFTGVSDFEYTPECSVFDLLGIPLYHGWLVDPQSPEAVRAVGKLSYNQLVERIITCKHSSDTNLVTEGLIAEQFLETTAAQLTYHGLCELTAAAKEGELSVFFRNNHFSTMTKHKSHLYLLVTDQGFLQEEQVVWESLHNVDGDSCFCDSDFHLSHSLGKGPGAEGGSGSPETQLQVDQDYLIALSLQQQQPRGPLGLTDLELAQQLQQEEYQQQQAAQPVRMRTRVLSLQGRGATSGRPAGERRQRPKHESDCILL

SEQ ID NO: 8037 - protein, 962 aa, Homo sapiens
MDDSEVESTASILASVKEQEAQFEKLTRALEEERRHVSAQLERVRVSPQDANPLMANGTLTRRHQNGRFVGDADLERQKFSDLKLNGPQDHSHLLYSTIPRMQEPGQIVETYTEEDPEGAMSVVSVETSDDGTTRRTETTVKKVVKTVTTRTVQPVAMGPDGLPVDASSVSNNYIQTLGRDFRKNGNGGPGPYVGQAGTATLPRNFHYPPDGYSRHYEDGYPGGSDNYGSLSRVTRIEERYRPSMEGYRAPSRQDVYGPQPQVRVGGSSVDLHRFHPEPYGLEDDQRSMGYDDLDYGMMSDYGTARRTGTPSDPRRRLRSYEDMIGEEVPSDQYYWAPLAQHERGSLASLDSLRKGGPPPPNWRQPELPEVIAMLGFRLDAVKSNAAAYLQHLCYRNDKVKTDVRKLKGIPVLVGLLDHPKKEVHLGACGALKNISFGRDQDNKIAIKNCDGVPALVRLLRKARDMDLTEVITGTLWNLSSHDSIKMEIVDHALHALTDEVIIPHSGWEREPNEDCKPRHIEWESVLTNTAGCLRNVSSERSEARRKLRECDGLVDALIFIVQAEIGQKDSDSKLVENCVCLLRNLSYQVHREIPQAERYQEAAPNVANNTGPHAASCFGAKKGKGKKPIEDPANDTVDFPKRTSPARGYELLFQPEVVRIYISLLKESKTPAILEASAGAIQNLCAGRWTYGRYIRSALRQEKALSAIADLLTNEHERVVKAASGALRNLAVDARNKELIGKHAIPNLVKNLPGGQQNSSWNFSEDTVISILNTINEVIAENLEAAKKLRETQGIEKLVLINKSGNRSEKEVRAAALVLQTIWGYKELRKPLEKEGWKKSDFQVNLNNASRSQSSHSYDDSTLPLIDRNQKSDKKPDREEIQMSNMGSNTKSLDNNYSTPNERGDHNRTLDRSGDLGDMEPLKGTTPLMQDEGQESLEEELDVLVLDDEGGQVSYPSMQKI

SEQ ID NO: 8038 - protein, 793 aa, Homo sapiens
MDDFERRRELRRQKREEMRLEAERIAYQRNDDDEEEAARERRRRARQERLRQKQEEESLGQVTDQVEVNAQNSVPDEEAKTTTTNTQVEGDDEAAFLERLARREERRQKRLQEALERQKEFDPTITDASLSLPSRRMQNDTAENETTEKEEKSESRQERYEIEETETVTKSYQKNDWRDAEENKKEDKEKEEEEEEKPKRGSIGENQVEVMVEEKTTESQEETVVMSLKNGQISSEEPKQEEEREQGSDEISHHEKMEEEDKERAEAERARLEAEERERIKAEQDKKIADERARIEAEEKAAAQERERREAEERERMREEEKRAAEERQRIKEEEKRAAEERQRIKEEEKRAAEERQRIKEEEKRAAEERQRARAEEEEKAKVEEQKRNKQLEEKKHAMQETKIKGEKVEQKIEGKWVNEKKAQEDKLQTAVLKKQGEEKGTKVQAKREKLQEDKPTFKKEEIKDEKIKKDKEPKEEVKSFMDRKKGFTEVKSQNGEFMTHKLKHTENTFSRPGGRASVDTKEAEGAPQVEAGKRLEELRRRRGETESEEFEKLKQKQQEAALELEELKKKREERRKVLEEEEQRRKQEEADRKLREEEEKRRLKEEIERRRAEAAEKRQKMPEDGLSDDKKPFKCFTPKGSSLKIEERAEFLNKSVQKSSGVKSTHQAAIVSKIDSRLEQYTSAIEGTKSAKPTKPAASDLPVPAEGVRNIKSMWEKGNVFSSPTAAGTPNKETAGLKVGVSSRINEWLTKTPDGNKSPAPKPSDLRPGDVSSKRNLWEKQSVDKVTSPTKV

SEQ ID NO: 8039 - protein, 1201 aa, Homo sapiens
MGTDSPSPRPLRPGVTLPPGALTMNTKDTTEVAENSHHLKIFLPKKLLECLPRCPLLPPERLRWNTNEEIASYLITFEKHDEWLSCAPKTRPQNGSIILYNRKKVKYRKDGYLWKKRKDGKTTREDHMKLKVQGMENPDIVLVHYLNVPALEDCGKGCSPIFCSISSDRREWLKWSREELLGQLKPMFHGIKWSCGNGTEEFSVEHLVQQILDTHPTKPAPRTHACLCSGGLGSGSLTHKCSSTKHRIISPKVEPRALTLTSIPHAHPPEPPPLIAPLPPELPKAHTSPSSSSSSSSSGFAEPLEIRPSPPTSRGGSSRGGTAILLLTGLEQRAGGLTPTRHLAPQADPRPSMSLAVVVGTEPSAPPAPPSPAFDPDRFLNSPQRGQTYGGGQGVSPDFPEAEAAHTPCSALEPAAALEPQAAARGPPPQSVAGGRRGNCFFIQDDDSGEELKGHGAAPPIPSPPPSPPPSPAPLEPSSRVGRGEALFGGPVGASELEPFSLSSFPDLMGELISDEAPSIPAPTPQLSPALSTITDFSPEWSYPEGGVKVLITGPWTEAAEHYSCVFDHIAVPASLVQPGVLRCYCPAHEVGLVSLQVAGREGPLSASVLFEYRARRFLSLPSTQLDWLSLDDNQFRMSILERLEQMEKRMAEIAAAGQVPCQGPDAPPVQDEGQGPGFEARVVVLVESMIPRSTWKGPERLAHGSPFRGMSLLHLAAAQGYARLIETLSQWRSVETGSLDLEQEVDPLNVDHFSCTPLMWACALGHLEAAVLLFRWNRQALSIPDSLGRLPLSVAHSRGHVRLARCLEELQRQEPSVEPPFALSPPSSSPDTGLSSVSSPSELSDGTFSVTSAYSSAPDGSPPPAPLPASEMTMEDMAPGQLSSGVPEAPLLLMDYEATNSKGPLSSLPALPPASDDGAAPEDADSPQAVDVIPVDMISLAKQIIEATPERIKREDFVGLPEAGASMRERTGAVGLSETMSWLASYLENVDHFPSSTPPSELPFERGRLAVPSAPSWAEFLSASTSGKMESDFALLTLSDHEQRELYEAARVIQTAFRKYKGRRLKEQQEVAAAVIQRCYRKYKQLTWIALKFALYKKMTQAAILIQSKFRSYYEQKRFQQSRRAAVLIQQHYRSYRRRPGPPHRTSATLPARNKGSFLTKKQDQAARKIMRFLRRCRHRMRELKQNQELEGLPQPGLAT

SEQ ID NO: 8040 - protein, 413 aa, Homo sapiens
MKEVVYWSPKKVADWLLENAMPEYCEPLEHFTGQDLINLTQEDFKKPPLCRVSSDNGQRLLDMIETLKMEHHLEAHKNGHANGHLNIGVDIPTPDGSFSIKIKPNGMPNGYRKEMIKIPMPELERSQYPMEWGKTFLAFLYALSCFVLTTVMISVVHERVPPKEVQPPLPDTFFDHFNRVQWAFSICEINGMILVGLWLIQWLLLKYKSIISRRFFCIVGTLYLYRCITMYVTTLPVPGMHFNCSPKLFGDWEAQLRRIMKLIAGGGLSITGSHNMCGDYLYSGHTVMLTLTYLFIKEYSPRRLWWYHWICWLLSVVGIFCILLAHDHYTVDVVVAYYITTRLFWWYHTMANQQVLKEASQMNLLARVWWYRPFQYFEKNVQGIVPRSYHWPFPWPVVHLSRQVKYSRLVNDT

SEQ ID NO: 8041 - protein, 193 aa, Homo sapiens
MVATGSLSSKNPASISELLDCGYHPESLLSDFDYWDYVVPEPNLNEVIFEESTCQNLVKMLENCLSKSKQTKLGCSKVLVPEKLTQRIAQDVLRLSSTEPCGLRGCVMHVNLEIENVCKKLDRIVCDSSVVPTFELTLVFKQENCSWTSFRDFFFSRGRFSSGFRRTLILSSGFRLVKKKLYSLIGTTVIEGS

SEQ ID NO: 8042 - protein, 986 aa, Homo sapiens
MSRIESLTRARIDRSRELASKTREKEKMKEAKDARYTNGHLFTTISVSGMTMCYACNKSITAKEALICPTCNVTIHNRCKDTLANCTKVKQKQQKAALLKNNTALQSVSLRSKTTIRERPSSAIYPSDSFRQSLLGSRRGRSSLSLAKSVSTTNIAGHFNDESPLGLRRILSQSTDSLNMRNRTLSVESLIDEAEVIYSELMSDFEMDEKDFAADSWSLAVDSSFLQQHKKEVMKQQDVIYELIQTELHHVRTLKIMTRLFRTGMLEELHLEPGVVQGLFPCVDELSDIHTRFLSQLLERRRQALCPGSTRNFVIHRLGDLLISQFSGPSAEQMCKTYSEFCSRHSKALKLYKELYARDKRFQQFIRKVTRPAVLKRHGVQECILLVTQRITKYPLLISRILQHSHGIEEERQDLTTALGLVKELLSNVDEGIYQLEKGARLQEIYNRMDPRAQTPVPGKGPFGREELLRRKLIHDGCLLWKTATGRFKDVLVLLMTDVLVFLQEKDQKYIFPTLDKPSVVSLQNLIVRDIANQEKGMFLISAAPPEMYEVHTASRDDRSTWIRVIQQSVRTCPSREDFPLIETEDEAYLRRIKMELQQKDRALVELLREKVGLFAEMTHFQAEEDGGSGMALPTLPRGLFRSESLESPRGERLLQDAIREVEGLKDLLVGPGVELLLTPREPALPLEPDSGGNTSPGVTANGEARTFNGSIELCRADSDSSQRDRNGNQLRSPQEEALQRLVNLYGLLHGLQAAVAQQDTLMEARFPEGPERREKLCRANSRDGEAGRAGAAPVAPEKQATELALLQRQHALLQEELRRCRRLGEERATEAGSLEARLRESEQARALLEREAEEARRQLAALGQTEPLPAEAPWARRPVDPRRRSLPAGDALYLSFNPPQPSRGTDRLDLPVTTRSVHRNFEDRERQELGSPEERLQDSSDPDTGSEEEGSSRLSPPHSPRDFTRMQDIPEETESRDGEAVASES

SEQ ID NO: 8043 - protein, 526 aa, Homo sapiens
MDVRFYPPPAQPAAAPDAPCLGPSPCLDPYYCNKFDGENMYMSMTEPSQDYVPASQSYPGPSLESEDFNIPPITPPSLPDHSLVHLNEVESGYHSLCHPMNHNGLLPFHPQNMDLPEITVSNMLGQDGTLLSNSISVMPDIRNPEGTQYSSHPQMAAMRPRGQPADIRQQPGMMPHGQLTTINQSQLSAQLGLNMGGSNVPHNSPSPPGSKSATPSPSSSVHEDEGDDTSKINGGEKRPASDMGKKPKTPKKKKKKDPNEPQKPVSAYALFFRDTQAAIKGQNPNATFGEVSKIVASMWDGLGEEQKQVYKKKTEAAKKEYLKQLAAYRASLVSKSYSEPVDVKTSQPPQLINSKPSVFHGPSQAHSALYLSSHYHQQPGMNPHLTAMHPSLPRNIAPKPNNQMPVTVSIANMAVSPPPPLQISPPLHQHLNMQQHQPLTMQQPLGNQLPMQVQSALHSPTMQQGFTLQPDYQTIINPTSTAAQVVTQAMEYVRSGCRNPPPQPVDWNNDYCSSGGMQRDKALYLT

SEQ ID NO: 8044 - protein, 1148 aa, Homo sapiens
MPEPTKKEENEVPAPAPPPEEPSKEKEAGTTPAKDEEEVSPPSALPPGLGSRALERKDSDWTLVETPPGEEQAKQNANSQLSILFIEKPQGGTVKVGEDITFIAKVKAEDLLRKPTIKWFKGKWMDLASKAGKHLQLKETFERHSRVYTFEMQIIKAKDNFAGNYRCEVTYKDKFDSCSFDLEVHESTGTTPNIDIRSAFKRSGEGQEDAGELDFSGLLKRREVKQQEEEPQVDVWELLKNAKPSEYEKIAFQYGITDLRGMLKRLKRMRREEKKSAAFAKILDPAYQVDKGGRVRFVVELADPKLEVKWYKNGQEIRPSTKYIFEHKGCQRILFINNCQMTDDSEYYVTAGDEKCSTELFVREPPIMVTKQLEDTTAYCGERVELECEVSEDDANVKWFKNGEEIIPGPKSRYRIRVEGKKHILIIEGATKADAAEYSVMTTGGQSSAKLSVDLKPLKILTPLTDQTVNLGKEICLKCEISENIPGKWTKNGLPVQESDRLKVVHKGRIHKLVIANALTEDEGDYVFAPDAYNVTLPAKVHVIDPPKIILDGLDADNTVTVIAGNKLRLEIPISGEPPPKAMWSRGDKAIMEGSGRIRTESYPDSSTLVIDIAERDDSGVYHINLKNEAGEAHASIKVKVVDFPDPPVAPTVTEVGDDWCIMNWEPPAYDGGSPILGYFIERKKKQSSRWMRLNFDLCKETTFEPKKMIEGVAYEVRIFAVNAIGISKPSMPSRPFVPLAVTSPPTLLTVDSVTDTTVTMRWRPPDHIGAAGLDGYVLEYCFEGTEDWIVANKDLIDKTKFTITGLPTDAKIFVRVKAVNAAGASEPKYYSQPILVKEIIEPPKIRIPRHLKQTYIRRVGEAVNLVIPFQGKPRPELTWKKDGAEIDKNQINIRNSETDTIIFIRKAERSHSGKYDLQVKVDKFVETASIDIQIIDRPGPPQIVKIEDVWGENVALTWTPPKDDGNAAITGYTIQKADKKSMEWFTVIEHYHRTSATITELVIGNEYYFRVFSENMCGLSEDATMTKESAVIARDGKIYKNPVYEDFDFSEAPMFTQPLVNTYAIAGYNATLNCSVRGNPKPKITWMKNKVAIVDDPRYRMFSNQGVCTLEIRKPSPYDGGTYCCKAVNDLGTVEIECKLEVKVIAQ

SEQ ID NO: 8045 - protein, 621 aa, Homo sapiens
MANVPWAEVCEKFQAALALSRVELHKNPEKEPYKSKYSARALLEEVKALLGPAPEDEDERPEAEDGPGAGDHALGLPAEVVEPEGPVAQRAVRLAVIEFHLGVNHIDTEELSAGEEHLVKCLRLLRRYRLSHDCISLCIQAQNNLGILWSEREEIETAQAYLESSEALYNQYMKEVGSPPLDPTERFLPEEEKLTEQERSKRFEKVYTHNLYYLAQVYQHLEMFEKAAHYCHSTLKRQLEHNAYHPIEWAINAATLSQFYINKLCFMEARHCLSAANVIFGQTGKISATEDTPEAEGEVPELYHQRKGEIARCWIKYCLTLMQNAQLSMQDNIGELDLDKQSELRALRKKELDEEESIRKKAVQFGTGELCDAISAVEEKVSYLRPLDFEEARELFLLGQHYVFEAKEFFQIDGYVTDHIEVVQDHSALFKVLAFFETDMERRCKMHKRRIAMLEPLTVDLNPQYYLLVNRQIQFEIAHAYYDMMDLKVAIADRLRDPDSHIVKKINNLNKSALKYYQLFLDSLRDPNKVFPEHIGEDVLRPAMLAKFRVARLYGKIITADPKKELENLATSLEHYKFIVDYCEKHPEAAQEIEVELELSKEMVSLLPTKMERFRTKMALT

SEQ ID NO: 8046 - protein, 1171 aa, Homo sapiens
MPEPTKKEENEVPAPAPPPEEPSKEKEAGTTPAKDEEEVSPPSALPPGLGSRALERKDSDWTLVETPPGEEQAKQNANSQLSILFIEKPQGGTVKVGEDITFIAKVKAEDLLRKPTIKWFKGKWMDLASKAGKHLQLKETFERHSRVYTFEMQIIKAKDNFAGNYRCEVTYKDKFDSCSFDLEVHESTGTTPNIDIRSAFKRSGEGQEDAGELDFSGLLKRREVKQQEEEPQVDVWELLKNAKPSEYEKIAFQYGITDLRGMLKRLKRMRREEKKSAAFAKILDPAYQVDKGGRVRFVVELADPKLEVKWYKNGQEIRPSTKYIFEHKGCQRILFINNCQMTDDSEYYVTAGDEKCSTELFVREPPIMVTKQLEDTTAYCGERVELECEVSEDDANVKWFKNGEEIIPGPKSRYRIRVEGKKHILIIEGATKADAAEYSVMTTGGQSSAKLSVDLKPLKILTPLTDQTVNLGKEICLKCEISENIPGKWTKNGLPVQESDRLKVVHKGRIHKLVIANALTEDEGDYVFAPDAYNVTLPAKVHVIDPPKIILDGLDADNTVTVIAGNKLRLEIPISGEPPPKAMWSRGDKAIMEGSGRIRTESYPDSSTLVIDIAERDDSGVYHINLKNEAGEAHASIKVKVVDFPDPPVAPTVTEVGDDWCIMNWEPPAYDGGSPILGYFIERKKKQSSRWMRLNFDLCKETTFEPKKMIEGVAYEVRIFAVNAIGISKPSMPSRPFVPLAVTSPPTLLTVDSVTDTTVTMRWRPPDHIGAAGLDGYVLEYCFEGTEDWIVANKDLIDKTKFTITGLPTDAKIFVRVKAVNAAGASEPKYYSQPILVKEIIEPPKIRIPRHLKQTYIRRVGEAVNLVIPFQGKPRPELTWKKDGAEIDKNQINIRNSETDTIIFIRKAERSHSGKYDLQVKVDKFVETASIDIQIIDRPGPPQIVKIEDVWGENVALTWTPPKDDGNAAITGYTIQKADKKSMEWFTVIEHYHRTSATITELVIGNEYYFRVFSENMCGLSEDATMTKESAVIARDGKIYKNPVYEDFDFSEAPMFTQPLVNTYAIAGYNATLNCSVRGNPKPKITWMKNKVAIVDDPRYRMFSNQGVCTLEIRKPSPYDGGTYCCKAVNDLGTVEIECKLEVKVIYQGVNTPGQPVFLEGQQQSLHNKDF

SEQ ID NO: 8047 - protein, 916 aa, Homo sapiens
MVQKESQATLEERESELSSNPAASAGASLEPPAAPAPGEDNPAGAGGAAVAGAAGGARRFLCGVVEGFYGRPWVMEQRKELFRRLQKWELNTYLYAPKDDYKHRMFWREMYSVEEAEQLMTLISAAREYEIEFIYAISPGLDITFSNPKEVSTLKRKLDQVSQFGCRSFALLFDDIDHNMCAADKEVFSSFAHAQVSITNEIYQYLGEPETFLFCPTEYCGTFCYPNVSQSPYLRTVGEKLLPGIEVLWTGPKVVSKEIPVESIEEVSKIIKRAPVIWDNIHANDYDQKRLFLGPYKGRSTELIPRLKGVLTNPNCEFEANYVAIHTLATWYKSNMNGVRKDVVMTDSEDSTVSIQIKLENEGSDEDIETDVLYSPQMALKLALTEWLQEFGVPHQYSSRQVAHSGAKASVVDGTPLVAAPSLNATTVVTTVYQEPIMSQGAALSGEPTTLTKEEEKKQPDEEPMDMVVEKQEETDHKNDNQILSEIVEAKMAEELKPMDTDKESIAESKSPEMSMQEDCISDIAPMQTDEQTNKEQFVPGPNEKPLYTAEPVTLEDLQLLADLFYLPYEHGPKGAQMLREFQWLRANSSVVSVNCKGKDSEKIEEWRSRAAKFEEMCGLVMGMFTRLSNCANRTILYDMYSYVWDIKSIMSMVKSFVQWLGCRSHSSAQFLIGDQEPWAFRGGLAGEFQRLLPIDGANDLFFQPPPLTPTSKVYTIRPYFPKDEASVYKICREMYDDGVGLPFQSQPDLIGDKLVGGLLSLSLDYCFVLEDEDGICGYALGTVDVTPFIKKCKISWIPFMQEKYTKPNGDKELSEAEKIMLSFHEEQEVLPETFLANFPSLIKMDIHKKVTDPSVAKSMMACLLSSLKANGSRGAFCEVRPDDKRILEFYSKLGCFEIAKMEGFPKDVVILGRSL

SEQ ID NO: 8048 - protein, 1661 aa, Homo sapiens
MLGAPDESSVRVAVRIRPQLAKEKIEGCHICTSVTPGEPQVFLGKDKAFTFDYVFDIDSQQEQIYIQCIEKLIEGCFEGYNATVFAYGQTGAGKTYTMGTGFDVNIVEEELGIISRAVKHLFKSIEEKKHIAIKNGLPAPDFKVNAQFLELYNEEVLDLFDTTRDIDAKSKKSNIRIHEDSTGGIYTVGVTTRTVNTESEMMQCLKLGALSRTTASTQMNVQSSRSHAIFTIHVCQTRVCPQIDADNATDNKIISESAQMNEFETLTAKFHFVDLAGSERLKRTGATGERAKEGISINCGLLALGNVISALGDKSKRATHVPYRDSKLTRLLQDSLGGNSQTIMIACVSPSDRDFMETLNTLKYANRARNIKNKVMVNQDRASQQINALRSEITRLQMELMEYKTGKRIIDEEGVESINDMFHENAMLQTENNNLRVRIKAMQETVDALRSRITQLVSDQANHVLARAGEGNEEISNMIHSYIKEIEDLRAKLLESEAVNENLRKNLTRATARAPYFSGSSTFSPTILSSDKETIEIIDLAKKDLEKLKRKEKRKKKSVAGKEDNTDTDQEKKEEKGVSERENNELEVEESQEVSDHEDEEEEEEEEEDDIDGGESSDESDSESDEKANYQADLANITCEIAIKQKLIDELENSQKRLQTLKKQYEEKLMMLQHKIRDTQLERDQVLQNLGSVESYSEEKAKKVRSEYEKKLQAMNKELQRLQAAQKEHARLLKNQSQYEKQLKKLQQDVMEMKKTKVRLMKQMKEEQEKARLTESRRNREIAQLKKDQRKRDHQLRLLEAQKRNQEVVLRRKTEEVTALRRQVRPMSDKVAGKVTRKLSSSDAPAQDTGSSAAAVETDASRTGAQQKMRIPVARVQALPTPATNGNRKKYQRKGLTGRVFISKTARMKWQLLERRVTDIIMQKMTISNMEADMNRLLKQREELTKRREKLSKRREKIVKENGEGDKNVANINEEMESLTANIDYINDSISDCQANIMQMEEAKEEGETLDVTAVINACTLTEARYLLDHFLSMGINKGLQAAQKEAQIKVLEGRLKQTEITSATQNQLLFHMLKEKAELNPELDALLGHALQDLDSVPLENVEDSTDEDAPLNSPGSEGSTLSSDLMKLCGEVKPKNKARRRTTTQMELLYADSSELASDTSTGDASLPGPLTPVAEGQEIGMNTETSGTSAREKELSPPPGLPSKIGSISRQSSLSEKKIPEPSPVTRRKAYEKAEKSKAKEQKHSDSGTSEASLSPPSSPPSRPRNELNVFNRLTVSQGNTSVQQDKSDESDSSLSEVHRSSRRGIINPFPASKGIRAFPLQCIHIAEGHTKAVLCVDSTDDLLFTGSKDRTCKVWNLVTGQEIMSLGGHPNNVVSVKYCNYTSLVFTVSTSYIKVWDIRDSAKCIRTLTSSGQVTLGDACSASTSRTVAIPSGENQINQIALNPTGTFLYAASGNAVRMWDLKRFQSTGKLTGHLGPVMCLTVDQISSGQDLIITGSKDHYIKMFDVTEGALGTVSPTHNFEPPHYDGIEALTIQGDNLFSGSRDNGIKKWDLTQKDLLQQVPNAHKDWVCALGVVPDHPVLLSGCRGGILKVWNMDTFMPVGEMKGHDSPINAICVNSTHIFTAADDRTVRIWKARNLQDGQISDTGDLGEDIASN

SEQ ID NO: 8049 - protein, 498 aa, Homo sapiens
MPHPRRYHSSERGSRGSYREHYRSRKHKRRRSRSWSSSSDRTRRRRREDSYHVRSRSSYDDRSSDRRVYDRRYCGSYRRNDYSRDRGDAYYDTDYRHSYEYQRENSSYRSQRSSRRKHRRRRRRSRTFSRSSSHSSRRAKSVEDDAEGHLIYHVGDWLQERYEIVSTLGEGTFGRVVQCVDHRRGGARVALKIIKNVEKYKEAARLEINVLEKINEKDPDNKNLCVQMFDWFDYHGHMCISFELLGLSTFDFLKDNNYLPYPIHQVRHMAFQLCQAVKFLHDNKLTHTDLKPENILFVNSDYELTYNLEKKRDERSVKSTAVRVVDFGSATFDHEHHSTIVSTRHYRAPEVILELGWSQPCDVWSIGCIIFEYYVGFTLFQTHDNREHLAMMERILGPIPSRMIRKTRKQKYFYRGRLDWDENTSAGRYVRENCKPLRRYLTSEAEEHHQLFDLIESMLEYEPAKRLTLGEALQHPFFARLRAEPPNKLWDSSRDISR

SEQ ID NO: 8050 - protein, 443 aa, Homo sapiens
MDPLNLSWYDDDLERQNWSRPFNGSDGKADRPHYNYYATLLTLLIAVIVFGNVLVCMAVSREKALQTTTNYLIVSLAVADLLVATLVMPWVVYLEVVGEWKFSRIHCDIFVTLDVMMCTASILNLCAISIDRYTAVAMPMLYNTRYSSKRRVTVMISIVWVLSFTISCPLLFGLNNADQNECIIANPAFVVYSSIVSFYVPFIVTLLVYIKIYIVLRRRRKRVNTKRSSRAFRAHLRAPLKGNCTHPEDMKLCTVIMKSNGSFPVNRRRVEAARRAQELEMEMLSSTSPPERTRYSPIPPSHHQLTLPDPSHHGLHSTPDSPAKPEKNGHAKDHPKIAKIFEIQTMPNGKTRTSLKTMSRRKLSQQKEKKATQMLAIVLGVFIICWLPFFITHILNIHCDCNIPPVLYSAFTWLGYVNSAVNPIIYTTFNIEFRKAFLKILHC

SEQ ID NO: 8051 - protein, 333 aa, Homo sapiens
MVGEMETKEKPKPTPDYLMQLMNDKKLMSSLPNFCGIFNHLERLLDEEISRVRKDMYNDTLNGSTEKRSAELPDAVGPIVQLQEKLYVPVKEYPDFNFVGRILGPRGLTAKQLEAETGCKIMVRGKGSMRDKKKEEQNRGKPNWEHLNEDLHVLITVEDAQNRAEIKLKRAVEEVKKLLVPAAEGEDSLKKMQLMELAILNGTYRDANIKSPTAQAAPRIITGPAPVLPPAALRTPTPAGPTIMPLIRQIQTAVMPNGTPHPTAAIVPPGPEAGLIYTPYEYPYTLAPATSILEYPIEPSGVLGAVATKVRRHDMRVHPYQRIVTADRAATGN

SEQ ID NO: 8052 - protein, 653 aa, Homo sapiens
MGCSSSSTKTRRSDTSLRAALIIQNWYRGYKARLKARQHYALTIFQSIEYADEQGQMQLSTFFSFMLENYTHIHKEELELRNQSLESEQDMRDRWDYVDSIDVPDSYNGPRLQFPLTCTDIDLLLEAFKEQQILHAHYVLEVLFETKKVLKQMPNFTHIQTSPSKEVTICGDLHGKLDDLFLIFYKNGLPSERNPYVFNGDFVDRGKNSIEILMILCVSFLVYPNDLHLNRGNHEDFMMNLRYGFTKEILHKYKLHGKRILQILEEFYAWLPIGTIVDNEILVIHGGISETTDLNLLHRVERNKMKSVLIPPTETNRDHDTDSKHNKVGVTFNAHGRIKTNGSPTEHLTEHEWEQIIDILWSDPRGKNGCFPNTCRGGGCYFGPDVTSKILNKYQLKMLIRSHECKPEGYEICHDGKVVTIFSASNYYEEGSNRGAYIKLCSGTTPRFFQYQVTKATCFQPLRQRVDTMENSAIKILRERVISRKSDLTRAFQLQDHRKSGKLSVSQWAFCMENILGLNLPWRSLSSNLVNIDQNGNVEYMSSFQNIRIEKPVQEAHSTLVETLYRYRSDLEIIFNAIDTDHSGLISVEEFRAMWKLFSSHYNVHIDDSQVNKLANIMDLNKDGSIDFNEFLKAFYVVHRYEDLMKPDVTNLG

SEQ ID NO: 8053 - protein, 1077 aa, Homo sapiens
MEPNDSTSTAVEEPDSLEVLVKTLDSQTRTFIVGAQMNVKEFKEHIAASVSIPSEKQRLIYQGRVLQDDKKLQEYNVGGKVIHLVERAPPQTHLPSGASSGTGSASATHGGGSPPGTRGPGASVHDRNANSYVMVGTFNLPSDGSAVDVHINMEQAPIQSEPRVRLVMAQHMIRDIQTLLSRMECRGGPQPQHSQPPPQPPAVTPEPVALSSQTSEPVESEAPPREPMEAEEVEERAPAQNPELTPGPAPAGPTPAPETNAPNHPSPAEYVEVLQELQRLESRLQPFLQRYYEVLGAAATTDYNNNHEGREEDQRLINLVGESLRLLGNTFVALSDLRCNLACTPPRHLHVVRPMSHYTTPMVLQQAAIPIQINVGTTVTMTGNGTRPPPTPNAEAPPPGPGQASSVAPSSTNVESSAEGAPPPGPAPPPATSHPRVIRISHQSVEPVVMMHMNIQDSGTQPGGVPSAPTGPLGPPGHGQTLGQQVPGFPTAPTRVVIARPTPPQARPSHPGGPPVSGTLQGAGLGTNASLAQMVSGLVGQLLMQPVLVAQGTPGMAPPPAPATASASAGTTNTATTAGPAPGGPAQPPPTPQPSMADLQFSQLLGNLLGPAGPGAGGSGVASPTITVAMPGVPAFLQGMTDFLQATQTAPPPPPPPPPPPPAPEQQTMPPPGSPSGGAGSPGGLGLESLSPEFFTSVVQGVLSSLLGSLGARAGSSESIAAFIQRLSGSSNIFEPGADGALGFFGALLSLLCQNFSMVDVVMLLHGHFQPLQRLQPQLRSFFHQHYLGGQEPTPSNIRMATHTLITGLEEYVRESFSLVQVQPGVDIIRTNLEFLQEQFNSIAAHVLHCTDSGFGARLLELCNQGLFECLALNLHCLGGQQMELAAVINGRIRRMSRGVNPSLVSWLTTMMGLRLQVVLEHMPVGPDAILRYVRRVGDPPQPLPEEPMEVQGAERASPEPQRENASPAPGTTAEEAMSRGPPPAPEGGSRDEQDGASAETEPWAAAVPPEWVPIIQQDIQSQRKVKPQPPLSDAYLSGMPAKRRKLRSDIQKRLQEDPNYSPQRFPNAQRAFADDP

SEQ ID NO: 8054 - protein, 1036 aa, Homo sapiens
MEVVGDFEYSKRDLVGHGAFAVVFRGRHRQKTDWEVAIKSINKKNLSKSQILLGKEIKILKELQHENIVALYDVQELPNSVFLVMEYCNGGDLADYLQAKGTLSEDTIRVFLHQIAAAMRILHSKGIIHRDLKPQNILLSYANRRKSSVSGIRIKIADFGFARYLHSNMMAATLCGSPMYMAPEVIMSQHYDAKADLWSIGTVIYQCLVGKPPFQANSPQDLRMFYEKNRSLMPSIPRETSPYLANLLLGLLQRNQKDRMDFEAFFSHPFLEQGPVKKSCPVPVPMYSGSVSGSSCGSSPSCRFASPPSLPDMQHIQEENLSSPPLGPPNYLQVSKDSASTSSKNSSCDTDDFVLVPHNISSDHSCDMPVGTAGRRASNEFLVCGGQCQPTVSPHSETAPIPVPTQIRNYQRIEQNLTSTASSGTNVHGSPRSAVVRRSNTSPMGFLRPGSCSPVPADTAQTVGRRLSTGSSRPYSPSPLVGTIPEQFSQCCCGHPQGHDSRSRNSSGSPVPQAQSPQSLLSGARLQSAPTLTDIYQNKQKLRKQHSDPVCPSHTGAGYSYSPQPSRPGSLGTSPTKHLGSSPRSSDWFFKTPLPTIIGSPTKTTAPFKIPKTQASSNLLALVTRHGPAEEQSKDGNEPRECAHCLLVQGSERQRAEQQSKAVFGRSVSTGKLSDQQGKTPICRHQGSTDSLNTERPMDIAPAGACGGVLAPPAGTAASSKAVLFTVGSPPHSAAAPTCTHMFLRTRTTSVGPSNSGGSLCAMSGRVCVGSPPGPGFGSSPPGAEAAPSLRYVPYGASPPSLEGLITFEAPELPEETLMEREHTDTLRHLNVMLMFTECVLDLTAMRGGNPELCTSAVSLYQIQESVVVDQISQLSKDWGRVEQLVLYMKAAQLLAASLHLAKAQIKSGKLSPSTAVKQVVKNLNERYKFCITMCKKLTEKLNRFFSDKQRFIDEINSVTAEKLIYNCAVEMVQSAALDEMFQQTEDIVYRYHKAALLLEGLSRILQDPADIENVHKYKCSIERRLSALCHSTATV

SEQ ID NO: 8055 - protein, 1674 aa, Homo sapiens
MLGAPDESSVRVAVRIRPQLAKEKIEGCHICTSVTPGEPQVFLGKDKAFTFDYVFDIDSQQEQIYIQCIEKLIEGCFEGYNATVFAYGQTGAGKTYTMGTGFDVNIVEEELGIISRAVKHLFKSIEEKKHIAIKNGLPAPDFKVNAQFLELYNEEVLDLFDTTRDIDAKSKKSNIRIHEDSTGGIYTVGVTTRTVNTESEMMQCLKLGALSRTTASTQMNVQSSRSHAIFTIHVCQTRVCPQIDADNATDNKIISESAQMNEFETLTAKFHFVDLAGSERLKRTGATGERAKEGISINCGLLALGNVISALGDKSKRATHVPYRDSKLTRLLQDSLGGNSQTIMIACVSPSDRDFMETLNTLKYANRARNIKNKVMVNQDRASQQINALRSEITRLQMELMEYKTGKRIIDEEGVESINDMFHENAMLQTENNNLRVRIKAMQETVDALRSRITQLVSDQANHVLARAGEGNEEISNMIHSYIKEIEDLRAKLLESEAVNENLRKNLTRATARAPYFSGSSTFSPTILSSDKETIEIIDLAKKDLEKLKRKEKRKKKRLQKLEESNREERSVAGKEDNTDTDQEKKEEKGVSERENNELEVEESQEVSDHEDEEEEEEEEEDDIDGGESSDESDSESDEKANYQADLANITCEIAIKQKLIDELENSQKRLQTLKKQYEEKLMMLQHKIRDTQLERDQVLQNLGSVESYSEEKAKKVRSEYEKKLQAMNKELQRLQAAQKEHARLLKNQSQYEKQLKKLQQDVMEMKKTKVRLMKQMKEEQEKARLTESRRNREIAQLKKDQRKRDHQLRLLEAQKRNQEVVLRRKTEEVTALRRQVRPMSDKVAGKVTRKLSSSDAPAQDTGSSAAAVETDASRTGAQQKMRIPVARVQALPTPATNGNRKKYQRKGLTGRVFISKTARMKWQLLERRVTDIIMQKMTISNMEADMNRLLKQREELTKRREKLSKRREKIVKENGEGDKNVANINEEMESLTANIDYINDSISDCQANIMQMEEAKEEGETLDVTAVINACTLTEARYLLDHFLSMGINKGLQAAQKEAQIKVLEGRLKQTEITSATQNQLLFHMLKEKAELNPELDALLGHALQDLDSVPLENVEDSTDEDAPLNSPGSEGSTLSSDLMKLCGEVKPKNKARRRTTTQMELLYADSSELASDTSTGDASLPGPLTPVAEGQEIGMNTETSGTSAREKELSPPPGLPSKIGSISRQSSLSEKKIPEPSPVTRRKAYEKAEKSKAKEQKHSDSGTSEASLSPPSSPPSRPRNELNVFNRLTVSQGNTSVQQDKSDESDSSLSEVHRSSRRGIINPFPASKGIRAFPLQCIHIAEGHTKAVLCVDSTDDLLFTGSKDRTCKVWNLVTGQEIMSLGGHPNNVVSVKYCNYTSLVFTVSTSYIKVWDIRDSAKCIRTLTSSGQVTLGDACSASTSRTVAIPSGENQINQIALNPTGTFLYAASGNAVRMWDLKRFQSTGKLTGHLGPVMCLTVDQISSGQDLIITGSKDHYIKMFDVTEGALGTVSPTHNFEPPHYDGIEALTIQGDNLFSGSRDNGIKKWDLTQKDLLQQVPNAHKDWVCALGVVPDHPVLLSGCRGGILKVWNMDTFMPVGEMKGHDSPINAICVNSTHIFTAADDRTVRIWKARNLQDGQISDTGDLGEDIASN

SEQ ID NO: 8056 - protein, 75 aa, Homo sapiens
MAKQPSDVSSECDREGRQLQPAERPPQLRPGAPTSLQTEPQVSLCHPGWSALVRSWLTATSNSQVQAVLLPQPPK

SEQ ID NO: 8057 - protein, 435 aa, Homo sapiens
MAPFGRNLLKTRHKNRSPTKDMDSEEKEIVVWVCQEEKLVCGLTKRTTSADVIQALLEEHEATFGEKRFLLGKPSDYCIIEKWRGSERVLPPLTRILKLWKAWGDEQPNMQFVLVKADAFLPVPLWRTAEAKLVQNTEKLWELSPANYMKTLPPDKQKRIVRKTFRKLAKIKQDTVSHDRDNMETLVHLIISQDHTIHQQVKRMKELDLEIEKCEAKFHLDRVENDGENYVQDAYLMPSFSEVEQNLDLQYEENQTLEDLSESDGIEQLEERLKYYRILIDKLSAEIEKEVKSVCIDINEDAEGEAASELESSNLESVKCDLEKSMKAGLKIHSHLSGIQKEIKYSDSLLQMKAKEYELLAKEFNSLHISNKDGCQLKENRAKESEVPSSNGEIPPFTQRVFSNYTNDTDSDTGISSNHSQDSETTVGDVVLLST

SEQ ID NO: 8058 - protein, 531 aa, Homo sapiens
MSAVSQPQAAPSPLEKSPSTAILCNTCGNVCKGEVLRVQDKYFHIKCFVCKACGCDLAEGGFFVRQGEYICTLDYQRLYGTRCFSCDQFIEGEVVSALGKTYHPDCFVCAVCRLPFPPGDRVTFNGKECMCQKCSLPVSVGSSAHLSQGLRSCGGCGTEIKNGQALVALDKHWHLGCFKCKSCGKLLNAEYISKDGLPYCEADYHAKFGIRCDSCEKYITGRVLEAGEKHYHPSCALCVRCGQMFAEGEEMYLQGSSIWHPACRQAARTEDRNKETRTSSESIISVPASSTSGSPSRVIYAKLGGEILDYRDLAALPKSKAIYDIDRPDMISYSPYISHSAGDRQSYGESPQLLSPTPTEGDQDDRSYKQCRTSSPSSTGSVSLGRYTPTSRSPQHYSRPAARRSDGEDGSLDQDNRKKSSWLMLKGDADTRTNSPDLDTQSLSHSSGTDRDPLQRMAGDSFHSQYKIYPYDSLIVTNRIRVKLPKDVDRTRLERHLSPEEFQEVFGMSIEEFDRLALWKRNDLKKKALLF

SEQ ID NO: 8059 - protein, 254 aa, Homo sapiens
MDQSSEGCMKKISSVNLDKLINDFSQIEKKMVETNGKNNILDIQLEKSNCLLKVMQAKEVSIKEECATLHNIIKGLQQTIEYQQNLKGENEQLKISADLIKEKLKSHEQEYKNNIAKLVSEMKIKEEGYKKEISKLYQDMQRKVELNEEKHKELIEKKEMEISELNAKLRSQEKEKQNEIIKLQLEFDAKLARVQTKSKSYQDSTVLPQSIYRRKLQHFQEEKNKEIAILRNTIRDLEQRLSVGKDSHLKRRRF

SEQ ID NO: 8060 - protein, 167 aa, Homo sapiens
MTAGTVVITGGILATVILLCIIAVLCYCRLQYYCCKKSGTEVADEEEEREHDLPTHPRGPTCNACSSQALDGRGSLAPLTSEPCSQPCGVAASHCTTCSPYSSPFYIRTADMVPNGGGGERLSFAPTYYKEGGPPSLKLAAPQSYPVTWPGSGREAFTNPRAISTDV

SEQ ID NO: 8061 - protein, 656 aa, Homo sapiens
MARMCVKTQRLDVAKVCLGNMGHARGARALREAEQEPELEARVAVLATQLGMLEDAEQLYRKCKRHDLLNKFYQAAGRWQEALQVAEHHDRVHLRSTYHRYAGHLEASADCSRALSYYEKSDTHRFEVPRMLSEDLPSLELYVNKMKDKTLWRWWAQYLESQGEMDAALHYYELARDHFSLVRIHCFQGNVQKAAQIANETGNLAASYHLARQYESQEEVGQAVHFYTRAQAFKNAIRLCKENGLDDQLMNLALLSSPEDMIEAARYYEEKGVQMDRAVMLYHKAGHFSKALELAFATQQFVALQLIAEDLDETSDPALLARCSDFFIEHSQYERAVELLLAARKYQEALQLCLGQNMSITEEMAEKMTVAKDSSDLPEESRRELLEQIADCCMRQGSYHLATKKYTQAGNKLKAMRALLKSGDTEKITFFASVSRQKEIYIMAANYLQSLDWRKEPEIMKNIIGFYTKGRALDLLAGFYDACAQVEIDEYQNYDKAHGALTEAYKCLAKAKAKSPLDQETRLAQLQSRMALVKRFIQARRTYTEDPKESIKQCELLLEEPDLDSTIRIGDVYGFLVEHYVRKEEYQTAYRFLEEMRRRLPLANMSYYVSPQAVDAVHRGLGLPLPRTVPEQVRHNSMEDARELDEEVVEEADDDP

SEQ ID NO: 8062 - protein, 549 aa, Homo sapiens
MAGAIASRMSFSSLKRKQPKTFTVRIVTMDAEMEFNCEMKWKGKDLFDLVCRTLGLRETWFFGLQYTIKDTVAWLKMDKKVKKQILDEKIYCPPEASVLLASYAVQAKYGDYDPSVHKRGFLAQEELLPKRVINLYQMTPEMWEERITAWYAEHRGRARDEAEMEYLKIAQDLEMYGVNYFAIRNKKGTELLLGVDALGLHIYDPENRLTPKISFPWNEIRNISYSDKEFTIKPLDKKIDVFKFNSSKLRVNKLILQLCIGNHDLFMRRRKADSLEVQQMKAQAREEKARKQMERQRLAREKQMREEAERTRDELERRLLQMKEEATMANEALMRSEETADLLAEKAQITEEEAKLLAQKAAEAEQEMQRIKATAIRTEEEKRLMEQKVLEAEVLALKMAEESERRAKEADQLKQDLQEAREAERRAKQKLLEIATKPTYPPMNPIPAPLPPDIPSFNLIGDSLSFDFKDTDMKRLSMEIEKEKVEYMEKSKHLQEQLNELKTEIEALKLKERETALDILHNENSDRGGSSKHNTIKKPQAQGRRPICI

SEQ ID NO: 8063 - protein, 939 aa, Homo sapiens
MDDSEVESTASILASVKEQEAQFEKLTRALEEERRHVSAQLERVRVSPQDANPLMANGTLTRRHQNGRFVGDADLERQKFSDLKLNGPQDHSHLLYSTIPRMQEPGQIVETYTEEDPEGAMSVVSVETSDDGTTRRTETTVKKVVKTVTTRTVQPVAMGPDGLPVDASSVSNNYIQTLGRDFRKNGNGGPGPYVGQAGTATLPRNFHYPPDGYSRHYEDGYPGGSDNYGSLSRVTRIEERYRPSMEGYRAPSRQDVYGPQPQVRVGGSSVDLHRFHPEPYGLEDDQRSMGYDDLDYGMMSDYGTARRTGTPSDPRRRLRSYEDMIGEEVPSDQYYWAPLAQHERGSLASLDSLRKGGPPPPNWRQPELPEVIAMLGFRLDAVKSNAAAYLQHLCYRNDKVKTDVRKLKGIPVLVGLLDHPKKEVHLGACGALKNISFGRDQDNKIAIKNCDGVPALVRLLRKARDMDLTEVITGTLWNLSSHDSIKMEIVDHALHALTDEVIIPHSGWEREPNEDCKPRHIEWESVLTNTAGCLRNVSSERSEARRKLRECDGLVDALIFIVQAEIGQKDSDSKLVENCVCLLRNLSYQVHREIPQAERYQEAAPNVANNTGPHAASCFGAKKGKDEWFSRGKKPIEDPANDTVDFPKRTSPARGYELLFQPEVVRIYISLLKESKTPAILEASAGAIQNLCAGRWTYGRYIRSALRQEKALSAIADLLTNEHERVVKAASGALRNLAVDARNKELIGKHAIPNLVKNLPGGQQNSSWNFSEDTVISILNTINEVIAENLEAAKKLRETQGIEKLVLINKSGNRSEKEVRAAALVLQTIWGYKELRKPLEKEGWKKSDFQVNLNNASRSQSSHSYDDSTLPLIDRNQKSDKKPDREEIQMSNMGSNTKSLDNNYSTPNERGDHNRTLDRSGDLGDMEPLKGTTPLMQKI

SEQ ID NO: 8064 - protein, 850 aa, Homo sapiens
MRQVCCSALPPPPLEKGRCSSYSDSSSSSSERSSSSSSSSSESGSSSRSSSNNSSISRPAAPPEPRPQQQPQPRSPAARRAAARSRAAAAGGMRRDPAPGFSMLLFGVSLACYSPSLKSVQDQAYKAPVVVEGKVQGLVPAGGSSSNSTREPPASGRVALVKVLDKWPLRSGGLQREQVISVGSCVPLERNQRYIFFLEPTEQPLVFKTAFAPLDTNGKNLKKEVGKILCTDCATRPKLKKMKSQTGQVGEKQSLKCEAAAGNPQPSYRWFKDGKELNRSRDIRIKYGNGRKNSRLQFNKVKVEDAGEYVCEAENILGKDTVRGRLYVNSVSTTLSSWSGHARKCNETAKSYCVNGGVCYYIEGINQLSCKCPNGFFGQRCLEKLPLRLYMPDPKQKAEELYQKRVLTITGICVALLVVGIVCVVAYCKTKKQRKQMHNHLRQNMCPAHQNRSLANGPSHPRLDPEEIQMADYISKNVPATDHVIRRETETTFSGSHSCSPSHHCSTATPTSSHRHESHTWSLERSESLTSDSQSGIMLSSVGTSKCNSPACVEARARRAAAYNLEERRRATAPPYHDSVDSLRDSPHSERYVSALTTPARLSPVDFHYSLATQVPTFEITSPNSAHAVSLPPAAPISYRLAEQQPLLRHPAPPGPGPGPGPGPGPGADMQRSYDSYYYPAAGPGPRRGTCALGGSLGSLPASPFRIPEDDEYETTQECAPPPPPRPRARGASRRTSAGPRRWRRSRLNGLAAQRARAARDSLSLSSGSGGGSASASDDDADDADGALAAESTPFLGLRGAHDALRSDSPPLCPAADSRTYYSLDSHSTRASSRHSRGPPPRAKQDSAPL

SEQ ID NO: 8065 - protein, 957 aa, Homo sapiens
MSLVSQNSRRRRRRVAKATAHNSSWGEMQAPNAPGLPADVPGSDVPQGPSDSQILQGLCASEGPSTSVLPTSAEGPSTFVPPTISEASSASGQPTISEGPGTSVLPTPSEGLSTSGPPTISKGLCTSVTLAASEGRNTSRPPTSSEEPSTSVPPTASEVPSTSLPPTPGEGTSTSVPPTAYEGPSTSVVPTPDEGPSTSVLPTPGEGPGTSVPLAATEGLSTSVQATPDEGPSTSVPPTATEGLSTPVPPTRDEGPSTSVPATPGEGPSTSVLPAASDGQSISLVPTRGKGSSTSVPPTATEGLSTSVQPTAGEGSSTSVPPTPGGGLSTSVPPTATEELSTSVPPTPGEGPSTSVLPIPGEGLSTSVPPTASDGSDTSVPPTPGEGASTLVQPTAPDGPGSSVLPNPGEGPSTLFSSSASVDRNPSKCSLVLPSPRVTKASVDSDSEGPKGAEGPIEFEVLRDCESPNSISIMGLNTSRVAITLKPQDPMEQNVAELLQFLLVKDQSKYPIRESEMREYIVKEYRNQFPEILRRAAAHLECIFRFELRELDPEAHTYILLNKLGPVPFEGLEESPNGPKMGLLMMILGQIFLNGNQAKEAEIWEMLWRMGVQRERRLSIFGNPKRLLSVEFVWQRYLDYRPVTDCKPVEYEFFWGPRSHLETTKMKILKFMAKIYNKDPMDWPEKYNEALEEDAARAFAEGWQALPHFRRPFFEEAAAEVPSPDSEVSSYSSKYAPHSWPESRLESKARKLVQLFLLMDSTKLPIPKKGILYYIGRECSKVFPDLLNRAARTLNHVYGTELVVLDPRNHSYTLYNRREMEETEEIVDSPNRPGNNFLMQVLSFIFIMGNHARESAVWAFLRGLGVQAGRKHVITCRYLSQRYIDSLRVPDSDPVQYEFVWGPRARLETSKMKALRYVARIHRKEPQDWPQQYREAMEDEANRADVGHRQIFVHNFR

SEQ ID NO: 8066 - protein, 1319 aa, Homo sapiens
MTEVQAMVEFSVELNKFYNVDLFQRGFYQIRASMKIPSRIPHRVEASLLHATGMTLAFPASVHDSLICSKTFQILYKNEEVVLNDVMIFKVKMLLDERKIEETLEEMNFLLSLDLHFTDGDYSADDLNALQLISSRTLKLHFSPHRGLHHHVNVMFDYFHLSVVSVTVHASLVALHQPLISFPRPVKTTWLNRNAPAQNKDSVIPTLESVVFGINYTKQLSPDGCSFIIADSFLHHAYRFHYTLCATLLLAFKGLHSYFITVTEEIPSCQKLELEEMDVEARLTELCEEVKKIENPDELAELINMNLAQLCSLLMALWGQFLEVITLHEELRILLAQEHHTLRVRRFSEAFFCFEHPREAAIAYQELHAQSHLQMCTAIKNTSFCSSLPPLPIECSELDGDLNSLPIIFEDRYLDSVTEGKLDISQDDSEITQMEHNLASRRSSDDCHDHQTTPSLGVRTIEIKPSNKDPFSGENITVKLGPWTELRQEEILVDNLLPNFESLESNGKSKSIEITFEKEALQEAKCLSIGESLTKLRSNLPAPSTKEYHVVVSGDTIKLPDISATYASSRFSDSGVESEPSSFATHPNTDLVFETVQGQGPCNSERLFPQLLMKPDYNVKFSLGNHCTESTSAISEIQSSLTSINSLPSDDELSPDENSKKSVVPECHLNDSKTVLNLGTTDLPKCDDTKKSSITLQQQSVVFSGNLDNETVAIHSLNSSIKDPLQFVFSDEETSSDVKSSCSSKPNLDTMCKGFQSPDKSNNSTGTAITLNSKLICLGTPCVISGSISSNTDVSEDRTMKKNSDVLNLTQMYSEIPTVESETHLGTSDPFSASTDIVKQGLVENYFGSQSSTDISDTCAVSYSNALSPQKETSEKEISNLQQEQDKEDEEEEQDQQMVQNGYYEETDYSALDGTINAHYTSRDELMEERLTKSEKINSDYLRDGINMPTVCTSGCLSFPSAPRESPCNVKYSSKSKFDAITKQPSSTSYNFTSSISWYESSPKPQIQAFLQAKEELKLLKLPGFMYSEVPLLASSVPYFSVEEEDGSEDGVHLIVCVHGLDGNSADLRLVKTYIELGLPGGRIDFLMSERNQNDTFADFDSMTDRLLDEIIQYIQIYSLTVSKISFIGHSLGNLIIRSVLTRPRFKYYLNKLHTFLSLSGPHLGTLYNSSALVNTGLWFMQKWKKSGSLLQLTCRDHSDPRQTFLYKLSNKAGLHYFKNVVLVGSLQDRYVPYHSARIEMCKTALKDKQSGQIYSEMIHNLLRPVLQSKDCNLVRYNVINALPNTADSLIGRAAHIAVLDSEIFLEKFFLVAALKYFQ

SEQ ID NO: 8067 - protein, 623 aa, Homo sapiens
MAAESGELIGACEFMKDRLYFATLRNRPKSTVNTHYFSIDEELVYENFYADFGPLNLAMVYRYCCKLNKKLKSYSLSRKKIVHYTCFDQRKRANAAFLIGAYAVIYLKKTPEEAYRALLSGSNPPYLPFRDASFGNCTYNLTILDCLQGIRKGLQHGFFDFETFDVDEYEHYERVENGDFNWIVPGKFLAFSGPHPKSKIENGYPLHAPEAYFPYFKKHNVTAVVRLNKKIYEAKRFTDAGFEHYDLFFIDGSTPSDNIVRRFLNICENTEGAIAVHCKAGLGRTGTLIACYVMKHYRFTHAEIIAWIRICRPGSIIGPQQHFLEEKQASLWVQGDIFRSKLKNRPSSEGSINKILSGLDDMSIGGNLSKTQNMERFGEDNLEDDDVEMKNGITQGDKLRALKSQRQPRTSPSCAFRSDDTKGHPRAVSQPFRLSSSLQGSAVTLKTSKMALSPSATAKRINRTSLSSGATVRSFSINSRLASSLGNLNAATDDPENKKTSSSSKAGFTASPFTNLLNGSSQPTTRNYPELNNNQYNRSSNSNGGNLNSPPGPHSAKTEEHTTILRPSYTGLSSSSARFLSRSIPVSAQTPPPGPQNPECNFCALPSQPRLPPKKFNSAKEAF

SEQ ID NO: 8068 - protein, 1773 aa, Homo sapiens
MAAAPSALLLLPPFPVLSTYRLQSRSRPSAPETDDSRVGGIMRGEKNYYFRGAAGDHGSCPTTTSPLASALLMPSEAVSSSWSESGGGLSGGDEEDTRLLQLLRTARDPSEAFQALQAALPRRGGRLGFPRRKEALYRALGRVLVEGGSDEKRLCLQLLSDVLRGQGEAGQLEEAFSLALLPQLVVSLREENPALRKDALQILHICLKRSPGEVLRTLIQQGLESTDARLRASTALLLPILLTTEDLLLGLDLTEVIISLARKLGDQETEEESETAFSALQQIGERLGQDRFQSYISRLPSALRRHYNRRLESQFGSQVPYYLELEASGFPEDPLPCAVTLSNSNLKFGIIPQELHSRLLDQEDYKNRTQAVEELKQVLGKFNPSSTPHSSLVGFISLLYNLLDDSNFKVVHGTLEVLHLLVIRLGEQVQQFLGPVIAASVKVLADNKLVIKQEYMKIFLKLMKEVGPQQVLCLLLEHLKHKHSRVREEVVNICICSLLTYPSEDFDLPKLSFDLAPALVDSKRRVRQAALEAFAVLASSMGSGKTSILFKAVDTVELQDNGDGVMNAVQARLARKTLPRLTEQGFVEYAVLMPSSAGGRSNHLAHGADTDWLLAGNRTQSAHCHCGDHVRDSMHIYGSYSPTICTRRVLSAGKGKNKLPWENEQPGIMGENQTSTSKDIEQFSTYDFIPSAKLKLSQGMPVNDDLCFSRKRVSRNLFQNSRDFNPDCLPLCAAGTTGTHQTNLSGKCAQLGFSQICGKTGSVGSDLQFLGTTSSHQEKVYASLNFGSKTQQTFGSQTECTSSNGQNPSPGAYILPSYPVSSPRTSPKHTSPLIISPKKSQDNSVNFSNSWPLKSFEGLSKPSPQKKLVSQKSSDPTGRNHGENSQEKPPVQLTPALVRSPSSRRGLNGTKPVPPIPRGISLLPDKADLSTVGHKKKEPDDIWKCEKDSLPIDLSELNFKDKDLDQEEMHSSLRSLRNSAAKKRAKLSGSTSDLESPDSAMKLDLTMDSPSLSSSPNINSYSESGVYSQESLTSSLSTTPQGKRIMSDIFPTFGSKPCPTRLSSAKKKISHIAEQSPSAGSSSNPQQISSFDFTTTKALSEDSVVVVGKGVFGSLSSAPATCSQSVISSVENGDTFSIKQSIEPPSGIYGRSVQQNISSYLDVENEKDAKVSISKSTYNKMRQKRKEEKELFHNKDCEKKEKNSWERMRHTGTEKMASESETPTGAISQYKERMPSVTHSPEIMDLSELRPFSKPEIALTEALRLLADEDWEKKIEGLNFIRCLAAFHSEILNTKLHETNFAVVQEVKNLRSGVSRAAVVCLSDLFTYLKKSMDQELDTTVKVLLHKAGESNTFIREDVDKALRAMVNNVTPARAVVSLINGGQSHLHIAVRRCTAQHLSDVLEFMEPERILSAAKDMAERILPAAAKFAQDSSQETRYYGRKMLFFMMCHPNFEKMLEKYVPSKDLPYIKDSVRNLQQKGLGEIPLDTPSAKGRRSHTGSVGNTRSSSVSRDAFNSAERAVTEVREVTRKSVPRNSLESAEYLKLITGLLNAKDFRDRINGIKQLLSDTENNQDLVVGNIVKIFDAFKSRLHDSNSKVNLVALETMHKMIPLLRDHLSPIINMLIPAIVDNNLNSKNPGIYAAATNVVQALSQHVDNYLLLQPFCTKAQFLNGKAKQDMTEKLADIVTELYQRKPHATEQKVLVVLWHLLGNMTNSGSLPGAGGNIRTATAKLSKALFAQMGQNLLNQAASQPPHIKKSLEELLDMTILNEL

SEQ ID NO: 8069 - protein, 833 aa, Homo sapiens
MHQLFRLVLGQKDLSRAGDLFSLDDSEIEDSLTEALEQIKIISSSSDYQTNNNDQAVVEICITRITTAIRETESIEKHAKALVGLWDSCLEHNLRPFGKDEDTPHAKIASDIMSCILQNYNRPPVMALAIPIAVKFLHRGNKELCRNMSNYLSLAAITKADLLADHTEVIVKSILQGNTMLLRVLPAVYEKQPQPINRHLTELLALMSQLEQPEQYHLLRLLHVAAKKKQLEVVQKCIPFLIGHLKDSTHNDIILNILIEIAVYEPVALNSFLPMLKEIGERFPYLTGQMARIYGAVGHVDEERARSCLTYLVSQLANMEHSFHHILLLEIKSITDTFSSILGPQSRDIFRMSNSFTAIAKLLTRQLENTKAGSGRRKISTEIEFPEKLEETKLIVTENEDHEKLQVKIQAFEDKINAGSNTPGSIRRYSLGQVSKEERKNIRFNRSKSLAFHTMLTKGVGSDDGEDENRGDIPASISLSEIDPLGQGNDKLPFKTDTERSQLGESSVSYPNIIHIDSENLSETVKENSQEETPETTASPIEYQDKLYLHLKKNLSKVKAYAMEIGKKIPVPDQCTIEDTVRSCVAKLFFTCSLKGHYCLYSKSSFILISQEPQPWIQIMFLFQQSLFPEPLSIQSHSVQFLRALWEKTQAGGAHSFETAMMESTFPQQKDLDQVQLHLEEVRFFDVFGFSETAGAWQCFMCNNPEKATVVNQDGQPLIEGKLKEKQVRWKFIKRWKTRYFTLAGNQLLFQKGKSKDDPDDCPIELSKVQSVKAVAKKRRDRSLPRAFEIFTDNKTYVFKAKDEKNAEEWLQCINVAVAQAKERESREVTTYL

SEQ ID NO: 8070 - protein, 699 aa, Homo sapiens
MNLLPKSSREFGSVDYWEKFFQQRGKKAFEWYGTYLELCGVLHKYIKPREKVLVIGCGNSELSEQLYDVGYRDIVNIDISEVVIKQMKECNATRRPQMSFLKMDMTQMEFPDASFQVVLDKGTLDAVLTDEEEKTLQQVDRMLAEVGRVLQVGGRYLCISLAQAHILKKAVGHFSREGWMVRVHQVANSQDQVLEAEPQFSLPVFAFIMTKFRPVPGSALQIFELCAQEQRKPVRLESAERLAEAVQERQQYAWLCSQLRRKARLGSVSLDLCDGDTGEPRYTLHVVDSPTVKPSRDNHFAIFIIPQGRETEWLFGMDEGRKQLAASAGFRRLITVALHRGQQYESMDHIQAELSARVMELAPAGMPTQQQVPFLSVGGDIGVRTVQHQDCSPLSGDYVIEDVQGDDKRYFRRLIFLSNRNVVQSEARLLKDVSHKAQKKRKKDRKKQRPADAEDLPAAPGQSIDKSYLCCEHHKAMIAGLALLRNPELLLEIPLALLVVGLGGGSLPLFVHDHFPKSCIDAVEIDPSMLEVATQWFGFSQSDRMKVHIADGLDYIASLAGGGEARPCYDVIMFDVDSKDPTLGMSCPPPAFVEQSFLQKVKSILTPEGVFILNLVCRDLGLKDSVLAGLKAVFPLLYVRRIEGEVNEILFCQLHPEQKLATPELLETAQALERTLRKPGRGWDDTYVLSDMLKTVKIV

SEQ ID NO: 8071 - protein, 230 aa, Homo sapiens
MEAAETEAEAAALEVLAEVAGILEPVGLQEEAELPAKILVEFVVDSQKKDKLLCSQLQVADFLQNILAQEDTAKGLDPLASEDTSRQKAIAAKEQWKELKATYREHVEAIKIGLTKALTQMEEAQRKRTQLREAFEQLQAKKQMAMEKRRAVQNQWQLQQEKHLQHLAEVSAEGKLLFPEAEAEAENLPDDKPQQPTRPQEQSTGDTMGRDPGVSFKAVGLQPAGDVNLP

SEQ ID NO: 8072 - protein, 3685 aa, Homo sapiens
MLWWEEVEDCYEREDVQKKTFTKWVNAQFSKFGKQHIENLFSDLQDGRRLLDLLEGLTGQKLPKEKGSTRVHALNNVNKALRVLQNNNVDLVNIGSTDIVDGNHKLTLGLIWNIILHWQVKNVMKNIMAGLQQTNSEKILLSWVRQSTRNYPQVNVINFTTSWSDGLALNALIHSHRPDLFDWNSVVCQQSATQRLEHAFNIARYQLGIEKLLDPEDVDTTYPDKKSILMYITSLFQVLPQQVSIEAIQEVEMLPRPPKVTKEEHFQLHHQMHYSQQITVSLAQGYERTSSPKPRFKSYAYTQAAYVTTSDPTRSPFPSQHLEAPEDKSFGSSLMESEVNLDRYQTALEEVLSWLLSAEDTLQAQGEISNDVEVVKDQFHTHEGYMMDLTAHQGRVGNILQLGSKLIGTGKLSEDEETEVQEQMNLLNSRWECLRVASMEKQSNLHRVLMDLQNQKLKELNDWLTKTEERTRKMEEEPLGPDLEDLKRQVQQHKVLQEDLEQEQVRVNSLTHMVVVVDESSGDHATAALEEQLKVLGDRWANICRWTEDRWVLLQDILLKWQRLTEEQCLFSAWLSEKEDAVNKIHTTGFKDQNEMLSSLQKLAVLKADLEKKKQSMGKLYSLKQDLLSTLKNKSVTQKTEAWLDNFARCWDNLVQKLEKSTAQISQAVTTTQPSLTQTTVMETVTTVTTREQILVKHAQEELPPPPPQKKRQITVDSEIRKRLDVDITELHSWITRSEAVLQSPEFAIFRKEGNFSDLKEKVNAIEREKAEKFRKLQDASRSAQALVEQMVNEGVNADSIKQASEQLNSRWIEFCQLLSERLNWLEYQNNIIAFYNQLQQLEQMTTTAENWLKIQPTTPSEPTAIKSQLKICKDEVNRLSDLQPQIERLKIQSIALKEKGQGPMFLDADFVAFTNHFKQVFSDVQAREKELQTIFDTLPPMRYQETMSAIRTWVQQSETKLSIPQLSVTDYEIMEQRLGELQALQSSLQEQQSGLYYLSTTVKEMSKKAPSEISRKYQSEFEEIEGRWKKLSSQLVEHCQKLEEQMNKLRKIQNHIQTLKKWMAEVDVFLKEEWPALGDSEILKKQLKQCRLLVSDIQTIQPSLNSVNEGGQKIKNEAEPEFASRLETELKELNTQWDHMCQQVYARKEALKGGLEKTVSLQKDLSEMHEWMTQAEEEYLERDFEYKTPDELQKAVEEMKRAKEEAQQKEAKVKLLTESVNSVIAQAPPVAQEALKKELETLTTNYQWLCTRLNGKCKTLEEVWACWHELLSYLEKANKWLNEVEFKLKTTENIPGGAEEISEVLDSLENLMRHSEDNPNQIRILAQTLTDGGVMDELINEELETFNSRWRELHEEAVRRQKLLEQSIQSAQETEKSLHLIQESLTFIDKQLAAYIADKVDAAQMPQEAQKIQSDLTSHEISLEEMKKHNQGKEAAQRVLSQIDVAQKKLQDVSMKFRLFQKPANFEQRLQESKMILDEVKMHLPALETKSVEQEVVQSQLNHCVNLYKSLSEVKSEVEMVIKTGRQIVQKKQTENPKELDERVTALKLHYNELGAKVTERKQQLEKCLKLSRKMRKEMNVLTEWLAATDMELTKRSAVEGMPSNLDSEVAWGKATQKEIEKQKVHLKSITEVGEALKTVLGKKETLVEDKLSLLNSNWIAVTSRAEEWLNLLLEYQKHMETFDQNVDHITKWIIQADTLLDESEKKKPQQKEDVLKRLKAELNDIRPKVDSTRDQAANLMANRGDHCRKLVEPQISELNHRFAAISHRIKTGKASIPLKELEQFNSDIQKLLEPLEAEIQQGVNLKEEDFNKDMNEDNEGTVKELLQRGDNLQQRITDERKREEIKIKQQLLQTKHNALKDLRSQRRKKALEISHQWYQYKRQADDLLKCLDDIEKKLASLPEPRDERKIKEIDRELQKKKEELNAVRRQAEGLSEDGAAMAVEPTQIQLSKRWREIESKFAQFRRLNFAQIHTVREETMMVMTEDMPLEISYVPSTYLTEITHVSQALLEVEQLLNAPDLCAKDFEDLFKQEESLKNIKDSLQQSSGRIDIIHSKKTAALQSATPVERVKLQEALSQLDFQWEKVNKMYKDRQGRFDRSVEKWRRFHYDIKIFNQWLTEAEQFLRKTQIPENWEHAKYKWYLKELQDGIGQRQTVVRTLNATGEEIIQQSSKTDASILQEKLGSLNLRWQEVCKQLSDRKKRLEEQKNILSEFQRDLNEFVLWLEEADNIASIPLEPGKEQQLKEKLEQVKLLVEELPLRQGILKQLNETGGPVLVSAPISPEEQDKLENKLKQTNLQWIKVSRALPEKQGEIEAQIKDLGQLEKKLEDLEEQLNHLLLWLSPIRNQLEIYNQPNQEGPFDVKETEIAVQAKQPDVEEILSKGQHLYKEKPATQPVKRKLEDLSSEWKAVNRLLQELRAKQPDLAPGLTTIGASPTQTVTLVTQPVVTKETAISKLEMPSSLMLEVPALADFNRAWTELTDWLSLLDQVIKSQRVMVGDLEDINEMIIKQKATMQDLEQRRPQLEELITAAQNLKNKTSNQEARTIITDRIERIQNQWDEVQEHLQNRRQQLNEMLKDSTQWLEAKEEAEQVLGQARAKLESWKEGPYTVDAIQKKITETKQLAKDLRQWQTNVDVANDLALKLLRDYSADDTRKVHMITENINASWRSIHKRVSEREAALEETHRLLQQFPLDLEKFLAWLTEAETTANVLQDATRKERLLEDSKGVKELMKQWQDLQGEIEAHTDVYHNLDENSQKILRSLEGSDDAVLLQRRLDNMNFKWSELRKKSLNIRSHLEASSDQWKRLHLSLQELLVWLQLKDDELSRQAPIGGDFPAVQKQNDVHRAFKRELKTKEPVIMSTLETVRIFLTEQPLEGLEKLYQEPRELPPEERAQNVTRLLRKQAEEVNTEWEKLNLHSADWQRKIDETLERLRELQEATDELDLKLRQAEVIKGSWQPVGDLLIDSLQDHLEKVKALRGEIAPLKENVSHVNDLARQLTTLGIQLSPYNLSTLEDLNTRWKLLQVAVEDRVRQLHEAHRDFGPASQHFLSTSVQGPWERAISPNKVPYYINHETQTTCWDHPKMTELYQSLADLNNVRFSAYRTAMKLRRLQKALCLDLLSLSAACDALDQHNLKQNDQPMDILQIINCLTTIYDRLEQEHNNLVNVPLCVDMCLNWLLNVYDTGRTGRIRVLSFKTGIISLCKAHLEDKYRYLFKQVASSTGFCDQRRLGLLLHDSIQIPRQLGEVASFGGSNIEPSVRSCFQFANNKPEIEAALFLDWMRLEPQSMVWLPVLHRVAAAETAKHQAKCNICKECPIIGFRYRSLKHFNYDICQSCFFSGRVAKGHKMHYPMVEYCTPTTSGEDVRDFAKVLKNKFRTKRYFAKHPRMGYLPVQTVLEGDNMETPVTLINFWPVDSAPASSPQLSHDDTHSRIEHYASRLAEMENSNGSYLNDSISPNESIDDEHLLIQHYCQSLNQDSPLSQPRSPAQILISLESEERGELERILADLEEENRNLQAEYDRLKQQHEHKGLSPLPSPPEMMPTSPQSPRDAELIAEAKLLRQHKGRLEARMQILEDHNKQLESQLHRLRQLLEQPQAEAKVNGTTVSSPSTSLQRSDSSQPMLLRVVGSQTSDSMGEEDLLSPPQDTSTGLEEVMEQLNNSFPSSRGRNTPGKPMREDTM

SEQ ID NO: 8073 - protein, 671 aa, Homo sapiens
MAQLFLPLLAALVLAQAPAALADVLEGDSSEDRAFRVRIAGDAPLQGVLGGALTIPCHVHYLRPPPSRRAVLGSPRVKWTFLSRGREAEVLVARGVRVKVNEAYRFRVALPAYPASLTDVSLALSELRPNDSGIYRCEVQHGIDDSSDAVEVKVKGVVFLYREGSARYAFSFSGAQEACARIGAHIATPEQLYAAYLGGYEQCDAGWLSDQTVRYPIQTPREACYGDMDGFPGVRNYGVVDPDDLYDVYCYAEDLNGELFLGDPPEKLTLEEARAYCQERGAEIATTGQLYAAWDGGLDHCSPGWLADGSVRYPIVTPSQRCGGGLPGVKTLFLFPNQTGFPNKHSRFNVYCFRDSAQPSAIPEASNPASNPASDGLEAIVTVTETLEELQLPQEATESESRGAIYSIPIMEDGGGGSSTPEDPAEAPRTLLEFETQSMVPPTGFSEEEGKALEEEEKYEDEEEKEEEEEEEEVEDEALWAWPSELSSPGPEASLPTEPAAQEESLSQAPARAVLQPGASPLPDGESEASRPPRVHGPPTETLPTPRERNLASPSPSTLVEAREVGEATGGPELSGVPRGESEETGSSEGAPSLLPATRAPEGTRELEAPSEDNSGRTAPAGTSVQAQPVLPTDSASRGGVAVVPASGNSAQGSTALSILLLFFPLQLWVT

SEQ ID NO: 8074 - protein, 786 aa, Homo sapiens
MTSIFHFAIIFMLILQIRIQLSEESEFLVDRSKNGLIHVPKDLSQKTTILNISQNYISELWTSDILSLSKLRILIISHNRIQYLDISVFKFNQELEYLDLSHNKLVKISCHPTVNLKHLDLSFNAFDALPICKEFGNMSQLKFLGLSTTHLEKSSVLPIAHLNISKVLLVLGETYGEKEDPEGLQDFNTESLHIVFPTNKEFHFILDVSVKTVANLELSNIKCVLEDNKCSYFLSILAKLQTNPKLSNLTLNNIETTWNSFIRILQLVWHTTVWYFSISNVKLQGQLDFRDFDYSGTSLKALSIHQVVSDVFGFPQSYIYEIFSNMNIKNFTVSGTRMVHMLCPSKISPFLHLDFSNNLLTDTVFENCGHLTELETLILQMNQLKELSKIAEMTTQMKSLQQLDISQNSVSYDEKKGDCSWTKSLLSLNMSSNILTDTIFRCLPPRIKVLDLHSNKIKSIPKQVVKLEALQELNVAFNSLTDLPGCGSFSSLSVLIIDHNSVSHPSADFFQSCQKMRSIKAGDNPFQCTCELGEFVKNIDQVSSEVLEGWPDSYKCDYPESYRGTLLKDFHMSELSCNITLLIVTIVATMLVLAVTVTSLCSYLDLPWYLRMVCQWTQTRRRARNIPLEELQRNLQFHAFISYSGHDSFWVKNELLPNLEKEGMQICLHERNFVPGKSIVENIITCIEKSYKSIFVLSPNFVQSEWCHYELYFAHHNLFHEGSNSLILILLEPIPQYSIPSSYHKLKSLMARRTYLEWPKEKSKRGLFWANLRAAINIKLTEQAKK

SEQ ID NO: 8075 - protein, 447 aa, Homo sapiens
MENKKKDKDKSDDRMARPSGRSGHNTRGTGSSSSGVLMVGPNFRVGKKIGCGNFGELRLGKNLYTNEYVAIKLEPMKSRAPQLHLEYRFYKQLGSGDGIPQVYYFGPCGKYNAMVLELLGPSLEDLFDLCDRTFSLKTVLMIAIQLISRMEYVHSKNLIYRDVKPENFLIGRPGNKTQQVIHIIDFGLAKEYIDPETKKHIPYREHKSLTGTARYMSINTHLGKEQSRRDDLEALGHMFMYFLRGSLPWQGLKADTLKERYQKIGDTKRATPIEVLCENFPEMATYLRYVRRLDFFEKPDYDYLRKLFTDLFDRKGYMFDYEYDWIGKQLPTPVGAVQQDPALSSNREAHQHRDKMQQSKNQSADHRAAWDSQQANPHHLRAHLAADRHGGSVQVVSSTNGELNTDDPTAGRSNAPITAPTEVEVMDETKCCCFFKRRKRKTIQRHK

SEQ ID NO: 8076 - protein, 602 aa, Homo sapiens
MSNELDFRSVRLLKNDPVNLQKFSYTSEDEAWKTYLENPLTAATKAMMRVNGDDDSVAALSFLYDYYMGPKEKRILSSSTGGRNDQGKRYYHGMEYETDLTPLESPTHLMKFLTENVSGTPEYPDLLKKNNLMSLEGALPTPGKAAPLPAGPSKLEAGSVDSYLLPTTDMYDNGSLNSLFESIHGVPPTQRWQPDSTFKDDPQESMLFPDILKTSPEPPCPEDYPSLKSDFEYTLGSPKAIHIKSGESPMAYLNKGQFYPVTLRTPAGGKGLALSSNKVKSVVMVVFDNEKVPVEQLRFWKHWHSRQPTAKQRVIDVADCKENFNTVEHIEEVAYNALSFVWNVNEEAKVFIGVNCLSTDFSSQKGVKGVPLNLQIDTYDCGLGTERLVHRAVCQIKIFCDKGAERKMRDDERKQFRRKVKCPDSSNSGVKGCLLSGFRGNETTYLRPETDLETPPVLFIPNVHFSSLQRSGGAAPSAGPSSSNRLPLKRTCSPFTEEFEPLPSKQAKEGDLQRVLLYVRRETEEVFDALMLKTPDLKGLRNAISEKYGFPEENIYKVYKKCKRGILVNMDNNIIQHYSNHVAFLLDMGELDGKIQIILKEL

SEQ ID NO: 8077 - protein, 1957 aa, Homo sapiens
MFRQFYLWTCLASGIILGSLFEICLGQYDDDCKLARGGPPATIVAIDEESRNGTILVDNMLIKGTAGGPDPTIELSLKDNVDYWVLMDPVKQMLFLNSTGRVLDRDPPMNIHSIVVQVQCINKKVGTIIYHEVRIVVRDRNDNSPTFKHESYYATVNELTPVGTTIFTGFSGDNGATDIDDGPNGQIEYVIQYNPDDPTSNDTFEIPLMLTGNIVLRKRLNYEDKTRYFVIIQANDRAQNLNERRTTTTTLTVDVLDGDDLGPMFLPCVLVPNTRDCRPLTYQAAIPELRTPEELNPIIVTPPIQAIDQDRNIQPPSDRPGILYSILVGTPEDYPRFFHMHPRTAELSLLEPVNRDFHQKFDLVIKAEQDNGHPLPAFAGLHIEILDENNQSPYFTMPSYQGYILESAPVGATISDSLNLTSPLRIVALDKDIEDTKDPELHLFLNDYTSVFTVTQTGITRYLTLLQPVDREEQQTYTFSITAFDGVQESEPVIVNIQVMDANDNTPTFPEISYDVYVYTDMRPGDSVIQLTAVDADEGSNGEITYEILVGAQGDFIINKTTGLITIAPGVEMIVGRTYALTVQAADNAPPAERRNSICTVYIEVLPPNNQSPPRFPQLMYSLEISEAMRVGAVLLNLQATDREGDSITYAIENGDPQRVFNLSETTGILTLGKALDRESTDRYILIITASDGRPDGTSTATVNIVVTDVNDNAPVFDPYLPRNLSVVEEEANAFVGQVKATDPDAGINGQVHYSLGNFNNLFRITSNGSIYTAVKLNREVRDYYELVVVATDGAVHPRHSTLTLAIKVLDIDDNSPVFTNSTYTVLVEENLPAGTTILQIEAKDVDLGANVSYRIRSPEVKHFFALHPFTGELSLLRSLDYEAFPDQEASITFLVEAFDIYGTMPPGIATVTVIVKDMNDYPPVFSKRIYKGMVAPDAVKGTPITTVYAEDADPPGLPASRVRYRVDDVQFPYPASIFEVEEDSGRVITRVNLNEEPTTIFKLVVVAFDDGEPVMSSSATVKILVLHPGEIPRFTQEEYRPPPVSELATKGTMVGVISAAAINQSIVYSIVSGNEEDTFGINNITGVIYVNGPLDYETRTSYVLRVQADSLEVVLANLRVPSKSNTAKVYIEIQDENNHPPVFQKKFYIGGVSEDARMFTSVLRVKATDKDTGNYSVMAYRLIIPPIKEGKEGFVVETYTGLIKTAMLFHNMRRSYFKFQVIATDDYGKGLSGKADVLVSVVNQLDMQVIVSNVPPTLVEKKIEDLTEILDRYVQEQIPGAKVVVESIGARRHGDAFSLEDYTKCDLTVYAIDPQTNRAIDRNELFKFLDGKLLDINKDFQPYYGEGGRILEIRTPEAVTSIKKRGESLGYTEGALLALAFIIILCCIPAILVVLVSYRQFKVRQAECTKTARIQAALPAAKPAVPAPAPVAAPPPPPPPPPGAHLYEELGDSSMHNLFLLYHFQQSRGNNSVSEDRKHQQVVMPFSSNTIEAHKSAHVDGSLKSNKLKSARKFTFLSDEDDLSAHNPLYKENISQVSTNSDISQRTDFVDPFSPKIQAKSKSLRGPREKIQRLWSQSVSLPRRLMRKVPNRPEIIDLQQWQGTRQKAENENTGICTNKRGSSNPLLTTEEANLTEKEEIRQGETLMIEGTEQLKSLSSDSSFCFPRPHFSFSTLPTVSRTVELKSEPNVISSPAECSLELSPSRPCVLHSSLSRRETPICMLPIETERNIFENFAHPPNISPSACPLPPPPPISPPSPPPAPAPLAPPPDISPFSLFCPPPSPPSIPLPLPPPTFFPLSVSTSGPPTPPLLPPFPTPLPPPPPSIPCPPPPSASFLSTECVCITGVKCTTNLMPAEKIKSSMTQLSTTTVCKTDPQREPKGILRHVKNLAELEKSVANMYSQIEKNYLRTNVSELQTMCPSEVTNMEITSEQNKGSLNNIVEGTEKQSHSQSTSL

SEQ ID NO: 8078 - protein, 319 aa, Homo sapiens
MVGEMETKEKPKPTPDYLMQLMNDKKLMSSLPNFCGIFNHLERLLDEEISRVRKDMYNDTLNGSTEKRSAELPDAVGPIVQLQEKLYVPVKEYPDFNFVGRILGPRGLTAKQLEAETGCKIMVRGKGSMRDKKKEEQNRGKPNWEHLNEDLHVLITVEDAQNRAEIKLKRAVEEVKKLLVPAAEGEDSLKKMQLMELAILNGTYRDANIKSPALAFSLAATAQAAPRIITGPAPVLPPAALRTPTPAGPTIMPLIRQIQTAVMPNGTPHPTAAIVPPGPEAGLIYTPYEYPYTLAPATSILEYPIEPSGVLGMAFPTKG

SEQ ID NO: 8079 - protein, 1101 aa, Homo sapiens
MATPSKKTSTPSPQPSKRALPRDPSSEVPSKRKNSAPQLPLLQSSGPFVEGSIVRISMENFLTYDICEVSPGPHLNMIVGANGTGKSSIVCAICLGLAGKPAFMGRADKVGFFVKRGCSRGMVEIELFRASGNLVITREIDVAKNQSFWFINKKSTTQKIVEEKVAALNIQVGNLCQFLPQDKVGEFAKLSKIELLEATEKSIGPPEMHKYHCELKNLREKEKQLETSCKEKTEYLQKMVQRNERYKQDVERFYERKRHLDLIEMLEAKRPWVEYENVRQEYEEVKLVRDRVKEEVRKLKEGQIPVTCRIEEMENERHNLEARIKEKATDIKEASQKCKQKQDVIERKDKHIEELQQALIVKQNEELDRQRRIGNTRKMIEDLQNELKTTENCENLQPQIDAITNDLRRIQDEKALCEGEIIDKRRERETLEKEKKSVDDHIVRFDNLMNQKEDKLRQRFRDTYDAVLWLRNNRDKFKQRVCEPIMLTINMKDNKNAKYIENHIPSNDLRAFVFESQEDMEVFLKEVRDNKKLRVNAVIAPKSSYADKAPSRSLNELKQYGFFSYLRELFDAPDPVMSYLCCQYHIHEVPVGTEKTRERIERVIQETRLKQIYTAEEKYVVKTSFYSNKVISSNTSLKVAQFLTVTVDLEQRRHLEEQLKEIHRKLQAVDSGLIALRETSKHLEHKDNELRQKKKELLERKTKKRQLEQKISSKLGSLKLMEQDTCNLEEEERKASTKIKEINVQKAKLVTELTNLIKICTSLHIQKVDLILQNTTVISEKNKLESDYMAASSQLRLTEQHFIELDENRQRLLQKCKELMKRARQVCNLGAEQTLPQEYQTQVPTIPNGHNSSLPMVFQDLPNTLDEIDALLTEERSRASCFTGLNPTIVQEYTKREEEIEQLTEELKGKKVELDQYRENISQVKERWLNPLKELVEKINEKFSNFFSSMQCAGEVDLHTENEEDYDKYGIRIRVKFRSSTQLHELTPHHQSGGERSVSTMLYLMALQELNRCPFRVVDEINQGMDPINERRVFEMVVNTACKENTSQYFFITPKLLQNLPYSEKMTVLFVYNGPHMLEPNTWNLKAFQRRRRRITFTQPS

SEQ ID NO: 8080 - protein, 668 aa, Homo sapiens
MMPSPSDSSRSLTSRPSTRGLTHLRLHRPWLQALLTLGLVQVLLGILVVTFSMVASSVTTTESIKRSCPSWAGFSLAFSGVVGIVSWKRPFTLVISFFSLLSVLCVMLSMAGSVLSCKNAQLARDFQQCSLEGKVCVCCPSVPLLRPCPESGQELKVAPNSTCDEARGALKNLLFSVCGLTICAAIICTLSAIVCCIQIFSLDLVHTLAPERSVSGPLGPLGCTSPPPAPLLHTMLDLEEFVPPVPPPPYYPPEYTCSSETDAQSITYNGSMDSPVPLYPTDCPPSYEAVMGLRGDSQATLFDPQLHDGSCICERVASIVDVSMDSGSLVLSAIGDLPGGSSPSEDSCLLELQGSVRSVDYVLFRSIQRSRAGYCLSLDCGLRGPFEESPLPRRPPRAARSYSCSAPEAPPPLGAPTAARSCHRLEGWPPWVGPCFPELRRRVPRGGGRPAAAPPTRAPTRRFSDSSGSLTPPGHRPPHPASPPPLLLPRSHSDPGITTSSDTADFRDLYTKVLEEEAASVSSADTGLCSEACLFRLARCPSPKLLRARSAEKRRPVPTFQKVPLPSGPAPAHSLGDLKGSWPGRGLVTRFLQISRKAPDPSGTGAHGHKQVPRSLWGRPGRESLHLRSCGDLSSSSSLRRLLSGRRLERGTRPHSLSLNGGSRETGL

SEQ ID NO: 8081 - protein, 626 aa, Homo sapiens
MAARPAATLAWSLLLLSSALLREGCRARFVAERDSEDDGEEPVVFPESPLQSPTVLVAVLARNAAHTLPHFLGCLERLDYPKSRMAIWAATDHNVDNTTEIFREWLKNVQRLYHYVEWRPMDEPESYPDEIGPKHWPTSRFAHVMKLRQAALRTAREKWSDYILFIDVDNFLTNPQTLNLLIAENKTIVAPMLESRGLYSNFWCGITPKGFYKRTPDYVQIREWKRTGCFPVPMVHSTFLIDLRKEASDKLTFYPPHQDYTWTFDDIIVFAFSSRQAGIQMYLCNREHYGYLPIPLKPHQTLQEDIENLIHVQIEAMIDRPPMEPSQYVSVVPKYPDKMGFDEIFMINLKRRKDRRDRMLRTLYEQEIEVKIVEAVDGKALNTSQLKALNIEMLPGYRDPYSSRPLTRGEIGCFLSHYSVWKEVIDRELEKTLVIEDDVRFEHQFKKKLMKLMDNIDQAQLDWELIYIGRKRMQVKEPEKAVPNVANLVEADYSYWTLGYVISLEGAQKLVGANPFGKMLPVDEFLPVMYNKHPVAEYKEYYESRDLKAFSAEPLLIYPTHYTGQPGYLSDTETSTIWDNETVATDWDRTHAWKSRKQSRIYSNAKNTEALPPPTSLDTVPSRDEL

SEQ ID NO: 8082 - protein, 2017 aa, Homo sapiens
MTAPVTSQKSWIKGVFDKRECSTIIPSSKNPHRCTPVCQVCQNLIRCYCGRLIGDHAGIDYSWTISAAKGKESEQWSVEKHTTKSPTDTFGTINFQDGEHTHHAKYIRTSYDTKLDHLLHLMLKEWKMELPKLVISVHGGIQNFTMPSKFKEIFSQGLVKAAETTGAWIITEGINTGVSKHVGDALKSHSSHSLRKIWTVGIPPWGVIENQRDLIGKDVVCLYQTLDNPLSKLTTLNSMHSHFILSDDGTVGKYGNEMKLRRNLEKYLSLQKIHCRSRQGVPVVGLVVEGGPNVILSVWETVKDKDPVVVCEGTGRAADLLAFTHKHLADEGMLRPQVKEEIICMIQNTFNFSLKQSKHLFQILMECMVHRDCITIFDADSEEQQDLDLAILTALLKGTNLSASEQLNLAMAWDRVDIAKKHILIYEQHWKPDALEQAMSDALVMDRVDFVKLLIEYGVNLHRFLTIPRLEELYNTKQGPTNTLLHHLVQDVKQHTLLSGYRITLIDIGLVVEYLIGRAYRSNYTRKHFRALYNNLYRKYKHQRHSSGNRNESAESTLHSQFIRTAQPYKFKEKSIVLHKSRKKSKEQNVSDDPESTGFLYPYNDLLVWAVLMKRQKMAMFFWQHGEEATVKAVIACILYRAMAHEAKESHMVDDASEELKNYSKQFGQLALDLLEKAFKQNERMAMTLLTYELRNWSNSTCLKLAVSGGLRPFVSHTCTQMLLTDMWMGRLKMRKNSWLKIIISIILPPTILTLEFKSKAEMSHVPQSQDFQFMWYYSDQNASSSKESASVKEYDLERGHDEKLDENQHFGLESGHQHLPWTRKVYEFYSAPIVKFWFYTMAYLAFLMLFTYTVLVEMQPQPSVQEWLVSIYIFTNAIEVVREICISEPGKFTQKVKVWISEYWNLTETVAIGLFSAGFVLRWGDPPFHTAGRLIYCIDIIFWFSRLLDFFAVNQHAGPYVTMIAKMTANMFYIVIIMAIVLLSFGVARKAILSPKEPPSWSLARDIVFEPYWMIYGEVYAGEIDVCSSQPSCPPGSFLTPFLQAVYLFVQYIIMVNLLIAFFNNVYLDMESISNNLWKYNRYRYIMTYHEKPWLPPPLILLSHVGLLLRRLCCHRAPHDQEEGDVGLKLYLSKEDLKKLHDFEEQCVEKYFHEKMEDVNCSCEERIRVTSERVTEMYFQLKEMNEKVSFIKDSLLSLDSQVGHLQDLSALTVDTLKVLSAVDTLQEDEALLAKRKHSTCKKLPHSWSNVICAEVLGSMEIAGEKKYQYYSMPSSLLRSLAGGRHPPRVQRGALLEITNSKREATNVRNDQERQETQSSIVVSGVSPNRQAHSKYGQFLLVPSNLKRVPFSAETVLPLSRPSVPDVLATEQDIQTEVLVHLTGQTPVVSDWASVDEPKEKHEPIAHLLDGQDKAEQVLPTLSCTPEPMTMSSPLSQAKIMQTGGGYVNWAFSEGDETGVFSIKKKWQTCLPSTCDSDSSRSEQHQKQAQDSSLSDNSTRSAQSSECSEVGPWLQPNTSFWINPLRRYRPFARSHSFRFHKEEKLMKICKIKNLSGSSEIGQGAWVKAKMLTKDRRLSKKKKNTQGLQVPIITVNACSQSDQLNPEPGENSISEEEYSKNWFTVSKFSHTGVEPYIHQKMKTKEIGQCAIQISDYLKQSQEDLSKNSLWNSRSTNLNRNSLLKSSIGVDKISASLKSPQEPHHHYSAIERNNLMRLSQTIPFTPVQLFAGEEITVYRLEESSPLNLDKSMSSWSQRGRAAMIQVLSREEMDGGLRKAMRVVSTWSEDDILKPGQVFIVKSFLPEVVRTWHKIFQESTVLHLCLREIQQQRAAQKLIYTFNQVKPQTIPYTPRFLEVFLIYCHSANQWLTIEKYMTGEFRKYNNNNGDEITPTNTLEELMLAFSHWTYEYTRGELLVLDLQGVGENLTDPSVIKPEVKQSRGMVFGPANLGEDAIRNFIAKHHCNSCCRKLKLPDLKRNDYSPERINSTFGLEIKIESAEEPPARETGRNSPEDDMQL

SEQ ID NO: 8083 - protein, 2279 aa, Homo sapiens
MYRSSARSSVSSHRPKDDGGGGPRSGRSSGSSSGPARRSSPPPPPSGSSSRTPARRPRSPSGHRGRRASPSPPRGRRVSPSPPRARRGSPSPPRGRRLFPPGPAGFRGSSRGESRADYARDGRGDHPGDSGSRRRSPGLCSDSLEKSLRITVGNDHFCVSTPERRRLSDRLGSPVDNLEDMDRDDLTDDSVFTRSSQCSRGLERYISQEEGPLSPFLGQLDEDYRTKETFLHRSDYSPHISCHDELLRGTERNREKLKGYSIRSEERSREAKRPRYDDTVKINSMGGDHPSFTSGTRNYRQRRRSPSPRFLDPEFRELDLARRKREEEEERSRSLSQELVGVDGGGTGCSIPGLSGVLTASEPGYSLHRPEEVSVMPKKSILKKRIEVDIMEPSMQLESFSSSTSSSQDHPLYSGHPSLPLSGAIAAFASEIENKGTMVETALKEPQGNLYQWGPLPGIPKDNSPLREKFGSFLCHKDNLDLKAEGPERHTDFLLPHERASQDGSGFSRILSMLADSTSTQEKRRRSFPDIEDEEKFLYGDEEEDLKAESVPKPLGSSESEVMRQKASSLPSSAPAVKLESLEETNPEYAKIHDLLKTIGLDIGVAEISQLAARTQERLHGKKPSLRSSADRRSSVDRYFSADHCSSVDHRFSADRCSSVDHCFSADRRSSDPHRLESREAHHSNTHSPEVSHPHPPSPVDPYLLTKNSPPFLKSDHPVGHISGPEVVGSGFQSSVAVRCMLPSAPSAPIRLPHTAALSQFHMPRASQFAAARIPPNYQGPAIPPASFDAYRHYMAYAASRWPMYPTSQPSNHPVPEPHRIMPITKQATRSRPNLRVIPTVTPDKPKQKESLRGSIPAAQVPVQVSIPSLIRYNPEKISDEKNRASQKQKVIEEREKLKNDREARQKKMYYLRTELERLHKQQGEMLRKKRREKDGHKDPLLVEVSRLQDNIMKDIAELRQEAEEAEKKQSELDKVAQILGINIFDKSQKSLSDSREPTEKPGKAEKSKSPEKVSSFSNSSSNKESKVNNEKFRTKSPKPAESPQSATKQLDQPTAAYEYYDAGNHWCKDCNTICGTMFDFFTHMHNKKHTQTLDPYNRPWASKTQSEAKQDAIKRTDKITVPAKGSEFLVPISGFYCQLCEEFLGDPISGEQHVKGHQHNEKYKKYVDENPLYEERRNLDRQAGLAVVLETERRRQSELKRKLSEKPKEEKKEKKAKAVKEVKEDDKVSEKLEDQLSEGRNSPEKAENKRNTGIKLQLKEEVKKESPTSSSFGKFSWKKPEKEEEKSSLVTPSISKEEILESSKDKEDGKTEAGKAKPIKIKLSGKTVVAHTSPWMPVVTTSTQTKIRPNLPIPSTVLRKSCSATMSKPAPLNTFLSIKSSGTTAKPLPVVKESSADLLLPPDIISKAFGGEEVILKGSPEEKVVLAEKSEPSHLPEQILPPPPPPPPPPPPPPPVIPHPAAPSAAQANAILAPVKSNPVVSQTLSPGFVGPNILNPVLPVAIMASAQPAAIPSDETAPGVSESDRDQTLFSVLVRPPPPLSSVFSEQAKKLEKRNSCLATANAKDLYDIFYSSGGKGAPETKGAPETKLSGGPLANGENSNLSRTKSSDTSSTSPLNSSASQEELHQDEGLVAAPIVSNSEKPIAKTLVALGKWSVVEHVGPKSTGSTYGFLQPLTRLCQSRPYETITPKTDTLAIWTSSSFQSDTSRDISPEKSELDLGEPGPPGVEPPPQLLDIQCKESQKLVEIHLRESVNQDKESQELRKSEDCRESEIETNTELKERVKELSEGIVDEGVSTSIGPHSIDDSNLNHGNRYMWEGEVKQPNLLMIDKEAEQSNKLMTGSETPSKVVIKLSPQACSFTKAKLDSFLSEARSLLNPQDTPVKISAPELLLHSPARSAMCLTGSPQEQGVSVVSEEGLENSAPESASRTSRYRSLKLKRERSKDFQVKKIYELAVWDENKKRPETWESPEKPKTEALELQDVHPELTVTIESKALEDFEATDLKVEELTALGNLGDMPVDFCTTRVSPAHRSPTVLCQKVCEENSVSPIGCNSSDPADFEPIPSFSGFPLDSPKTLVLDFETEGERNSPNPRSVRIPSPNILKTGLTENVDRGLGGLEGTHQALDLLAGGMMPEEVKESSQLDKQESLGLELKTINSAGLGPSPCLPDLVDFVTRTSGVQKDKLCSPLSEPGDPSKCSSLELGPLQLEISNASTTEVAILQVDDDSGDPLNLVKAPVSRSPPREQVIEDNMVPQGMPEQETTVGAIQDHTESSVHN

SEQ ID NO: 8084 - protein, 725 aa, Homo sapiens
MVMKASVDDDDSGWELSMPEKMEKSNTNWVDITQDFEEACRELKLGELLHDKLFGLFEAMSAIEMMDPKMDAGMIGNQVNRKVLNFEQAIKDGTIKIKDLTLPELIGIMDTCFCCLITWLEGHSLAQTVFTCLYIHNPDFIEDPAMKAFALGILKICDIAREKVNKAAVFEEEDFQSMTYGFKMANSVTDLRVTGMLKDVEDDMQRRVKSTRSRQGEERDPEVELEHQQCLAVFSRVKFTRVLLTVLIAFTKKETSAVAEAQKLMVQAADLLSAIHNSLHHGIQAQNDTTKGDHPIMMGFEPLVNQRLLPPTFPRYAKIIKREEMVNYFARLIDRIKTVCEVVNLTNLHCILDFFCEFSEQSPCVLSRSLLQTTFLVDNKKVFGTHLMQDMVKDALRSFVSPPVLSPKCYLYNNHQAKDCIDSFVTHCVRPFCSLIQIHGHNRARQRDKLGHILEEFATLQDEAEKVDAALHTMLLKQEPQRQHLACLGTWVLYHNLRIMIQYLLSGFELELYSMHEYYYIYWYLSEFLYAWLMSTLSRADGSQMAEERIMEEQQKGRSSKKTKKKKKVRPLSREITMSQAYQNMCAGMFKTMVAFDMDGKVRKPKFELDSEQVRYEHRFAPFNSVMTPPPVHYLQFKEMSDLNKYSPPPQSPELYVAASKHFQQAKMILENIPNPDHEVNRILKVAKPNFVVMKLLAGGHKKESKVPPEFDFSAHKYFPVVKLV

SEQ ID NO: 8085 - protein, 1766 aa, Homo sapiens
MGGKNKQRTKGNLRPSNSGRAAELLAKEQGTVPGFIGFGTSQSDLGYVPAIQGAEEIDSLVDSDFRMVLRKLSKKDVTTKLKAMQEFGTMCTERDTETVKGVLPYWPRIFCKISLDHDRRVREATQQAFEKLILKVKKQLAPYLKSLMGYWLMAQCDTYTPAAFAAKDAFEAAFPPSKQPEAIAFCKDEITSVLQDHLIKETPDTLSDPQTVPEEEREAKFYRVVTCSLLALKRLLCLLPDNELDSLEEKFKSLLSQNKFWKYGKHSVPQIRSAYFELVSALCQRIPQLMKEEASKVSPSVLLSIDDSDPIVCPALWEAVLYTLTTIEDCWLHVNAKKSVFPKLSTVIREGGRGLATVIYPYLLPFISKLPQSITNPKLDFFKNFLTSLVAGLSTERTKTSSLESSAVISAFFECLRFIMQQNLGEEEIEQMLVNDQLIPFIDAVLKDPGLQHGQLFNHLAETLSSWEAKADTEKDEKTAHNLENVLIHFWERLSEICVAKISEPEADVESVLGVSNLLQVLQKPKSSLKSSKKKNGKVRFADEILESNKENEKCVSSEGEKIEGWELTTEPSLTHNSSGLLSPLRKKPLEDLVCKLADISINYVNERKSEQHLRFLSTLLDSFSSSRVFKMLLGDEKQSIVQAKPLEIAKLVQKNPAVQFLYQKLIGWLNEDQRKDFGFLVDILYSALRCCDNDMERKKVLDDLTKVDLKWNSLLKIIEKACPSSDKHALVTPWLKGDILGEKLVNLADCLCNEDLESRVSSESHFSERWTLLSLVLSQHVKNDYLIGDVYVERIIVRLHETLFKTKKLSEAESSDSSVSFICDVAYNYFSSAKGCLLMPSSEDLLLTLFQLCAQSKEKTHLPDFLICKLKNTWLSGVNLLVHQTDSSYKESTFLHLSALWLKNQVQASSLDINSLQVLLSAVDDLLNTLLESEDSYLMGVYIGSVMPNDSEWEKMRQSLPMQWLHRPLLEGRLSLNYECFKTDFKEQDIKTLPSHLCTSALLSKMVLIALRKETVLENNELEKIIAELLYSLQWCEELDNPPIFLIGFCEILQKMNITYDNLRVLGNTSGLLQLLFNRSREHGTLWSLIIAKLILSRSISSDEVKPHYKRKESFFPLTEGNLHTIQSLCPFLSKEEKKEFSAQCIPALLGWTKKDLCSTNGGFGHLAIFNSCLQTKSIDDGELLHGILKIIISWKKEHEDIFLFSCNLSEASPEVLGVNIEIIRFLSLFLKYCSSPLAESEWDFIMCSMLAWLETTSENQALYSIPLVQLFACVSCDLACDLSAFFDSTTLDTIGNLPVNLISEWKEFFSQGIHSLLLPILVTVTGENKDVSETSFQNAMLKPMCETLTYISKEQLLSHKLPARLVADQKTNLPEYLQTLLNTLAPLLLFRARPVQIAVYHMLYKLMPELPQYDQDNLKSYGDEEEEPALSPPAALMSLLSIQEDLLENVLGCIPVGQIVTIKPLSEDFCYVLGYLLTWKLILTFFKAASSQLRALYSMYLRKTKSLNKLLYHLFRLMPENPTYAETAVEVPNKDPKTFFTEELQLSIRETTMLPYHIPHLACSVYHMTLKDLPAMVRLWWNSSEKRVFNIVDRFTSKYVSSVLSFQEISSVQTSTQLFNGMTVKARATTREVMATYTIEDIVIELIIQLPSNYPLGSIIVESGKRVGVAVQQWRNWMLQLSTYLTHQNGSIMEGLALWKNNVDKRFEGVEDCMICFSVIHGFNYSLPKKACRTCKKKFHSACLYKWFTSSNKSTCPLCRETFF

SEQ ID NO: 8086 - protein, 2170 aa, Homo sapiens
MKDSEGPQRPPLCFLSTLLSQKVPEKSDAVLRCIISGQPKPEVTWYKNGQAIDGSGIISNYEFFENQYIHVLHLSCCTKNDAAVYQISAKNSFGMICCSASVEVECSSENPQLSPNLEDDRDRGWKHETGTHEEERANQIDEKEHPYKEEESISPGTPRSADSSPSKSNHSLSLQSLGNLDISVSSSENPLGVKGTRHTGEAYDPSNTEEIANGLLFLNSSHIYEKQDRCCHKTVHSMASKFTDGDLNNDGPHDEGLRSSQQNPKVQKYISFSLPLSEATAHIYPGDSAVANKQPSPQLSSEDSDSDYELCPEITLTYTEEFSDDDLEYLECSDVMTDYSNAVWQRNLLGTEHVFLLESDDEEMEFGEHCLGGCEHFLSGMGCGSRVSGDAGPMVATAGFCGHHSQPQEVGVRSSRVSKHGPSSPQTGMTLILGPHQDGTSSVTEQGRYKLPTAPEAAENDYPGIQGETRDSHQAREEFASDNLLNMDESVRETEMKLLSGESENSGMSQCWETAADKRVGGKDLWSKRGSRKSARVRQPGMKGNPKKPNANLRESTTEGTLHLCSAKESAEPPLTQSDKRETSHTTAAATGRSSHADARECAISTQAEQEAKTLQTSTDSVSKEGNTNCKGEGMQVNTLFETSQVPDWSDPPQVQVQETVRETISCSQMPAFSEPAGEESPFTGTTTISFSNLGGVHKENASLAQHSEVKPCTCGPQHEEKQDRDGNIPDNFREDLKYEQSISEANDETMSPGVFSRHLPKDARADFREPVAVSVASPEPTDTALTLENVCDEPRDREAVCAMECFEAGDQGTCFDTIDSLVGRPVDKYSPQEICSVDTELAEGQNKVSDLCSSNDKTLEVFFQTQVSETSVSTCKSSKDGNSVMSPLFTSTFTLNISHTASEGATGENLAKVENSTYPLASTVHAGQEQPSPSNSGGLDETQLLSSENNPLVQFKEGGDKSPSPSAADTTATPASYSSIVSFPWEKPTTLTANNECFQATRETEDTSTVTIATEVHPAKYLAVSIPEDKHAGGTEERFPRASHEKVSQFPSQVQLDHILSGATIKSTKELLCRAPSVPGVPHHVLQLPEGEGFCSNSPLQVDNLSGDKSQTVDRADFRSYEENFQERGSETKQGVQQQSLSQQGSLSAPDFQQSLPTTSAAQEERNLVPTAHSPASSREGAGQRSGWGTRVSVVAETAGEEDSQALSNVPSLSDILLEESKEYRPGNWEAGNKLKIITLEASASEIWPPRQLTNSESKASDGGLIIPDKVWAVPDSLKADAVVPELAPSEIAALAHSPEDAESALADSRESHKGEEPTISVHWRSLSSRGFSQPRLLESSVDPVDEKELSVTDSLSAASETGGKENVNNVSQDQEEKQLKMDHTAFFKKFLTCPKILESSVDPIDEISVIEYTRAGKPEPSETTPQGAREGGQSNDGNMGHEAEIQPAILQVPCLQGTILSENRISRSQEGSMKQEAEQIQPEEAKTAIWQVLQPSEGGERIPSGCSIGQIQESSDGSLGEAEQSKKDKAELISPTSPLSSCLPIMTHASLGVDTHNSTGQIHDVPENDIVEPRKRQYVFPVSQKRGTIENERGKPLPSSPDLTRFPCTSSPEGNVTDFLISHKMEEPKIEVLQIGETKPPSSSSSSAKTLAFISGERELEKAPKLLQDPCQKGTLGCAKKSREREKSLEARAGKSPGTLTAVTGSEEVKRKPEAPGSGHLAEGVKKKILSRVAALRLKLEEKENIRKNSAFLKKMPKLETSLSHTEEKQDPKKPSCKREGRAPVLLKKIQAEMFPEHSGNVKLSCQFAEIHEDSTICWTKDSKSIAQVQRSAGDNSTVSFAIVQASPKDQGLYYCCIKNSYGKVTAEFNLTAEVLKQLSSRQDTKGCEEIEFSQLIFKEDFLHDSYFGGRLRGQIATEELHFGEGVHRKAFRSTVMHGLMPVFKPGHACVLKVHNAIAYGTRNNDELIQRNYKLAAQECYVQNTARYYAKIYAAEAQPLEGFGEVPEIIPIFLIHRPENNIPYATVEEELIGEFVKYSIRDGKEINFLRRESEAGQKCCTFQHWVYQKTSGCLLVTDMQGVGMKLTDVGIATLAKGYKGFKGNCSMTFIDQFKALHQCNKYCKMLGLKSLQNNNQKQKQPSIGKSKVQTNSMTIKKAGPETPGEKKT

SEQ ID NO: 8087 - protein, 521 aa, Homo sapiens
MAAHLVKRCTCLLREAARQAPAMAPVGRLRLAWVAHKTLTSSATSPISHLPGSLMEPVEKERASTPYIEKQVDHLIKKATRPEELLELLGGSHDLDSNQAAMVLIRLSHLLSEKPEDKGLLIQDAHFHQLLCLLNSQIASVWHGTLSKLLGSLYALGIPKASKELQSVEQEVRWRMRKLKYKHLAFLAESCATLSQEQHSQELLAELLTHLERRWTEIEDSHTLVTVMMKVGHLSEPLMNRLEDKHVLNRAQDITLPHLCSVLLAFARLNFHPDQEDQFFSLVHEKLGSELPGLEPALQVDLVWALCVLQQAREAELQAVLHPEFHIQFLGGKSQKDQNTFQKLLHINATALLEYPEYSGPLLPASAVAPGPSALDRKVTPLQKELQETLKGLLGSADKGSLEVATQYGWVLDAEVLLDSDGEFLPVRDFVAPHLAQPTGSQSPPPGSKRLAFLRWEFPNFNSRSKDLLGRFVLARRHIVAAGFLIVDVPFYEWLELKSEWQKGAYLKDKMRKAVAEELAK

SEQ ID NO: 8088 - protein, 971 aa, Homo sapiens
MLRRPAPALAPAARLLLAGLLCGGGVWAARVNKHKPWLEPTYHGIVTENDNTVLLDPPLIALDKDAPLRFAGEICGFKIHGQNVPFDAVVVDKSTGEGVIRSKEKLDCELQKDYSFTIQAYDCGKGPDGTNVKKSHKATVHIQVNDVNEYAPVFKEKSYKATVIEGKQYDSILRVEAVDADCSPQFSQICSYEIITPDVPFTVDKDGYIKNTEKLNYGKEHQYKLTVTAYDCGKKRATEDVLVKISIKPTCTPGWQGWNNRIEYEPGTGALAVFPNIHLETCDEPVASVQATVELETSHIGKGCDRDTYSEKSLHRLCGAAAGTAELLPSPSGSLNWTMGLPTDNGHDSDQVFEFNGTQAVRIPDGVVSVSPKEPFTISVWMRHGPFGRKKETILCSSDKTDMNRHHYSLYVHGCRLIFLFRQDPSEEKKYRPAEFHWKLNQVCDEEWHHYVLNVEFPSVTLYVDGTSHEPFSVTEDYPLHPSKIETQLVVGACWQEFSGVENDNETEPVTVASAGGDLHMTQFFRGNLAGLTLRSGKLADKKVIDCLYTCKEGLDLQVLEDSGRGVQIQAHPSQLVLTLEGEDLGELDKAMQHISYLNSRQFPTPGIRRLKITSTIKCFNEATCISVPPVDGYVMVLQPEEPKISLSGVHHFARAASEFESSEGVFLFPELRIISTITREVEPEGDGAEDPTVQESLVSEEIVHDLDTCEVTVEGEELNHEQESLEVDMARLQQKGIEVSSSELGMTFTGVDTMASYEEVLHLLRYRNWHARSLLDRKFKLICSELNGRYISNEFKVEVNVIHTANPMEHANHMAAQPQFVHPEHRSFVDLSGHNLANPHPFAVVPSTATVVIVVCVSFLVFMIILGVFRIRAAHRRTMRDQDTGKENEMDWDDSALTITVNPMETYEDQHSSEEEEEEEEEEESEDGEEEDDITSAESESSEEEEGEQGDPQNATRQQQLEWDDSTLSY

SEQ ID NO: 8089 - protein, 500 aa, Homo sapiens
MATAASNPYLPGNSLLAAGSIVHSDAAGAGGGGGGGGGGGGGGAGGGGGGMQPGSAAVTSGAYRGDPSSVKMVQSDFMQGAMAASNGGHMLSHAHQWVTALPHAAAAAAAAAAAAVEASSPWSGSAVGMAGSPQQPPQPPPPPPQGPDVKGGAGRDDLHAGTALHHRGPPHLGPPPPPPHQGHPGGWGAAAAAAAAAAAAAAAAHLPSMAGGQQPPPQSLLYSQPGGFTVNGMLSAPPGPGGGGGGAGGGAQSLVHPGLVRGDTPELAEHHHHHHHHAHPHPPHPHHAQGPPHHGGGGGGAGPGLNSHDPHSDEDTPTSDDLEQFAKQFKQRRIKLGFTQADVGLALGTLYGNVFSQTTICRFEALQLSFKNMCKLKPLLNKWLEEADSSTGSPTSIDKIAAQGRKRKKRTSIEVSVKGALESHFLKCPKPSAQEITNLADSLQLEKEVVRVWFCNRRQKEKRMTPPGIQQQTPDDVYSQVGTVSADTPPPHHGLQTSVQ

SEQ ID NO: 8090 - protein, 572 aa, Homo sapiens
MSAVSQPQAAPSPLEKSPSTAILCNTCGNVCKGEVLRVQDKYFHIKCFVCKACGCDLAEGGFFVRQGEYICTLDYQRLYGTRCFSCDQFIEGEVVSALGKTYHPDCFVCAVCRLPFPPGDRVTFNGKECMCQKCSLPVSVGSSAHLSQGLRSCGGCGTEIKNGQALVALDKHWHLGCFKCKSCGKLLNAEYISKDGLPYCEADYHAKFGIRCDSCEKYITGRVLEAGEKHYHPSCALCVRCGQMFAEGEEMYLQGSSIWHPACRQAARTEDRNKETRTSSESIISVPASSTSGSPSRVIYAKLGGEILDYRDLAALPKSKAIYDIDRPDMISYSPYISHSAGDRQSYGEGDQDDRSYKQCRTSSPSSTGSVSLGRYTPTSRSPQHYSRPGSESGRSTPSLSVLSDSKPPPSTYQQAPRHFHVPDTGVKDNIYRKPPIYRQHAARRSDGEDGSLDQDNRKKSSWLMLKGDADTRTNSPDLDTQSLSHSSGTDRDPLQRMAGDSFHSQYKIYPYDSLIVTNRIRVKLPKDVDRTRLERHLSPEEFQEVFGMSIEEFDRLALWKRNDLKKKALLF

SEQ ID NO: 8091 - protein, 1336 aa, Homo sapiens
MTLDRPGEGATMLKTFTVLLFCIRMSLGMTSIVMDPQPELWIESNYPQAPWENITLWCRSPSRISSKFLLLKDKTQMTWIRPSHKTFQVSFLIGALTESNAGLYRCCYWKETGWSKPSKVLELEAPGQLPKPIFWIQAETPALPGCNVNILCHGWLQDLVFMLFKEGYAEPVDYQVPTGTMAIFSIDNLTPEDEGVYICRTHIQMLPTLWSEPSNPLKLVVAGLYPKPTLTAHPGPIMAPGESLNLRCQGPIYGMTFALMRVEDLEKSFYHKKTIKNEANFFFQSLKIQDTGHYLCFYYDASYRGSLLSDVLKIWVTDTFPKTWLLARPSAVVQMGQNVSLRCRGPVDGVGLALYKKGEDKPLQFLDATSIDDNTSFFLNNVTYSDTGIYSCHYLLTWKTSIRMPSHNTVELMVVDKPPKPSLSAWPSTVFKLGKAITLQCRVSHPVLEFSLEWEERETFQKFSVNGDFIISNVDGKGTGTYSCSYRVETHPNIWSHRSEPLKLMGPAGYLTWNYVLNEAIRLSLIMQLVALLLVVLWIRWKCRRLRIREAWLLGTAQGVTMLFIVTALLCCGLCNGVLIEETEIVMPTPKPELWAETNFPLAPWKNLTLWCRSPSGSTKEFVLLKDGTGWIATRPASEQVRAAFPLGALTQSHTGSYHCHSWEEMAVSEPSEALELVGTDILPKPVISASPTIRGQELQLRCKGWLAGMGFALYKEGEQEPVQQLGAVGREAFFTIQRMEDKDEGNYSCRTHTEKRPFKWSEPSEPLELVIKEMYPKPFFKTWASPVVTPGARVTFNCSTPHQHMSFILYKDGSEIASSDRSWASPGASAAHFLIISVGIGDGGNYSCRYYDFSIWSEPSDPVELVVTEFYPKPTLLAQPGPVVFPGKSVILRCQGTFQGMRFALLQEGAHVPLQFRSVSGNSADFLLHTVGAEDSGNYSCIYYETTMSNRGSYLSMPLMIWVTDTFPKPWLFAEPSSVVPMGQNVTLWCRGPVHGVGYILHKEGEATSMQLWGSTSNDGAFPITNISGTSMGRYSCCYHPDWTSSIKIQPSNTLELLVTGLLPKPSLLAQPGPMVAPGENMTLQCQGELPDSTFVLLKEGAQEPLEQQRPSGYRADFWMPAVRGEDSGIYSCVYYLDSTPFAASNHSDSLEIWVTDKPPKPSLSAWPSTMFKLGKDITLQCRGPLPGVEFVLEHDGEEAPQQFSEDGDFVINNVEGKGIGNYSCSYRLQAYPDIWSEPSDPLELVGAAGPVAQECTVGNIVRSSLIVVVVVALGVVLAIEWKKWPRLRTRGSETDGRDQTIALEECNQEGEPGTPANSPSSTSQRISVELPVPI

SEQ ID NO: 8092 - protein, 1173 aa, Homo sapiens
MSRGSIEIPLRDTDEVIELDFDQLPEGDEVISILKQEHTQLHIWIALALEYYKQGKTEEFVKLLEAARIDGNLDYRDHEKDQMTCLDTLAAYYVQQARKEKNKDNKKDLITQATLLYTMADKIIMYDQNHLLGRACFCLLEGDKMDQADAQFHFVLNQSPNNIPALLGKACISFNKKDYRGALAYYKKALRTNPGCPAEVRLGMGHCFVKLNKLEKARLAFSRALELNSKCVGALVGLAVLELNNKEADSIKNGVQLLSRAYTIDPSNPMVLNHLANHFFFKKDYSKVQHLALHAFHNTEVEAMQAESCYQLARSFHVQEDYDQAFQYYYQATQFASSSFVLPFFGLGQMYIYRGDKENASQCFEKVLKAYPNNYETMKILGSLYAASEDQEKRDIAKGHLKKVTEQYPDDVEAWIELAQILEQTDIQGALSAYGTATRILQEKVQADVPPEILNNVGALHFRLGNLGEAKKYFLASLDRAKAEAEHDEHYYNAISVTTSYNLARLYEAMCEFHEAEKLYKNILREHPNYVDCYLRLGAMARDKGNFYEASDWFKEALQINQDHPDAWSLIGNLHLAKQEWGPGQKKFERILKQPSTQSDTYSMLALGNVWLQTLHQPTRDREKEKRHQDRALAIYKQVLRNDAKNLYAANGIGAVLAHKGYFREARDVFAQVREATADISDVWLNLAHIYVEQKQYISAVQMYENCLRKFYKHQNTEVVLYLARALFKCGKLQECKQTLLKARHVAPSDTVLMFNVALVLQRLATSVLKDEKSNLKEVLNAVKELELAHRYFSYLSKVGDKMRFDLALAATEARQCSDLLSQAQYHVARARKQDEEERELRAKQEQEKELLRQKLLKEQEEKRLREKEEQKKLLEQRAQYVEKTKNILMFTGETEATKEKKRGGGGGRRSKKGGEFDEFVNDDTDDDLPISKKKKRRKGSGSEQEGEDEEGGERKKKKRRRHPKGEEGSDDDETENGPKPKKRRPPKAEKKKAPKPERLPPSMKGKIKSKAIISSSDDSSDEDKLKIADEGHPRNSNSNSDSDEDEQRKKCASSESDSDENQNKSGSEAGSPRRPRRQRSDQDSDSDQPSRKRRPSGSEQSDNESVQSGRSHSGVSENDSRPASPSAESDHESERGSDNEGSGQGSGNESEPEGSNNEASDRGSEHGSDDSD

SEQ ID NO: 8093 - protein, 643 aa, Homo sapiens
MGQESSKPVWPNPTGGYQSNTGRRYGRRHAYVSFRPPTSQRERIASQRKTNSEVPMHRSAPSQTTKRSRSPFSTTRRSWDDSESSGTNLNIDNEDYSRYPPREYRASGSRRGMAYGHIDSYGADDSEEEGAGPVERPPVRGKTGKFKDDKLYDPEKGARSLAGPPPHFSSFSRDVREERDKLDPVPAARCSASRADFLPQSSVASQSSSEGKLATKGDSSERERREQNLPARPSRAPVSICGGGENTSKSAEEPVVRPKIRNLASPNCVKPKIFFDTDDDDDMPHSTSRWRDTANDNEGHSDGLARRGRGESSSGYPEPKYPEDKREARSDQVKPEKVPRRRRTMADPDFWTHSDDYYKYCDEDSDSDKEWIAALRRKYRSREQTLSSSGESWETLPGKEEREPPQAKVSASTGTSPGPGASASAGAGAGASAGSNGSNYLEEVREPSLQEEQASLEEGEIPWLQYHENDSSSEGDNDSGHELMQPGVFMLDGNNNLEDDSSVSEDLEVDWSLFDGFADGLGVAEAISYVDPQFLTYMALEERLAQAMETALAHLESLAVDVEVANPPASKESIDALPEILVTEDHGAVGQEMCCPICCSEYVKGEVATELPCHHYFHKPCVSIWLQKSGTCPVCRCMFPPPL

SEQ ID NO: 8094 - protein, 848 aa, Homo sapiens
MQAEAADWFSSMPFQKHVYYPLASGPEGPDVAVAAAAAGAASMACAPPSAASGPLPFFQFRPRLESVDWRRLSAIDVDKVAGAVDVLTLQENIMNITFCKLEDEKCPHCQSGVDPVLLKLIRLAQFTIEYLLHSQEFLTSQLHTLEERLRLSHCDGEQSKKLLTKQAGEIKTLKEECKRRKKMISTQQLMIEAKANYYQCHFCDKAFMNQAFLQSHIQRRHTEENSHFEYQKNAQIEKLRSEIVVLKEELQLTRSELEAAHHASAVRFSKEYEMQKTKEEDFLKLFDRWKEEEKEKLVDEMEKVKEMFMKEFKELTSKNSALEYQLSEIQKSNMQIKSNIGTLKDAHEFKEDRSPYPQDFHNVMQLLDSQESKWTARVQAIHQEHKKEKGRLLSHIEKLRTSMIDDLNASNVFYKKRIEELGQRLQEQNELIITQRQQIKDFTCNPLNSISEPKVNAPALHTLETKSSLPMVHEQAFSSHILEPIEELSEEEKGRENEQKLNNNKMHLRKALKSNSSLTKGLRTMVEQNLMEKLETLGINADIRGISSDQLHRVLKSVESERHKQEREIPNFHQIREFLEHQVSCKIEEKALLSSDQCSVSQMDTLSTGEVPKMIQLPSKNRQLIRQKAVSTDRTSVPKIKKNVMEDPFPRKSSTITTPPFSSEEEQEDDDLIRAYASPGPLPVPPPQNKGSFGKNTVKSDADGTEGSEIEDTDDSPKPAGVAVKTPTEKVEKMFPHRKNVNKPVGGTNVPEMFIKKEELQELKCADVEDEDWDISSLEEEISLGKKSGKEQKEPPPAKNEPHFAHVLNAWGAFNPKGPKGEGLQENESSTLKSSLVTVTDWSDTSDV

SEQ ID NO: 8095 - protein, 249 aa, Homo sapiens
MLQTLYDYFWWERLWLPVNLTWADLEDRDGRVYAKASDLYITLPLALLFLIVRYFFELYVATPLAALLNIKEKTRLRAPPNATLEHFYLTSGKQPKQVEVELLSRQSGLSGRQVERWFRRRRNQDRPSLLKKFREASWRFTFYLIAFIAGMAVIVDKPWFYDMKKVWEGYPIQSTIPSQYWYYMIELSFYWSLLFSIASDVKRKDFKEQIIHHVATIILISFSWFANYIRAGTLIMALHDSSDYLLEVR

SEQ ID NO: 8096 - protein, 433 aa, Homo sapiens
MLPAGCSRRLVAELQGALDACAQRQLQLEQSLRVCRRLLHAWEPTGTRALKPPPGPETNGEDPLPACTPSPQDLKELEFLTQALEKAVRVRRGITKAGERDKAPSLKSRSIVTSSGTTASAPPHSPGQAGGHASDTRPTKGLRQTTVPAKGHPERRLLSVGDGTRVGMGARTPRPGAGLRDQQMAPSAAPQAPEAFTLKEKGHLLRLPAAFRKAASQNSSLWAQLSSTQTSDSTDAAAAKTQFLQNMQTASGGPQPRLSAVEVEAEAGRLRKACSLLRLRMREELSAAPMDWMQEYRCLLTLEGLQAMVGQCLHRLQELRAAVAEQPPRPCPVGRPPGASPSCGGRAEPAWSPQLLVYSSTQELQTLAALKLRVAVLDQQIHLEKVLMAELLPLVSAAQPQGPPWLALCRAVHSLLCEGGARVLTILRDEPAV

SEQ ID NO: 8097 - protein, 841 aa, Homo sapiens
MSAQSLPAATPPTQKPPRIIRPRPPSRSRAAQSPGPPHNGSSPQELPRNSNDAPTPMCTPIFWEPPAASLKPPALLPPSASRASLDSQTSPDSPSSTPTPSPVSRRSASPEPAPRSPVPPPKPSGSPCTPLLPMAGVLAQNGSASAPGTVRRLAGRFEGGAEGRAQDADAPEPGLQARADVNGEREAPLTGSGSQENGAPDAGLACPPCCPCVCHTTRPGLELRWVPVGGYEEVPRVPRRASPLRTSRSRPHPPSIGHPAVVLTSYRSTAERKLLPLLKPPKPTRVRQDATIFGDPPQPDLDLLSEDGIQTGDSPDEAPQNTPPATVEGREEEGLEVLKEQNWELPLQDEPLYQTYRAAVLSEELWGVGEDGSPSPANAGDAPTFPRPPGPRNTLWQELPAVQASGLLDTLSPQERRMQESLFEVVTSEASYLRSLRLLTDTFVLSQALRDTLTPRDHHTLFSNVQRVQGVSERFLATLLSRVRSSPHISDLCDVVHAHAVGPFSVYVDYVRNQQYQEETYSRLMDTNVRFSAELRRLQSLPKCERLPLPSFLLLPFQRITRLRMLLQNILRQTEEGSSRQENAQKALGAVSKIIERCSAEVGRMKQTEELIRLTQRLRFHKVKALPLVSWSRRLEFQGELTELGCRRGGVLFASRPRFTPLCLLLFSDLLLITQPKSGQRLQVLDYAHRSLVQAQQVPDPSGPPTFRLSLLSNHQGRPTHRLLQASSLSDMQRWLGAFPTPGPLPCSPDTIYEDCDCSQELCSESSAPAKTEGRSLESRAAPKHLHKTPEGWLKGLPGAFPAQLVCEVTGEHERRRHLRQNQRLLEAVGSSSGTPNAPPP

SEQ ID NO: 8098 - protein, 1208 aa, Homo sapiens
MDSLPDEFFVRHPAVEDQRKEETENKLEKSSGQLNKQENDIPTDLVPVNLLLEVKKLLNAINTLPKGVVPHIKKFLQEDFSFQTMQREVAANSQNGEEIVPALTLRFLITQLEAALRNIQAGNYTAHQINIGYYLTLLFLYGVALTERGKKEDYTEAENKFLVMKMMIQENEICENFMSLVYFGRGLLRCAQKRYNGGLLEFHKSLQEIGDKNDHWFDIDPTEDEDLPTTFKDLLNNFIKTTESNIMKQTICSYLDCERSCEADILKNTSYKGFFQLMCSKSCCVYFHKICWKKFKNLKYPGENDQSFSGKKCLKEGCTGDMVRMLQCDVPGIVKILFEVVRKDEYITIENLGASYRKLISLKITDTDIRPKISLKFNTKDEMPIFKLDYNYFYHLLHIIIISGTDIVRQIFDEAMPPPLLKKELLIHKNVLESYYNHLWTNHPLGGSWHLLYPPNKELPQSKQFDLCLLLALIKHLNVFPAPKKGWNMEPPSSDISKSADILRLCKYRDILLSEILMNGLTESQFNSIWKKVSDILLRLGMMQEDIDKVKENPIENISLDYHQLSVYLGIPVPEIIQRMLSCYQQGIALQSITGSQRIEIEELQNEEEELSPPLMEYNINVKSHPEIQFAEINKDGTSIPSESSTESLKDLQEVKSKQRKKKKTKNKKNKDSKEDQVPYVVEKEEQLRKEQANPHSVSRLIKDDASDVQEDSAMEDKFYSLDELHILDMIEQGSAGKVTTDYGETEKERLARQRQLYKLHYQCEDFKRQLRTVTFRWQENQMQIKKKDKIIASLNQQVAFGINKVSKLQRQIHAKDNEIKNLKEQLSMKRSQWEMEKHNLESTMKTYVSKLNAETSRALTAEVYFLQCRRDFGLLHLEQTEKECLNQLARVTHMAASNLESLQLKAAVDSWNAIVADVRNKIAFLRTQYNEQINKVKQGFALSTLPPVQLPPPPPSPEILMQQFLGRPLVKESFFRPILTVPQMPAVCPGVVSATGQPRAPLMTGIAWALPAPVGDAVPPSAGLRSDPSIMNWERITDRLKTAFPQQTRKELTDFLRKLKDAYGKSLSELTFDEIVCKISQFIDPKKSQSQGKSVSNVNCVSPSHSPSQPDAAQPPKPAWRPLTSQGPATWEGASNPDEEEEEEEPCVICHENLSPENLSVLPCAHKFHAQCIRPWLMQQGTCPTCRLHVLLPEEFPGHPSRQLPKI

SEQ ID NO: 8099 - protein, 1720 aa, Homo sapiens
MAAAPSALLLLPPFPVLSTYRLQSRSRPSAPETDDSRVGGIMRGEKNYYFRGAAGDHGSCPTTTSPLASALLMPSEAVSSSWSESGGGLSGGDEEDTRLLQLLRTARDPSEAFQALQAALPRRGGRLGFPRRKEALYRALGRVLVEGGSDEKRLCLQLLSDVLRGQGEAGQLEEAFSLALLPQLVVSLREENPALRKDALQILHICLKRSPGEVLRTLIQQGLESTDARLRASTALLLPILLTTEDLLLGLDLTEVIISLARKLGDQETEEESETAFSALQQIGERLGQDRFQSYISRLPSALRRHYNRRLESQFGSQVPYYLELEASGFPEDPLPCAVTLSNSNLKFGIIPQELHSRLLDQEDYKNRTQAVEELKQVLGKFNPSSTPHSSLVGFISLLYNLLDDSNFKVVHGTLEVLHLLVIRLGEQVQQFLGPVIAASVKVLADNKLVIKQEYMKIFLKLMKEVGPQQVLCLLLEHLKHKHSRVREEVVNICICSLLTYPSEDFDLPKLSFDLAPALVDSKRRVRQAALEAFAVLASSMGSGKTSILFKAVDTVELQDNGDGVMNAVQARLARKTLPRLTEQGFVEYAVLMPSSAGGRSNHLAHGADTDWLLAGNRTQSAHCHCGDHVRDSMHIYGSYSPTICTRRVLSAGKGKNKLPWENEQPGIMGENQTSTSKDIEQFSTYDFIPSAKLKLSQGMPVNDDLCFSRKRVSRNLFQNSRDFNPDCLPLCAAGTTGTHQTNLSGKCAQLGFSQICGKTGSVGSDLQFLGTTSSHQEKVYASLNFGSKTQQTFGSQTECTSSNGQNPSPGAYILPSYPVSSPRTSPKHTSPLIISPKKSQDNSVNFSNSWPLKSFEGLSKPSPQKKLVSQKSSDPTGRNHGENSQEKPPVQLTPALVRSPSSRRGLNGTKPVPPIPRGISLLPDKADLSTVGHKKKEPDDIWKCEKDSLPIDLSELNFKDKDLDQEEMHSSLRSLRNSAAKKRAKLSGSTSDLESPDSAMKLDLTMDSPSLSSSPNINSYSESGVYSQESLTSSLSTTPQGKRIMSDIFPTFGSKPCPTRLSSAKKKISHIAEQSPSAGSSSNPQQISSFDFTTTKALSEDSVVVVGKGVFGSLSSAPATCSQSVISSVENGDTFSIKQSIEPPSGIYGRSVQQNISSYLDVENEKDAKVSISKSTYNKMRQKRKEEKELFHNKDCEKKEKNSWERMRHTGTEKMASESETPTGAISQYKERMPSVTHSPEIMDLSELRPFSKPEIALTEALRLLADEDWEKKIEGLNFIRCLAAFHSEILNTKLHETNFAVVQEVKNLRSGVSRAAVVCLSDLFTYLKKSMDQELDTTVKVLLHKAGESNTFIREDVDKALRAMVNNVTPARAVVSLINGGQRYYGRKMLFFMMCHPNFEKMLEKYVPSKDLPYIKDSVRNLQQKGLGEIPLDTPSAKGRRSHTGSVGNTRSSSVSRDAFNSAERAVTEVREVTRKSVPRNSLESAEYLKLITGLLNAKDFRDRINGIKQLLSDTENNQDLVVGNIVKIFDAFKSRLHDSNSKVNLVALETMHKMIPLLRDHLSPIINMLIPAIVDNNLNSKNPGIYAAATNVVQALSQHVDNYLLLQPFCTKAQFLNGKAKQDMTEKLADIVTELYQRKPHATEQKVLVVLWHLLGNMTNSGSLPGAGGNIRTATAKLSKALFAQMGQNLLNQAASQPPHIKKSLEELLDMTILNEL

SEQ ID NO: 8100 - protein, 1163 aa, Homo sapiens
MVWCLGLAVLSLVISQGADGRGKPEVVSVVGRAGESVVLGCDLLPPAGRPPLHVIEWLRFGFLLPIFIQFGLYSPRIDPDYVGRVRLQKGASLQIEGLRVEDQGWYECRVFFLDQHIPEDDFANGSWVHLTVNSPPQFQETPPAVLEVQELEPVTLRCVARGSPLPHVTWKLRGKDLGQGQGQVQVQNGTLRIRRVERGSSGVYTCQASSTEGSATHATQLLVLGPPVIVVPPKNSTVNASQDVSLACHAEAYPANLTYSWFQDNINVFHISRLQPRVRILVDGSLRLLATQPDDAGCYTCVPSNGLLHPPSASAYLTVLCMPGVIRCPVRANPPLLFVSWTKDGKALQLDKFPGWSQGTEGSLIIALGNEDALGEYSCTPYNSLGTAGPSPVTRVLLKAPPAFIERPKEEYFQEVGRELLIPCSAQGDPPPVVSWTKVGRGLQGQAQVDSNSSLILRPLTKEAHGHWECSASNAVARVATSTNVYVLGTSPHVVTNVSVVALPKGANVSWEPGFDGGYLQRFSVWYTPLAKRPDRMHHDWVSLAVPVGAAHLLVPGLQPHTQYQFSVLAQNKLGSGPFSEIVLSAPEGLPTTPAAPGLPPTEIPPPLSPPRGLVAVRTPRGVLLHWDPPELVPKRLDGYVLEGRQGSQGWEVLDPAVAGTETELLVPGLIKDVLYEFRLVAFAGSFVSDPSNTANVSTSGLEVYPSRTQLPGLLPQPVLAGVVGGVCFLGVAVLVSILAGCLLNRRRAARRRRKRLRQDPPLIFSPTGKSAAPSALGSGSPDSVAKLKLQGSPVPSLRQSLLWGDPAGTPSPHPDPPSSRGPLPLEPICRGPDGRFVMGPTVAAPQERSGREQAEPRTPAQRLARSFDCSSSSPSGAPQPLCIEDISPVAPPPAAPPSPLPGPGPLLQYLSLPFFREMNVDGDWPPLEEPSPAAPPDYMDTRRCPTSSFLRSPETPPVSPRESLPGAVVGAGATAEPPYTALADWTLRERLLPGLLPAAPRGSLTSQSSGRGSASFLRPPSTAPSAGGSYLSPAPGDTSSWASGPERWPRREHVVTVSKRRNTSVDENYEWDSEFPGDMELLETLHLGLASSRLRPEAEPELGVKTPEEGCLLNTAHVTGPEARCAALREEFLAFRRRRDATRARLPAYRQPVPHPEQATLL

SEQ ID NO: 8101 - protein, 563 aa, Homo sapiens
MDVGELLSYQPNRGTKRPRDDEEEEQKMRRKQTGTRERGRYREEEMTVVEEADDDKKRLLQIIDRDGEEEEEEEEPLDESSVKKMILTFEKRSYKNQELRIKFPDNPEKFMESELDLNDIIQEMHVVATMPDLYHLLVELNAVQSLLGLLGHDNTDVSIAVVDLLQELTDIDTLHESEEGAEVLIDALVDGQVVALLVQNLERLDESVKEEADGVHNTLAIVENMAEFRPEMCTEGAQQGLLQWLLKRLKAKMPFDANKLYCSEVLAILLQDNDENRELLGELDGIDVLLQQLSVFKRHNPSTAEEQEMMENLFDSLCSCLMLSSNRERFLKGEGLQLMNLMLREKKISRSSALKVLDHAMIGPEGTDNCHKFVDILGLRTIFPLFMKSPRKIKKVGTTEKEHEEHVCSILASLLRNLRGQQRTRLLNKFTENDSEKVDRLMELHFKYLGAMQVADKKIEGEKHDMVRRGEIIDNDTEEEFYLRRLDAGLFVLQHICYIMAEICNANVPQIRQRVHQILNMRGSSIKIVRHIIKEYAENIGDGRSPEFRENEQKRILGLLENF

SEQ ID NO: 8102 - protein, 1043 aa, Homo sapiens
MAMALELQAQASPQPEPEELLIVKLEEDSWGSESKLWEKDRGSVSGPEASRQRFRQFQYRDAAGPHEAFSQLWALCCRWLRPEIRLKEQILELLVLEQFLTILPREVQTWVQARHPESGEEAVALVEDWHRETRTAGQSGLELHTEETRPLKTGEEAQSFQLQPVDPWPEGQSQKKGVKNTCPDLPNHLNAEVAPQPLKESAVLTPRVPTLPKMGSVGDWEVTAESQEALGPGKHAEKELCKDPPGDDCGNSVCLGVPVSKPSNTSEKEQGPEFWGLSLINSGKRSTADYSLDNEPAQALTWRDSRAWEEQYQWDVEDMKVSGVHWGYEETKTFLAILSESPFSEKLRTCHQNRQVYRAIAEQLRARGFLRTLEQCRYRVKNLLRNYRKAKSSHPPGTCPFYEELEALVRARTAIRATDGPGEAVALPRLGYSDAEMDEQEEGGWDPEEMAEDCNGAGLVNVESTQGPRIAGAPALFQSRIAGVHWGYEETKAFLAILSESPFSEKLRTCHQNSQVYRAIAERLCALGFLRTLEQCRYRFKNLLRSYRKAKSSHPPGTCPFYEELDSLMRARAAVRAMGTVREAAGLPRCGQSSAETDAQEAWGEVANEDAVKPSTLCPKAPDMGFEMRHEDEDQISEQDIFEGLPGALSKCPTEAVCQPLDWGEDSENENEDEGQWGNPSQEQWQESSSEEDLEKLIDHQGLYLAEKPYKCDTCMKSFSRSSHFIAHQRIHTGEKPYKCLECGKNFSDRSNLNTHQRIHTGEKPYKCLECGKSFSDHSNLITHQRIHTGEKPYKCGECWKSFNQSSNLLKHQRIHLGGNPDQCSEPGGNFAQSPSFSAHWRNSTEETAPEQPQSISKDLNSPGPHSTNSGEKLYECSECGRSFSKSSALISHQRIHTGEKPYECAECGKSFSKSSTLANHQRTHTGEKPYKCVDCGKCFSERSKLITHQRVHTGEKPYKCLECGKFFRDRSNLITHQRIHTGEKPYKCRECGKCFNQSSSLIIHQRIHTGEKPYKCTECGKDFNNSSHFSAHRRTHAGGKAS

SEQ ID NO: 8103 - protein, 1279 aa, Homo sapiens
MASSNPPPQPAIGDQLVPGVPGPSSEAEDDPGEAFEFDDSDDEEDTSAALGVPSLAPERDTDPPLIHLDSIPVTDPDPAAAPPGTGVPAWVSNGDAADAAFSGARHSSWKRKSSRRIDRFTFPALEEDVIYDDVPCESPDAHQPGAERNLLYEDAHRAGAPRQAEDLGWSSSEFESYSEDSGEEAKPEVEVEPAKHRVSFQPKLSPDLTRLKERYARTKRDILALRVGGRDMQELKHKYDCKMTQLMKAAKSGTKDGLEKTRMAVMRKVSFLHRKDVLGDSEEEDMGLLEVSVSDIKPPAPELGPMPEGLSPQQVVRRHILGSIVQSEGSYVESLKRILQDYRNPLMEMEPKALSARKCQVVFFRVKEILHCHSMFQIALSSRVAEWDSTEKIGDLFVASFSKSMVLDVYSDYVNNFTSAMSIIKKACLTKPAFLEFLKRRQVCSPDRVTLYGLMVKPIQRFPQFILLLQDMLKNTPRGHPDRLSLQLALTELETLAEKLNEQKRLADQVAEIQQLTKSVSDRSSLNKLLTSGQRQLLLCETLTETVYGDRGQLIKSKERRVFLLNDMLVCANINFKPANHRGQLEISSLVPLGPKYVVKWNTALPQVQVVEVGQDGGTYDKDNVLIQHSGAKKASASGQAQNKVYLGPPRLFQELQDLQKDLAVVEQITLLISTLHGTYQNLNMTVAQDWCLALQRLMRVKEEEIHSANKCRLRLLLPGKPDKSGRPISFMVVFITPNPLSKISWVNRLHLAKIGLREENQPGWLCPDEDKKSKAPFWCPILACCIPAFSSRALSLQLGALVHSPVNCPLLGFSAVSTSLPQGYLWVGGGQEGAGGQVEIFSLNRPSPRTVKSFPLAAPVLCMEYIPELEEEAESRDESPTVADPSATVHPTICLGLQDGSILLYSSVDTGTQCLVSCRSPGLQPVLCLRHSPFHLLAGLQDGTLAAYPRTSGGVLWDLESPPVCLTVGPGPVRTLLSLEDAVWASCGPRVTVLEATTLQPQQSFEAHQDEAVSVTHMVKAGSGVWMAFSSGTSIRLFHTETLEHLQEINIATRTTFLLPGQKHLCVTSLLICQGLLWVGTDQGVIVLLPVPRLEGIPKITGKGMVSLNGHCGPVAFLAVATSILAPDILRSDQEEAEGPRAEEDKPDGQAHEPMPDSHVGRELTRKKGILLQYRLRSTAHLPGPLLSMREPAPADGAALEHSEEDGSIYEMADDPDIWVRSRPCARDAHRKEICSVAIISGGQGYRNFGSALGSSGRQAPCGETDSTLLIWQVPLML

SEQ ID NO: 8104 - protein, 1014 aa, Homo sapiens
LVPDSKQGKPQSATDYSDPDNVDDGLFIVDIPKTNNDKEVNAEHHIKGKGRGVQESKRGLVQDKTELEDENQEGMTVHSSVHSNNLNSMPAAEKGKDTLKSAYDDTENDLKGAAIHISKGMLHEEKPGEQILEGGSESESAQKAAGNQMNDRKIQQESLGSAPLMGDDHPNASRDSVEGDALVNGAKLHTLSVEHQREELKEELVLKTQNQPRFSSPDEIDLPRELEDEVPILGRNLPWQQERDVAATASKQMSEKIRLSEGEAKEDSLDEEFFHHKAMQGTEVGQTDQTDSTGGPAFLSKVEEDDYPSEELLEDENAINAKRSKEKNPGNQGRQFDVNLQVPDRAVLGTIHPDPEIEESKQETSMILDSEKTSETAAKGVNTGGREPNTMVEKERPLADKKAQRPFERSDFSDSIKIQTPELGEVFQNKDSDYLKNDNPEEHLKTSGLAGEPEGELSKEDHENTEKYMGTESQGSAAAEPEDDSFHWTPHTSVEPGHSDKREDLLIISSFFKEQQSLQRFQKYFNVHELEALLQEMSSKLKSAQQESLPYNMEKVLDKVFRASESQILSIAEKMLDTRVAENRDLGMNENNIFEEAAVLDDIQDLIYFVRYKHSTAEETATLVMAPPLEEGLGGAMEEMQPLHEDNFSREKTAELNVQVPEEPTHLDQRVIGDTHASEVSQKPNTEKDLDPGPVTTEDTPMDAIDANKQPETAAEEPASVTPLENAILLIYSFMFYLTKSLVATLPDDVQPGPDFYGLPWKPVFITAFLGIASFAIFLWRTVLVVKDRVYQVTEQQISEKLKTIMKENTELVQKLSNYEQKIKESKKHVQETRKQNMILSDEAIKYKDKIKTLEKNQEILDDTAKNLRVMLESEREQNVKNQDLLQQEIEDWSKLHAELSEQIKSFEKSQKDLEVALTHKDDNINALTNCITQLNLLECESESEGQNKGGNDSDELANGEVGGDRNEKMKNQIKQMMDVSRTQTAISVVEEDLKLLQLKLRASVSTKCNLEDQ

SEQ ID NO: 8105 - protein, 355 aa, Homo sapiens
MQLTTCLRETLFTGASQKTSLWWLGIASFGVPEKLGCANLPLNSRQKELCKRKPYLLPSIREGARLGIQECGSQFRHERWNCMITAAATTAPMGASPLFGYELSSGTKETAFIYAVMAAGLVHSVTRSCSAGNMTECSCDTTLQNGGSASEGWHWGGCSDDVQYGMWFSRKFLDFPIGNTTGKENKVLLAMNLHNNEAGRQAVAKLMSVDCRCHGVSGSCAVKTCWKTMSSFEKIGHLLKDKYENSIQISDKTKRKMRRREKDQRKIPIHKDDLLYVNKSPNYCVEDKKLGIPGTQGRECNRTSEGADGCNLLCCGRGYNTHVVRHVERCECKFIWCCYVRCRRCESMTDVHTCK

SEQ ID NO: 8106 - protein, 393 aa, Homo sapiens
MDMHCKADPFSAMHRHGGVNQLGGVFVNGRPLPDVVRQRIVELAHQGVRPCDISRQLRVSHGCVSKILGRYYETGSIKPGVIGGSKPKVATPKVVDKIAEYKRQNPTMFAWEIRDRLLAEGICDNDTVPSVSSINRIIRTKVQQPFHPTPDGAGTGVTAPGHTIVPSTASPPVSSASNDPVGSYSINGILGIPRSNGEKRKRDEDVSEGSVPNGDSQSGVDSLRKHLRADTFTQQQLEALDRVFERPSYPDVFQASEHIKSEQGNEYSLPALTPGLDEVKSSLSASTNPELGSNVSGTQTYPVVTGRDMASTTLPGYPPHVPPTGQGSYPTSTLAGMVPGSEFSGNPYSHPQYTAYNEAWRFSNPALLSSPYYYSAAPRGSAPAAAAAAYDRH

SEQ ID NO: 8107 - protein, 266 aa, Homo sapiens
MQGSTRRMGVMTDVHRRFLQLLMTHGVLEEWDVKRLQTHCYKVHDRNATVDKLEDFINNINSVLESLYIEIKRGVTEDDGRPIYALVNLATTSISKMATDFAENELDLFRKALELIIDSETGFASSTNILNLVDQLKGKKMRKKEAEQVLQKFVQNKWLIEKEGEFTLHGRAILEMEQYIRETYPDAVKICNICHSLLIQGQSCETCGIRMHLPCVAKYFQSNAEPRCPHCNDYWPHEIPKVFDPEKERESGVLKSNKKSLRSRQH

SEQ ID NO: 8108 - protein, 1135 aa, Homo sapiens
MHQMNAKMHFRFVFALLIVSFNHDVLGKNLKYRIYEEQRVGSVIARLSEDVADVLLKLPNPSTVRFRAMQRGNSPLLVVNEDNGEISIGATIDREQLCQKNLNCSIEFDVITLPTEHLQLFHIEVEVLDINDNSPQFSRSLIPIEISESAAVGTRIPLDSAFDPDVGENSLHTYSLSANDFFNIEVRTRTDGAKYAELIVVRELDRELKSSYELQLTASDMGVPQRSGSSILKISISDSNDNSPAFEQQSYIIQLLENSPVGTLLLDLNATDPDEGANGKIVYSFSSHVSPKIMETFKIDSERGHLTLFKQVDYEITKSYEIDVQAQDLGPNSIPAHCKIIIKVVDVNDNKPEININLMSPGKEEISYIFEGDPIDTFVALVRVQDKDSGLNGEIVCKLHGHGHFKLQKTYENNYLILTNATLDREKRSEYSLTVIAEDRGTPSLSTVKHFTVQINDINDNPPHFQRSRYEFVISENNSPGAYITTVTATDPDLGENGQVTYTILESFILGSSITTYVTIDPSNGAIYALRIFDHEEVSQITFVVEARDGGSPKQLVSNTTVVLTIIDENDNVPVVIGPALRNNTAEITIPKGAESGFHVTRIRAIDRDSGVNAELSCAIVAGNEENIFIIDPRSCDIHTNVSMDSVPYTEWELSVIIQDKGNPQLHTKVLLKCMIFEYAESVTSTAMTSVSQASLDVSMIIIISLGAICAVLLVIMVLFATRCNREKKDTRSYNCRVAESTYQHHPKRPSRQIHKGDITLVPTINGTLPIRSHHRSSPSSSPTLERGQMGSRQSHNSHQSLNSLVTISSNHVPENFSLELTHATPAVEQVSQLLSMLHQGQYQPRPSFRGNKYSRSYRYALQDMDKFSLKDSGRGDSEAGDSDYDLGRDSPIDRLLGEGFSDLFLTDGRIPAAMRLCTEECRVLGHSDQCWMPPLPSPSSDYRSNMFIPGEEFPTQPQQQHPHQSLEDDAQPADSGEKKKSFSTFGKDSPNDEDTGDTSTSSLLSEMSSVFQRLLPPSLDTYSECSEVDRSNSLERRKGPLPAKTVGYPQGVAAWAASTHFQNPTTNCGPPLGTHSSVQPSSKWLPAMEEIPENYEEDDFDNVLNHLNDGKHELMDASELVAEINKLLQDVRQS

SEQ ID NO: 8109 - protein, 484 aa, Homo sapiens
MYIKMATLANGQADNASLSTNGLGSSPGSAGHMNGLSHSPGNPSTIPMKDHDAIKLFIGQIPRNLDEKDLKPLFEEFGKIYELTVLKDRFTGMHKGCAFLTYCERESALKAQSALHEQKTLPGMNRPIQVKPADSESRGGSSCLRQPPSHRKLFVGMLNKQQSEDDVRRLFEAFGNIEECTILRGPDGNSKGCAFVKYSSHAEAQAAINALHGSQTMPGASSSLVVKFADTDKERTMRRMQQMAGQMGMFNPMAIPFGAYGAYAQAMQQQAALMASVAQGGYLNPMAAFAAAQMQQMAALNMNGLAAAPMTPTSGGSTPPGITAPAVPSIPSPIGVNGFTGLPPQANGQPAAEAVFANGIHPYPAQSPTAADPLQQAYAGVQQYAGPAAYPAAYGQISQAFPQPPPMIPQQQREGPEGCNLFIYHLPQEFGDAELMQMFLPFGFVSFDNPASAQTAIQAMNGFQIGMKRLKVQLKRPKDANRPY

SEQ ID NO: 8110 - protein, 1023 aa, Homo sapiens
MWDQRLVRLALLQHLRAFYGIKVKGVRGQCDRRRHETAATEIGGKIFGVPFNALPHSAVPEYGHIPSFLVDACTSLEDHIHTEGLFRKSGSVIRLKALKNKVDHGEGCLSSAPPCDIAGLLKQFFRELPEPILPADLHEALLKAQQLGTEEKNKATLLLSCLLADHTVHVLRYFFNFLRNVSLRSSENKMDSSNLAVIFAPNLLQTSEGHEKMSSNTEKKLRLQAAVVQTLIDYASDIGRVPDFILEKIPAMLGIDGLCATPSLEGFEEGEYETPGEYKRKRRQSVGDFVSGALNKFKPNRTPSITPQEERIAQLSESPVILTPNAKRTLPVDSSHGFSSKKRKSIKHNFNFELLPSNLFNSSSTPVSVHIDTSSEGSSQSSLSPVLIGGNHLITAGVPRRSKRIAGKKVCRVESGKAGCFSPKISHKEKVRRSLRLKFNLGKNGREVNGCSGVNRYESVGWRLANQQSLKNRIESVKTGLLFSPDVDEKLPKKGSEKISKSEETLLTPERLVGTNYRMSWTGPNNSSFQEVDANEASSMVENLEVENSLEPDIMVEKSPATSCELTPSNLNNKHNSNITSSPLSGDENNMTKETLVKVQKAFSESGSNLHALMNQRQSSVTNVGKVKLTEPSYLEDSPEENLFETNDLTIVESKEKYEHHTGKGEKCFSERDFSPLQTQTFNRETTIKCYSTQMKMEHEKDIHSNMPKDYLSKQEFSSDEEIKKQQSPKDKLNNKLKENENMMEGNLPKCAAHSKDEARSSFSQQSTCVVTNLSKPRPMRIAKQQSLETCEKTVSESSQMTEHRKVSDHIQWFNKLSLNEPNRIKVKSPLKFQRTPVRQSVRRINSLLEYSRQPTGHKLASLGDTASPLVKSVSCDGALSSCIESASKDSSVSCIKSGPKEQKSMSCEESNIGAISKSSMELPSKSFLKMRKHPDSVNASLRSTTVYKQKILSDGQVKVPLDDLTNHDIVKPVVNNNMGISSGINNRVLRRPSERGRAWYKGSPKHPIGKTQLLPTSKPVDL

SEQ ID NO: 8111 - protein, 341 aa, Homo sapiens
MVGEMETKEKPKPTPDYLMQLMNDKKLMSSLPNFCGIFNHLERLLDEEISRVRKDMYNDTLNGSTEKRSAELPDAVGPIVQLQEKLYVPVKEYPDFNFVGRILGPRGLTAKQLEAETGCKIMVRGKGSMRDKKKEEQNRGKPNWEHLNEDLHVLITVEDAQNRAEIKLKRAVEEVKKLLVPAAEGEDSLKKMQLMELAILNGTYRDANIKSPALAFSLAATAQAAPRIITGPAPVLPPAALRTPTPAGPTIMPLIRQIQTAVMPNGTPHPTAAIVPPGPEAGLIYTPYEYPYTLAPATSILEYPIEPSGVLGAVATKVRRHDMRVHPYQRIVTADRAATGN

SEQ ID NO: 8112 - protein, 717 aa, Homo sapiens
MEGAHASLSLEDEVSGAGSRQRPLEGKGGETPAAEEPGSLKNYAVFATRDVSAAPEKEEEEAEGPLRAQDLRESYIQLVQGVQEWQDGCMYQGEFGLNMKLGYGKFSWPTGESYHGQFYRDHCHGLGTYMWPDGSSFTGTFYLSHREGYGTMYMKTRLFQTHCHNDIVNLLLDCGADVNKCSDEGLTALSMCFLLHYPAQSFKPNVAERTIPEPQEPPKFPVVPILSSSFMDTNLESLYYEVNVPSQGSYELRPPPAPLLLPRVSGSHEGGHFQDTGQCGGSIDHRSSSLKGDSPLVKGSLGHVESGLEDVLGNTDRGSLCSAETKFESNVCVCDFSIELSQAMLERSAQSHSLLKMASPSPCTSSFDKGTMRRMALSMIERRKRWRTIKLLLRRGADPNLCCVPMQVLFLAVKAGDVDGVRLLLEHGARTDICFPPQLSTLTPLHIAAALPGEEGVQIVELLLHAITDVDAKASDEDDTYKPGKVVKELLTQGADPNLPLTKGLGSALCVACDLTYEHQRNMDSKLALIDRLISHGADILKPVMLRQGEKEAVGTAVDYGYFRFFQDRRIARCPFHTLMPAERETFLARKRLLEYMGLQLRQAVFAKESQWDPTWLYLCKRAELIPSHRMKKKGPSLPRGLDVKEQGQIPFFKFCYQCGRSIGVRLLPCPRCYGILTCSKYCKTKAWTEFHKKDCGDLVAIVTQLEQVSRRREEFQ

SEQ ID NO: 8113 - protein, 894 aa, Homo sapiens
MESTLSASNMQDPSSSPLEKCLGSANGNGDLDSEEGSSLEETGFNWGEYLEETGASAAPHTSFKHVEISIQSNFQPGMKLEVANKNNPDTYWVATIITTCGQLLLLRYCGYGEDRRADFWCDVVIADLHPVGWCTQNNKVLMPPDAIKEKYTDWTEFLIRDLTGSRTAPANLLEGPLRGKGPIDLITVGSLIELQDSQNPFQYWIVSVIENVGGRLRLRYVGLEDTESYDQWLFYLDYRLRPVGWCQENKYRMDPPSEIYPLKMASEWKCTLEKSLIDAAKFPLPMEVFKDHADLRSHFFTVGMKLETVNMCEPFYISPASVTKVFNNHFFQVTIDDLRPEPSKLSMLCHADSLGILPVQWCLKNGVSLTPPKGYSGQDFDWADYHKQHGAQEAPPFCFRNTSFSRGFTKNMKLEAVNPRNPGELCVASVVSVKGRLMWLHLEGLQTPVPEVIVDVESMDIFPVGWCEANSYPLTAPHKTVSQKKRKIAVVQPEKQLPPTVPVKKIPHDLCLFPHLDTTGTVNGKYCCPQLFINHRCFSGPYLNKGRIAELPQSVGPGKCVLVLKEVLSMIINAAYKPGRVLRELQLVEDPHWNFQEETLKAKYRGKTYRAVVKIVRTSDQVANFCRRVCAKLECCPNLFSPVLISENCPENCSIHTKTKYTYYYGKRKKISKPPIGESNPDSGHPKPARRRKRRKSIFVQKKRRSSAVDFTAGSGEESEEEDADAMDDDTASEETGSELRDDQTDTSSAEVPSARPRRAVTLRSGSEPVRRPPPERTRRGRGAPAASSAEEGEKCPPTKPEGTEDTKQEEEERLVLESNPLEWTVTDVVRFIKLTDCAPLAKIFQEQDIDGQALLLLTLPTVQECMELKLGPAIKLCHQIERVKVAFYAQYAN

SEQ ID NO: 8114 - protein, 435 aa, Homo sapiens
MLPARCARLLTPHLLLVLVQLSPARGHRTTGPRFLISDRDPQCNLHCSRTQPKPICASDGRSYESMCEYQRAKCRDPTLGVVHRGRCKDAGQSKCRLERAQALEQAKKPQEAVFVPECGEDGSFTQVQCHTYTGYCWCVTPDGKPISGSSVQNKTPVCSGSVTDKPLSQGNSGRKDDGSKPTPTMETQPVFDGDEITAPTLWIKHLVIKDSKLNNTNIRNSEKVYSCDQERQSALEEAQQNPREGIVIPECAPGGLYKPVQCHQSTGYCWCVLVDTGRPLPGTSTRYVMPSCESDARAKTTEADDPFKDRELPGCPEGKKMEFITSLLDALTTDMVQAINSAAPTGGGRFSEPDPSHTLEERVVHWYFSQLDSNSSNDINKREMKPFKRYVKKKAKPKKCARRFTDYCDLNKDKVISLPELKGCLGVSKEVGRLV

SEQ ID NO: 8115 - protein, 453 aa, Homo sapiens
MARKVVSRKRKAPASPGAGSDAQGPQFGWDHSLHKRKRLPPVKRSLVYYLKNREVRLQNETSYSRVLHGYAAQQLPSLLKEREFHLGTLNKVFASQWLNHRQVVCGTKCNTLFVVDVQTSQITKIPILKDREPGGVTQQGCGIHAIELNPSRTLLATGGDNPNSLAIYRLPTLDPVCVGDDGHKDWIFSIAWISDTMAVSGSRDGSMGLWEVTDDVLTKSDARHNVSRVPVYAHITHKALKDIPKEDTNPDNCKVRALAFNNKNKELGAVSLDGYFHLWKAENTLSKLLSTKLPYCRENVCLAYGSEWSVYAVGSQAHVSFLDPRQPSYNVKSVCSRERGSGIRSVSFYEHIITVGTGQGSLLFYDIRAQRFLEERLSACYGSKPRLAGENLKLTTGKGWLNHDETWRNYFSDIDFFPNAVYTHCYDSSGTKLFVAGGPLPSGLHGNYAGLWS

SEQ ID NO: 8116 - protein, 402 aa, Homo sapiens
MPFITYLSGLLTAQMLSDDQLISGVEIRCEEKGRCPSTCHLCRRPGKEQLSPTPVLLEINRVVPLYTLIQDNGTKEAFKSALMSSYWCSGKGDVIDDWCRCDLSAFDANGLPNCSPLLQPVLRLSPTVEPSSTVVSLEWVDVQPAIGTKVSDYILQHKKVDEYTDTDLYTGEFLSFADDLLSGLGTSCVAAGRSHGEVPEVSIYSVIFKCLEPDGLYKFTLYAVDTRGRHSELSTVTLRTACPLVDDNKAEEIADKIYNLYNGYTSGKEQQMAYNTLMEVSASMLFRVQHHYNSHYEKFGDFVWRSEDELGPRKAHLILRRLERVSSHCSSLLRSAYIQSRVETVPYLFCRSEEVRPAGMVWYSILKDTKITCEEKMVSMARNTYGESKGRYYLTLSKVSPF

SEQ ID NO: 8117 - protein, 1629 aa, Homo sapiens
MERCSRCHRLLLLLPLVLGLSAAPGWAGAPPVDVLRALRFPSLPDGVRRAKGICPADVAYRVARPAQLSAPTRQLFPGGFPKDFSLLTVVRTRPGLQAPLLTLYSAQGVRQLGLELGRPVRFLYEDQTGRPQPPSQPVFRGLSLADGKWHRVAVAVKGQSVTLIVDCKKRVTRPLPRSARPVLDTHGVIIFGARILDEEVFEGDVQELAIVPGVQAAYESCEQKELECEGGQRERPQNQQPHRAQRSPQQQPSRLHRPQNQEPQSQAAHGPRGLKGEKGEPAVLEPGMLVEGPPGPEGPAGLIGPPGIQGNPGPVGDPGERGPPGRAGLPGSDGAPGPPGTSLMLPFRFGSGGGDKGPVVAAQEAQAQAILQQARLALRGPPGPMGYTGRPGPLGQPGSPGLKGESGDLGPQGPRGPQGLTGPPGKAGRRGRAGADGARGMPGDPGVKGDRGFDGLPGLPGEKGHRGDTGAQGLPGPPGEDGERGDDGEIGPRGLPGESGPRGLLGPKGPPGIPGPPGVRGMDGPQGPKGSLGPQGEPGPPGQQGTPGTQGLPGPQGAIGPHGEKGPQGKPGLPGMPGSDGPPGHPGKEGPPGTKGNQGPSGPQGPLGYPGPRGVKGVDGIRGLKGHKGEKGEDGFPGFKGDIGVKGDRGEVGVPGSRGEDGPEGPKGRTGPTGDPGPPGLMGEKGKLGVPGLPGYPGRQGPKGSLGFPGFPGASGEKGARGLSGKSGPRGERGPTGPRGQRGPRGATGKSGAKGTSGGDGPHGPPGERGLPGPQGPNGFPGPKGPPGPPGKDGLPGHPGQRGEVGFQGKTGPPGPPGVVGPQGAAGETGPMGERGHPGPPGPPGEQGLPGTAGKEGTKGDPGPPGAPGKDGPAGLRGFPGERGLPGTAGGPGLKGNEGPSGPPGPAGSPGERGAAGSGGPIGPPGRPGPQGPPGAAGEKGVPGEKGPIGPTGRDGVQGPVGLPGPAGPPGVAGEDGDKGEVGDPGQKGTKGNKGEHGPPGPPGPIGPVGQPGAAGADGEPGARGPQGHFGAKGDEGTRGFNGPPGPIGLQGLPGPSGEKGETGDVGPMGPPGPPGPRGPAGPNGADGPQGPPGGVGNLGPPGEKGEPGESGSPGIQGEPGVKGPRGERGEKGESGQPGEPGPPGPKGPTGDDGPKGNPGPVGFPGDPGPPGEGGPRGQDGAKGDRGEDGEPGQPGSPGPTGENGPPGPLGKRGPAGSPGSEGRQGGKGAKGDPGAIGAPGKTGPVGPAGPAGKPGPDGLRGLPGSVGQQGRPGATGQAGPPGPVGPPGLPGLRGDAGAKGEKGHPGLIGLIGPPGEQGEKGDRGLPGPQGSPGQKGEMGIPGASGPIGPGGPPGLPGPAGPKGAKGATGPGGPKGEKGVQGPPGHPGPPGEVIQPLPIQMPKKTRRSVDGSRLMQEDEAIPTGGAPGSPGGLEEIFGSLDSLREEIEQMRRPTGTQDSPARTCQDLKLCHPELPDGEYWVDPNQGCARDAFRVFCNFTAGGETCVTPRDDVTQFSYVDSEGSPVGVVQLTFLRLLSVSAHQDVSYPCSGAARDGPLRLRGANEDELSPETSPYVKEFRDGCQTQQGRTVLEVRTPVLEQLPVLDASFSDLGAPPRRGGVLLGPVCFMG

SEQ ID NO: 8118 - protein, 553 aa, Homo sapiens
MPLPWSLALPLLLSWVAGGFGNAASARHHGLLASARQPGVCHYGTKLACCYGWRRNSKGVCEATCEPGCKFGECVGPNKCRCFPGYTGKTCSQDVNECGMKPRPCQHRCVNTHGSYKCFCLSGHMLMPDATCVNSRTCAMINCQYSCEDTEEGPQCLCPSSGLRLAPNGRDCLDIDECASGKVICPYNRRCVNTFGSYYCKCHIGFELQYISGRYDCIDINECTMDSHTCSHHANCFNTQGSFKCKCKQGYKGNGLRCSAIPENSVKEVLRAPGTIKDRIKKLLAHKNSMKKKAKIKNVTPEPTRTPTPKVNLQPFNYEEIVSRGGNSHGGKKGNEEKMKEGLEDEKREEKALKNDIEERSLRGDVFFPKVNEAGEFGLILVQRKALTSKLEHKDLNISVDCSFNHGICDWKQDREDDFDWNPADRDNAIGFYMAVPALAGHKKDIGRLKLLLPDLQPQSNFCLLFDYRLAGDKVGKLRVFVKNSNNALAWEKTTSEDEKWKTGKIQLYQGTDATKSIIFEAERGKGKTGEIAVDGVLLVSGLCPDSLLSVDD

SEQ ID NO: 8119 - protein, 506 aa, Homo sapiens
MPSKTKYNLVDDGHDLRIPLHNEDAFQHGICFEAKYVGSLDVPRPNSRVEIVAAMRRIRYEFKAKNIKKKKVSIMVSVDGVKVILKKKKKLLLLQKKEWTWDESKMLVMQDPIYRIFYVSHDSQDLKIFSYIARDGASNIFRCNVFKSKKKSQAMRIVRTVGQAFEVCHKLSLQHTQQNADGQEDGESERNSNSSGDPGRQLTGAERASTATAEETDIDAVEVPLPGNDVLEFSRGVTDLDAVGKEGGSHTGSKVSHPQEPMLTASPRMLLPSSSSKPPGLGTETPLSTHHQMQLLQQLLQQQQQQTQVAVAQVHLLKDQLAAEAAARLEAQARVHQLLLQNKDMLQHISLLVKQVQELELKLSGQNAMGSQDSLLEITFRSGALPVLCDPTTPKPEDLHSPPLGAGLADFAHPAGSPLGRRDCLVKLECFRFLPPEDTPPPAQGEALLGGLELIKFRESGIASEYESNTDESEERDSWSQEELPRLLNVLQRQELGDGLDDEIAV

SEQ ID NO: 8120 - protein, 1292 aa, Homo sapiens
MSSECDGGSKAVMNGLAPGSNGQDKATADPLRARSISAVKIIPVKTVKNASGLVLPTDMDLTKICTGKGAVTLRASSSYRETPSSSPASPQETRQHESKPGLEPEPSSADEWRLSSSADANGNAQPSSLAAKGYRSVHPNLPSDKSQDATSSSAAQPEVIVVPLYLVNTDRGQEGTARPPTPLGPLGCVPTIPATASAASPLTFPTLDDFIPPHLQRWPHHSQPARASGSFAPISQTPPSFSPPPPLVPPAPEDLRRVSEPDLTGAVSSTDSSPLLNEVSSSLIGTDSQAFPSVSKPSSAYPSTTIVNPTIVLLQHNREQQKRLSSLSDPVSERRVGEQDSAPTQEKPTSPGKAIEKRAKDDSRRVVKSTQDLSDVSMDEVGIPLRNTERSKDWYKTMFKQIHKLNRDTPEENPYFPTYKFPELPEIQQTSEEDNPYTPTYQFPASTPSPKSEDDDSDLYSPRYSFSEDTKSPLSVPRSKSEMSYIDGEKVVKRSATLPLPARSSSLKSSSERNDWEPPDKKVDTRKYRAEPKSIYEYQPGKSSVLTNEKMSRDISPEEIDLKNEPWYKFFSELEFGKPPPKKIWDYTPGDCSILPREDRKTNLDKDLSLCQTELEADLEKMETLNKAPSANVPQSSAISPTPEISSETPGYIYSSNFHAVKRESDGAPGDLTSLENERQIYKSVLEGGDIPLQGLSGLKRPSSSASTKDSESPRHFIPADYLESTEEFIRRRHDDKEKLLADQRRLKREQEEADIAARRHTGVIPTHHQFITNERFGDLLNIDDTAKRKSGSEMRPARAKFDFKAQTLKELPLQKGDIVYIYKQIDQNWYEGEHHGRVGIFPRTYIELLPPAEKAQPKKLTPVQVLEYGEAIAKFNFNGDTQVEMSFRKGERITLLRQVDENWYEGRIPGTSRQGIFPITYVDVIKRPLVKNPVDYMDLPFSSSPSRSATASPQFSSHSKLITPAPSSLPHSRRALSPEMHAVTSEWISLTVGVPGRRSLALTPPLPPLPEASIYNTDHLALSPRASPSLSLSLPHLSWSDRPTPRSVASPLALPSPHKTYSLAPTSQASLHMNGDGGVHTPSSGIHQDSFLQLPLGSSDSVISQLSDAFSSQSKRQPWREESGQYERKAERGAGERGPGGPKISKKSCLKPSDVVRCLSTEQRLSDLNTPEESRPGKPLGSAFPGSEAEQTERHRGGEQAGRKAARRGGSQQPQAQQRRVTPDRSQTSQDLFSYQALYSYIPQNDDELELRDGDIVDVMEKCDDGWFVGTSRRTKQFGTFPGNYVKPLYL

SEQ ID NO: 8121 - protein, 301 aa, Homo sapiens
MDYNRMNSFLEYPLCNRGPSAYSAHSAPTSFPPSSAQAVDSYASEGRYGGGLSSPAFQQNSGYPAQQPPSTLGVPFPSSAPSGYAPAACSPSYGPSQYYPLGQSEGDGGYFHPSSYGAQLGGLSDGYGAGGAGPGPYPPQHPPYGNEQTASFAPAYADLLSEDKETPCPSEPNTPTARTFDWMKVKRNPPKTAKVSEPGLGSPSGLRTNFTTRQLTELEKEFHFNKYLSRARRVEIAATLELNETQVKIWFQNRRMKQKKREREEGRVPPAPPGCPKEAAGDASDQSTCTSPEASPSSVTS

SEQ ID NO: 8122 - protein, 1395 aa, Homo sapiens
MTGAEIESGAQVKPEKKPGEEVVGGAEIENDVPLVVRPKVRTQAQIMPGARPKNKSKVMPGASTKVETSAVGGARPKSKAKAIPVSRFKEEAQMWAQPRFGAERLSKTERNSQTNIIASPLVSTDSVLVAKTKYLSEDRELVNTDTESFPRRKAHYQAGFQPSFRSKEETNMGSWCCPRPTSKQEASPNSDFKWVDKSVSSLFWSGDEVTAKFHPGNRVKDSNRSMHMANQEANTMSRSQTNQELYIASSSGSEDESVKTPWFWARDKTNTWSGPREDPNSRSRFRSKKEVYVESSSGSEHEDHLESWFGAGKEAKFRSKMRAGKEANNRARHRAKREACIDFMPGSIDVIKKESCFWPEENANTFSRPMIKKEARARAMTKEEAKTKARARAKQEARSEEEALIGTWFWATDESSMADEASIESSLQVEDESIIGSWFWTEEEASMGTGASSKSRPRTDGERIGDSLFGAREKTSMKTGAEATSESILAADDEQVIIGSWFWAGEEVNQEAEEETIFGSWFWVIDAASVESGVGVSCESRTRSEEEEVIGPWFWSGEQVDIEAGIGEEARPGAEEETIFGSWFWAENQTYMDCRAETSCDTMQGAEEEEPIIGSWFWTRVEACVEGDVNSKSSLEDKEEAMIPCFGAKEEVSMKHGTGVRCRFMAGAEETNNKSCFWAEKEPCMYPAGGGSWKSRPEEEEDIVNSWFWSRKYTKPEAIIGSWLWATEESNIDGTGEKAKLLTEEETIINSWFWKEDEAISEATDREESRPEAEEGDIIGSWFWAGEEDRLEPAAETREEDRLAAEKEGIVGSWFGAREETIRREAGSCSKSSPKAEEEEVIIGSWFWEEEASPEAVAGVGFESKPGTEEEEITVGSWFWPEEEASIQAGSQAVEEMESETEEETIFGSWFWDGKEVSEEAGPCCVSKPEDDEEMIVESWFWSRDKAIKETGTVATCESKPENEEGAIVGSWFEAEDEVDNRTDNGSNCGSRTLADEDEAIVGSWFWAGDEAHFESNPSPVFRAICRSTCSVEQEPDPSRRPQSWEEVTVQFKPGPWGRVGFPSISPFRFPKEAASLFCEMFGGKPRNMVLSPEGEDQESLLQPDQPSPEFPFQYDPSYRSVQEIREHLRAKESTEPESSSCNCIQCELKIGSEEFEELLLLMEKIRDPFIHEISKIAMGMRSASQFTRDFIRDSGVVSLIETLLNYPSSRVRTSFLENMIRMAPPYPNLNIIQTYICKVCEETLAYSVDSPEQLSGIRMIRHLTTTTDYHTLVANYMSGFLSLLATGNAKTRFHVLKMLLNLSENLFMTKELLSAEAVSEFIGLFNREETNDNIQIVLAIFENIGNNIKKETVFSDDDFNIEPLISAFHKVEKFAKELQGKTDNQNDPEGDQEN

SEQ ID NO: 8123 - protein, 426 aa, Homo sapiens
MASPPRCSPTAHDRECKLPPPSAPASEYCPGKLSWGTMARALGRFKLSIPHTHLLATLDPLALDREPPPHLLPEKHQVPEKLIWGDQDPLSKIPFKILSGHEHAVSTCHFCVDDTKLLSGSYDCTVKLWDPVDGSVVRDFEHRPKAPVVECSITGDSSRVIAASYDKTVRAWDLETGKLLWKVRYDTFIVSCKFSPDGKYVVSGFDVDHGICIMDAENITTVSVIKDHHTRSITSCCFDPDSQRVASVSLDRCIKIWDVTSQATLLTITKAHSNAISNCCFTFSGHFLCTSSWDKNLKIWNVHTGEFRNCGACVTLMQGHEGSVSSCHFARDSSFLISGGFDRTVAIWDVAEGYRKLSLKGHNDWVMDVAISNNKKWILSASKDRTMRLWNIEEIDEIPLVIKYKKAVGLKLKQEKKEAYLKLKQG

SEQ ID NO: 8124 - protein, 1011 aa, Homo sapiens
MQKPSGLKPPGRGGKHSSPMGRTSTGSASSSAAVAASSKEGSPLHKQSSGPSSSPAAAAAPEKPGPKAAEVGDDFLGDFVVGERVWVNGVKPGVVQYLGETQFAPGQWAGVVLDDPVGKNDGAVGGVRYFECPALQGIFTRPSKLTRQPTAEGSGSDAHSVESLTAQNLSLHSGTATPPLTSRVIPLRESVLNSSVKTGNESGSNLSDSGSVKRGEKDLRLGDRVLVGGTKTGVVRYVGETDFAKGEWCGVELDEPLGKNDGAVAGTRYFQCPPKFGLFAPIHKVIRIGFPSTSPAKAKKTKRMAMGVSALTHSPSSSSISSVSSVASSVGGRPSRSGLLTETSSRYARKISGTTALQEALKEKQQHIEQLLAERDLERAEVAKATSHICEVEKEIALLKAQHEQYVAEAEEKLQRARLLVESVRKEKVDLSNQLEEERRKVEDLQFRVEEESITKGDLELTTVAEKSRVLQLEEELTLRRGEIEELQQCLLHSGPPPPDHPDAAEILRLRERLLSASKEHQRESGVLRDKYEKALKAYQAEVDKLRAANEKYAQEVAGLKDKVQQATSENMGLMDNWKSKLDSLASDHQKSLEDLKATLNSGPGAQQKEIGELKAVMEGIKMEHQLELGNLQAKHDLETAMHVKEKEALREKLQEAQEELAGLQRHWRAQLEVQASQHRLELQEAQDQRRDAELRVHELEKLDVEYRGQAQAIEFLKEQISLAEKKMLDYERLQRAEAQGKQEVESLREKLLVAENRLQAVEALCSSQHTHMIESNDISEETIRTKETVEGLQDKLNKRDKEVTALTSQTEMLRAQVSALESKCKSGEKKVDALLKEKRRLEAELETVSRKTHDASGQLVLISQELLRKERSLNELRVLLLEANRHSPGPERDLSREVHKAEWRIKEQKLKDDIRGLREKLTGLDKEKSLSDQRRYSLIDRSSAPELLRLQHQLMSTEDALRDALDQAQQVEKLMEAMRSCPDKAQTIGNSGSANGIHQQDKAQKQEDKH

SEQ ID NO: 8125 - protein, 1115 aa, Homo sapiens
MRRLSLWWLLSRVCLLLPPPCALVLAGVPSSSSHPQPCQILKRIGHAVRVGAVHLQPWTTAPRAASRAPDDSRAGAQRDEPEPGTRRSPAPSPGARWLGSTLHGRGPPGSRKPGEGARAEALWPRDALLFAVDNLNRVEGLLPYNLSLEVVMAIEAGLGDLPLLPFSSPSSPWSSDPFSFLQSVCHTVVVQGVSALLAFPQSQGEMMELDLVSLVLHIPVISIVRHEFPRESQNPLHLQLSLENSLSSDADVTVSILTMNNWYNFSLLLCQEDWNITDFLLLTQNNSKFHLGSIINITANLPSTQDLLSFLQIQLESIKNSTPTVVMFGCDMESIRRIFEITTQFGVMPPELRWVLGDSQNVEELRTEGLPLGLIAHGKTTQSVFEHYVQDAMELVARAVATATMIQPELALIPSTMNCMEVETTNLTSGQYLSRFLANTTFRGLSGSIRVKGSTIVSSENNFFIWNLQHDPMGKPMWTRLGSWQGGKIVMDYGIWPEQAQRHKTHFQHPSKLHLRVVTLIEHPFVFTREVDDEGLCPAGQLCLDPMTNDSSTLDSLFSSLHSSNDTVPIKFKKCCYGYCIDLLEKIAEDMNFDFDLYIVGDGKYGAWKNGHWTGLVGDLLRGTAHMAVTSFSINTARSQVIDFTSPFFSTSLGILVRTRDTAAPIGAFMWPLHWTMWLGIFVALHITAVFLTLYEWKSPFGLTPKGRNRSKVFSFSSALNICYALLFGRTVAIKPPKCWTGRFLMNLWAIFCMFCLSTYTANLAAVMVGEKIYEELSGIHDPKLHHPSQGFRFGTVRESSAEDYVRQSFPEMHEYMRRYNVPATPDGVEYLKNDPEKLDAFIMDKALLDYEVSIDADCKLLTVGKPFAIEGYGIGLPPNSPLTANISELISQYKSHGFMDMLHDKWYRVVPCGKRSFAVTETLQMGIKHFSGLFVLLCIGFGLSILTTIGEHIVYRLLLPRIKNKSKLQYWLHTSQRLHRAINTSFIEEKQQHFKTKRVEKRSNVGPRQLTVWNTSNLSHDNRRKYIFSDEEGQNQLGIRIHQDIPLPPRRRELPALRTTNGKADSLNVSRNSVMQELSELEKQIQVIRQELQLAVSRKTELEEYQRTSRTCES

SEQ ID NO: 8126 - protein, 334 aa, Homo sapiens
MLGIMAWNATCKNWLAAEAALEKYYLSIFYGIEFVVGVLGNTIVVYGYIFSLKNWNSSNIYLFNLSVSDLAFLCTLPMLIRSYANGNWIYGDVLCISNRYVLHANLYTSILFLTFISIDRYLIIKYPFREHLLQKKEFAILISLAIWVLVTLELLPILPLINPVITDNGTTCNDFASSGDPNYNLIYSMCLTLLGFLIPLFVMCFFYYKIALFLKQRNRQVATALPLEKPLNLVIMAVVIFSVLFTPYHVMRNVRIASRLGSWKQYQCTQVVINSFYIVTRPLAFLNSVINPVFYFLLGDHFRDMLMNQLRHNFKSLTSFSRWAHELLLSFREK

SEQ ID NO: 8127 - protein, 512 aa, Homo sapiens
MAEASVDASTLPVTVKKKKSLSIEEKIDIINAVESGKKKAEIAAEYGIKKNSLSSIMKNKDKVLEAFESLRFDPKRKRLRTAFYTDLEEALMRWYRIAQCLNVPVNGPMLRLKANDFAQKLGHNDFKCSNGWLDRFKSRYGLVFRAQPVEATGVPVDPSTVWYQNVLPYYLNDYHPKNVFNIKETGLLYRMLPTNTFAFKGETCSVGKLCKDRITLVVGTNMDGSEKLPLLVIGKKRTPHCFKGLKSLPVCYEANRMAWMTSDVFEQWMRKLDEEFQAQQRRVVIFVESFPAHPEVKNLKSIELAFFPSCLSSKCIAMKQGVIKSLKIKYRHCLIKKFLSSVEGSKEFTFSLLDAVDTLHLCWRAVTPETIVKSYEEAGFKSQKGESDITNAEKDTGLDLVADALGAGVEFPEGLSIEEYAALDDDLETCEAAPNGDSICTKESKSDETGFYTSDEEDDDGSPGTELPLPSKSEAITALDTLKKFLRSQDMNDGLQNSLADLENFINSLSPK

SEQ ID NO: 8128 - protein, 1119 aa, Homo sapiens
MQMVPSLPPASECAGEEKRVGTRTVFVGNHPVSETEAYIAQRFCDNRIVSSKYTLWNFLPKNLFEQFRRIANFYFLIIFLVQVTVDTPTSPVTSGLPLFFVITVTAIKQGYEDCLRHRADNEVNKSTVYIIENAKRVRKESEKIKVGDVVEVQADETFPCDLILLSSCTTDGTCYVTTASLDGESNCKTHYAVRDTIALCTAESIDTLRAAIECEQPQPDLYKFVGRINIYSNSLEAVARSLGPENLLLKGATLKNTEKIYGVAVYTGMETKMALNYQGKSQKRSAVEKSINAFLIVYLFILLTKAAVCTTLKYVWQSTPYNDEPWYNQKTQKERETLKVLKMFTDFLSFMVLFNFIIPVSMYVTVEMQKFLGSFFISWDKDFYDEEINEGALVNTSDLNEELGQVDYVFTDKTGTLTENSMEFIECCIDGHKYKGVTQEVDGLSQTDGTLTYFDKVDKNREELFLRALCLCHTVEIKTNDAVDGATESAELTYISSSPDEIALVKGAKRYGFTFLGNRNGYMRVENQRKEIEEYELLHTLNFDAVRRRMSVIVKTQEGDILLFCKGADSAVFPRVQNHEIELTKVHVERNAMDGYRTLCVAFKEIAPDDYERINRQLIEAKMALQDREEKMEKVFDDIETNMNLIGATAVEDKLQDQAAETIEALHAAGLKVWVLTGDKMETAKSTCYACRLFQTNTELLELTTKTIEESERKEDRLHELLIEYRKKLLHEFPKSTRSFKKAWTEHQEYGLIIDGSTLSLILNSSQDSSSNNYKSIFLQICMKCTAVLCCRMAPLQKAQIVRMVKNLKGSPITLSIGDGANDVSMILESHVGIGIKGKEGRQAARNSDYSVPKFKHLKKLLLAHGHLYYVRIAHLVQYFFYKNLCFILPQFLYQFFCGFSQQPLYDAAYLTMYNICFTSLPILAYSLLEQHINIDTLTSDPRLYMKISGNAMLQLGPFLYWTFLAAFEGTVFFFGTYFLFQTASLEENGKVYGNWTFGTIVFTVLVFTVTLKLALDTRFWTWINHFVIWGSLAFYVFFSFFWGGIIWPFLKQQRMYFVFAQMLSSVSTWLAIILLIFISLFPEILLIVLKNVRRRSARNPNLELPMLLSYKHTDSGYS

SEQ ID NO: 8129 - protein, 277 aa, Homo sapiens
MGNTIRALVAFIPADRCQNYVVRDLREMPLDKMVDLSGSQLRRFPLHVCSFRELVKLYLSDNHLNSLPPELGQLQNLQILALDFNNFKALPQVVCTLKQLCILYLGNNKLCDLPSELSLLQNLRTLWIEANCLTQLPDVVCELSLLKTLHAGSNALRLLPGQLRRLQELRTIWLSGNRLTDFPTVLLHMPFLEVIDVDWNSIRYFPSLAHLSSLKLVIYDHNPCRNAPKVAKGVRRVGRWAEETPEPDPRKARRYALVREESQELQAPVPLLPPTNS

SEQ ID NO: 8130 - protein, 394 aa, Homo sapiens
MATAQLQRTPMSALVFPNKISTEHQSLVLVKRLLAVSVSCITYLRGIFPECAYGTRYLDDLCVKILREDKNCPGSTQLVKWMLGCYDALQKKYLRMVVLAVYTNPEDPQTISECYQFKFKYTNNGPLMDFISKNQSNESSMLSTDTKKASILLIRKIYILMQNLGPLPNDVCLTMKLFYYDEVTPPDYQPPGFKDGDCEGVIFEGEPMYLNVGEVSTPFHIFKVKVTTERERMENIDSTILSPKQIKTPFQKILRDKDVEDEQEHYTSDDLDIETKMEEQEKNPASSELEEPSLVCEEDEIMRSKESPDLSISHSQVEQLVNKTSELDMSESKTRSGKVFQNKMANGNQPVKSSKENRKRSQHESGRIVLHHFDSSSQESVPKRRKFSEPKEHI

SEQ ID NO: 8131 - protein, 839 aa, Homo sapiens
MAQFDTEYQRLEASYSDSPPGEEDLLVHVAEGSKSPWHHIENLDLFFSRVYNLHQKNGFTCMLIGEIFELMQFLFVVAFTTFLVSCVDYDILFANKMVNHSLHPTEPVKVTLPDAFLPAQVCSARIQENGSLITILVIAGVFWIHRLIKFIYNICCYWEIHSFYLHALRIPMSALPYCTWQEVQARIVQTQKEHQICIHKRELTELDIYHRILRFQNYMVALVNKSLLPLRFRLPGLGEAVFFTRGLKYNFELILFWGPGSLFLNEWSLKAEYKRGGQRLELAQRLSNRILWIGIANFLLCPLILIWQILYAFFSYAEVLKREPGALGARCWSLYGRCYLRHFNELEHELQSRLNRGYKPASKYMNCFLSPLLTLLAKNGAFFAGSILAVLIALTIYDEDVLAVEHVLTTVTLLGVTVTVCRSFIPDQHMVFCPEQLLRVILAHIHYMPDHWQGNAHRSQTRDEFAQLFQYKAVFILEELLSPIVTPLILIFCLRPRALEIIDFFRNFTVEVVGVGDTCSFAQMDVRQHGHPQWLSAGQTEASVYQQAEDGKTELSLMHFAITNPGWQPPRESTAFLGFLKEQVQRDGAAASLAQGGLLPENALFTSIQSLQSESEPLSLIANVVAGSSCRGPPLPRDLQGSRHRAEVASALRSFSPLQPGQAPTGRAHSTMTGSGVDARTASSGSSVWEGQLQSLVLSEYASTEMSLHALYMHQLHKQQAQAEPERHVWHRRESDESGESAPDEGGEGARAPQSIPRSASYPCAAPRPGAPETTALHGGFQRRYGGITDPGTVPRVPSHFSRLPLGGWAEDGQSASRHPEPVPEEGSEDELPPQVHKV

SEQ ID NO: 8132 - protein, 1516 aa, Homo sapiens
MDSPPKLTGETLIVHHIPLVHCQVPDRQCCGGAGGGGGSTRPNPFCPPELGITQPDQDLGQADSLLFSSLHSTPGGTARSIDSTKSRSRDGRGPGAPKRHNPFLLQEGVGEPGLGDLYDDSIGDSATQQSFHLHGTGQPNFHLSSFQLPPSGPRVGRPWGTTRSRAGVVEGQEQEPVMTLDTQQCGTSHCCRPELEAETMELDECGGPGGSGSGGGASDTSGFSFDQEWKLSSDESPRNPGCSGSGDQHCRCSSTSSQSEAADQSMGYVSDSSCNSSDGVLVTFSTLYNKMHGTPRANLNSAPQSCSDSSFCSHSDPGAFYLDLQPSPFESKMSYESHHPESGGREGGYGCPHASSPELDANCNSYRPHCEPCPAVADLTACFQSQARLVVATQNYYKLVTCDLSSQSSPSPAGSSITSCSEEHTKISPPPGPGPDPGPSQPSEYYLFQKPEVQPEEQEAVSSSTQAAAAVGPTVLEGQVYTNTSPPNLSTGRQRSRSYDRSLQRSPPVRLGSLERMLSCPVRLSEGPAAMAGPGSPPRRVTSFAELAKGRKKTGGSGSPPLRVSVGDSSQEFSPIQEAQQDRGAPLDEGTCCSHSLPPMPLGPGMDLLGPDPSPPWSTQVCQGPHSSEMPPAGLRATGQGPLAQLMDPGPALPGSPANSHTQRDARARADGGGTESRPVLRYSKEQRPTTLPIQPFVFQHHFPKQLAKARALHSLSQLYSLSGCSRTQQPAPLAAPAAQVSVPAPSGEPQASTPRATGRGARKAGSEPETSRPSPLGSYSPIRSVGPFGPSTDSSASTSCSPPPEQPTATESLPPWSHSCPSAVRPATSQQPQKEDQKILTLTEYRLHGTGSLPPLGSWRSGLSRAESLARGGGEGSMATRPSNANHLSPQALKWREYRRKNPLGPPGLSGSLDRRSQEARLARRNPIFEFPGSLSAASHLNCRLNGQAVKPLPLTCPDFQDPFSLTEKPPAEFCLSPDGSSEAISIDLLQKKGLVKAVNIAVDLIVAHFGTSRDPGVKAKLGNSSVSPNVGHLVLKYLCPAVRAVLEDGLKAFVLDVIIGQRKNMPWSVVEASTQLGPSTKVLHGLYNKVSQFPELTSHTMRFNAFILGLLNIRSLEFWFNHLYNHEDIIQTHYQPWGFLSAAHTVCPGLFEELLLLLQPLALLPFSLDLLFQHRLLQSGQQQRQHKELLRVSQDLLLSAHSTLQLARARGQEGPGDVDRAAQGERVKGVGASEGGEEEEEEEETEEVAEAAGGSGRARWARGGQAGWWYQLMQSSQVYIDGSIEGSRFPRGSSNSSSEKKKGAGGGGPPQAPPPREGVVEGAEACPASEEALGRERGWPFWMGSPPDSVLAELRRSREREGPAASPAENEEGASEPSPGGIKWGHLFGSRKAQREARPTNRLPSDWLSLDKSMFQLVAQTVGSRREPEPKESLQEPHSPALPSSPPCEVQALCHHLATGPGQLSFHKGDILRVLGRAGGDWLRCSRGPDSGLVPLAYVTLTPTPSPTPGSSQN

SEQ ID NO: 8133 - protein, 645 aa, Homo sapiens
MNASSEGESFAGSVQIPGGTTVLVELTPDIHICGICKQQFNNLDAFVAHKQSGCQLTGTSAAAPSTVQFVSEETVPATQTQTTTRTITSETQTITVSAPEFVFEHGYQTYLPTESNENQTATVISLPAKSRTKKPTTPPAQKRLNCCYPGCQFKTAYGMKDMERHLKIHTGDKPHKCEVCGKCFSRKDKLKTHMRCHTGVKPYKCKTCDYAAADSSSLNKHLRIHSDERPFKCQICPYASRNSSQLTVHLRSHTASELDDDVPKANCLSTESTDTPKAPVITLPSEAREQMATLGERTFNCCYPGCHFKTVHGMKDLDRHLRIHTGDKPHKCEFCDKCFSRKDNLTMHMRCHTSVKPHKCHLCDYAAVDSSSLKKHLRIHSDERPYKCQLCPYASRNSSQLTVHLRSHTGDTPFQCWLCSAKFKISSDLKRHMIVHSGEKPFKCEFCDVRCTMKANLKSHIRIKHTFKCLHCAFQGRDRADLLEHSRLHQADHPEKCPECSYSCSSAAALRVHSRVHCKDRPFKCDFCSFDTKRPSSLAKHVDKVHRDEAKTENRAPLGKEGLREGSSQHVAKIVTQRAFRCETCGASFVRDDSLRCHKKQHSDQSENKNSDLVTFPPESGASGQLSTLVSVGQLEAPLEPSQDL

SEQ ID NO: 8134 - protein, 1028 aa, Homo sapiens
MRAARALLPLLLQACWTAAQDEPETPRAVAFQDCPVDLFFVLDTSESVALRLKPYGALVDKVKSFTKRFIDNLRDRYYRCDRNLVWNAGALHYSDEVEIIQGLTRMPGGRDALKSSVDAVKYFGKGTYTDCAIKKGLEQLLVGGSHLKENKYLIVVTDGHPLEGYKEPCGGLEDAVNEAKHLGVKVFSVAITPDHLEPRLSIIATDHTYRRNFTAADWGQSRDAEEAISQTIDTIVDMIKNNVEQVCCSFECQPARGPPGLRGDPGFEGERGKPGLPGEKGEAGDPGRPGDLGPVGYQGMKGEKGSRGEKGSRGPKGYKGEKGKRGIDGVDGVKGEMGYPGLPGCKGSPGFDGIQGPPGPKGDPGAFGLKGEKGEPGADGEAGRPGSSGPSGDEGQPGEPGPPGEKGEAGDEGNPGPDGAPGERGGPGERGPRGTPGTRGPRGDPGEAGPQGDQGREGPVGVPGDPGEAGPIGPKGYRGDEGPPGSEGARGAPGPAGPPGDPGLMGERGEDGPAGNGTEGFPGFPGYPGNRGAPGINGTKGYPGLKGDEGEAGDPGDDNNDIAPRGVKGAKGYRGPEGPQGPPGHQGPPGPDECEILDIIMKMCSCCECKCGPIDLLFVLDSSESIGLQNFEIAKDFVVKVIDRLSRDELVKFEPGQSYAGVVQYSHSQMQEHVSLRSPSIRNVQELKEAIKSLQWMAGGTFTGEALQYTRDQLLPPSPNNRIALVITDGRSDTQRDTTPLNVLCSPGIQVVSVGIKDVFDFIPGSDQLNVISCQGLAPSQGRPGLSLVKENYAELLEDAFLKNVTAQICIDKKCPDYTCPITFSSPADITILLDGSASVGSHNFDTTKRFAKRLAERFLTAGRTDPAHDVRVAVVQYSGTGQQRPERASLQFLQNYTALASAVDAMDFINDATDVNDALGYVTRFYREASSGAAKKRLLLFSDGNSQGATPAAIEKAVQEAQRAGIEIFVVVVGRQVNEPHIRVLVTGKTAEYDVAYGESHLFRVPSYQALLRGVFHQTVSRKVALG

SEQ ID NO: 8135 - protein, 548 aa, Homo sapiens
MAGAIASRMSFSSLKRKQPKTFTVRIVTMDAEMEFNCEVLDHDVSKEEPVTFHFLAKFYPENAEEELVQEITQHLFFLQVKKQILDEKIYCPPEASVLLASYAVQAKYGDYDPSVHKRGFLAQEELLPKRVINLYQMTPEMWEERITAWYAEHRGRARDEAEMEYLKIAQDLEMYGVNYFAIRNKKGTELLLGVDALGLHIYDPENRLTPKISFPWNEIRNISYSDKEFTIKPLDKKIDVFKFNSSKLRVNKLILQLCIGNHDLFMRRRKADSLEVQQMKAQAREEKARKQMERQRLAREKQMREEAERTRDELERRLLQMKEEATMANEALMRSEETADLLAEKAQITEEEAKLLAQKAAEAEQEMQRIKATAIRTEEEKRLMEQKVLEAEVLALKMAEESERRAKEADQLKQDLQEAREAERRAKQKLLEIATKPTYPPMNPIPAPLPPDIPSFNLIGDSLSFDFKDTDMKRLSMEIEKEKVEYMEKSKHLQEQLNELKTEIEALKLKERETALDILHNENSDRGGSSKHNTIKKPQAQGRRPICI

SEQ ID NO: 8136 - protein, 1040 aa, Homo sapiens
MLEDISEEDIWEYKSKRKPKRVDPNNGSKNILKSVEKATDGKYQSKRSRNRKRAAEAKEVKDHEVPLGNAGCQTSVASSQNSSCGDGIQQTQDKETTPGKLCRTQKSQHVSPKIRPVYDGYCPNCQMPFSSLIGQTPRWHVFECLDSPPRSETECPDGLLCTSTIPFHYKRYTHFLLAQSRAGDHPFSSPSPASGGSFSETKSGVLCSLEERWSSYQNQTDNSVSNDPLLMTQYFKKSPSLTEASEKISTHIQTSQQALQFTDFVENDKLVGVALRLANNSEHINLPLPENDFSDCEISYSPLQSDEDTHDIDEKPDDSQEQLFFTESSKDGSLEEDDDSCGFFKKRHGPLLKDQDESCPKVNSFLTRDKYDEGLYRFNSLNDLSQPISQNNESTLPYDLACTGGDFVLFPPALAGKLAASVHQATKAKPDEPEFHSAQSNKQKQVIEESSVYNQVSLPLVKSLMLKPFESQVEGYLSSQPTQNTIRKLSSENLNAKNNTNSACFCRKALEGVPVGKATILNTENLSSTPAPKYLKILPSGLKYNARHPSTKVMKQMDIGVYFGLPPKRKEEKLLGESALEGINLNPVPSPNQKRSSQCKRKAEKSLSDLEFDASTLHESQLSVELSSERSQRQKKRCRKSNSLQEGACQKRSDHLINTESEAVNLSKVKVFTKSAHGGLQRGNKKIPESSNVGGSRKKTCPFYKKIPGTGFTVDAFQYGVVEGCTAYFLTHFHSDHYAGLSKHFTFPVYCSEITGNLLKNKLHVQEQYIHPLPLDTECIVNGVKVVLLDANHCPGAVMILFYLPNGTVILHTGDFRADPSMERSLLADQKVHMLYLDTTYCSPEYTFPSQQEVIRFAINTAFEAVTLNPHALVVCGTYSIGKEKVFLAIADVLGSKVGMSQEKYKTLQCLNIPEINSLITTDMCSSLVHLLPMMQINFKGLQSHLKKCGGKYNQILAFRPTGWTHSNKFTRIADVIPQTKGNISIYGIPYSEHSSYLEMKRFVQWLKPQKIIPTVNVGTWKSRSTMEKYFREWKLEAGY

SEQ ID NO: 8137 - protein, 563 aa, Homo sapiens
MANAEVSVPVGDVVVVPTEGNEGENPEDTKTQVILQLQPVQQGIYEAGSENNTAVVAVETHTIHKIEEGIDTGTIEANEDMEIAYPITCGESKAILLWKKFVCPGINVKCVKFNDQLISPKHFVHLAGKSTLKDWKRAIRLGGIMLRKMMDSGQIDFYQHDKVCSNTCRSTKFDLLISSARAPVPGQQTSVVQTPTSADGSITQIAISEESMEEAGLEWNSALTAAVTMATEEGVKKDSEEISEDTLMFWKGIADVGLMEEVVCNIQKEIEELLRGVQQRLIQAPFQVTDAAVLNNVAHTFGLMDTVKKVLDNRRNQVEQGEEQFLYTLTDLERQLEEQKKQGQDHRLKSQTVQNVVLMPVSTPKPPKRPRLQRPASTTVLSPSPPVQQPQFTVISPITITPVGQSFSMGNIPVATLSQGSSPVTVHTLPSGPQLFRYATVVSSAKSSSPDTVTIHPSSSLALLSSTAMQDGSTLGNMTTMVSPVELVAMESGLTSAIQAVESTSEDGQTIIEIDPAPDPEAEDTEGKAVILETELRTEEKVVAEMEEHQHQVHNVEIVVLED

SEQ ID NO: 8138 - protein, 581 aa, Homo sapiens
MGFNVIRLLSGSAVALVIAPTVLLTMLSSAERGCPKGCRCEGKMVYCESQKLQEIPSSISAGCLGLSLRYNSLQKLKYNQFKGLNQLTWLYLDHNHISNIDENAFNGIRRLKELILSSNRISYFLNNTFRPVTNLRNLDLSYNQLHSLGSEQFRGLRKLLSLHLRSNSLRTIPVRIFQDCRNLELLDLGYNRIRSLARNVFAGMIRLKELHLEHNQFSKLNLALFPRLVSLQNLYLQWNKISVIGQTMSWTWSSLQRLDLSGNEIEAFSGPSVFQCVPNLQRLNLDSNKLTFIGQEILDSWISLNDISLAGNIWECSRNICSLVNWLKSFKGLRENTIICASPKELQGVNVIDAVKNYSICGKSTTERFDLARALPKPTFKPKLPRPKHESKPPLPPTVGATEPGPETDADAEHISFHKIIAGSVALFLSVLVILLVIYVSWKRYPASMKQLQQRSLMRRHRKKKRQSLKQMTPSTQEFYVDYKPTNTETSEMLLNGTGPCTYNKSGSRECEIPLSMNVSTFLAYDQPTISYCGVHHELLSHKSFETNAQEDTMETHLETELDLSTITTAGRISDHKQQLA

SEQ ID NO: 8139 - protein, 1873 aa, Homo sapiens
MEPSSPQDEGLRKKQPKKPVPEILPRPPRALFCLTLENPLRKACISIVEWKPFETIILLTIFANCVALAVYLPMPEDDNNSLNLGLEKLEYFFLIVFSIEAAMKIIAYGFLFHQDAYLRSGWNVLDFTIVFLGVFTVILEQVNVIQSHTAPMSSKGAGLDVKALRAFRVLRPLRLVSGVPSLQVVLNSIFKAMLPLFHIALLVLFMVIIYAIIGLELFKGKMHKTCYFIGTDIVATVENEEPSPCARTGSGRRCTINGSECRGGWPGPNHGITHFDNFGFSMLTVYQCITMEGWTDVLYWVNDAIGNEWPWIYFVTLILLGSFFILNLVLGVLSGEFTKEREKAKSRGTFQKLREKQQLDEDLRGYMSWITQGEVMDVEDFREGKLSLDEGGSDTESLYEIAGLNKIIQFIRHWRQWNRIFRWKCHDIVKSKVFYWLVILIVALNTLSIASEHHNQPLWLTRLQDIANRVLLSLFTTEMLMKMYGLGLRQYFMSIFNRFDCFVVCSGILEILLVESGAMTPLGISVLRCIRLLRIFKITKYWTSLSNLVASLLNSIRSIASLLLLLFLFIVIFALLGMQLFGGRYDFEDTEVRRSNFDNFPQALISVFQVLTGEDWTSMMYNGIMAYGGPSYPGMLVCIYFIILFVCGNYILLNVFLAIAVDNLAEAESLTSAQKAKAEEKKRRKMSKGLPDKSEEEKSTMAKKLEQKPKGEGIPTTAKLKIDEFESNVNEVKDPYPSADFPGDDEEDEPEIPLSPRPRPLAELQLKEKAVPIPEASSFFIFSPTNKIRVLCHRIVNATWFTNFILLFILLSSAALAAEDPIRADSMRNQILKHFDIGFTSVFTVEIVLKMTTYGAFLHKGSFCRNYFNMLDLLVVAVSLISMGLESSAISVVKILRVLRVLRPLRAINRAKGLKHVVQCMFVAISTIGNIVLVTTLLQFMFACIGVQLFKGKFFRCTDLSKMTEEECRGYYYVYKDGDPMQIELRHREWVHSDFHFDNVLSAMMSLFTVSTFEGWPQLLYKAIDSNAEDVGPIYNNRVEMAIFFIIYIILIAFFMMNIFVGFVIVTFQEQGETEYKNCELDKNQRQCVQYALKARPLRCYIPKNPYQYQVWYIVTSSYFEYLMFALIMLNTICLGMQHYNQSEQMNHISDILNVAFTIIFTLEMILKLMAFKARGYFGDPWNVFDFLIVIGSIIDVILSEIDTFLASSGGLYCLGGGCGNVDPDESARISSAFFRLFRVMRLIKLLSRAEGVRTLLWTFIKSFQALPYVALLIVMLFFIYAVIGMQMFGKIALVDGTQINRNNNFQTFPQAVLLLFRCATGEAWQEILLACSYGKLCDPESDYAPGEEYTCGTNFAYYYFISFYMLCAFLVINLFVAVIMDNFDYLTRDWSILGPHHLDEFKAIWAEYDPEAKGRIKHLDVVTLLRRIQPPLGFGKFCPHRVACKRLVGMNMPLNSDGTVTFNATLFALVRTALKIKTEGNFEQANEELRAIIKKIWKRTSMKLLDQVIPPIGDDEVTVGKFYATFLIQEHFRKFMKRQEEYYGYRPKKDIVQIQAGLRTIEEEAAPEICRTVSGDLAAEEELERAMVEAAMEEGIFRRTGGLFGQVDNFLERTNSLPPVMANQRPLQFAEIEMEEMESPVFLEDFPQDPRTNPLARANTNNANANVAYGNSNHSNSHVFSSVHYEREFPEETETPATRGRALGQPCRVLGPHSKPCVEMLKGLLTQRAMPRGQAPPAPCQCPRVESSMPEDRKSSTPGSLHEETPHSRSTRENTSRCSAPATALLIQKALVRGGLGTLAADANFIMATGQALADACQMEPEEVEIMATELLKGREAPEGMASSLGCLNLGSSLGSLDQHQGSQETLIPPRL

SEQ ID NO: 8140 - protein, 567 aa, Homo sapiens
MWLRAFILATLSASAAWGHPSSPPVVDTVHGKVLGKFVSLEGFAQPVAIFLGIPFAKPPLGPLRFTPPQPAEPWSFVKNATSYPPMCTQDPKAGQLLSELFTNRKENIPLKLSEDCLYLNIYTPADLTKKNRLPVMVWIHGGGLMVGAASTYDGLALAAHENVVVVTIQYRLGIWGFFSTGDEHSRGNWGHLDQVAALRWVQDNIASFGGNPGSVTIFGESAGGESVSVLVLSPLAKNLFHRAISESGVALTSVLVKKGDVKPLAEQIAITAGCKTTTSAVMVHCLRQKTEEELLETTLKMKFLSLDLQGDPRESQPLLGTVIDGMLLLKTPEELQAERNFHTVPYMVGINKQEFGWLIPMQLMSYPLSEGQLDQKTAMSLLWKSYPLVCIAKELIPEATEKYLGGTDDTVKKKDLFLDLIADVMFGVPSVIVARNHRDAGAPTYMYEFQYRPSFSSDMKPKTVIGDHGDELFSVFGAPFLKEGASEEEIRLSKMVMKFWANFARNGNPNGEGLPHWPEYNQKEGYLQIGANTQAAQKLKDKEVAFWTNLFAKKAVEKPPQTEHIEL

SEQ ID NO: 8141 - protein, 370 aa, Homo sapiens
MPTETLQTGSMVKPVSPAGTFTSAVPLRILNKGPDYFRRQAEPNPKRLSAVERLEADKAKYVKSQEVINAKQEPVKPAVLAKPPVCPAAKRALGSPTLKVFGNHAKTESGVQRENLKLEILKNIINSSEGSSSGSGHKHSSRNWPPHRSEATDLHRHSFAESLKVYPTQGRRSPQEGGSHVGRRLLEQSAESFLHVSHSSSDIRKVTSVKPLKAIPCSSSAPPLPPKPKIAAIASMKSPEADPVEPACGVSRRPSLQRSKSDLSDRYFRVDADVERFFNYCGLDPEELENLGMENFARANSDIISLNFRSASMISSDCEQSQDSNSDLRNDDSANDRVPYGISAIERNARIIKWLYSIKQARESQKVSHV

SEQ ID NO: 8142 - protein, 582 aa, Homo sapiens
MIFLTALPLFWIMISASRGGHWGAWMPSSISAFEGTCVSIPCRFDFPDELRPAVVHGVWYFNSPYPKNYPPVVFKSRTQVVHESFQGRSRLLGDLGLRNCTLLLSNVSPELGGKYYFRGDLGGYNQYTFSEHSVLDIVNTPNIVVPPEVVAGTEVEVSCMVPDNCPELRPELSWLGHEGLGEPAVLGRLREDEGTWVQVSLLHFVPTREANGHRLGCQASFPNTTLQFEGYASMDVKYPPVIVEMNSSVEAIEGSHVSLLCGADSNPPPLLTWMRDGTVLREAVAESLLLELEEVTPAEDGVYACLAENAYGQDNRTVGLSVMYAPWKPTVNGTMVAVEGETVSILCSTQSNPDPILTIFKEKQILSTVIYESELQLELPAVSPEDDGEYWCVAENQYGQRATAFNLSVEFAPVLLLESHCAAARDTVQCLCVVKSNPEPSVAFELPSRNVTVNESEREFVYSERSGLVLTSILTLRGQAQAPPRVICTARNLYGAKSLELPFQGAHRLMWAKIGPVGAVVAFAILIAIVCYITQTRRKKNVTESPSFSAGDNPPVLFSSDFRISGAPEKYESKEVSTLESH

SEQ ID NO: 8143 - protein, 1711 aa, Homo sapiens
MSAKVRLKKLEQLLLDGPWRNESALSVETLLDVLVCLYTECSHSALRRDKYVAEFLEWAKPFTQLVKEMQLHREDFEIIKVIGRGAFGEVAVVKMKNTERIYAMKILNKWEMLKRAETACFREERDVLVNGDCQWITALHYAFQDENHLYLVMDYYVGGDLLTLLSKFEDKLPEDMARFYIGEMVLAIDSIHQLHYVHRDIKPDNVLLDVNGHIRLADFGSCLKMNDDGTVQSSVAVGTPDYISPEILQAMEDGMGKYGPECDWWSLGVCMYEMLYGETPFYAESLVETYGKIMNHEERFQFPSHVTDVSEEAKDLIQRLICSRERRLGQNGIEDFKKHAFFEGLNWENIRNLEAPYIPDVSSPSDTSNFDVDDDVLRNTEILPPGSHTGFSGLHLPFIGFTFTTESCFSDRGSLKSIMQSNTLTKDEDVQRDLEHSLQMEAYERRIRRLEQEKLELSRKLQESTQTVQSLHGSSRALSNSNRDKEIKKLNEEIERLKNKIADSNRLERQLEDTVALRQEREDSTQRLRGLEKQHRVVRQEKEELHKQLVEASERLKSQAKELKDAHQQRKLALQEFSELNERMAELRAQKQKVSRQLRDKEEEMEVATQKVDAMRQEMRRAEKLRKELEAQLDDAVAEASKERKLREHSENFCKQMESELEALKVKQGGRGAGATLEHQQEISKIKSELEKKVLFYEEELVRREASHVLEVKNVKKEVHDSESHQLALQKEILMLKDKLEKSKRERHNEMEEAVGTIKDKYERERAMLFDENKKLTAENEKLCSFVDKLTAQNRQLEDELQDLAAKKESVAHWEAQIAEIIQWVSDEKDARGYLQALASKMTEELEALRSSSLGSRTLDPLWKVRRSQKLDMSARLELQSALEAEIRAKQLVQEELRKVKDANLTLESKLKDSEAKNRELLEEMEILKKKMEEKFRADTGLKLPDFQDSIFEYFNTAPLAHDLTFRTSSASEQETQAPKPEASPSMSVAASEQQEDMARPPQRPSAVPLPTTQALALAGPKPKAHQFSIKSFSSPTQCSHCTSLMVGLIRQGYACEVCSFACHVSCKDGAPQVCPIPPEQSKRPLGVDVQRGIGTAYKGHVKVPKPTGVKKGWQRAYAVVCDCKLFLYDLPEGKSTQPGVIASQVLDLRDDEFSVSSVLASDVIHATRRDIPCIFRVTASLLGAPSKTSSLLILTENENEKRKWVGILEGLQSILHKNRLRNQVVHVPLEAYDSSLPLIKAILTAAIVDADRIAVGLEEGLYVIEVTRDVIVRAADCKKVHQIELAPREKIVILLCGRNHHVHLYPWSSLDGAEGSFDIKLPETKGCQLMATATLKRNSGTCLFVAVKRLILCYEIQRTKPFHRKFNEIVAPGSVQCLAVLRDRLCVGYPSGFCLLSIQGDGQPLNLVNPNDPSLAFLSQQSFDALCAVELESEEYLLCFSHMGLYVDPQGRRARAQELMWPAAPVACSCSPTHVTVYSEYGVDVFDVRTMEWVQTIGLRRIRPLNSEGTLNLLNCEPPRLIYFKSKFSGAVLNVPDTSDNSKKQMLRTRSKRRFVFKVPEEERLQQRREMLRDPELRSKMISNPTNFNHVAHMGPGDGMQVLMDLPLSAVPPSQEERPGPAPTNLARQPPSRNKPYISWPSSGGSEPSVTVPLRSMSDPDQDFDKEPDSDSTKHSTPSNSSNPSGPPSPNSPHRSQLPLEGLEQPACDT

SEQ ID NO: 8144 - protein, 535 aa, Homo sapiens
MVGEDADLPCHLFPTMSAETMELRWVSSSLRQVVNVYADGKEVEDRQSAPYRGRTSILRDGITAGKAALRIHNVTASDSGKYLCYFQDGDFYEKALVELKVAALGSDLHIEVKGYEDGGIHLECRSTGWYPQPQIKWSDTKGENIPAVEAPVVADGVGLYAVAASVIMRGSSGGGVSCIIRNSLLGLEKTASISIADPFFRSAQPWIAALAGTLPISLLLLAGASYFLWRQQKEKIALSRETEREREMKEMGYAATEQEISLREWRKIQYMARGEKSLAYHEWKMALFKPADVILDPDTANAILLVSEDQRSVQRAEEPRDLPDNPERFEWRYCVLGCENFTSGRHYWEVEVGDRKEWHIGVCSKNVERKKGWVKMTPENGYWTMGLTDGNKYRALTEPRTNLKLPEPPRKVGIFLDYETGEISFYNATDGSHIYTFPHASFSEPLYPVFRILTLEPTALTICPIPKEVESSPDPDLVPDHSLETPLTPGLANESGEPQAEVTSLLLPAHPGAEVSPSATTNQNHKLQARTEALY

SEQ ID NO: 8145 - protein, 1069 aa, Homo sapiens
MLRMRTAGWARGWCLGCCLLLPLSLSLAAAKQLLRYRLAEEGPADVRIGNVASDLGIVTGSGEVTFSLESGSEYLKIDNLTGELSTSERRIDREKLPQCQMIFDENECFLDFEVSVIGPSQSWVDLFEGQVIVLDINDNTPTFPSPVLTLTVEENRPVGTLYLLPTATDRDFGRNGIERYELLQEPGGGGSGGESRRAGAADSAPYPGGGGNGASGGGSGGSKRRLDASEGGGGTNPGGRSSVFELQVADTPDGEKQPQLIVKGALDREQRDSYELTLRVRDGGDPPRSSQAILRVLITDVNDNSPRFEKSVYEADLAENSAPGTPILQLRAADLDVGVNGQIEYVFGAATESVRRLLRLDETSGWLSVLHRIDREEVNQLRFTVMARDRGQPPKTDKATVVLNIKDENDNVPSIEIRKIGRIPLKDGVANVAEDVLVDTPIALVQVSDRDQGENGVVTCTVVGDVPFQLKPASDTEGDQNKKKYFLHTSTPLDYEATREFNVVIVAVDSGSPSLSSNNSLIVKVGDTNDNPPMFGQSVVEVYFPENNIPGERVATVLATDADSGKNAEIAYSLDSSVMGIFAIDPDSGDILVNTVLDREQTDRYEFKVNAKDKGIPVLQGSTTVIVQVADKNDNDPKFMQDVFTFYVKENLQPNSPVGMVTVMDADKGRNAEMSLYIEENNNIFSIENDTGTIYSTMSFDREHQTTYTFRVKAVDGGDPPRSATATVSLFVMDENDNAPTVTLPKNISYTLLPPSSNVRTVVATVLATDSDDGINADLNYSIVGGNPFKLFEIDPTSGVVSLVGKLTQKHYGLHRLVVQVNDSGQPSQSTTTLVHVFVNESVSNATAIDSQIARSLHIPLTQDIAGDPSYEISKQRLSIVIGVVAGIMTVILIILIVVMARYCRSKNKNGYEAGKKDHEDFFTPQQHDKSKKPKKDKKNKKSKQPLYSSIVTVEASKPNGQRYDSVNEKLSDSPSMGRYRSVNGGPGSPDLARHYKSSSPLPTVQLHPQSPTAGKKHQAVQDLPPANTFVGAGDNISIGSDHCSEYSCQTNNKYSKQMRLHPYITVFG

SEQ ID NO: 8146 - protein, 341 aa, Homo sapiens
MEPAFGEVNQLGGVFVNGRPLPNAIRLRIVELAQLGIRPCDISRQLRVSHGCVSKILARYNETGSILPGAIGGSKPRVTTPTVVKHIRTYKQRDPGIFAWEIRDRLLADGVCDKYNVPSVSSISRILRNKIGNLAQQGHYDSYKQHQPTPQPALPYNHIYSYPSPITAAAAKVPTPPGVPAIPGSVAMPRTWPSSHSVTDILGIRSITDQVSDSSPYHSPKVEEWSSLGRNNFPAAAPHAVNGLEKGALEQEAKYGQAPNGLPAVGSFVSASSMAPYPTPAQVSPYMTYSAAPSGYVAGHGWQHAGGTSLSPHNCDIPASLAFKGMQAAREGSHSVTASAL

SEQ ID NO: 8147 - protein, 967 aa, Homo sapiens
MGPGQPASTCVHLAPRTQLDGRSDPKVLQTQNQLQFNRNVPTHSSNLAIRYSCPHAIRIEKLKHSYNESYHCKDADCRVGPDLGSSVSFSVISQERLSYAVHLARRDVKRRQFEKHIKEHHLRSQPQSSQKCGHTKYKIPDHRVERKESKSQAACQCSHQPSKVEISSSGAKVYLYSSHPGQSDLTVPNSPPTHDPGLQPHPRIGDHKNISEQKSLLEVQRLQKELSSCIHKIEEVTKKDRLEEALDPDEERRIRIRRQEQAARSARMLYVLQQQVKEIQEELDKLSPHKIKHTKKSWAMSKLAAAHRGAIRALQMFVTQFTDRGEHPLPARCKELGSLIRQLSLCSVKLDADPSVPDVVIDILQQIEALESLLEKKLSPKKVKKCFSEIRSRFPIGSQKALERWPSTSPKGERRPLTAKDTFPQETSRPSVAKQLLADKYQPDTELPETQRLQSELDVLDADIVLEEGPFILDQSASFKDEVLAVAKTKAGKKKPVTENVPFRKKDTLAPARQQGLRKAERGRQSQPHSKSRVQQTTVSSRLKMNRQPVKDRKAPWIPPNPTSPPASPKCAAWLKVKTSPRDATKEPLQQEDPQEESHLTGAVEHEAARLAWLDAETSKRLKELEELKAKEIDSMQKQRLDWLDAETSRRTKELNELKAEEMYRLQQLSVSATHLADKVEEAVLDRLKPLLVKAQRVNSTTEANIHLKDGSSVNTAKAQPAQEVAAVDFESNNIRQLDDFLEDCASELWAVTHAKILGSETLATVEDSKDSPDLEIMMRRMEEMEKYQESVRQRYNKIAYADPRLWMQEENNDQKISAISEKPLSPHPIRITKTVDRKDPAVNIMLERPCNGNSLDESVGTEEGSEKREAPLLSLAEDSQQKEGRAPLFVPPGMQHSIGDYCSRFEQYLRIISHEAVGSFNPWLIAESFSEELVDEALGAVAAELQDMCEDYAEAVFTSEFLEAAT

SEQ ID NO: 8148 - protein, 593 aa, Homo sapiens
MSRPSSRAIYLHRKEYSQNLTSEPTLLQHRVEHLMTCKQGSQRVQGPEDALQKLFEMDAQGRVWSQDLILQVRDGWLQLLDIETKEELDSYRLDSIQAMNVALNTCSYNSILSITVQEPGLPGTSTLLFQCQEVGAERLKTSLQKALEEELEQRPRLGGLQPGQDRWRGPAMERPLPMEQARYLEPGIPPEQPHQRTLEHSLPPSPRPLPRHTSAREPSAFTLPPPRRSSSPEDPERDEEVLNHVLRDIELFMGKLEKAQAKTSRKKKFGKKNKDQGGLTQAQYIDCFQKIKHSFNLLGRLATWLKETSAPELVHILFKSLNFILARCPEAGLAAQVISPLLTPKAINLLQSCLSPPESNLWMGLGPAWTTSRADWTGDEPLPYQPTFSDDWQLPEPSSQAPLGYQDPVSLRRGSHRLGSTSHFPQEKTHNHDPQPGDPNSRPSSPKPAQPALKMQVLYEFEARNPRELTVVQGEKLEVLDHSKRWWLVKNEAGRSGYIPSNILEPLQPGTPGTQGQSPSRVPMLRLSSRPEEVTDWLQAENFSTATVRTLGSLTGSQLLRIRPGELQMLCPQEAPRILSRLEAVRRMLGISP

SEQ ID NO: 8149 - protein, 1016 aa, Homo sapiens
MSQGPPTGESSEPEAKVLHTKRLYRAVVEAVHRLDLILCNKTAYQEVFKPENISLRNKLRELCVKLMFLHPVDYGRKAEELLWRKVYYEVIQLIKTNKKHIHSRSTLECAYRTHLVAGIGFYQHLLLYIQSHYQLELQCCIDWTHVTDPLIGCKKPVSASGKEMDWAQMACHRCLVYLGDLSRYQNELAGVDTELLAERFYYQALSVAPQIGMPFNQLGTLAGSKYYNVEAMYCYLRCIQSEVSFEGAYGNLKRLYDKAAKMYHQLKKCETRKLSPGKKRCKDIKRLLVNFMYLQSLLQPKSSSVDSELTSLCQSVLEDFNLCLFYLPSSPNLSLASEDEEEYESGYAFLPDLLIFQMVIICLMCVHSLERAGSKQYSAAIAFTLALFSHLVNHVNIRLQAELEEGENPVPAFQSDGTDEPESKEPVEKEEEPDPEPPPVTPQVGEGRKSRKFSRLSCLRRRRHPPKVGDDSDLSEGFESDSSHDSARASEGSDSGSDKSLEGGGTAFDAETDSEMNSQESRSDLEDMEEEEGTRSPTLEPPRGRSEAPDSLNGPLGPSEASIASNLQAMSTQMFQTKRCFRLAPTFSNLLLQPTTNPHTSASHRPCVNGDVDKPSEPASEEGSESEGSESSGRSCRNERSIQEKLQVLMAEGLLPAVKVFLDWLRTNPDLIIVCAQSSQSLWNRLSVLLNLLPAAGELQESGLALCPEVQDLLEGCELPDLPSSLLLPEDMALRNLPPLRAAHRRFNFDTDRPLLSTLEESVVRICCIRSFGHFIARLQGSILQFNPEVGIFVSIAQSEQESLLQQAQAQFRMAQEEARRNRLMRDMAQLRLQLEVSQLEGSLQQPKAQSAMSPYLVPDTQALCHHLPVIRQLATSGRFIVIIPRTVIDGLDLLKKEHPGARDGIRYLEAEFKKGNRYIRCQKEVGKSFERHKLKRQDADAWTLYKILDSCKQLTLAQGAGEEDPSGMVTIITGLPLDNPSVLSGPMQAALQAAAHASVDIKNVLDFYKQWKEIG

SEQ ID NO: 8150 - protein, 529 aa, Homo sapiens
MKPHLKQWRQRMLFGIFAWGLLFLLIFIYFTDSNPAEPVPSSLSFLETRRLLPVQGKQRAIMGAAHEPSPPGGLDARQALPRAHPAGSFHAGPGDLQKWAQSQDGFEHKEFFSSQVGRKSQSAFYPEDDDYFFAAGQPGWHSHTQGTLGFPSPGEPGPREGAFPAAQVQRRRVKKRHRRQRRSHVLEEGDDGDRLYSSMSRAFLYRLWKGNVSSKMLNPRLQKAMKDYLTANKHGVRFRGKREAGLSRAQLLCQLRSRARVRTLDGTEAPFSALGWRRLVPAVPLSQLHPRGLRSCAVVMSAGAILNSSLGEEIDSHDAVLRFNSAPTRGYEKDVGNKTTIRIINSQILTNPSHHFIDSSLYKDVILVAWDPAPYSANLNLWYKKPDYNLFTPYIQHRQRNPNQPFYILHPKFIWQLWDIIQENTKEKIQPNPPSSGFIGILIMMSMCREVHVYEYIPSVRQTELCHYHELYYDAACTLGAYHPLLYEKLLVQRLNMGTQGDLHRKGKVVLPGFQAVHCPAPSPVIPHS

SEQ ID NO: 8151 - protein, 471 aa, Homo sapiens
MADERKDEAKAPHWTSAPLTEASAHSHPPEIKDQGGAGEGLVRSANGFPYREDEEGAFGEHGSQGTYSNTKENGINGELTSADRETAEEVSARIVQVVTAEAVAVLKGEQEKEAQHKDQTAALPLAAEETANLPPSPPPSPASEQTVTVEEAAGGESALAPSVFKQAKDKVSDGVTKSPEKRSSLPRPSSILPPRRGVSGDRDENSFSLNSSISSSARRTTRSEPIRRAGKSGTSTPTTPGSTAITPGTPPSYSSRTPGTPGTPSYPRTPHTPGTPKSAILVPSEKKVAIIRTPPKSPATPKQLRLINQPLPDLKNVKSKIGSTDNIKYQPKGGQVQIVTKKIDLSHVTSKCGSLKNIRHRPGGGRVKIESVKLDFKEKAQAKVGSLDNAHHVPGGGNVKIDSQKLNFREHAKARVDHGAEIITQSPGRSSVASPRRLSNVSSSGSINLLESPQLATLAEDVTAALAKQGL

SEQ ID NO: 8152 - protein, 239 aa, Homo sapiens
MWLPQLDLMRVISAKSQGYSIVTQITGPTTVNGLERGSLTVQCVYRSGWETYLKWWCRGAIWRDCKILVKTSGSEQEVKRDRVSIKDNQKNRTFTVTMEDLMKTDADTYWCGIEKTGNDLGVTVQVTIDPASTPAPTTPTSTTFTAPVTQEETSSSPTLTGHHLDNRHKLLKLSVLLPLIFTILLLLLVAASLLAWRMMKYQQKGTAAPGGRPLLCRPDPAAGRNLPAKGYHEAFLCPG

SEQ ID NO: 8153 - protein, 175 aa, Homo sapiens
MEERGDSEPTPGCSGLGPGGVRGFGDGGGAPSWAPEDAWMGTHPKYLEMMELDIGDATQVYVAFLVYLDLMESKSWHEVNCVGLPELQLICLVGTEIEGEGLQTVVPTPITASLSHNRIREILKASRKLQGDPDLPMSFTLAIVESDSTIVYYKLTDGFMLPDPQVSFENISLRR

SEQ ID NO: 8154 - protein, 979 aa, Homo sapiens
MWRLRRAAVACEVCQSLVKHSSGIKGSLPLQKLHLVSRSIYHSHHPTLKLQRPQLRTSFQQFSSLTNLPLRKLKFSPIKYGYQPRRNFWPARLATRLLKLRYLILGSAVGGGYTAKKTFDQWKDMIPDLSEYKWIVPDIVWEIDEYIDFGHKLVSEVIGASDLLLLLGSPEETAFRATDRGSESDKHFRKGLLGELILLQQQIQEHEEEARRAAGQYSTSYAQQKRKVSDKEKIDQLQEELLHTQLKYQRILERLEKENKELRKLVLQKDDKGIHHRKLKKSLIDMYSEVLDVLSDYDASYNTQDHLPRVVVVGDQSAGKTSVLEMIAQARIFPRGSGEMMTRSPVKVTLSEGPHHVALFKDSSREFDLTKEEDLAALRHEIELRMRKNVKEGCTVSPETISLNVKGPGLQRMVLVDLPGVINTVTSGMAPDTKETIFSISKAYMQNPNAIILCIQDGSVDAERSIVTDLVSQMDPHGRRTIFVLTKVDLAEKNVASPSRIQQIIEGKLFPMKALGYFAVVTGKGNSSESIEAIREYEEEFFQNSKLLKTSMLKAHQVTTRNLSLAVSDCFWKMVRESVEQQADSFKATRFNLETEWKNNYPRLRELDRNELFEKAKNEILDEVISLSQVTPKHWEEILQQSLWERVSTHVIENIYLPAAQTMNSGTFNTTVDIKLKQWTDKQLPNKAVEVAWETLQEEFSRFMTEPKGKEHDDIFDKLKEAVKEESIKRHKWNDFAEDSLRVIQHNALEDRSISDKQQWDAAIYFMEEALQARLKDTENAIENMVGPDWKKRWLYWKNRTQEQCVHNETKNELEKMLKCNEEHPAYLASDEITTVRKNLESRGVEVDPSLIKDTWHQVYRRHFLKTALNHCNLCRRGFYYYQRHFVDSELECNDVVLFWRIQRMLAITANTLRQQLTNTEVRRLEKNVKEVLEDFAEDGEKKIKLLTGKRVQLAEDLKKVREIQEKLDAFIEALHQEK

SEQ ID NO: 8155 - protein, 1316 aa, Homo sapiens
MSMLKPSGLKAPTKILKPGSTALKTPTAVVAPVEKTISSEKASSTPSSETQEEFVDDFRVGERVWVNGNKPGFIQFLGETQFAPGQWAGIVLDEPIGKNDGSVAGVRYFQCEPLKGIFTRPSKLTRKVQAEDEANGLQTTPASRATSPLCTSTASMVSSSPSTPSNIPQKPSQPAAKEPSATPPISNLTKTASESISNLSEAGSIKKGERELKIGDRVLVGGTKAGVVRFLGETDFAKGEWCGVELDEPLGKNDGAVAGTRYFQCQPKYGLFAPVHKVTKIGFPSTTPAKAKANAVRRVMATTSASLKRSPSASSLSSMSSVASSVSSRPSRTGLLTETSSRYARKISGTTALQEALKEKQQHIEQLLAERDLERAEVAKATSHVGEIEQELALARDGHDQHVLELEAKMDQLRTMVEAADREKVELLNQLEEEKRKVEDLQFRVEEESITKGDLEVATVSEKSRIMELEKDLALRVQEVAELRRRLESNKPAGDVDMSLSLLQEISSLQEKLEVTRTDHQREITSLKEHFGAREETHQKEIKALYTATEKLSKENESLKSKLEHANKENSDVIALWKSKLETAIASHQQAMEELKVSFSKGLGTETAEFAELKTQIEKMRLDYQHEIENLQNQQDSERAAHAKEMEALRAKLMKVIKEKENSLEAIRSKLDKAEDQHLVEMEDTLNKLQEAEIKASSITRELQGRELKLTNLQENLSEVSQVKETLEKELQILKEKFAEASEEAVSVQRSMQETVNKLHQKEEQFNMLSSDLEKLRENLADMEAKFREKDEREEQLIKAKEKLENDIAEIMKMSGDNSSQLTKMNDELRLKERDVEELQLKLTKANENASFLQKSIEDMTVKAEQSQQEAAKKHEEEKKELERKLSDLEKKMETSHNQCQELKARYERATSETKTKHEEILQNLQKTLLDTEDKLKGAREENSGLLQELEELRKQADKAKAAQTAEDAMQIMEQMTKEKTETLASLEDTKQTNAKLQNELDTLKENNLKNVEELNKSKELLTVENQKMEEFRKEIETLKQAAAQKSQQLSALQEENVKLAEELGRSRDEVTSHQKLEEERSVLNNQLLEMKKRESKFIKDADEEKASLQKSISITSALLTEKDAELEKLRNEVTVLRGENASAKSLHSVVQTLESDKVKLELKVKNLELQLKENKRQLSSSSGNTDTQADEDERAQESQIDFLNSVIVDLQRKNQDLKMKVEMMSEAALNGNGDDLNNYDSDDQEKQSKKKPRLFCDICDCFDLHDTEDCPTQAQMSEDPPHSTHHGSRGEERPYCEICEMFGHWATNCNDDETF

SEQ ID NO: 8156 - protein, 879 aa, Homo sapiens
MKMLTRLQVLTLALFSKGFLLSLGDHNFLRREIKIEGDLVLGGLFPINEKGTGTEECGRINEDRGIQRLEAMLFAIDEINKDDYLLPGVKLGVHILDTCSRDTYALEQSLEFVRASLTKVDEAEYMCPDGSYAIQENIPLLIAGVIGGSYSSVSIQVANLLRLFQIPQISYASTSAKLSDKSRYDYFARTVPPDFYQAKAMAEILRFFNWTYVSTVASEGDYGETGIEAFEQEARLRNICIATAEKVGRSNIRKSYDSVIRELLQKPNARVVVLFMRSDDSRELIAAASRANASFTWVASDGWGAQESIIKGSEHVAYGAITLELASQPVRQFDRYFQSLNPYNNHRNPWFRDFWEQKFQCSLQNKRNHRRVCDKHLAIDSSNYEQESKIMFVVNAVYAMAHALHKMQRTLCPNTTKLCDAMKILDGKKLYKDYLLKINFTAPFNPNKDADSIVKFDTFGDGMGRYNVFNFQNVGGKYSYLKVGHWAETLSLDVNSIHWSRNSVPTSQCSDPCAPNEMKNMQPGDVCCWICIPCEPYEYLADEFTCMDCGSGQWPTADLTGCYDLPEDYIRWEDAWAIGPVTIACLGFMCTCMVVTVFIKHNNTPLVKASGRELCYILLFGVGLSYCMTFFFIAKPSPVICALRRLGLGSSFAICYSALLTKTNCIARIFDGVKNGAQRPKFISPSSQVFICLGLILVQIVMVSVWLILEAPGTRRYTLAEKRETVILKCNVKDSSMLISLTYDVILVILCTVYAFKTRKCPENFNEAKFIGFTMYTTCIIWLAFLPIFYVTSSDYRVQTTTMCISVSLSGFVVLGCLFAPKVHIILFQPQKNVVTHRLHLNRFSVSGTGTTYSQSSASTYVPTVCNGREVLDSTTSSL

SEQ ID NO: 8157 - protein, 676 aa, Homo sapiens
MAKVNITRDLIRRQIKERGALSFERRYHVTDPFIRRLGLEAELQGHSGCVNCLEWNEKGDLLASGSDDQHTIVWDPLHHKKLLSMHTGHTANIFSVKFLPHAGDRILITGAADSKVHVHDLTVKETIHMFGDHTNRVKRIATAPMWPNTFWSAAEDGLIRQYDLRENSKHSEVLIDLTEYCGQLVEAKCLTVNPQDNNCLAVGASGPFVRLYDIRMIHNHRKSMKQSPSAGVHTFCDRQKPLPDGAAQYYVAGHLPVKLPDYNNRLRVLVATYVTFSPNGTELLVNMGGEQVYLFDLTYKQRPYTFLLPRKCHSSGVQNGKMSTNGVSNGVSNGLHLHSNGFRLPESRGHVSPQVELPPYLERVKQQANEAFACQQWTQAIQLYSKAVQRAPHNAMLYGNRAAAYMKRKWDGDHYDALRDCLKAISLNPCHLKAHFRLARCLFELKYVAEALECLDDFKGKFPEQAHSSACDALGRDITAALFSKNDGEEKKGPGGGAPVRLRSTSRKDSISEDEMVLRERSYDYQFRYCGHCNTTTDIKEANFFGSNAQYIVSGSDDGSFFIWEKETTNLVRVLQGDESIVNCLQPHPSYCFLATSGIDPVVRLWNPRPESEDLTGRVVEDMEGASQANQRRMNADPLEVMLLNMGYRITGLSSGGAGASDDEDSSEGQVQCRPS

SEQ ID NO: 8158 - protein, 1015 aa, Homo sapiens
MWRLRRAAVACEVCQSLVKHSSGIKGSLPLQKLHLVSRSIYHSHHPTLKLQRPQLRTSFQQFSSLTNLPLRKLKFSPIKYGYQPRRNFWPARLATRLLKLRYLILGSAVGGGYTAKKTFDQWKDMIPDLSEYKWIVPDIVWEIDEYIDFEKIRKALPSSEDLVKLAPDFDKIVESLSLLKDFFTSGHKLVSEVIGASDLLLLLGSPEETAFRATDRGSESDKHFRKGLLGELILLQQQIQEHEEEARRAAGQYSTSYAQQKRKVSDKEKIDQLQEELLHTQLKYQRILERLEKENKELRKLVLQKDDKGIHHRKLKKSLIDMYSEVLDVLSDYDASYNTQDHLPRVVVVGDQSAGKTSVLEMIAQARIFPRGSGEMMTRSPVKVTLSEGPHHVALFKDSSREFDLTKEEDLAALRHEIELRMRKNVKEGCTVSPETISLNVKGPGLQRMVLVDLPGVINTVTSGMAPDTKETIFSISKAYMQNPNAIILCIQDGSVDAERSIVTDLVSQMDPHGRRTIFVLTKVDLAEKNVASPSRIQQIIEGKLFPMKALGYFAVVTGKGNSSESIEAIREYEEEFFQNSKLLKTSMLKAHQVTTRNLSLAVSDCFWKMVRESVEQQADSFKATRFNLETEWKNNYPRLRELDRNELFEKAKNEILDEVISLSQVTPKHWEEILQQSLWERVSTHVIENIYLPAAQTMNSGTFNTTVDIKLKQWTDKQLPNKAVEVAWETLQEEFSRFMTEPKGKEHDDIFDKLKEAVKEESIKRHKWNDFAEDSLRVIQHNALEDRSISDKQQWDAAIYFMEEALQARLKDTENAIENMVGPDWKKRWLYWKNRTQEQCVHNETKNELEKMLKCNEEHPAYLASDEITTVRKNLESRGVEVDPSLIKDTWHQVYRRHFLKTALNHCNLCRRGFYYYQRHFVDSELECNDVVLFWRIQRMLAITANTLRQQLTNTEVRRLEKNVKEVLEDFAEDGEKKIKLLTGKRVQLAEDLKKVREIQEKLDAFIEALHQEK

SEQ ID NO: 8159 - protein, 1469 aa, Homo sapiens
MARLAAVLWNLCVTAVLVTSATQGLSRAGLPFGLMRRELACEGYPIELRCPGSDVIMVENANYGRTDDKICDADPFQMENVQCYLPDAFKIMSQRCNNRTQCVVVAGSDAFPDPCPGTYKYLEVQYDCVPYIFVCPGTLQKVLEPTSTHESEHQSGAWCKDPLQAGDRIYVMPWIPYRTDTLTEYASWEDYVAARHTTTYRLPNRVDGTGFVVYDGAVFYNKERTRNIVKYDLRTRIKSGETVINTANYHDTSPYRWGGKTDIDLAVDENGLWVIYATEGNNGRLVVSQLNPYTLRFEGTWETGYDKRSASNAFMVCGVLYVLRSVYVDDDSEAAGNRVDYAFNTNANREEPVSLTFPNPYQFISSVDYNPRDNQLYVWNNYFVVRYSLEFGPPDPSAGPATSPPLSTTTTARPTPLTSTASPAATTPLRRAPLTTHPVGAINQLGPDLPPATAPVPSTRRPPAPNLHVSPELFCEPREVRRVQWPATQQGMLVERPCPKGTRGIASFQCLPALGLWNPRGPDLSNCTSPWVNQVAQKIKSGENAANIASELARHTRGSIYAGDVSSSVKLMEQLLDILDAQLQALRPIERESAGKNYNKMHKRERTCKDYIKAVVETVDNLLRPEALESWKDMNATEQVHTATMLLDVLEEGAFLLADNVREPARFLAAKENVVLEVTVLNTEGQVQELVFPQEEYPRKNSIQLSAKTIKQNSRNGVVKVVFILYNNLGLFLSTENATVKLAGEAGPGGPGGASLVVNSQVIAASINKESSRVFLMDPVIFTVAHLEDKNHFNANCSFWNYSERSMLGYWSTQGCRLVESNKTHTTCACSHLTNFAVLMAHREIYQGRINELLLSVITWVGIVISLVCLAICISTFCFLRGLQTDRNTIHKNLCINLFLAELLFLVGIDKTQYEIACPIFAGLLHYFFLAAFSWLCLEGVHLYLLLVEVFESEYSRTKYYYLGGYCFPALVVGIAAAIDYRSYGTEKACWLRVDNYFIWSFIGPVSFVIVVNLVFLMVTLHKMIRSSSVLKPDSSRLDNIKSWALGAIALLFLLGLTWAFGLLFINKESVVMAYLFTTFNAFQGVFIFVFHCALQKKVHKEYSKCLRHSYCCIRSPPGGTHGSLKTSAMRSNTRYYTGTQSRIRRMWNDTVRKQTESSFMAGDINSTPTLNRGTMGNHLLTNPVLQPRGGTSPYNTLIAESVGFNPSSPPVFNSPGSYREPKHPLGGREACGMDTLPLNGNFNNSYSLRSGDFPPGDGGPEPPRGRNLADAAAFEKMIISELVHNNLRGSSSAAKGPPPPEPPVPPVPGGGGEEEAGGPGGADRAEIELLYKALEEPLLLPRAQSVLYQSDLDESESCTAEDGATSRPLSSPPGRDSLYASGANLRDSPSYPDSSPEGPSEALPPPPPAPPGPPEIYYTSRPPALVARNPLQGYYQVRRPSHEGYLAAPGLEGPGPDGDGQMQLVTSL

SEQ ID NO: 8160 - protein, 687 aa, Homo sapiens
MAEELVLERCDLELETNGRDHHTADLCREKLVVRRGQPFWLTLHFEGRNYEASVDSLTFSVVTGPAPSQEAGTKARFPLRDAVEEGDWTATVVDQQDCTLSLQLTTPANAPIGLYRLSLEASTGYQGSSFVLGHFILLFNAWCPADAVYLDSEEERQEYVLTQQGFIYQGSAKFIKNIPWNFGQFEDGILDICLILLDVNPKFLKNAGRDCSRRSSPVYVGRVVSGMVNCNDDQGVLLGRWDNNYGDGVSPMSWIGSVDILRRWKNHGCQRVKYGQCWVFAAVACTVLRCLGIPTRVVTNYNSAHDQNSNLLIEYFRNEFGEIQGDKSEMIWNFHCWVESWMTRPDLQPGYEGWQALDPTPQEKSEGTYCCGPVPVRAIKEGDLSTKYDAPFVFAEVNADVVDWIQQDDGSVHKSINRSLIVGLKISTKSVGRDEREDITHTYKYPEGSSEEREAFTRANHLNKLAEKEETGMAMRIRVGQSMNMGSDFDVFAHITNNTAEEYVCRLLLCARTVSYNGILGPECGTKYLLNLNLEPFSEKSVPLCILYEKYRDCLTESNLIKVRALLVEPVINSYLLAERDLYLENPEIKIRILGEPKQKRKLVAEVSLQNPLPVALEGCTFTVEGAGLTEEQKTVEIPDPVEAGEEVKVRMDLLPLHMGLHKLVVNFESDKLKAVKGFRNVIIGPA

SEQ ID NO: 8161 - protein, 390 aa, Homo sapiens
MGLLVFVRNLLLALCLFLVLGFLYYSAWKLHLLQWEEDSSKYSHSSSPQEKPVADSVVLSFDSAGQTLGSEYDRLGFLLNLDSKLPAELATKYANFSEGACKPGYASALMTAIFPRFSKPAPMFLDDSFRKWARIREFVPPFGIKGQDNLIKAILSVTKEYRLTPALDSLRCRRCIIVGNGGVLANKSLGSRIDDYDIVVRLNSAPVKGFEKDVGSKTTLRITYPEGAMQRPEQYERDSLFVLAGFKWQDFKWLKYIVYKERVSASDGFWKSVATRVPKEPPEIRILNPYFIQEAAFTLIGLPFNNGLMGRGNIPTLGSVAVTMALHGCDEVAVAGFGYDMSTPNAPLHYYETVRMAAIKESWTHNIQREKEFLRKLVKARVITDLSSGI

SEQ ID NO: 8162 - protein, 1087 aa, Homo sapiens
MMTSVGTNRARGNWEQPQNQNQTQHKQRPQATAEQIRLAQMISDHNDADFEEKVKQLIDITGKNQDECVIALHDCNGDVNRAINVLLEGNPDTHSWEMVGKKKGVSGQKDGGQTESNEEGKENRDRDRDYSRRRGGPPRRGRGASRGREFRGQENGLDGTKSGGPSGRGTERGRRGRGRGRGGSGRRGGRFSAQGMGTFNPADYAEPANTDDNYGNSSGNTWNNTGHFEPDDGTSAWRTATEEWGTEDWNEDLSETKIFTASNVSSVPLPAENVTITAGQRIDLAVLLGKTPSTMENDSSNLDPSQAPSLAQPLVFSNSKQTAISQPASGNTFSHHSMVSMLGKGFGDVGEAKGGSTTGSQFLEQFKTAQALAQLAAQHSQSGSTTTSSWDMGSTTQSPSLVQYDLKNPSDSAVHSPFTKRQAFTPSSTMMEVFLQEKSPAVATSTAAPPPPSSPLPSKSTSAPQMSPGSSDNQSSSPQPAQQKLKQQKKKASLTSKIPALAVEMPGSADISGLNLQFGALQFGSEPVLSDYESTPTTSASSSQAPSSLYTSTASESSSTISSNQSQESGYQSGPIQSTTYTSQNNAQGPLYEQRSTQTRRYPSSISSSPQKDLTQAKNGFSSVQATQLQTTQSVEGATGSAVKSDSPSTSSIPPLNETVSAASLLTTTNQHSSSLGGLSHSEEIPNTTTTQHSSTLSTQQNTLSSSTSSGRTSTSTLLHTSVESEANLHSSSSTFSTTSSTVSAPPPVVSVSSSLNSGSSLGLSLGSNSTVTASTRSSVATTSGKAPPNLPPGVPPLLPNPYIMAPGLLHAYPPQVYGYDDLQMLQTRFPLDYYSIPFPTPTTPLTGRDGSLASNPYSGDLTKFGRGDASSPAPATTLAQPQQNQTQTHHTTQQTFLNPALPPGYSYTSLPYYTGVPGLPSTFQYGPAVFPVAPTSSKQHGVNVSVNASATPFQQPSGYGSHGYNTGVSVTSSNTGVPDISGSVYSKTQQSFEKQGFHSGTPAASFNLPSALGSGGPINPATAAAYPPAPFMHILTPHQQPHSQILHHHLQQDGQTGSGQRSQTSSIPQKPQTNKSAYNSYSWGAN

SEQ ID NO: 8163 - protein, 353 aa, Homo sapiens
MRRQLRSRRAPSFPYSYRYRLDDPDEANQNYLADEEEEAEEEARVTVVPKSEEEEEEEEKEEEEEEEKEEEEGQGQPTGNAWWQKLQIMSEYLWDPERRMFLARTGLILLIYFFFYASLAAVITLCMYTLFLTISPYIPTFTERVKPPGVMIRPFAHSLNFNFNVSEPDTWQHYVISLNGFLQGYNDSLQEEMNVDCPPGQYFIQDGNEDEDKKACQFKRSFLKNCSGLEDPTFGYSTGQPCILLKMNRIVGFRPELGDPVKVSCKVQRGDENDIRSISYYPESASFDLRYYPYYGKLTHVNYTSPLVAMHFTDVVKNQAVPVQCQLKGKGVINDVINDRFVGRVIFTLNIET

SEQ ID NO: 8164 - protein, 1128 aa, Homo sapiens
MSRSVLQPSQQKLAEKLTILNDRGVGMLTRLYNIKKACGDPKAKPSYLIDKNLESAVKFIVRKFPAVETRNNNQQLAQLQKEKSEILKNLALYYFTFVDVMEFKDHVCELLNTIDVCQVFFDITVNFDLTKNYLDLIITYTTLMILLSRIEERKAIIGLYNYAHEMTHGASDREYPRLGQMIVDYENPLKKMMEEFVPHSKSLSDALISLQMVYPRRNLSADQWRNAQLLSLISAPSTMLNPAQSDTMPCEYLSLDAMEKWIIFGFILCHGILNTDATALNLWKLALQSSSCLSLFRDEVFHIHKAAEDLFVNIRGYNKRINDIRECKEAAVSHAGSMHRERRKFLRSALKELATVLSDQPGLLGPKALFVFMALSFARDEIIWLLRHADNMPKKSADDFIDKHIAELIFYMEELRAHVRKYGPVMQRYYVQYLSGFDAVVLNELVQNLSVCPEDESIIMSSFVNTMTSLSVKQVEDGEVFDFRGMRLDWFRLQAYTSVSKASLGLADHRELGKMMNTIIFHTKMVDSLVEMLVETSDLSIFCFYSRAFEKMFQQCLELPSQSRYSIAFPLLCTHFMSCTHELCPEERHHIGDRSLSLCNMFLDEMAKQARNLITDICTEQCTLSDQLLPKHCAKTISQAVNKKSKKQTGKKGEPEREKPGVESMRKNRLVVTNLDKLHTALSELCFSINYVPNMVVWEHTFTPREYLTSHLEIRFTKSIVGMTMYNQATQEIAKPSELLTSVRAYMTVLQSIENYVQIDITRVFNNVLLQQTQHLDSHGEPTITSLYTNWYLETLLRQVSNGHIAYFPAMKAFVNLPTENELTFNAEEYSDISEMRSLSELLGPYGMKFLSESLMWHISSQVAELKKLVVENVDVLTQMRTSFDKPDQMAALFKRLSSVDSVLKRMTIIGVILSFRSLAQEALRDVLSYHIPFLVSSIEDFKDHIPRETDMKVAMNVYELSSAAGLPCEIDPALVVALSSQKSENISPEEEYKIACLLMVFVAVSLPTLASNVMSQYSPAIEGHCNNIHCLAKAINQIAAALFTIHKGSIEDRLKEFLALASSSLLKIGQETDKTTTRNRESVYLLLDMIVQESPFLTMDLLESCFPYVLLRNAYHAVYKQSVTSSA

SEQ ID NO: 8165 - protein, 599 aa, Homo sapiens
MPSSLPGSQVPHPTLDAVDLVEKTLRNEGTSSSAPVLEEGDTDPWTLPQLKDTSQPWKELRVAGRLRRVAGSVLKACGLLGSLYFFICSLDVLSSAFQLLGSKVAGDIFKDNVVLSNPVAGLVIGVLVTALVQSSSTSSSIVVSMVAAKLLTVRVSVPIIMGVNVGTSITSTLVSMAQSGDRDEFQRAFSGSAVHGIFNWLTVLVLLPLESATALLERLSELALGAASLTPRAQAPDILKVLTKPLTHLIVQLDSDMIMSSATGNATNSSLIKHWCGTTGQPTQENSSCGAFGPCTEKNSTAPADRLPCRHLFAGTELTDLAVGCILLAGSLLVLCGCLVLIVKLLNSVLRGRVAQVVRTVINADFPFPLGWLGGYLAVLAGAGLTFALQSSSVFTAAVVPLMGVGVISLDRAYPLLLGSNIGTTTTALLAALASPADRMLSALQVALIHFFFNLAGILLWYLVPALRLPIPLARHFGVVTARYRWVAGVYLLLGFLLLPLAAFGLSLAGGMELAAVGGPLVGLVLLVILVTVLQRRRPAWLPVRLRSWAWLPVWLHSLEPWDRLVTRCCPCNVCSPPKATTKEAYCYENPEILASQQL

SEQ ID NO: 8166 - protein, 200 aa, Homo sapiens
MAFTEHSPLTPHRRDLCSRSIWLARKIRSDLTALTESYVKHQGLNKNINLDSADGMPVASTDQWSELTEAERLQENLQAYRTFHVLLARLLEDQQVHFTPTEGDFHQAIHTLLLQVAAFAYQIEELMILLEYKIPRNEADGMPINVGDGGLFEKKLWGLKVLQELSQWTVRSIHDLRFISSHQTGIPARGSHYIANNKKM

SEQ ID NO: 8167 - protein, 1909 aa, Homo sapiens
MCHAAQETPLLHHFMAPVMARWPPFGLCLLLLLLSPPPLPLTGAHRFSAPNTTLNHLALAPGRGTLYVGAVNRLFQLSPELQLEAVAVTGPVIDSPDCVPFRDPAECPQAQLTDNANQLLLVSSRAQELVACGQVRQGVCETRRLGDVAEVLYQAEDPGDGQFVAANTPGVATVGLVVPLPGRDLLLVARGLAGKLSAGVPPLAIRQLAGSQPFSSEGLGRLVVGDFSDYNNSYVGAFADARSAYFVFRRRGARAQAEYRSYVARVCLGDTNLYSYVEVPLACQGQGLIQAAFLAPGTLLGVFAAGPRGTQAALCAFPMVELGASMEQARRLCYTAGGRGPSGAEEATVEYGVTSRCVTLPLDSPESYPCGDEHTPSPIAGRQPLEVQPLLKLGQPVSAVAALQADGHMIAFLGDTQGQLYKVFLHGSQGQVYHSQQVGPPGSAISPDLLLDSSGSHLYVLTAHQVDRIPVAACPQFPDCASCLQAQDPLCGWCVLQGRCTRKGQCGRAGQLNQWLWSYEEDSHCLHIQSLLPGHHPRQEQGQVTLSVPRLPILDADEYFHCAFGDYDSLAHVEGPHVACVTPPQDQVPLNPPGTDHVTVPLALMFEDVTVAATNFSFYDCSAVQALEAAAPCRACVGSIWRCHWCPQSSHCVYGEHCPEGERTIYSAQEVDIQVRGPGACPQVEGLAGPHLVPVGWESHLALRVRNLQHFRGLPASFHCWLELPGELRGLPATLEETAGDSGLIHCQAHQFYPSMSQRELPVPIYVTQGEAQRLDNTHALYVILYDCAMGHPDCSHCQAANRSLGCLWCADGQPACRYGPLCPPGAVELLCPAPSIDAVEPLTGPPEGGLALTILGSNLGRAFADVQYAVSVASRPCNPEPSLYRTSARIVCVTSPAPNGTTGPVRVAIKSQPPGISSQHFTYQDPVLLSLSPRWGPQAGGTQLTIRGQHLQTGGNTSAFVGGQPCPILEPVCPEAIVCRTRPQAAPGEAAVLVVFGHAQRTLLASPFRYTANPQLVAAEPSASFRGGGRLIRVRGTGLDVVQRPLLSVWLEADAEVQASRAQPQDPQPRRSCGAPAADPQACIQLGGGLLQCSTVCSVNSSSLLLCRSPAVPDRAHPQRVFFTLDNVQVDFASASGGQGFLYQPNPRLAPLSREGPARPYRLKPGHVLDVEGEGLNLGISKEEVRVHIGRGECLVKTLTRTHLYCEPPAHAPQPANGSGLPQFVVQMGNVQLALGPVQYEAEPPLSAFPVEAQAGVGMGAAVLIAAVLLLTLMYRHKSKQALRDYQKVLVQLESLETGVGDQCRKEFTDLMTEMTDLSSDLEGSGIPFLDYRTYAERAFFPGHGGCPLQPKPEGPGEDGHCATVRQGLTQLSNLLNSKLFLLTLIHTLEEQPSFSQRDRCHVASLLSLALHGKLEYLTDIMRTLLGDLAAHYVHRNPKLMLRRTETMVEKLLTNWLSICLYAFLREVAGEPLYMLFRAIQYQVDKGPVDAVTGKAKRTLNDSRLLREDVEFQPLTLMVLVGPGAGGAAGSSEMQRVPARVLDTDTITQVKEKVLDQVYKGTPFSQRPSVHALDLEWRSGLAGHLTLSDEDLTSVTQNHWKRLNTLQHYKVPDGATVGLVPQLHRGSTISQSLAQRCPLGENIPTLEDGEEGGVCLWHLVKATEEPEGAKVRCSSLREREPARAKAIPEIYLTRLLSMKGTLQKFVDDTFQAILSVNRPIPIAVKYLFDLLDELAEKHGIEDPGTLHIWKTNSLLLRFWVNALKNPQLIFDVRVSDNVDAILAVIAQTFIDSCTTSEHKVGRDSPVNKLLYAREIPRYKQMVERYYADIRQSSPASYQEMNSALAELSGNYTSAPHCLEALQELYNHIHRYYDQIISALEEDPVGQKLQLACRLQQVAALVENKVTDL

SEQ ID NO: 8168 - protein, 1253 aa, Homo sapiens
MVVALRYVWPLLLCSPCLLIQIPEEYEGHHVMEPPVITEQSPRRLVVFPTDDISLKCEASGKPEVQFRWTRDGVHFKPKEELGVTVYQSPHSGSFTITGNNSNFAQRFQGIYRCFASNKLGTAMSHEIRLMAEGAPKWPKETVKPVEVEEGESVVLPCNPPPSAEPLRIYWMNSKILHIKQDERVTMGQNGNLYFANVLTSDNHSDYICHAHFPGTRTIIQKEPIDLRVKATNSMIDRKPRLLFPTNSSSHLVALQGQPLVLECIAEGFPTPTIKWLRPSGPMPADRVTYQNHNKTLQLLKVGEEDDGEYRCLAENSLGSARHAYYVTVEAAPYWLHKPQSHLYGPGETARLDCQVQGRPQPEVTWRINGIPVEELAKDQKYRIQRGALILSNVQPSDTMVTQCEARNRHGLLLANAYIYVVQLPAKILTADNQTYMAVQGSTAYLLCKAFGAPVPSVQWLDEDGTTVLQDERFFPYANGTLGIRDLQANDTGRYFCLAANDQNNVTIMANLKVKDATQITQGPRSTIEKKGSRVTFTCQASFDPSLQPSITWRGDGRDLQELGDSDKYFIEDGRLVIHSLDYSDQGNYSCVASTELDVVESRAQLLVVGSPGPVPRLVLSDLHLLTQSQVRVSWSPAEDHNAPIEKYDIEFEDKEMAPEKWYSLGKVPGNQTSTTLKLSPYVHYTFRVTAINKYGPGEPSPVSETVVTPEAAPEKNPVDVKGEGNETTNMVITWKPLRWMDWNAPQVQYRVQWRPQGTRGPWQEQIVSDPFLVVSNTSTFVPYEIKVQAVNSQGKGPEPQVTIGYSGEDYPQAIPELEGIEILNSSAVLVKWRPVDLAQVKGHLRGYNVTYWREGSQRKHSKRHIHKDHVVVPANTTSVILSGLRPYSSYHLEVQAFNGRGSGPASEFTFSTPEGVPGHPEALHLECQSNTSLLLRWQPPLSHNGVLTGYVLSYHPLDEGGKGQLSFNLRDPELRTHNLTDLSPHLRYRFQLQATTKEGPGEAIVREGGTMALSGISDFGNISATAGENYSVVSWVPKEGQCNFRFHILFKALGEEKGGASLSPQYVSYNQSSYTQWDLQPDTDYEIHLFKERMFRHQMAVKTNGTGRVRLPPAGFATEGWFIGFVSAIILLLLVLLILCFIKRSKGGKYSVKDKEDTQVDSEARPMKDETFGEYSDNEEKAFGSSQPSLNGDIKPLGSDDSLADYGGSVDVQFNEDGSFIGQYSGKKEKEAAGGNDSSGATSPINPAVALE

SEQ ID NO: 8169 - protein, 606 aa, Homo sapiens
MPSSVTALGQARSSGPGMAPSACCCSPAALQRRLPILAWLPSYSLQWLKMDFVAGLSVGLTAIPQALAYAEVAGLPPQYGLYSAFMGCFVYFFLGTSRDVTLGPTAIMSLLVSFYTFHEPAYAVLLAFLSGCIQLAMGVLRLGFLLDFISYPVIKGFTSAAAVTIGFGQIKNLLGLQNIPRPFFLQVYHTFLRIAETRVGDAVLGLVCMLLLLVLKLMRDHVPPVHPEMPPGVRLSRGLVWAATTARNALVVSFAALVAYSFEVTGYQPFILTGETAEGLPPVRIPPFSVTTANGTISFTEMVQDMGAGLAVVPLMGLLESIAVAKAFASQNNYRIDANQELLAIGLTNMLGSLVSSYPVTGSFGRTAVNAQSGVCTPAGGLVTGVLVLLSLDYLTSLFYYIPKSALAAVIIMAVAPLFDTKIFRTLWRVKRLDLLPLCVTFLLCFWEVQYGILAGALVSLLMLLHSAARPETKVSEGPVLVLQPASGLSFPAMEALREEILSRALEVSPPRCLVLECTHVCSIDYTVVLGLGELLQDFQKQGVALAFVGLQVPVLRVLLSADLKGFQYFSTLEEAEKHLRQEPGTQPYNIREDSILDQKVALLKA

SEQ ID NO: 8170 - protein, 613 aa, Homo sapiens
MKECNATRRPQMSFLKMDMTQMEFPDASFQVVLDKGTLDAVLTDEEEKTLQQVDRMLAEVGRVLQVGGRYLCISLAQAHILKKAVGHFSREGWMVRVHQVANSQDQVLEAEPQFSLPVFAFIMTKFRPVPGSALQIFELCAQEQRKPVRLESAERLAEAVQERQQYAWLCSQLRRKARLGSVSLDLCDGDTGEPRYTLHVVDSPTVKPSRDNHFAIFIIPQGRETEWLFGMDEGRKQLAASAGFRRLITVALHRGQQYESMDHIQAELSARVMELAPAGMPTQQQVPFLSVGGDIGVRTVQHQDCSPLSGDYVIEDVQGDDKRYFRRLIFLSNRNVVQSEARLLKDVSHKAQKKRKKDRKKQRPADAEDLPAAPGQSIDKSYLCCEHHKAMIAGLALLRNPELLLEIPLALLVVGLGGGSLPLFVHDHFPKSCIDAVEIDPSMLEVATQWFGFSQSDRMKVHIADGLDYIASLAGGGEARPCYDVIMFDVDSKDPTLGMSCPPPAFVEQSFLQKVKSILTPEGVFILNLVCRDLGLKDSVLAGLKAVFPLLYVRRIEGEVNEILFCQLHPEQKLATPELLETAQALERTLRKPGRGWDDTYVLSDMLKTVKIV

SEQ ID NO: 8171 - protein, 1065 aa, Homo sapiens
MAPAPLGVPEEQLLGCRSRVLSRLLFIAQTALLLLPAAGAGLCPAPCSCRIPLLDCSRRKLPAPSWRALSGLLPPDTAILDFSHNRLSNWNISLESQTLQEVKMNYNELTEIPYFGEPTSNITLLSLVHNIIPEINAQALQFYPALESLDLSSNIISEIKTSSFPRMQLKYLNLSNNRITTLEAGCFDNLSSSLLVVKLNRNRMSMIPPKIFKLPHLQFLELKRNRIKIVEGLTFQGLDSLRSLKMQRNGISKLKDGAFFGLNNMEELELEHNNLTRVNKGWLYGLRMLQQLYVSQNAIERISPDAWEFCQRLSELDLSYNQLTRLDESAFVGLSLLERLNLGDNRVTHIADGVFRFLSNLQTLDLRNNEISWAIEDASEAFAGLTSLTKLILQGNQIKSITKKAFIGLESLEHLDLNNNAIMSIQENAFSQTHLKELILNTSSLLCDCHLKWLLQWLVDNNFQHSVNVSCAHPEWLAGQSILNVDLKDFVCDDFLKPQIRTHPETIIALRGMNVTLTCTAVSSSDSPMSTVWRKDSEILYDVDTENFVRYWQQAGEALEYTSILHLFNVNFTDEGKYQCIVTNHFGSNYSQKAKLTVNEMPSFLKTPMDLTIRTGAMARLECAAEGHPAPQISWQKDGGTDFPAARERRMHVMPEDDVFFIANVKIEDMGIYSCMAQNTAGGLSANASLTVLETPSFIRPLEDKTVTRGETAVLQCIAGGSPAPRLNWTKDDGPLLVTERHFFAAANQLLIIVDAGLEDAGKYTCIMSNTLGTERGHIYLNVISSPNCDSSQSSIGHEDDGWTTVGIVIIVVVCCVVGTSLIWVIVIYHMRRKNEDYSITNTEELNLPADIPSYLSSQGTLSEPQEGYSNSEAGSHQQLMPPANGYIHKGTDGGTGTRVICSDCYDNANIYSRTREYCPYTYIAEEDVLDQTLSSLMVQMPKETYLVHPPQDTTALESLIPSANREPSAFPTNHERISEKKLPSTQMSGETLQRPVWNINRELGLPHPPFSQQPVHESPQLHQNEGLAGREPDCSASSMSCHRLQDHAFDFSRTRNIQDGSEGT

SEQ ID NO: 8172 - protein, 569 aa, Homo sapiens
MDHISDSFLETNVPLLVLIEAAKSGNEKEVKEYAQVFREHANKLVEVANLACSISNNEEGVKLVRMAATQIDSLCPQVINAALTLAARPQSKVAQDNMDVFKDQWEKQVRVLTEAVDDITSVDDFLSVSENHILEDVNKCVIALQEGDVDTLDRTAGAIRGRAARVIHIINAEMENYEAGVYTEKVLEATKLLSETVMPRFAEQVEVAIEALSANVPQPFEENEFIDASRLVYDGVRDIRKAVLMIRTPEELEDDSDFEQEDYDVRSRTSVQTEDDQLIAGQSARAIMAQLPQEEKAKIAEQVEIFHQEKSKLDAEVAKWDDSGNDIIVLAKQMCMIMMEMTDFTRGKGPLKNTSDVINAAKKIAEAGSRMDKLARAVADQCPDSACKQDLLAYLQRIALYCHQLNICSKVKAEVQNLGGELIVSGTGVQSTFTTFYEVDCDVIDGGRASQLSTHLPTCAEGAPIGSGSSDSSMLDSATSLIQAAKNLMNAVVLTVKASYVASTKYQKVYGTAAVNSPVVSWKMKAPEKKPLVKREKPEEFQTRVRRGSQKKHISPVQALSEFKAMDSF

SEQ ID NO: 8173 - protein, 745 aa, Homo sapiens
MFPLRALWLVWALLGVAGSCPEPCACVDKYAHQFADCAYKELREVPEGLPANVTTLSLSANKITVLRRGAFADVTQVTSLWLAHNEVRTVEPGALAVLSQLKNLDLSHNFISSFPWSDLRNLSALQLLKMNHNRLGSLPRDALGALPDLRSLRINNNRLRTLAPGTFDALSALSHLQLYHNPFHCGCGLVWLQAWAASTRVSLPEPDSIACASPPALQGVPVYRLPALPCAPPSVHLSAEPPLEAPGTPLRAGLAFVLHCIADGHPTPRLQWQLQIPGGTVVLEPPVLSGEDDGVGAEEGEGEGDGDLLTQTQAQTPTPAPAWPAPPATPRFLALANGSLLVPLLSAKEAGVYTCRAHNELGANSTSIRVAVAATGPPKHAPGAGGEPDGQAPTSERKSTAKGRGNSVLPSKPEGKIKGQGLAKVSILGETETEPEEDTSEGEEAEDQILADPAEEQRCGNGDPSRYVSNHAFNQSAELKPHVFELGVIALDVAEREARVQLTPLAARWGPGPGGAGGAPRPGRRPLRLLYLCPAGGGAAVQWSRVEEGVNAYWFRGLRPGTNYSVCLALAGEACHVQVVFSTKKELPSLLVIVAVSVFLLVLATVPLLGAACCHLLAKHPGKPYRLILRPQAPDPMEKRIAADFDPRASYLESEKSYPAGGEAGGEEPEDVQGEGLDEDAEQGDPSGDLQREESLAACSLVESQSKANQEEFEAGSEYSDRLPLGAEAVNIAQEINGNYRQTAG

SEQ ID NO: 8174 - protein, 836 aa, Homo sapiens
MARLGNCSLTWAALIILLLPGSLEECGHISVSAPIVHLGDPITASCIIKQNCSHLDPEPQILWRLGAELQPGGRQQRLSDGTQESIITLPHLNHTQAFLSCCLNWGNSLQILDQVELRAGYPPAIPHNLSCLMNLTTSSLICQWEPGPETHLPTSFTLKSFKSRGNCQTQGDSILDCVPKDGQSHCCIPRKHLLLYQNMGIWVQAENALGTSMSPQLCLDPMDVVKLEPPMLRTMDPSPEAAPPQAGCLQLCWEPWQPGLHINQKCELRHKPQRGEASWALVGPLPLEALQYELCGLLPATAYTLQIRCIRWPLPGHWSDWSPSLELRTTERAPTVRLDTWWRQRQLDPRTVQLFWKPVPLEEDSGRIQGYVVSWRPSGQAGAILPLCNTTELSCTFHLPSEAQEVALVAYNSAGTSRPTPVVFSESRGPALTRLHAMARDPHSLWVGWEPPNPWPQGYVIEWGLGPPSASNSNKTWRMEQNGRATGFLLKENIRPFQLYEIIVTPLYQDTMGPSQHVYAYSQEMAPSHAPELHLKHIGKTWAQLEWVPEPPELGKSPLTHYTIFWTNAQNQSFSAILNASSRGFVLHGLEPASLYHIHLMAASQAGATNSTVLTLMTLTPEGSELHIILGLFGLLLLLTCLCGTAWLCCSPNRKNPLWPSVPDPAHSSLGSWVPTIMEEDAFQLPGLGTPPITKLTVLEEDEKKPVPWESHNSSETCGLPTLVQTYVLQGDPRAVSTQPQSQSGTSDQVLYGQLLGSPTSPGPGHYLRCDSTQPLLAGLTPSPKSYENLWFQASPLGTLVTPAPSQEDDCVFGPLLNFPLLQGIRVHGMEALGSF

SEQ ID NO: 8175 - protein, 1043 aa, Homo sapiens
MRRFKRKHLTAIDCQHLARSHLAVTQPFGQRWTNRDPNHGLYPKPRTKRGSRGQGSQRCIPEFFLAGKQPCTNDMAKSNSVGQDSCQDSEGDMIFPAESSCALPQEGSAGPGSPGSAPPSRKRSWSSEEESNQATGTSRWDGVSKKAPRHHLSVPCTRPREARQEAEDSTSRLSAESGETDQDAGDVGPDPIPDSYYGLLGTLPCQEALSHICSLPSEVLRHVFAFLPVEDLYWNLSLVCHLWREIISDPLFIPWKKLYHRYLMNEEQAVSKVDGILSNCGIEKESDLCVLNLIRYTATTKCSPSVDPERVLWSLRDHPLLPEAEACVRQHLPDLYAAAGGVNIWALVAAVVLLSSSVNDIQRLLFCLRRPSSTVTMPDVTETLYCIAVLLYAMREKGINISNRIHYNIFYCLYLQENSCTQATKVKEEPSVWPGKKTIQLTHEQQLILNHKMEPLQVVKIMAFAGTGKTSTLVKYAEKWSQSRFLYVTFNKSIAKQAERVFPSNVICKTFHSMAYGHIGRKYQSKKKLNLFKLTPFMVNSVLAEGKGGFIRAKLVCKTLENFFASADEELTIDHVPIWCKNSQGQRVMVEQSEKLNGVLEASRLWDNMRKLGECTEEAHQMTHDGYLKLWQLSKPSLASFDAIFVDEAQDCTPAIMNIVLSQPCGKIFVGDPHQQIYTFRGAVNALFTVPHTHVFYLTQSFRFGVEIAYVGATILDVCKRVRKKTLVGGNHQSGIRGDAKGQVALLSRTNANVFDEAVRVTEGEFPSRIHLIGGIKSFGLDRIIDIWILLQPEEERRKQNLVIKDKFIRRWVHKEGFSGFKRYVTAAEDKELEAKIAVVEKYNIRIPELVQRIEKCHIEDLDFAEYILGTVHKAKGLEFDTVHVLDDFVKVPCARHNLPQLPHFRVESFSEDEWNLLYVAVTRAKKRLIMTKSLENILTLAGEYFLQAELTSNVLKTGVVRCCVGQCNNAIPVDTVLTMKKLPITYSNRKENKGGYLCHSCAEQRIGPLAFLTASPEQVRAMERTVENIVLPRHEALLFLVF

SEQ ID NO: 8176 - protein, 393 aa, Homo sapiens [sequence omitted]

SEQ ID NO: 8177 - protein, 320 aa, Homo sapiens
MANITWMANHTGWSDFILLGLFRQSKHPALLCVVIFVVFLMALSGNAVLILLIHCDAHLHTPMYFFISQLSLMDMAYISVTVPKMLLDQVMGVNKISAPECGMQMFFYVTLAGSEFFLLATMAYDRYVAICHPLRYPVLMNHRVCLFLSSGCWFLGSVDGFTFTPITMTFPFRGSREIHHFFCEVPAVLNLSCSDTSLYEIFMYLCCVLMLLIPVVIISSSYLLILLTIHGMNSAEGRKKAFATCSSHLTVVILFYGAAIYTYMLPSSYHTPEKDMMVSVFYTILTPVVNPLIYSLRNKDVMGALKKMLTVEPAFQKAME

SEQ ID NO: 8178 - protein, 369 aa, Homo sapiens
MWQEYYFLNVFFPLLKVCCLTINSHVVILLPWECYHLIWKILPYIGTTVGSMEEYNTSSTDFTFMGLFNRKETSGLIFAIISIIFFTALMANGVMIFLIQTDLRLHTPMYFLLSHLSLIDMMYISTIVPKMLVNYLLDQRTISFVGCTAQHFLYLTLVGAEFFLLGLMAYDRYVAICNPLRYPVLMSRRVCWMIIAGSWFGGSLDGFLLTPITMSFPFCNSREINHFFCEAPAVLKLACADTALYETVMYVCCVLMLLIPFSVVLASYARILTTVQCMSSVEGRKKAFATCSSHMTVVSLFYGAAMYTYMLPHSYHKPAQDKVLSVFYTILTPMLNPLIYSLRNKDVTGALKRALGRFKGPQRVSGGVF

SEQ ID NO: 8179 - protein, 348 aa, Homo sapiens
MDNITWMASHTGWSDFILMGLFRQSKHPMANITWMANHTGWSDFILLGLFRQSKHPALLCVVIFVVFLMALSGNAVLILLIHCDAHLHTPMYFFISQLSLMDMAYISVTVPKMLLDQVMGVNKISAPECGMQMFFYVTLAGSEFFLLATMAYDRYVAICHPLRYPVLMNHRVCLFLSSGCWFLGSVDGFTFTPITMTFPFRGSREIHHFFCEVPAVLNLSCSDTSLYEIFMYLCCVLMLLIPVVIISSSYLLILLTIHGMNSAEGRKKAFATCSSHLTVVILFYGAAIYTYMLPSSYHTPEKDMMVSVFYTILTPVVNPLIYSLRNKDVMGALKKMLTVEPAFQKAME

SEQ ID NO: 8180 - protein, 312 aa, Homo sapiens
MAWENQTFNSDFILLGIFNHSPTHTFLFFLVLAIFSVAFMGNSVMVLLIYLDTQLHTPMYFLLSQLFLMDLMLICSTVPKMAFNYLSGSKSISMAGCATQIFFYVSLLGSECFLLAVMSYDRYIAICHPLRYTNLMRPKICGLMTAFSWILGSMDAIIDAVATFSFSYCGSREIAHFFCDFPSLLILSCNDTSIFEKVLFICCIVMIVFPVAIIIASYARVILAVIHMGSGEGRRKAFTTCSSHLMVVGMYYGAGLFMYIRPTSDRSPMQDKLVSVFYTILTPMLNPLIYSLRNKEVTRALRKVLGKGKCGE

SEQ ID NO: 8181 - protein, 486 aa, Homo sapiens
MAWAPPGERLREDARCPVCLDFLQEPVSVDCGHSFCLRCISEFCEKSDGAQGGVYACPQCRGPFRPSGFRPNRQLAGLVESVRRLGLGAGPGARRCARHGEDLSRFCEEDEAALCWVCDAGPEHRTHRTAPLQEAAGSYQVKLQMALELMRKELEDALTQEANVGKKTVIWKEKVEMQRQRFRLEFEKHRGFLAQEEQRQLRRLEAEERATLQRLRESKSRLVQQSKALKELADELQERCQRPALGLLEGVRGVLSRSKAVTRLEAENIPMELKTACCIPGRRELLRKFQVDVKLDPATAHPSLLLTADLRSVQDGEPWRDVPNNPERFDTWPCILGLQSFSSGRHYWEVLVGEGAEWGLGVCQDTLPRKGETTPSPENGVWALWLLKGNEYMVLASPSVPLLQLESPRCIGIFLDYEAGEISFYNVTDGSYIYTFNQLFSGLLRPYFFICDATPLILPPTTIAGSGNWASRDHLDPASDVRDDHL

SEQ ID NO: 8182 - protein, 314 aa, Homo sapiens
MANVTLVTGFLLMGFSNIQKLRILYGVLFLLIYLAALMSNLLIITLITLDVKLQTPMYFFLKNLSFLDVFLVSVPIPKFIVNNLTHNNSISILGCAFQLLLMTSFSAGEIFILTAMSYDRYVAICCPLNYEVIMNTGVCVLMASVSWAIGGLFGTAYTAGTFSMPFCGSSVIPQFFCDVPSLLRISCSETLMVIYAGIGVGACLSISCFICIVISYIYIFSTVLKIPTTKGQSKAFSTCFPHLTVFTVFIITAYFVYLKPPSNSPSVIDRLLSVIYTVMPPVFNPVTYSLRNNDMKCALIRLLQKTYGQEAYFI

SEQ ID NO: 8183 - protein, 320 aa, Homo sapiens
MMEIANVSSPEVFVLLGFSTRPSLETVLFIVVLSFYMVSILGNGIIILVSHTDVHLHTPMYFFLANLPFLDMSFTTSIVPQLLANLWGPQKTISYGGCVVQFYISHWLGATECVLLATMSYDRYAAICRPLHYTVIMHPQLCLGLALASWLGGLTTSMVGSTLTMLLPLCGNNCIDHFFCEMPLIMQLACVDTSLNEMEMYLASFVFVVLPLGLILVSYGHIARAVLKIRSAEGRRKAFNTCSSHVAVVSLFYGSIIFMYLQPAKSTSHEQGKFIALFYTVVTPALNPLIYTLRNTEVKSALRHMVLENCCGSAGKLAQI

SEQ ID NO: 8184 - protein, 979 aa, Homo sapiens
MKMASTRCKLARYLEDLEDVDLKKFKMHLEDYPPQKGCIPLPRGQTEKADHVDLATLMIDFNGEEKAWAMAVWIFAAINRRDLYEKAKRDEPKWGSDNARVSNPTVICQEDSIEEEWMGLLEYLSRISICKMKKDYRKKYRKYVRSRFQCIEDRNARLGESVSLNKRYTRLRLIKEHRSQQEREQELLAIGKTKTCESPVSPIKMELLFDPDDEHSEPVHTVVFQGAAGIGKTILARKMMLDWASGTLYQDRFDYLFYIHCREVSLVTQRSLGDLIMSCCPDPNPPIHKIVRKPSRILFLMDGFDELQGAFDEHIGPLCTDWQKAERGDILLSSLIRKKLLPEASLLITTRPVALEKLQHLLDHPRHVEILGFSEAKRKEYFFKYFSDEAQARAAFSLIQENEVLFTMCFIPLVCWIVCTGLKQQMESGKSLAQTSKTTTAVYVFFLSSLLQPRGGSQEHGLCAHLWGLCSLAADGIWNQKILFEESDLRNHGLQKADVSAFLRMNLFQKEVDCEKFYSFIHMTFQEFFAAMYYLLEEEKEGRTNVPGSRLKLPSRDVTVLLENYGKFEKGYLIFVVRFLFGLVNQERTSYLEKKLSCKISQQIRLELLKWIEVKAKAKKLQIQPSQLELFYCLYEMQEEDFVQRAMDYFPKIEINLSTRMDHMVSSFCIENCHRVESLSLGFLHNMPKEEEEEEKEGRHLDMVQCVLPSSSHAACSHGLVNSHLTSSFCRGLFSVLSTSQSLTELDLSDNSLGDPGMRVLCETLQHPGCNIRRLWLGRCGLSHECCFDISLVLSSNQKLVELDLSDNALGDFGIRLLCVGLKHLLCNLKKLWLVNSGLTSVCCSALSSVLSTNQNLTHLYLRGNTLGDKGIKLLCEGLLHPDCKLQVLELDNCNLTSHCCWDLSTLLTSSQSLRKLSLGNNDLGDLGVMMFCEVLKQQSCLLQNLGLSEMYFNYETKSALETLQEEKPELTVVFEPSW

SEQ ID NO: 8185 - protein, 389 aa, Homo sapiens
MDSVSFEDVAVAFTQEEWALLDPSQKNLYRDVMQEIFRNLASVGNKSEDQNIQDDFKNPGRNLSSHVVERLFEIKEGSQYGETFSQDSNLNLNKKVSTGVKPCECSVCGKVFICHSALHRHILSHIGNKLFECEECPEKLYHCKQCGKAFISLTSVDRHMVTHTSNGPYKGPVYEKPFDFPSVFQMPQSTYTGEKTYKCKHCDKAFNYSSYLREHERTHTGEKPYACKKCGKSFTFSSSLRQHERSHTGEKPYECKECGKAFSRSTYLGIHERTHTGEKPYECIKCGKAFRCSRVLRVHERTHSGEKPYECKQCGKAFKYSSNLCEHERTHTGVKPYGCKECGKSFTSSSALRSHERTHTGEKPYECKKCGKAFSCSSSLRKHERAYMW

SEQ ID NO: 8186 - protein, 2301 aa, Homo sapiens
MDSLAGLSPREAAGVLSLSCVGVCSTCAWAWPHGSMRDLRAQVTSGLLPFPEVTLQALGEDEITLESVLRGKFAAGKNGLACLACGPQLEVVNSITGERLSAYRFSGVNEQPPVVLAVKEFSWQKRTGLLIGLEETEGSVLCLYDLGISKVVKAVVLPGRVTAIEPIINHGGASASTQHLHPSLRWLFGVAAVVTDVGQILLVDLCLDDLSCNQNEVEASDLEVLTGIPAEVPHIRESVMRQGRHLCFQLVSPTGTAVSTLSYISRTNQLAVGFSDGYLALWNMKSMKREYYIQLESGQVPVYAVTFQEPENDPRNCCYLWAVQSTQDSEGDVLSLHLLQLAFGNRKCLASGQILYEGLEYCEERYTLDLTGGMFPLRGQTSNTKLLGCQSIEKFRSHGDREEGVNEALSPDTSVSVFTWQVNIYGQGKPSVYLGLFDINRWYHAQMPDSLRSGEYLHNCSYFALWSLESVVSRTSPHGILDILVHERSLNRGVPPSYPPPEQFFNPSTYNFDATCLLNSGVVHLTCTGFQKETLTFLKKSGPSLNELIPDGYNRCLVAGLLSPRFVDVQPSSLSQEEQLEAILSAAIQTSSLGLLTGYIRRWITEEQPNSATNLRFVLEWTWNKVVLTKEEFDRLCVPLFDGSCHFMDPQTIQSIQQCYLLLSNLNIVLSCFASEAREITERGLIDLSNKFVVSHLICQYAQVVLWFSHSGLLPEGIDDSVQLSRLCYNYPVIQNYYTSRRQKFERLSRGKWNPDCLMIDGLVSQLGERIEKLWKRDEGGTGKYPPASLHAVLDMYLLDGVTEAAKHSITIYLLLDIMYSFPNKTDTPIESFPTVFAISWGQVKLIQGFWLIDHNDYESGLDLLFHPATAKPLSWQHSKIIQAFMSQGEHRQALRYIQTMKPTVSSGNDVILHLTVLLFNRCMVEAWNFLRQHCNRLNIEELLKHMYEVCQEMGLMEDLLKLPFTDTEQECLVKFLQSSASVQNHEFLLVHHLQRANYVPALKLNQTLKINVMNDRDPRLRERSLARNSILDQYGKILPRVHRKLAIERAKPYHLSTSSVFRLVSRPKPLSAVPKQVVTGTVLTRSVFINNVLSKIGEVWASKEPINSTTPFNSSKIEEPSPIVYSLPAPELPEAFFGTPISKASQKISRLLDLVVQPVPRPSQCSEFIQQSSMKSPLYLVSRSLPSSSQLKGSPQAISRASELHLLETPLVVKKAKSLAMSVTTSGFSEFTPQSILRSTLRSTPLASPSPSPGRSPQRLKETRISFVEEDVHPKWIPGAADDSKLEVFTTPKKCAVPVETEWLKSKDRTTSFFLNSPEKEHQEMDEGSQSLEKLDVSKGNSSVSITSDETTLEYQDAPSPEDLEETVFTASKPKSSSTALTTNVTEQTEKDGDKDVFASEVTPSDLQKQMGNLEDAETKDLLVAAEAFSELNHLSPVQGTEASLCAPSVYEGKIFTQKSKVPVLDEGLTSVETYTPAIRANDNKSMADVLGDGGNSSLTISEGPIVSERRLNQEVALNLKEDHEVEVGVLKESVDLPEEKLPISDSPPDTQEIHVIEQEKLEAQDSGEEARNLSFNELYPSGTLKLQYNFDTIDQQFCDLADNKDTAECDIAEVDGELFVAQSNFTLILEGEEGEVEPGDFASSDVLPKAANTATEEKLVCSGENDNHGQIANLPSAVTSDQKSQKVDTLPYVPEPIKVAIAENLLDVIKDTRSKEITSDTMEQSIHETIPLVSQNIMCPTKLVKSAFKTAQETSTMTMNVSQVDDVVSSKTRTRGQRIQNVNVKSAQQEASADVATPKMPGQSVRKKTRKAKEISEASENIYSDVRGLSQNQQIPQNSVTPRRGRRKKEVNQDILENTSSVEQELQITTGRESKRLKSSQLLEPAVEETTKKEVKVSSVTKRTPRRIKRSVENQESVEIINDLKVSTVTSPSRMIRKLRSTNLDASENTGNKQDDKSSDKQLRIKHVRRVRGREVSPSDVREDSNLESSQLTVQAEFDMSAIPRKRGRPRKINPSEDVGSKAVKEERSPKKKEAPSIRRRSTRNTPAKSENVDVGKPALGKSILVPNEELSMVMSSKKKLTKKTESQSQKRSLHSVSEERTDEMTHKETNEQEERLLATASFTKSSRSSRTRSSKAILLPDLSEPNNEPLFSPASEVPRKAKAKKIEVPAQLKELVSDLSSQFVISPPALRSRQKNTSNKNKLEDELKDDAQSVETLGKPKAKRIRTSKTKQASKNTEKESAWSPPPIEIRLISPLASPADGVKSKPRKTTEVTGTGLGRNRKKLSSYPKQILRRKML

SEQ ID NO: 8187 - protein, 2275 aa, Homo sapiens
MAAERRCGSMRDLRAQVTSGLLPFPEVTLQALGEDEITLESVLRGKFAAGKNGLACLACGPQLEVVNSITGERLSAYRFSGVNEQPPVVLAVKEFSWQKRTGLLIGLEETEGSVLCLYDLGISKVVKAVVLPGRVTAIEPIINHGGASASTQHLHPSLRWLFGVAAVVTDVGQILLVDLCLDDLSCNQNEVEASDLEVLTGIPAEVPHIRESVMRQGRHLCFQLVSPTGTAVSTLSYISRTNQLAVGFSDGYLALWNMKSMKREYYIQLESGQVPVYAVTFQEPENDPRNCCYLWAVQSTQDSEGDVLSLHLLQLAFGNRKCLASGQILYEGLEYCEERYTLDLTGGMFPLRGQTSNTKLLGCQSIEKFRSHGDREEGVNEALSPDTSVSVFTWQVNIYGQGKPSVYLGLFDINRWYHAQMPDSLRSGEYLHNCSYFALWSLESVVSRTSPHGILDILVHERSLNRGVPPSYPPPEQFFNPSTYNFDATCLLNSGVVHLTCTGFQKETLTFLKKSGPSLNELIPDGYNRCLVAGLLSPRFVDVQPSSLSQEEQLEAILSAAIQTSSLGLLTGYIRRWITEEQPNSATNLRFVLEWTWNKVVLTKEEFDRLCVPLFDGSCHFMDPQTIQSIQQCYLLLSNLNIVLSCFASEAREITERGLIDLSNKFVVSHLICQYAQVVLWFSHSGLLPEGIDDSVQLSRLCYNYPVIQNYYTSRRQKFERLSRGKWNPDCLMIDGLVSQLGERIEKLWKRDEGGTGKYPPASLHAVLDMYLLDGVTEAAKHSITIYLLLDIMYSFPNKTDTPIESFPTVFAISWGQVKLIQGFWLIDHNDYESGLDLLFHPATAKPLSWQHSKIIQAFMSQGEHRQALRYIQTMKPTVSSGNDVILHLTVLLFNRCMVEAWNFLRQHCNRLNIEELLKHMYEVCQEMGLMEDLLKLPFTDTEQECLVKFLQSSASVQNHEFLLVHHLQRANYVPALKLNQTLKINVMNDRDPRLRERSLARNSILDQYGKILPRVHRKLAIERAKPYHLSTSSVFRLVSRPKPLSAVPKQVVTGTVLTRSVFINNVLSKIGEVWASKEPINSTTPFNSSKIEEPSPIVYSLPAPELPEAFFGTPISKASQKISRLLDLVVQPVPRPSQCSEFIQQSSMKSPLYLVSRSLPSSSQLKGSPQAISRASELHLLETPLVVKKAKSLAMSVTTSGFSEFTPQSILRSTLRSTPLASPSPSPGRSPQRLKETRISFVEEDVHPKWIPGAADDSKLEVFTTPKKCAVPVETEWLKSKDRTTSFFLNSPEKEHQEMDEGSQSLEKLDVSKGNSSVSITSDETTLEYQDAPSPEDLEETVFTASKPKSSSTALTTNVTEQTEKDGDKDVFASEVTPSDLQKQMGNLEDAETKDLLVAAEAFSELNHLSPVQGTEASLCAPSVYEGKIFTQKSKVPVLDEGLTSVETYTPAIRANDNKSMADVLGDGGNSSLTISEGPIVSERRLNQEVALNLKEDHEVEVGVLKESVDLPEEKLPISDSPPDTQEIHVIEQEKLEAQDSGEEARNLSFNELYPSGTLKLQYNFDTIDQQFCDLADNKDTAECDIAEVDGELFVAQSNFTLILEGEEGEVEPGDFASSDVLPKAANTATEEKLVCSGENDNHGQIANLPSAVTSDQKSQKVDTLPYVPEPIKVAIAENLLDVIKDTRSKEITSDTMEQSIHETIPLVSQNIMCPTKLVKSAFKTAQETSTMTMNVSQVDDVVSSKTRTRGQRIQNVNVKSAQQEASADVATPKMPGQSVRKKTRKAKEISEASENIYSDVRGLSQNQQIPQNSVTPRRGRRKKEVNQDILENTSSVEQELQITTGRESKRLKSSQLLEPAVEETTKKEVKVSSVTKRTPRRIKRSVENQESVEIINDLKVSTVTSPSRMIRKLRSTNLDASENTGNKQDDKSSDKQLRIKHVRRVRGREVSPSDVREDSNLESSQLTVQAEFDMSAIPRKRGRPRKINPSEDVGSKAVKEERSPKKKEAPSIRRRSTRNTPAKSENVDVGKPALGKSILVPNEELSMVMSSKKKLTKKTESQSQKRSLHSVSEERTDEMTHKETNEQEERLLATASFTKSSRSSRTRSSKAILLPDLSEPNNEPLFSPASEVPRKAKAKKIEVPAQLKELVSDLSSQFVISPPALRSRQKNTSNKNKLEDELKDDAQSVETLGKPKAKRIRTSKTKQASKNTEKESAWSPPPIEIRLISPLASPADGVKSKPRKTTEVTGTGLGRNRKKLSSYPKQILRRKML

SEQ ID NO: 8188 - protein, 616 aa, Homo sapiens
MDDSDTPTYYLQIEPQDGCHPGDSVERSVTCLPSASDENENQLDGDGHEHLTSSDSAMGKPQVSEQDSLNNNESCTLSCEVAAGENLQNTLCEASRDEQAFLGKDKKIPGKRSPRSKKGTAKKIPPGLFSGDIAPLMQEKVLSAVTYAVDDEEAAEVNANEQPEAPKLVLQSLFSLIRGEVEQLDSRALPLCLHQIAESYFQEEDYEKAMKFIQLERLYHEQLLANLSAIQEQWETKWKTVQPHTVTALRNSEKGFNGEDFERLTKICATHQDPLLSKHKIAAVEKSQERKCSTQLLVSEDPKEGGATTKESESKTCLGTESSKESQHTVEPLGSSPCCHQMDVQTDSPSLSVTAGKDHMEELLCSAEATLALHTQSSETAGSPSGPDSSEDACEDDSRLQLAQTEACQDVARIEGIAEDPKVFLSSKSKTEPLISPGCDRIPPALISEGKYSQAQRKELRLPLRDASEALPTDQLENNELNELQQPDLTDSDGKSPQAQADSDGSENVLCGNNQISDLGILLPEVCMAPEEKGDKDDQLNKETEDYLNSLLEGCLKDTEDSLSYEDNQDDDSDLLQDLSPEEASYSLQENLPSDESCLSLDDLAKRIEIAEVNQR

SEQ ID NO: 8189 - protein, 725 aa, Homo sapiens
MDDSDTPTYYLQIEPQDGCHPGDSVERSVTCLPSASDENENQLDGDGHEHLTSSDSAMGKPQVSEQDSLNNNESCTLSCEVAAGENLQNTLCEASRDEQAFLGKDKKIPGKRSPRSKKGTAKKIPPGLFSGDIAPLMQEKVLSAVTYAVDDEEAAEVNANEQPEAPKLVLQSLFSLIRGEVEQLDSRALPLCLHQIAESYFQEEDYEKAMKFIQLERLYHEQLLANLSAIQEQWETKWKTVQPHTVTALRNSEKGFNGEDFERLTKICATHQDPLLSKHKIAAVEKSQERKCSTQLLVSEDPKEGGATTKESESKTCLGTESSKESQHTVEPLGSSPCCHQMDVQTDSPSLSVTAGKDHMEELLCSAEATLALHTQSSETAGSPSGPDSSEDACEDDSRLQLAQTEACQDVARIEGIAEDPKVFLSSKSKTEPLISPGCDRIPPALISEGKYSQAQRKELRLPLRDASEALPTDQLENNELNELQQPDLTDSDGKSPQAQADSDGSENVLCGNNQISDLGILLPEVCMAPEEKGDKDDQLNKETEDYLNSLLEGCLKDTEDSLSYEDNQDDDSDLLQDLSPEEASYSLQENLPSDESCLSLDDLAKRIEIAEVVPTEGLVSILKKRNDTVGDHPAQMQHKPSKRRVRFQEIDDSLDQDEVGGGSCILLVLLCIATVFLSVGGTALYCTFGDMESPVCTDFADNMDFYYTKLLQGVAELKHWIYLS

SEQ ID NO: 8190 - protein, 396 aa, Homo sapiens
MWIPVVGLPRRLRLSALAGAGRFCILGSEAATRKHLPARNHCGLSDSSPQLWPEPDFRNPPRKASKASLDFKRYVTDRRLAETLAQIYLGKPSRPPHLLLECNPGPGILTQALLEAGAKVVALESDKTFIPHLESLGKNLDGKLRVIHCDFFKLDPRSGGVIKPPAMSSRGLFKNLGIEAVPWTADIPLKVVGMFPSRGEKRALWKLAYDLYSCTSIYKFGRIEVNMFIGEKEFQKLMADPGNPDLYHVLSVIWQLACEIKVLHMEPWSSFDIYTRKGPLENPKRRELLDQLQQKLYLIQMIPRQNLFTKNLTPMNYNIFFHLLKHCFGRRSATVIDHLRSLTPLDARDILMQIGKQEDEKVVNMHPQDFKTLFETIERSKDCAYKWLYDETLEDR

SEQ ID NO: 8191 - protein, 1727 aa, Homo sapiens
MMMDWKAVAAQKLNLSSKKKKHRPSTSSAAEPPLFATSFSGILQTSPPPAPPCLLRAVNKVKDTPGLGKVKVMLRICSTLARDTSESSSFLKVDPRKKQITLYDPLTCGGQNAFQKRGNQVPPKMFAFDAVFPQDASQAEVCAGTVAEVIQSVVNGADGCVFCFGHAKLGKSYTMIGKDDSMQNLGIIPCAISWLFKLINERKEKTGARFSVRVSAVEVWGKEENLRDLLSEVATGSLQDGQSPGVYLCEDPICGTQLQNQSELRAPTAEKAAFFLDAAIASRRSHQQDCDEDDHRNSHVFFTLHIYQYRMEKSGKGGMSGGRSRLHLIDLGSCVKALSKNREGGSGLCLSLSALGNVILALVNGSKHIPYKESKLAMLLRESLGNMNCRTTMIAHISAAVGSYAETLSTIQIASRVLRMKKKKTKYTSSSSGGESSCEEGRMRRPTQLRPFHTRATVDPDFPIAHLSSDPDYSSSSEQSCDTVIYIGPNGTALSDKELTDNEGPPDFVPIVPALQKTRGDSRPAEAGEAAAGKSERDCLKCNTFAELQERLDCIDGSEEPSSFPFEELPAQFGPEQASRGPRLSQAAGASPLSESDKEDNGSEGQLTNREGPELPASKMQRSHSPVPAAAPAHSPSPASPRSVPGSSSQHSASPLVQSPSLQSSRESLNSCGFVEGKPRPMGSPRLGIASLSKTSEYKPPSSPSQRCKVYTQKGVLPSPAPLPPSSKDSGVASRESLLQPEVRTPPVGMSPQVLKKSMSAGSEGFPETPVDDEQQAATPSESKKEILSTTMVTVQQPLELNGEDELVFTLVEELTISGVLDSGRPTSIISFNSDCSARALASGSRPVSIISSISEDLECYSSTAPVSEVSITQFLPLPKMSLDEKAQDAGSRRSSISSWLSEMSAGSEGEQSCHSFIAQTCFGHGEAMAEPVASEFVSSLQNTAVVCREKPKASPDNLLILSEMGDDSFNKAAPIKGCKISTVSKAMVTISNTANLSSCEGYIPMKTNITVYPCIAMSPRNIQEPEAPTATPKAGPTLAQSRESKENSAKKEMKFEDPWLKREEEVKKETAHPNEEGMMRCETATGPSNAETRAEQEQDGKPSPGDRLSSSSGEVSASPVTDNFRRVVDGCEMALPGLATQSPVHPNKSVKSSSLPRAFQKASRQEEPDSLSYYCAAETNGVGAASGTPPSKATLEGKVASPKHCVLARPKGTPPLPPVRKSSLDQKNRASPQHSASGSGTSSPLNQPAAFPAGLPDEPSGKTKDASSSSKLFSAKLEQLASRSNSLGRATVSHYECLSLERAESLSSVSSRLHAGKDGTMPRAGRSLGRSAGTSPPSSGASPKAGQSKISAVSRLLLASPRARGPSASTTKTLSFSTKSLPQAVGQGSSSPPGGKHTPWSTQSLSRNRSSGLASKLPLRAVSGRISELLQGGAGARGLQLRAGPEAEARGGALAEDEPAAAHLLPSPYSKITPPRRPHRCSSGHGSDNSSVLSGELPPAMGKTALFYHSGGSSGYESVMRDSEATGSASSAQDSTSENSSSVGGRCRSLKTPKKRSNPGSQRRRLIPALSLDTSSPVRKPPNSTGVRWVDGPLRSSPRGLGEPFEIKVYEIDDVERLQRRRGGASKEAMCFNAKLKILEHRQQRIAEVRAKYEWLMKELEATKQYLMLDPNKWLSEFDLEQVWELDSLEYLEALECVTERLESRVNFCKAHLMMITCFDITSRRR

SEQ ID NO: 8192 - protein, 269 aa, Homo sapiens
MLGPGQVRLRPRVWRDKAGGRVADGASGLPPARGSWRETGTGRALGASSPPRPAQGSSSPGIQSGPSSRPGSPRGAEQAGTPRPRLSLGISQATGSAARWRTRRTGKGLGYNSDEIRPRTLLIEHLMEGGRRDHHTMTVLWGTQEIIVAEFHKKIKEAFEVFDHESNNTVDVREIGTIIRSLGCCPTEGELHDLIAEVEEEEPTGYIRFEKFLPVMTEILLERKYRPIPEDVLLRAFEVLDSAKRGFLTKDELIKYMTEEDGVSLRRPG

SEQ ID NO: 8193 - protein, 800 aa, Homo sapiens
MATLGQKPVIHTVLKRKVYSSNEKMRRGTWRIVVPMTKDDALKEIRGNQVTFQDCFIADFLILLTFPLLTIPEIPGYLPISSPRGSQLMASWDACVVASAVLVTDMETFHTTDSFKSWTRIRVPPDILSDDERRSVAHVILSRDGIVFLINGVLYIKSFRGFIRLGGIVNLPDGGITGISSRKWCWVNYLLKAKGRRSTFAVWTENEIYLGSILLKFARLVTTTELKNILSLSVTATLTIDRVEYTGHPLEIAVFLNYCTVCNVTKKIFLVIYNEDTKQWVSQDFTLDAPIDSVTMPHFTFSALPGLLLWNKHSIYYCYHNFTFTGILQTPAGHGNLSMLSNDSIIHEVFIDYYGDILVKMENNVIFYSKINTRDAVKLHLWTNYTTRAFIFLSTSGQTYFLYALDDGTIQIQDYPLHLEAQSIAFTTKDKCPYMAFHNNVAHVFYFLDKGEALTVWTQIVYPENTGLYVIVESYGPKILQESHEISFEAAFGYCTKTLTLTFYQNVDYERISDYFETQDKHTGLVLVQFRPSEYSKACPIAQKVFQIAVGCDDKKFIAIKGFSKKGCHHHDFSYVIEKSYLRHQPSKNLRVRYIWGEYGCPLRLDFTEKFQPVVQLFDDNGYVKDVEANFIVWEIHGRDDYSFNNTMAQSGCLHEAQTWKSMIELNKHLPLEEVWGPENYKHCFSYAIGKPGDLNQPYEIINSSNGNHIFWPMGHSGMYVFRVKILDPNYSFCNLTAMFAIETFGLIPSPSVYLVASFLFVLMLLFFTILVLSYFRYMRIYRRYIYEPLHKPQRKRKKN

SEQ ID NO: 8194 - protein, 832 aa, Homo sapiens
MSAREVAVLLLWLSCYGSALWRYSTNSPNYRIFSTRSTIKLEYEGTLFTEWSVPETCFVLNKSSPTTELRCSSPGVHAIKPIVTGPDEEERYLFVESSHTCFLWYYRVRHFFNNFTQLITVWAYDPESADPDELLGNAEEPSINSIVLSTQMATLGQKPVIHTVLKRKVYSSNEKMRRGTWRIVVPMTKDDALKEIRGNQVTFQDCFIADFLILLTFPLLTIPEIPGYLPISSPRGSQLMASWDACVVASAVLVTDMETFHTTDSFKSWTRIRVPPDILSDDERRSVAHVILSRDGIVFLINGVLYIKSFRGFIRLGGIVNLPDGGITGISSRKWCWVNYLLKAKGRRSTFAVWTENEIYLGSILLKFARLVTTTELKNILSLSVTATLTIDRVEYTGHPLEIAVFLNYCTVCNVTKKIFLVIYNEDTKQWVSQDFTLDAPIDSVTMPHFTFSALPGLLLWNKHSIYYCYHNFTFTGILQTPAGHGNLSMLSNDSIIHEVFIDYYGDILVKMENNVIFYSKINTRDAVKLHLWTNYTTRAFIFLSTSGQTYFLYALDDGTIQIQDYPLHLEAQSIAFTTKDKCPYMAFHNNVAHVFYFLDKGEALTVWTQIVYPENTGLYVIVESYGPKILQESHEISFEAAFGYCTKTLTLTFYQNVDYERISDYFETQDKHTGLVLVQFRPSEYSKACPIAQKVFQIAVGCDDKKFIAIKGFSKKGCHHHDFSYVIEKSYLRHQPSKNLRVRYIWGEYGCPLRLDFTEKFQPVVQLFDDNGYVKDVEANFIVWEIHGRDDYSFNNTMAQSGCLHEAQTWKSMIELNKHLPLEEVWGPEFL

SEQ ID NO: 8195 - protein, 951 aa, Homo sapiens
MSAREVAVLLLWLSCYGSALWRYSTNSPNYRIFSTRSTIKLEYEGTLFTEWSVPETCFVLNKSSPTTELRCSSPGVHAIKPIVTGPDEEERYLFVESSHTCFLWYYRVRHFFNNFTQLITVWAYDPESADPDELLGNAEEPSINSIVLSTQMATLGQKPVIHTVLKRKVYSSNEKMRRGTWRIVVPMTKDDALKEIRGNQVTFQDCFIADFLILLTFPLLTIPEIPGYLPISSPRGSQLMASWDACVVASAVLVTDMETFHTTDSFKSWTRIRVPPDILSDDERRSVAHVILSRDGIVFLINGVLYIKSFRGFIRLGGIVNLPDGGITGISSRKWCWVNYLLKAKGRRSTFAVWTENEIYLGSILLKFARLVTTTELKNILSLSVTATLTIDRVEYTGHPLEIAVFLNYCTVCNVTKKIFLVIYNEDTKQWVSQDFTLDAPIDSVTMPHFTFSALPGLLLWNKHSIYYCYHNFTFTGILQTPAGHGNLSMLSNDSIIHEVFIDYYGDILVKMENNVIFYSKINTRDAVKLHLWTNYTTRAFIFLSTSGQTYFLYALDDGTIQIQDYPLHLEAQSIAFTTKDKCPYMAFHNNVAHVFYFLDKGEALTVWTQIVYPENTGLYVIVESYGPKILQESHEISFEAAFGYCTKTLTLTFYQNVDYERISDYFETQDKHTGLVLVQFRPSEYSKACPIAQKVFQIAVGCDDKKFIAIKGFSKKGCHHHDFSYVIEKSYLRHQPSKNLRVRYIWGEYGCPLRLDFTEKFQPVVQLFDDNGYVKDVEANFIVWEIHGRDDYSFNNTMAQSGCLHEAQTWKSMIELNKHLPLEEVWGPENYKHCFSYAIGKPGDLNQPYEIINSSNGNHIFWPMGHSGMYVFRVKILDPNYSFCNLTAMFAIETFGLIPSPSVYLVASFLFVLMLLFFTILVLSYFRYMRIYRRYIYEPLHKPQRKRKKN

SEQ ID NO: 8196 - protein, 115 aa, Homo sapiens
MTAIRLREFIERRPVIPPSIFIAHQGRDVQGYYPGQLARLHFDHSAKRAPRHSKPAEPWYKETTYRRDYSLPFYEIDWNQKLATVSLNPRPLNSLPELYCCEERSSFERNAFKLK

SEQ ID NO: 8197 - protein, 456 aa, Homo sapiens
MSDVTIVKEGWVQKRGEYIKNWRPRYFLLKTDGSFIGYKEKPQDVDLPYPLNNFSVAKCQLMKTERPKPNTFIIRCLQWTTVIERTFHVDTPEEREEWTEAIQAVADRLQRQEEERMNCSPTSQIDNIGEEEMDASTTHHKRKTMNDFDYLKLLGKGTFGKVILVREKASGKYYAMKILKKEVIIAKDEVAHTLTESRVLKNTRHPFLTLFFHLSRERVFSEDRTRFYGAEIVSALDYLHSGKIVYRDLKLENLMLDKDGHIKITDFGLCKEGITDAATMKTFCGTPEYLAPEVLEDNDYGRAVDWWGLGVVMYEMMCGRLPFYNQDHEKLFELILMEDIKFPRTLSSDAKSLLSGLLIKDPNKRLGGGPDDAKEIMRHSFFSGVNWQDVYDKKLVPPFKPQVTSETDTRYFDEEFTAQTITITPPEKYDEDGMDCMDNERRPHFPQFSYSASGRE

SEQ ID NO: 8198 - protein, 713 aa, Homo sapiens
MAKSPENSTLEEILGQYQRSLREHASRSIHQLTCALKEGDVTIGEDAPNLSFSTSVGNEDARTAWPELQQSHAVNQLKDLLRQQADKESEVSPSRRRKMSPLRSLEHEETNMPTMHDLVHTINDQSQYIHHLEAEVKFCKEELSGMKNKIQVVVLENEGLQQQLKSQRQEETLREQTLLDASGNMHNSWITTGEDSGVGETSKRPFSHDNADFGKAASAGEQLELEKLKLTYEEKCEIEESQLKFLRNDLAEYQRTCEDLKEQLKHKEFLLAANTCNRVGGLCLKCAQHEAVLSQTHTNVHMQTIERLVKERDDLMSALVSVRSSLADTQQREASAYEQVKQVLQISEEANFEKTKALIQCDQLRKELERQAERLEKELASQQEKRAIEKDMMKKEITKEREYMGSKMLILSQNIAQLEAQVEKVTKEKISAINQLEEIQSQLASREMDVTKVCGEMRYQLNKTNMEKDEAEKEHREFRAKTNRDLEIKDQEIEKLRIELDESKQHLEQEQQKAALAREECLRLTELLGESEHQLHLTRQEKDSIQQSFSKEAKAQALQAQQREQELTQKIQQMEAQHDKTENEQYLLLTSQNTFLTKLKEECCTLAKKLEQISQKTRSEIAQLSQEKRYTYDKLGKLQRRNEELEEQCVQHGRVHETMKQRLRQLDKHSQATAQQLVQLLSKQNQLLLERQSLSEEVDRLRTQLPSMPQSDC

SEQ ID NO: 8199 - protein, 1584 aa, Homo sapiens
MSLTSWFLVSSGGTRHRLPREMIFVGRDDCELMLQSRSVDKQHAVINYDASTDEHLVKDLGSLNGTFVNDVRIPEQTYITLKLEDKLRFGYDTNLFTVVQGEMRVPEEALKHEKFTIQLQLSQKSSESELSKSASAKSIDSKVADAATEVQHKTTEALKSEEKAMDISAMPRGTPLYGQPSWWGDDEVDEKRAFKTNGKPEEKNHEAGTSGCGIDAKQVEEQSAAANEEVLFPFCREPSYFEIPTKEFQQPSQITESTIHEIPTKDTPSSHITGAGHASFTIEFDDSTPGKVTIRDHVTKFTSDQRHKSKKSSPGTQDLLGIQTGMMAPENKVADWLAQNNPPQMLWERTEEDSKSIKSDVPVYLKRLKGNKHDDGTQSDSENAGAHRRCSKRATLEEHLRRHHSEHKKLQKVQATEKHQDQAVTSSAHHRGGHGVPHGKLLKQKSEEPSVSIPFLQTALLRSSGSLGHRPSQEMDKMLKNQATSATSEKDNDDDQSDKGTYTIELENPNSEEVEARKMIDKVFGVDDNQDYNRPVINEKHKDLIKDWALSSAAAVMEERKPLTTSGFHHSEEGTSSSGSKRWVSQWASLAANHTRHDQEERIMEFSAPLPLENETEISESGMTVRSTGSATSLASQGERRRRTLPQLPNEEKSLESHRAKVVTQRSEIGEKQDTELQEKETPTQVYQKDKQDADRPLSKMNRAVNGETLKTGGDNKTLLHLGSSAPGKEKSETDKETSLVKQTLAKLQQQEQREEAQWTPTKLSSKNVSGQTDKCREETFKQESQPPEKNSGHSTSKGDRVAQSESKRRKAEEILKSQTPKGGDKKESSKSLVRQGSFTIEKPSPNIPIELIPHINKQTSSTPSSLALTSASRIRERSESLDPDSSMDTTLILKDTEAVMAFLEAKLREDNKTDEGPDTPSYNRDNSISPESDVDTASTISLVTGETERKSTQKRKSFTSLYKDRCSTGSPSKDVTKSSSSGAREKMEKKTKSRSTDVGSRADGRKFVQSSGRIRQPSVDLTDDDQTSSVPHSAISDIMSSDQETYSCKPHGRTPLTSADEHVHSKLEGSKVTKSKTSPVVSGSSSKSTTLPRPRPTRTSLLRRARLGEASDSELADADKASVASEVSTTSSTSKPPTGRRNISRIDLLAQPRRTRLGSLSARSDSEATISRSSASSRTAEAIIRSGARLVPSDKFSPRIRANSISRLSDSKVKSMTSAHGSASVNSRWRRFPTDYASTSEDEFGSNRNSPKHTRLRTSPALKTTRLQSAGSAMPTSSSFKHRIKEQEDYIRDWTAHREEIARISQDLALIAREINDVAGEIDSVTSSGTAPSTTVSTAATTPGSAIDTREELVDRVFDESLNFRKIPPLVHSKTPEGNNGRSGDPRPQAAEPPDHLTITRRRTWSRDEVMGDNLLLSSVFQFSKKIRQSIDKTAGKIRILFKDKDRNWDDIESKLRAESEVPIVKTSSMEISSILQELKRVEKQLQAINAMIDPDGTLEALNNMGFPSAMLPSPPKQKSSPVNNHHSPGQTPTLGQPEARALHPAAVSAAAEFENAESEADFSIHFNRFNPDGEEEDVTVQE

SEQ ID NO: 8200 - protein, 1460 aa, Homo sapiens
MSLTSWFLVSSGGTRHRLPREMIFVGRDDCELMLQSRSVDKQHAVINYDASTDEHLVKDLGSLNGTFVNDVRIPEQTYITLKLEDKLRFGYDTNLFTVVQGEMRVPEEALKHEKFTIQLQLSQKSSESELSKSASAKSIDSKVADAATEVQHKTTEALKSEEKAMDISAMPRGTPLYGQPSWWGDDEVDEKRAFKTNGKPEEKNHEAGTSGCGIDAKQVEEQSAAANEEVLFPFCREPSYFEIPTKEFQQPSQITESTIHEIPTKDTPSSHITGAGHASFTIEFDDSTPGKVTIRDHVTKFTSDQRHKSKKSSPGTQDLLGIQTGMMAPENKVADWLAQNNPPQMLWERTEEDSKSIKSDVPVYLKRLKGNKHDDGTQSDSENAGAHRRCSKRATLEEHLRRHHSEHKKLQKVQATEKHQDQAVVFGVDDNQDYNRPVINEKHKDLIKDWALSSAAAVMEERKPLTTSGFHHSEEGTSSSGSKRWVSQWASLAANHTRHDQEERIMEFSAPLPLENETEISESGMTVRSTGSATSLASQGERRRRTLPQLPNEEKSLESHRAKVVTQRSEIGEKQDTELQEKETPTQVYQKDKQDADRPLSKMNRAVNGETLKTGGDNKTLLHLGSSAPGKEKSETDKETSLVKQTLAKLQQQEQREEAQWTPTKLSSKNVSGQTDKCREETFKQESQPPEKNSGHSTSKGDRVAQSESKRRKAEEILKSQTPKGGDKKESSKSLVRQGSFTIEKPSPNIPIELIPHINKQTSSTPSSLALTSASRIRERSESLDPDSSMDTTLILKDTEAVMAFLEAKLREDNKTDEGPDTPSYNRDNSISPESDVDTASTISLVTGETERKSTQKRKSFTSLYKDRCSTGSPSKDVTKSSSSGAREKMEKKTKSRSTDVGSRADGRKFVQSSGRIRQPSVDLTDDDQTSSVPHSAISDIMSSDQETYSCKPHGRTPLTSADEHVHSKLEGSKVTKSKTSPVVSGSSSKSTTLPRPRPTRTSLLRRARLGEASDSELADADKASVASEVSTTSSTSKPPTGRRNISRIDLLAQPRRTRLGSLSARSDSEATISRSSASSRTAEAIIRSGARLVPSDKFSPRIRANSISRLSDSKVKSMTSAHGSASALKTTRLQSAGSAMPTSSSFKHRIKEQEDYIRDWTAHREEIARISQDLALIAREINDVAGEIDSVTSSGTAPSTTVSTAATTPGSAIDTREEVGDLHGEMHKLVDRVFDESLNFRKIPPLVHSKTPEGNNGRSGDPRPQAAEPPDHLTITRRRTWSRDEVMGDNLLLSSVFQFSKKIRQSIDKTAGKIRILFKDKDRNWDDIESKLRAESEVPIVKTSSMEISSILQELKRVEKQLQAINAMIDPDGTLEALNNMGFPSAMLPSPPKQKSSPVNNHHSPGQTPTLGQPEARALHPAAVSAAAEFENAESEADFSIHFNRFNPDGEEEDVTVQE

SEQ ID NO: 8201 - protein, 1486 aa, Homo sapiens
MSLTSWFLVSSGGTRHRLPREMIFVGRDDCELMLQSRSVDKQHAVINYDASTDEHLVKDLGSLNGTFVNDVRIPEQTYITLKLEDKLRFGYDTNLFTVVQGEMRVPEEALKHEKFTIQLQLSQKSSESELSKSASAKSIDSKVADAATEVQHKTTEALKSEEKAMDISAMPRGTPLYGQPSWWGDDEVDEKRAFKTNGKPEEKNHEAGTSGCGIDAKQVEEQSAAANEEVLFPFCREPSYFEIPTKEFQQPSQITESTIHEIPTKDTPSSHITGAGHASFTIEFDDSTPGKVTIRDHVTKFTSDQRHKSKKSSPGTQDLLGIQTGMMAPENKVADWLAQNNPPQMLWERTEEDSKSIKSDVPVYLKRLKGNKHDDGTQSDSENAGAHRRCSKRATLEEHLRRHHSEHKKLQKVQATEKHQDQAVVFGVDDNQDYNRPVINEKHKDLIKDWALSSAAAVMEERKPLTTSGFHHSEEGTSSSGSKRWVSQWASLAANHTRHDQEERIMEFSAPLPLENETEISESGMTVRSTGSATSLASQGERRRRTLPQLPNEEKSLESHRAKVVTQRSEIGEKQDTELQEKETPTQVYQKDKQDADRPLSKMNRAVNGETLKTGGDNKTLLHLGSSAPGKEKSETDKETSLVKQTLAKLQQQEQREEAQWTPTKLSSKNVSGQTDKCREETFKQESQPPEKNSGHSTSKGDRVAQSESKRRKAEEILKSQTPKGGDKKESSKSLVRQGSFTIEKPSPNIPIELIPHINKQTSSTPSSLALTSASRIRERSESLDPDSSMDTTLILKDTEAVMAFLEAKLREDNKTDEGPDTPSYNRDNSISPESDVDTASTISLVTGETERKSTQKRKSFTSLYKDRCSTGSPSKDVTKSSSSGAREKMEKKTKSRSTDVGSRADGRKFVQSSGRIRQPSVDLTDDDQTSSVPHSAISDIMSSDQETYSCKPHGRTPLTSADEHVHSKLEGSKVTKSKTSPVVSGSSSKSTTLPRPRPTRTSLLRRARLGEASDSELADADKASVASEVSTTSSTSKPPTGRRNISRIDLLAQPRRTRLGSLSARSDSEATISRSSASSRTAEAIIRSGARLVPSDKFSPRIRANSISRLSDSKVKSMTSAHGSASVNSRWRRFPTDYASTSEDEFGSNRNSPKHTRLRTSPALKTTRLQSAGSAMPTSSSFKHRIKEQEDYIRDWTAHREEIARISQDLALIAREINDVAGEIDSVTSSGTAPSTTVSTAATTPGSAIDTREELVDRVFDESLNFRKIPPLVHSKTPEGNNGRSGDPRPQAAEPPDHLTITRRRTWSRDEVMGDNLLLSSVFQFSKKIRQSIDKTAGKIRILFKDKDRNWDDIESKLRAESEVPIVKTSSMEISSILQELKRVEKQLQAINAMIDPDGTLEALNNMGFPSAMLPSPPKQKSSPVNNHHSPGQTPTLGQPEARALHPAAVSAAAEFENAESEADFSIHFNRFNPDGEEEDVTVQE

SEQ ID NO: 8202 - protein, 1081 aa, Homo sapiens
MDIRKEKRLNMALQMSNFKKALNRFEKLVEQTAAQKRDERAGLFIHKEDAIGYDKFYASVQKLFGPDVKNQDVKRFYRKLCNNTDASADWCEIFGYFSSEEDPIASQLDEENLVFFVSRKRRILISGSRRRDVIKSIVKIPHLDLLITATQKGLITVFNNQDTSWITGCDYLLQLKRIVATTERTIIVWDYKAQGSSQENYFVIKPMDHCLLCVCVVPLPDHLCRDDILLGDDGGFVNRFTVNSDDFGIKQAKSKRKLQNQVLDSKNFKSVKRKLHNDWVMKIRYISALNCFGSCSLDSNHSLVLESLKRLEDNLPVREFSMPRGANTFCYCVKANVIVTGGDDKVIRLWHPNISTKPVGKLVGHMFSIAEIVTNEKDQHVVSLSSAKVFRVWDIQTLSLLQVFHDSQGGPGDMQIYSMIYDANHGMLITGSSVMDMYPLTRMIQDTKQVPHTHEREINVMLYNKYFHQVLTICSESIIRVWELETGLQVYQILEPHGFNTEVTSAAVDESGFLFATGAYNGTVRIWDFGSGQEMKVLPEGKDWKEDEHCLRRLIFLKAQEKHQQLVLALERNGTIKMIQGKEDDIYLMVIWELPDVVPFLQDGKHAVHLRMSTRDRNMAIPFPDVELIVERNFSQPTDNPTMDLLRVNCIDLLQVEGYNLIAAGTLNGVIILWNFVTSTVKKVYRPEDCFTVNPDLHPKHFKINDILFLFRTPECARRSSQDSICSSSQCESSKGPQSSKGSKQSIHDSEVKGEQTDVMVGKQQPMDKKHPGIANLPEAQPPILVTAHEDGHLRLWTLEGRLLKDMLPFTKHSAISLTSLYTDSCTRILLAGNVEGHVILCNISSFLDPPHDEKKFKQLLSWRAHSLEIIQVIYVEEKQVVLTASIDGSVRLWHALNGHYCGYFGQRRLFELSQTRDFILPCDVTEYPIEIKEESKFTEKQKYEYPLIFDREKWRKMSSVSLLFKRTPPKAFEVEQDFKFFKSLSSPKIRRYPLEGFVTENREAGIVFGSLPIYSISSPTSLRFLPLIGVEAQKDSSDGITGKKKGGHVQREKAPRRRSLKKNLVPQINLASSFFPAIPK

SEQ ID NO: 8203 - protein, 656 aa, Homo sapiens
MADNLPTEFDVVIIGTGLPESILAAACSRSGQRVLHIDSRSYYGGNWASFSFSGLLSWLKEYQQNNDIGEESTVVWQDLIHETEEAITLRKKDETIQHTEAFCYASQDMEDNVEEIGALQKNPSLGVSNTFTEVLDSALPEESQLSYFNSDEMPAKHTQKSDTEISLEVTDVEESVEKEKYCGDKTCMHTVSDKDGDKDESKSTVEDKADEPIRNRITYSQIVKEGRRFNIDLVSKLLYSQGLLIDLLIKSDVSRYVEFKNVTRILAFREGKVEQVPCSRADVFNSKELTMVEKRMLMKFLTFCLEYEQHPDEYQAFRQCSFSEYLKTKKLTPNLQHFVLHSIAMTSESSCTTIDGLNATKNFLQCLGRFGNTPFLFPLYGQGEIPQGFCRMCAVFGGIYCLRHKVQCFVVDKESGRCKAIIDHFGQRINAKYFIVEDSYLSEETCSNVQYKQISRAVLITDQSILKTDLDQQTSILIVPPAEPGACAVRVTELCSSTMTCMKDTYLVHLTCSSSKTAREDLESVVKKLFTPYTETEINEEELTKPRLLWALYFNMRDSSGISRSSYNGLPSNVYVCSGPDCGLGNEHAVKQAETLFQEIFPTEEFCPPPPNPEDIIFDGDDKQPEAPGTNNVVMAKLESSEESKNLESPEKHLQN

SEQ ID NO: 8204 - protein, 452 aa, Homo sapiens
MDSSVIQRKKVAVIGGGLVGSLQACFLAKRNFQIDVYEAREDTRVATFTRGRSINLALSHRGRQALKAVGLEDQIVSQGIPMRARMIHSLSGKKSAIPYGTKSQYILSVSRENLNKDLLTAAEKYPNVKMHFNHRLLKCNPEEGMITVLGSDKVPKDVTCDLIVGCDGAYSTVRSHLMKKPRFDYSQQYIPHGYMELTIPPKNGDYAMEPNYLHIWPRNTFMMIALPNMNKSFTCTLFMPFEEFEKLLTSNDVVDFFQKYFPDAIPLIGEKLLVQDFFLLPAQPMISVKCSSFHFKSHCVLLGDAAHAIVPFFGQGMNAGFEDCLVFDELMDKFSNDLSLCLPVFSRLRIPDDHAISDLSMYNYIEVTFSRIRYHEAVQRWHWQKKVINKGLFFLGSLIAISSTYLLIHYMSPRSFLRLRRPWNWIAHFRNTTCFPAKAVDSLEQISNLISR

SEQ ID NO: 8205 - protein, 473 aa, Homo sapiens
MDSSVIQRKKVAVIGGGLVGSLQACFLAKRNFQIDVYEAREDTRVATFTRGRSINLALSHRGRQALKAVGLEDQIVSQGIPMRARMIHSLSGKKSAIPYGTKSQYILSVSRENLNKDLLTAAEKYPNVKMHFNHRLLKCNPEEGMITVLGSDKVPKDVTCDLIVGCDGAYSTVRSHLMKKPRFDYSQQYIPHGYMELTIPPKNGDYAMEPNYLHIWPRNTFMMIALPNMNKSFTCTLFMPFEEFEKLLTSNDVVDFFQKYFPDAIPLIGEKLLVQDFFLLPAQPMISVKCSSFHFKSHCVLLGDAAHAIVPFFGQGMNAGFEDCLVFDELMDKFSNDLSLCLPVFSRLRIPDDHAISDLSMYNYIEKNMERFLHAIMPSTFIPLYTMVTFSRIRYHEAVQRWHWQKKVINKGLFFLGSLIAISSTYLLIHYMSPRSFLRLRRPWNWIAHFRNTTCFPAKAVDSLEQISNLISR

SEQ ID NO: 8206 - protein, 486 aa, Homo sapiens
MDSSVIQRKKVAVIGGGLVGSLQACFLAKRNFQIDVYEAREDTRVATFTRGRSINLALSHRGRQALKAVGLEDQIVSQGIPMRARMIHSLSGKKSAIPYGTKSQYILSVSRENLNKDLLTAAEKYPNVKMHFNHRLLKCNPEEGMITVLGSDKVPKDVTCDLIVGCDGAYSTVRSHLMKKPRFDYSQQYIPHGYMELTIPPKNGDYAMEPNYLHIWPRNTFMMIALPNMNKSFTCTLFMPFEEFEKLLTSNDVVDFFQKYFPDAIPLIGEKLLVQDFFLLPAQPMISVKCSSFHFKSHCVLLGDAAHAIVPFFGQGMNAGFEDCLVFDELMDKFSNDLSLCLPVFSRLRIPDDHAISDLSMYNYIEMRAHVNSSWFIFQKNMERFLHAIMPSTFIPLYTMVTFSRIRYHEAVQRWHWQKKVINKGLFFLGSLIAISSTYLLIHYMSPRSFLRLRRPWNWIAHFRNTTCFPAKAVDSLEQISNLISR

SEQ ID NO: 8207 - protein, 510 aa, Homo sapiens
MYRALRLLARSRPLVRAPAAALASAPGLGGAAVPSFWPPNAARMASQNSFRIEYDTFGELKVPNDKYYGAQTVRSTMNFKIGGVTERMPTPVIKAFGILKRAAAEVNQDYGLDPKIANAIMKAADEVAEGKLNDHFPLVVWQTGSGTQTNMNVNEVISNRAIEMLGGELGSKIPVHPNDHVNKSQSSNDTFPTAMHIAAAIEVHEVLLPGLQKLHDALDAKSKEFAQIIKIGRTHTQDAVPLTLGQEFSGYVQQVKYAMTRIKAAMPRIYELAAGGTAVGTGLNTRIGFAEKVAAKVAALTGLPFVTAPNKFEALAAHDALVELSGAMNTTACSLMKIANDIRFLGSGPRSGLGELILPENEPGSSIMPGKVNPTQCEAMTMVAAQVMGNHVAVTVGGSNGHFELNVFKPMMIKNVLHSARLLGDASVSFTENCVVGIQANTERINKLMNESLMLVTALNPHIGYDKAAKIAKTAHKNGSTLKETAIELGYLTAEQFDEWVKPKDMLGPK

SEQ ID NO: 8208 - protein, 477 aa, Homo sapiens
MAQGNNYGQTSNGVADESPNMLVYRKMEDVIARMQDEKNGIPIRTVKSFLSKIPSVFSGSDIVQWLIKNLTIEDPVEALHLGTLMAAHGYFFPISDHVLTLKDDGTFYRFQTPYFWPSNCWEPENTDYAVYLCKRTMQNKARLELADYEAESLARLQRAFARKWEFIFMQAEAQAKVDKKRDKIERKILDSQERAFWDVHRPVPGCVNTTEVDIKKSSRMRNPHKTRKSVYGLQNDIRSHSPTHTPTPETKPPTEDELQQQIKYWQIQLDRHRLKMSKVADSLLSYTEQYLEYDPFLLPPDPSNPWLSDDTTFWELEASKEPSQQRVKRWGFGMDEALKDPVGREQFLKFLESEFSSENLRFWLAVEDLKKRPIKEVPSRVQEIWQEFLAPGAPSAINLDSKSYDKTTQNVKEPGRYTFEDAQEHIYKLMKSDSYPRFIRSSAYQELLQAKKKGRNIPIFPCHKNCTPTLRASTNLL

SEQ ID NO: 8209 - protein, 469 aa, Homo sapiens
MAQGNNYGQTSNGVADESPNMLVYRKMEDVIARMQDEKNGIPIRTVKSFLSKIPSVFSGSDIVQWLIKNLTIEDPVEALHLGTLMAAHGYFFPISDHVLTLKDDGTFYRFQTPYFWPSNCWEPENTDYAVYLCKRTMQNKARLELADYEAESLARLQRAFARKWEFIFMQAEAQAKVDKKRDKIERKILDSQERAFWDVHRPVPGCVNTTEVDIKKSSRMRNPHKTRKSVYGLQNDIRSHSPTHTPTPETKPPTEDELQQQIKYWQIQLDRHRLKMSKVADSLLSYTEQYLEYDPFLLPPDPSNPWLSDDTTFWELEASKEPSQQRVKRWGFGMDEALKDPVGREQFLKFLESEFSSENLRFWLAVEDLKKRPIKEVPSRVQEIWQEFLAPGAPSAINLDSKSYDKTTQNVKEPGRYTFEDAQEHIYKLMKSDSYPRFIRSSAYQELLQAKKKGKSLTSKRLTSLAQSY

SEQ ID NO: 8210 - protein, 487 aa, Homo sapiens
MAQGNNYGQTSNGVADESPNMLVYRKMEDVIARMQDEKNGIPIRTVKSFLSKIPSVFSGSDIVQWLIKNLTIEDPVEALHLGTLMAAHGYFFPISDHVLTLKDDGTFYRFQTPYFWPSNCWEPENTDYAVYLCKRTMQNKARLELADYEAESLARLQRAFARKWEFIFMQAEAQAKVDKKRDKIERKILDSQERAFWDVHRPVPGCVNTTEVDIKKSSRMRNPHKTRKSVYGLQNDIRSHSPTHTPTPETKPPTEDELQQQIKYWQIQLDRHRLKMSKVADSLLSYTEQYLEYDPFLLPPDPSNPWLSDDTTFWELEASKEPSQQRVKRWGFGMDEALKDPVGREQFLKFLESEFSSENLRFWLAVEDLKKRPIKEVPSRVQEIWQEFLAPGAPSAINLDSKSYDKTTQNVKEPGRYTFEDAQEHIYKLMKSDSYPRFIRSSAYQELLQAKKKSGNSMDRRTSFEKFAQNVGKSLTSKRLTSLAQSY

SEQ ID NO: 8211 - protein, 540 aa, Homo sapiens
MWLLRCVLLCVSLSLAVSGQHKPEAPDYSSVLHCGPWSFQFAVNLNQEATSPPVLIAWDNQGLLHELQNDSDCGTWIRKGPGSSVVLEATYSSCYVTEWDSHYIMPVGVEGAGAAEHKVVTERKLLKCPMDLLARDAPDTDWCDSIPARDRLPCAPSPISRGDCEGLGCCYSSEEVNSCYYGNTVTLHCTREGHFSIAVSRNVTSPPLLLDSVRLALRNDSACNPVMATQAFVLFQFPFTSCGTTRQITGDRAVYENELVATRDVKNGSRGSVTRDSIFRLHVSCSYSVSSNSLPINVQVFTLPPPFPETQPGPLTLELQIAKDKNYGSYYGVGDYPVVKLLRDPIYVEVSILHRTDPYLGLLLQQCWATPSTDPLSQPQWPILVKGCPYIGDNYQTQLIPVQKALDLPFPSHHQRFSIFTFSFVNPTVEKQALRGPVHLHCSVSVCQPAETPSCVVTCPDLSRRRNFDNSSQNTTASVSSKGPMILLQATKDPPEKLRVPVDSKVLWVAGLSGTLILGALLVSYLAVKKQKSCPDQMCQ

SEQ ID NO: 8212 - protein, 4967 aa, Homo sapiens
MADGGEGEDEIQFLRTDDEVVLQCTATIHKEQQKLCLAAEGFGNRLCFLESTSNSKNVPPDLSICTFVLEQSLSVRALQEMLANTVEKSEGQVDVEKWKFMMKTAQGGGHRTLLYGHAILLRHSYSGMYLCCLSTSRSSTDKLAFDVGLQEDTTGEACWWTIHPASKQRSEGEKVRVGDDLILVSVSSERYLHLSYGNGSLHVDAAFQQTLWSVAPISSGSEAAQGYLIGGDVLRLLHGHMDECLTVPSGEHGEEQRRTVHYEGGAVSVHARSLWRLETLRVAWSGSHIRWGQPFRLRHVTTGKYLSLMEDKNLLLMDKEKADVKSTAFTFRSSKEKLDVGVRKEVDGMGTSEIKYGDSVCYIQHVDTGLWLTYQSVDVKSVRMGSIQRKAIMHHEGHMDDGISLSRSQHEESRTARVIRSTVFLFNRFIRGLDALSKKAKASTVDLPIESVSLSLQDLIGYFHPPDEHLEHEDKQNRLRALKNRQNLFQEEGMINLVLECIDRLHVYSSAAHFADVAGREAGESWKSILNSLYELLAALIRGNRKNCAQFSGSLDWLISRLERLEASSGILEVLHCVLVESPEALNIIKEGHIKSIISLLDKHGRNHKVLDVLCSLCVCHGVAVRSNQHLICDNLLPGRDLLLQTRLVNHVSSMRPNIFLGVSEGSAQYKKWYYELMVDHTEPFVTAEATHLRVGWASTEGYSPYPGGGEEWGGNGVGDDLFSYGFDGLHLWSGCIARTVSSPNQHLLRTDDVISCCLDLSAPSISFRINGQPVQGMFENFNIDGLFFPVVSFSAGIKVRFLLGGRHGEFKFLPPPGYAPCYEAVLPKEKLKVEHSREYKQERTYTRDLLGPTVSLTQAAFTPIPVDTSQIVLPPHLERIREKLAENIHELWVMNKIELGWQYGPVRDDNKRQHPCLVEFSKLPEQERNYNLQMSLETLKTLLALGCHVGISDEHAEDKVKKMKLPKNYQLTSGYKPAPMDLSFIKLTPSQEAMVDKLAENAHNVWARDRIRQGWTYGIQQDVKNRRNPRLVPYTLLDDRTKKSNKDSLREAVRTLLGYGYNLEAPDQDHAARAEVCSGTGERFRIFRAEKTYAVKAGRWYFEFETVTAGDMRVGWSRPGCQPDQELGSDERAFAFDGFKAQRWHQGNEHYGRSWQAGDVVGCMVDMNEHTMMFTLNGEILLDDSGSELAFKDFDVGDGFIPVCSLGVAQVGRMNFGKDVSTLKYFTICGLQEGYEPFAVNTNRDITMWLSKRLPQFLQVPSNHEHIEVTRIDGTIDSSPCLKVTQKSFGSQNSNTDIMFYRLSMPIECAEVFSKTVAGGLPGAGLFGPKNDLEDYDADSDFEVLMKTAHGHLVPDRVDKDKEATKPEFNNHKDYAQEKPSRLKQRFLLRRTKPDYSTSHSARLTEDVLADDRDDYDFLMQTSTYYYSVRIFPGQEPANVWVGWITSDFHQYDTGFDLDRVRTVTVTLGDEKGKVHESIKRSNCYMVCAGESMSPGQGRNNNGLEIGCVVDAASGLLTFIANGKELSTYYQVEPSTKLFPAVFAQATSPNVFQFELGRIKNVMPLSAGLFKSEHKNPVPQCPPRLHVQFLSHVLWSRMPNQFLKVDVSRISERQGWLVQCLDPLQFMSLHIPEENRSVDILELTEQEELLKFHYHTLRLYSAVCALGNHRVAHALCSHVDEPQLLYAIENKYMPGLLRAGYYDLLIDIHLSSYATARLMMNNEYIVPMTEETKSITLFPDENKKHGLPGIGLSTSLRPRMQFSSPSFVSISNECYQYSPEFPLDILKSKTIQMLTEAVKEGSLHARDPVGGTTEFLFVPLIKLFYTLLIMGIFHNEDLKHILQLIEPSVFKEAATPEEESDTLEKELSVDDAKLQGAGEEEAKGGKRPKEGLLQMKLPEPVKLQMCLLLQYLCDCQVRHRIEAIVAFSDDFVAKLQDNQRFRYNEVMQALNMSAALTARKTKEFRSPPQEQINMLLNFKDDKSECPCPEEIRDQLLDFHEDLMTHCGIELDEDGSLDGNSDLTIRGRLLSLVEKVTYLKKKQAEKPVESDSKKSSTLQQLISETMVRWAQESVIEDPELVRAMFVLLHRQYDGIGGLVRALPKTYTINGVSVEDTINLLASLGQIRSLLSVRMGKEEEKLMIRGLGDIMNNKVFYQHPNLMRALGMHETVMEVMVNVLGGGESKEITFPKMVANCCRFLCYFCRISRQNQKAMFDHLSYLLENSSVGLASPAMRGSTPLDVAAASVMDNNELALALREPDLEKVVRYLAGCGLQSCQMLVSKGYPDIGWNPVEGERYLDFLRFAVFCNGESVEENANVVVRLLIRRPECFGPALRGEGGNGLLAAMEEAIKIAEDPSRDGPSPNSGSSKTLDTEEEEDDTIHMGNAIMTFYSALIDLLGRCAPEMHLIHAGKGEAIRIRSILRSLIPLGDLVGVISIAFQMPTIAKDGNVVEPDMSAGFCPDHKAAMVLFLDRVYGIEVQDFLLHLLEVGFLPDLRAAASLDTAALSATDMALALNRYLCTAVLPLLTRCAPLFAGTEHHASLIDSLLHTVYRLSKGCSLTKAQRDSIEVCLLSICGQLRPSMMQHLLRRLVFDVPLLNEHAKMPLKLLTNHYERCWKYYCLPGGWGNFGAASEEELHLSRKLFWGIFDALSQKKYEQELFKLALPCLSAVAGALPPDYMESNYVSMMEKQSSMDSEGNFNPQPVDTSNITIPEKLEYFINKYAEHSHDKWSMDKLANGWIYGEIYSDSSKVQPLMKPYKLLSEKEKEIYRWPIKESLKTMLAWGWRIERTREGDSMALYNRTRRISQTSQVSVDAAHGYSPRAIDMSNVTLSRDLHAMAEMMAENYHNIWAKKKKMELESKGGGNHPLLVPYDTLTAKEKAKDREKAQDILKFLQINGYAVSRGFKDLELDTPSIEKRFAYSFLQQLIRYVDEAHQYILEFDGGSRGKGEHFPYEQEIKFFAKVVLPLIDQYFKNHRLYFLSAASRPLCSGGHASNKEKEMVTSLFCKLGVLVRHRISLFGNDATSIVNCLHILGQTLDARTVMKTGLESVKSALRAFLDNAAEDLEKTMENLKQGQFTHTRNQPKGVTQIINYTTVALLPMLSSLFEHIGQHQFGEDLILEDVQVSCYRILTSLYALGTSKSIYVERQRSALGECLAAFAGAFPVAFLETHLDKHNIYSIYNTKSSRERAALSLPTNVEDVCPNIPSLEKLMEEIVELAESGIRYTQMPHVMEVILPMLCSYMSRWWEHGPENNPERAEMCCTALNSEHMNTLLGNILKIIYNNLGIDEGAWMKRLAVFSQPIINKVKPQLLKTHFLPLMEKLKKKAATVVSEEDHLKAEARGDMSEAELLILDEFTTLARDLYAFYPLLIRFVDYNRAKWLKEPNPEAEELFRMVAEVFIYWSKSHNFKREEQNFVVQNEINNMSFLITDTKSKMSKAAVSDQERKKMKRKGDRYSMQTSLIVAALKRLLPIGLNICAPGDQELIALAKNRFSLKDTEDEVRDIIRSNIHLQGKLEDPAIRWQMALYKDLPNRTDDTSDPEKTVERVLDIANVLFHLEQKSKRVGRRHYCLVEHPQRSKKAVWHKLLSKQRKRAVVACFRMAPLYNLPRHRAVNLFLQGYEKSWIETEEHYFEDKLIEDLAKPGAEPPEEDEGTKRVDPLHQLILLFSRTALTEKCKLEEDFLYMAYADIMAKSCHDEEDDDGEEEVKSFEEKEMEKQKLLYQQARLHDRGAAEMVLQTISASKGETGPMVAATLKLGIAILNGGNSTVQQKMLDYLKEKKDVGFFQSLAGLMQSCSVLDLNAFERQNKAEGLGMVTEEGSGEKVLQDDEFTCDLFRFLQLLCEGHNSDFQNYLRTQTGNNTTVNIIISTVDYLLRVQESISDFYWYYSGKDVIDEQGQRNFSKAIQVAKQVFNTLTEYIQGPCTGNQQSLAHSRLWDAVVGFLHVFAHMQMKLSQDSSQIELLKELMDLQKDMVVMLLSMLEGNVVNGTIGKQMVDMLVESSNNVEMILKFFDMFLKLKDLTSSDTFKEYDPDGKGVISKRDFHKAMESHKHYTQSETEFLLSCAETDENETLDYEEFVKRFHEPAKDIGFNVAVLLTNLSEHMPNDTRLQTFLELAESVLNYFQPFLGRIEIMGSAKRIERVYFEISESSRTQWEKPQVKESKRQFIFDVVNEGGEKEKMELFVNFCEDTIFEMQLAAQISESDLNERSANKEESEKERPEEQGPRMAFFSILTVRSALFALRYNILTLMRMLSLKSLKKQMKKVKKMTVKDMVTAFFSSYWSIFMTLLHFVASVFRGFFRIICSLLLGGSLVEGAKKIKVAELLANMPDPTQDEVRGDGEEGERKPLEAALPSEDLTDLKELTEESDLLSDIFGLDLKREGGQYKLIPHNPNAGLSDLMSNPVPMPEVQEKFQEQKAKEEEKEEKEETKSEPEKAEGEDGEKEEKAKEDKGKQKLRQLHTHRYGEPEVPESAFWKKIIAYQQKLLNYFARNFYNMRMLALFVAFAINFILLFYKVSTSSVVEGKELPTRSSSENAKVTSLDSSSHRIIAVHYVLEESSGYMEPTLRILAILHTVISFFCIIGYYCLKVPLVIFKREKEVARKLEFDGLYITEQPSEDDIKGQWDRLVINTQSFPNNYWDKFVKRKVMDKYGEFYGRDRISELLGMDKAALDFSDAREKKKPKKDSSLSAVLNSIDVKYQMWKLGVVFTDNSFLYLAWYMTMSVLGHYNNFFFAAHLLDIAMGFKTLRTILSSVTHNGKQLVLTVGLLAVVVYLYTVVAFNFFRKFYNKSEDGDTPDMKCDDMLTCYMFHMYVGVRAGGGIGDEIEDPAGDEYEIYRIIFDITFFFFVIVILLAIIQGLIIDAFGELRDQQEQVKEDMETKCFICGIGNDYFDTVPHGFETHTLQEHNLANYLFFLMYLINKDETEHTGQESYVWKMYQERCWEFFPAGDCFRKQYEDQLN

SEQ ID NO: 8213 - protein, 1265 aa, Homo sapiens
MSPALQDLSQPEGLKKTLRDEINAILQKRIMVLDGGMGTMIQREKLNEEHFRGQEFKDHARPLKGNNDILSITQPDVIYQIHKEYLLAGADIIETNTFSSTSIAQADYGLEHLAYRMNMCSAGVARKAAEEVTLQTGIKRFVAGALGPTNKTLSVSPSVERPDYRNITFDELVEAYQEQAKGLLDGGVDILLIETIFDTANAKAALFALQNLFEEKYAPRPIFISGTIVDKSGRTLSGQTGEGFVISVSHGEPLCIGLNCALGAAEMRPFIEIIGKCTTAYVLCYPNAGLPNTFGDYDETPSMMAKHLKDFAMDGLVNIVGGCCGSTPDHIREIAEAVKNCKPRVPPATAFEGHMLLSGLEPFRIGPYTNFVNIGERCNVAGSRKFAKLIMAGNYEEALCVAKVQVEMGAQVLDVNMDDGMLDGPSAMTRFCNLIASEPDIAKVPLCIDSSNFAVIEAGLKCCQGKCIVNSISLKEGEDDFLEKARKIKKYGAAMVVMAFDEEGQATETDTKIRVCTRAYHLLVKKLGFNPNDIIFDPNILTIGTGMEEHNLYAINFIHATKVIKETLPGARISGGLSNLSFSFRGMEAIREAMHGVFLYHAIKSGMDMGIVNAGNLPVYDDIHKELLQLCEDLIWNKDPEATEKLLRYAQTQGTGGKKVIQTDEWRNGPVEERLEYALVKGIEKHIIEDTEEARLNQKKYPRPLNIIEGPLMNGMKIVGDLFGAGKMFLPQVIKSARVMKKAVGHLIPFMEKEREETRVLNGTVEEEDPYQGTIVLATVKGDVHDIGKNIVGVVLGCNNFRVIDLGVMTPCDKILKAALDHKADIIGLSGLITPSLDEMIFVAKEMERLAIRIPLLIGGATTSKTHTAVKIAPRYSAPVIHVLDASKSVVVCSQLLDENLKDEYFEEIMEEYEDIRQDHYESLKERRYLPLSQARKSGFQMDWLSEPHPVKPTFIGTQVFEDYDLQKLVDYIDWKPFFDVWQLRGKYPNRGFPKIFNDKTVGGEARKVYDDAHNMLNTLISQKKLRARGVVGFWPAQSIQDDIHLYAEAAVPQAAEPIATFYGLRQQAEKDSASTEPYYCLSDFIAPLHSGIRDYLGLFAVACFGVEELSKAYEDDGDDYSSIMVKALGDRLAEAFAEELHERVRRELWAYCGSEQLDVADLRRLRYKGIRPAPGYPSQPDHTEKLTMWRLADIEQSTGIRLTESLAMAPASAVSGLYFSNLKSKYFAVGKISKDQVEDYALRKNISVAEVEKWLGPILGYDTD

SEQ ID NO: 8214 - protein, 894 aa, Homo sapiens
MNQIEPGVQYNYVYDEDEYMIQEEEWDRDLLLDPAWEKQQRKTFTAWCNSHLRKAGTQIENIEEDFRNGLKLMLLLEVISGERLPKPDRGKMRFHKIANVNKALDYIASKGVKLVSIGAEEIVDGNVKMTLGMIWTIILRFAIQDISVEETSAKEGLLLWCQRKTAPYRNVNIQNFHTSWKDGLGLCALIHRHRPDLIDYSKLNKDDPIGNINLAMEIAEKHLDIPKMLDAEDIVNTPKPDERAIMTYVSCFYHAFAGAEQAETAANRICKVLAVNQENERLMEEYERLASELLEWIRRTIPWLENRTPEKTMQAMQKKLEDFRDYRRKHKPPKVQEKCQLEINFNTLQTKLRISNRPAFMPSEGKMVSDIAGAWQRLEQAEKGYEEWLLNEIRRLERLEHLAEKFRQKASTHETWAYGKEQILLQKDYESASLTEVRALLRKHEAFESDLAAHQDRVEQIAAIAQELNELDYHDAVNVNDRCQKICDQWDRLGTLTQKRREALERMEKLLETIDQLHLEFAKRAAPFNNWMEGAMEDLQDMFIVHSIEEIQSLITAHEQFKATLPEADGERQSIMAIQNEVEKVIQSYNIRISSSNPYSTVTMDELRTKWDKVKQLVPIRDQSLQEELARQHANERLRRQFAAQANAIGPWIQNKMEEIARSSIQITGALEDQMNQLKQYEHNIINYKNNIDKLEGDHQLIQEALVFDNKHTNYTMEHIRVGWELLLTTIARTINEVETQILTRDAKGITQEQMNEFRASFNHFDRRKNGLMDHEDFRACLISMGYDLGEAEFARIMTLVDPNGQGTVTFQSFIDFMTRETADTDTAEQVIASFRILASDKPYILAEELRRELPPDQAQYCIKRMPAYSGPGSVPGALDYAAFSSALYGESDL

SEQ ID NO: 8215 - protein, 2063 aa, Homo sapiens
MTSLAQQLQRLALPQSDASLLSRDEVASLLFDPKEAATIDRDTAFAIGCTGLEELLGIDPSFEQFEAPLFSQLAKTLERSVQTKAVNKQLDENISLFLIHLSPYFLLKPAQKCLEWLIHRFHIHLYNQDSLIACVLPYHETRIFVRVIQLLKINNSKHRWFWLLPVKQSGVPLAKGTLITHCYKDLGFMDFICSLVTKSVKVFAEYPGSSAQLRVLLAFYASTIVSALVAAEDVSDNIIAKLFPYIQKGLKSSLPDYRAATYMIICQISVKVTMENTFVNSLASQIIKTLTKIPSLIKDGLSCLIVLLQRQKPESLGKKPFPHLCNVPDLITILHGISETYDVSPLLHYMLPHLVVSIIHHVTGEETEGMDGQIYKRHLEAILTKISLKNNLDHLLASLLFEEYISYSSQEEMDSNKVSLLNEQFLPLIRLLESKYPRTLDVVLEEHLKEIADLKKQELFHQFVSLSTSGGKYQFLADSDTSLMLSLNHPLAPVRILAMNHLKKIMKTSKEGVDESFIKEAVLARLGDDNIDVVLSAISAFEIFKEHFSSEVTISNLLNLFQRAELSKNGEWYEVLKIAADILIKEEILSENDQLSNQVVVCLLPFMVINNDDTESAEMKIAIYLSKSGICSLHPLLRGWEEALENVIKSTKPGKLIGVANQKMIELLADNINLGDPSSMLKMVEDLISVGEEESFNLKQKVTFHVILSVLVSCCSSLKETHFPFAIRVFSLLQKKIKKLESVITAVEIPSEWHIELMLDRGIPVELWAHYVEELNSTQRVAVEDSVFLVFSLKKFIYALKAPKSFPKGDIWWNPEQLKEDSRDYLHLLIGLFEMMLNGADAVHFRVLMKLFIKVHLEDVFQLFKFCSVLWTYGSSLSNPLNCSVKTVLQTQALYVGCAMLSSQKTQCKHQLASISSPVVTSLLINLGSPVKEVRRAAIQCLQALSGVASPFYLIIDHLISKAEEITSDAAYVIQDLATLFEELQREKKLKSHQKLSETLKNLLSCVYSCPSYIAKDLMKVLQGVNGEITKPFFAAISDEKVQQKLLRMLFDLLVNCKNSHCAQTVSSVFKGISVNAEQVRIELEPPDKAKPLGTVQQKRRQKMQQKKSQDLESVQEVGGSYWQRVTLILELLQHKKKLRSPQILVPTLFNLLSRCLEPLPQEQGNMEYTKQLILSCLLNICQKLSPDGGKIPKDILDEEKFNVELIVQCIRLSEMPQTHHHALLLLGTVAGIFPDKVLHNIMSIFTFMGANVMRLDDTYSFQVINKTVKMVIPALIQSDSGDSIEVSRNVEEIVVKIISVFVDALPHVPEHRRLPILVQLVDTLGAEKFLWILLILLFEQYVTKTVLAAAYGEKDAILEADTEFWFSVCCEFSVQHQIQSLMNILQYLLKLPEEKEETIPKAVSFNKSESQEEMLQVFNVETHTSKQLRHFKFLSVSFMSQLLSSNNFLKKVVESGGPEILKGLEERLLETVLGYISAVAQSMERNADKLTVKFWRALLSKAYDLLDKVNALLPTETFIPVIRGLVGNPLPSVRRKALDLLNNKLQQNISWKKTIVTRFLKLVPDLLAIVQRKKKEGEEEQAINRQTALYTLKLLCKNFGAENPDPFVPVLNTAVKLIAPERKEEKNVLGSALLCIAEVTSTLEALAIPQLPSLMPSLLTTMKNTSELVSSEVYLLSALAALQKVVETLPHFISPYLEGILSQVIHLEKITSEMGSASQANIRLTSLKKTLATTLAPRVLLPAIKKTYKQIEKNWKNHMGPFMSILQEHIGVMKKEELTSHQSQLTAFFLEALDFRAQHSENDLEEVGKTENCIIDCLVAMVVKLSEVTFRPLFFKLFDWAKTEDAPKDRLLTFYNLADCIAEKLKGLFTLFAGHLVKPFADTLNQVNISKTDEAFFDSENDPEKCCLLLQFILNCLYKIFLFDTQHFISKERAEALMMPLVDQLENRLGGEEKFQERVTKHLIPCIAQFSVAMADDSLWKPLNYQILLKTRDSSPKVRFAALITVLALAEKLKENYIVLLPESIPFLAELMEDECEEVEHQCQKTIQQLETVLGEPLQSYF

SEQ ID NO: 8216 - protein, 2144 aa, Homo sapiens
MTSLAQQLQRLALPQSDASLLSRDEVASLLFDPKEAATIDRDTAFAIGCTGLEELLGIDPSFEQFEAPLFSQLAKTLERSVQTKAVNKQLDENISLFLIHLSPYFLLKPAQKCLEWLIHRFHIHLYNQDSLIACVLPYHETRIFVRVIQLLKINNSKHRWFWLLPVKQSGVPLAKGTLITHCYKDLGFMDFICSLVTKSVKVFAEYPGSSAQLRVLLAFYASTIVSALVAAEDVSDNIIAKLFPYIQKGLKSSLPDYRAATYMIICQISVKVTMENTFVNSLASQIIKTLTKIPSLIKDGLSCLIVLLQRQKPESLGKKPFPHLCNVPDLITILHGISETYDVSPLLHYMLPHLVVSIIHHVTGEETEGMDGQIYKRHLEAILTKISLKNNLDHLLASLLFEEYISYSSQEEMDSNKVSLLNEQFLPLIRLLESKYPRTLDVVLEEHLKEIADLKKQELFHQFVSLSTSGGKYQFLADSDTSLMLSLNHPLAPVRILAMNHLKKIMKTSKEGVDESFIKEAVLARLGDDNIDVVLSAISAFEIFKEHFSSEVTISNLLNLFQRAELSKNGEWYEVLKIAADILIKEEILSENDQLSNQVVVCLLPFMVINNDDTESAEMKIAIYLSKSGICSLHPLLRGWEEALENVIKSTKPGKLIGVANQKMIELLADNINLGDPSSMLKMVEDLISVGEEESFNLKQKVTFHVILSVLVSCCSSLKETHFPFAIRVFSLLQKKIKKLESVITAVEIPSEWHIELMLDRGIPVELWAHYVEELNSTQRVAVEDSVFLVFSLKKFIYALKAPKSFPKGDIWWNPEQLKEDSRDYLHLLIGLFEMMLNGADAVHFRVLMKLFIKVHLEDVFQLFKFCSVLWTYGSSLSNPLNCSVKTVLQTQALYVGCAMLSSQKTQCKHQLASISSPVVTSLLINLGSPVKEVRRAAIQCLQALSGVASPFYLIIDHLISKAEEITSDAAYVIQDLATLFEELQREKKLKSHQKLSETLKNLLSCVYSCPSYIAKDLMKVLQGVNGEMVLSQLLPMAEQLLEKIQKEPTAVLKDEAMVLHLTLGKYNEFSVSLLNEDPKSLDIFIKAVHTTKELYAGMPTIQITALEKITKPFFAAISDEKVQQKLLRMLFDLLVNCKNSHCAQTVSSVFKGISVNAEQVRIELEPPDKAKPLGTVQQKRRQKMQQKKSQDLESVQEVGGSYWQRVTLILELLQHKKKLRSPQILVPTLFNLLSRCLEPLPQEQGNMEYTKQLILSCLLNICQKLSPDGGKIPKDILDEEKFNVELIVQCIRLSEMPQTHHHALLLLGTVAGIFPDKVLHNIMSIFTFMGANVMRLDDTYSFQVINKTVKMVIPALIQSDSGDSIEVSRNVEEIVVKIISVFVDALPHVPEHRRLPILVQLVDTLGAEKFLWILLILLFEQYVTKTVLAAAYGEKDAILEADTEFWFSVCCEFSVQHQIQSLMNILQYLLKLPEEKEETIPKAVSFNKSESQEEMLQVFNVETHTSKQLRHFKFLSVSFMSQLLSSNNFLKKVVESGGPEILKGLEERLLETVLGYISAVAQSMERNADKLTVKFWRALLSKAYDLLDKVNALLPTETFIPVIRGLVGNPLPSVRRKALDLLNNKLQQNISWKKTIVTRFLKLVPDLLAIVQRKKKEGEEEQAINRQTALYTLKLLCKNFGAENPDPFVPVLNTAVKLIAPERKEEKNVLGSALLCIAEVTSTLEALAIPQLPSLMPSLLTTMKNTSELVSSEVYLLSALAALQKVVETLPHFISPYLEGILSQVIHLEKITSEMGSASQANIRLTSLKKTLATTLAPRVLLPAIKKTYKQIEKNWKNHMGPFMSILQEHIGVMKKEELTSHQSQLTAFFLEALDFRAQHSENDLEEVGKTENCIIDCLVAMVVKLSEVTFRPLFFKLFDWAKTEDAPKDRLLTFYNLADCIAEKLKGLFTLFAGHLVKPFADTLNQVNISKTDEAFFDSENDPEKCCLLLQFILNCLYKIFLFDTQHFISKERAEALMMPLVDQLENRLGGEEKFQERVTKHLIPCIAQFSVAMADDSLWKPLNYQILLKTRDSSPKVRFAALITVLALAEKLKENYIVLLPESIPFLAELMEDECEEVEHQCQKTIQQLETVLGEPLQSYF

SEQ ID NO: 8217 - protein, 1114 aa, Homo sapiens
MLASSSRIRAAWTRALLLPLLLAGPVGCLSRQELFPFGPGQGDLELEDGDDFVSPALELSGALRFYDRSDIDAVYVTTNGIIATSEPPAKESHPGLFPPTFGAVAPFLADLDTTDGLGKVYYREDLSPSITQRAAECVHRGFPEISFQPSSAVVVTWESVAPYQGPSRDPDQKGKRNTFQAVLASSDSSSYAIFLYPEDGLQFHTTFSKKENNQVPAVVAFSQGSVGFLWKSNGAYNIFANDRESVENLAKSSNSGQQGVWVFEIGSPATTNGVVPADVILGTEDGAEYDDEDEDYDLATTRLGLEDVGTTPFSYKALRRGGADTYSVPSVLSPRRAATERPLGPPTERTRSFQLAVETFHQQHPQVIDVDEVEETGVVFSYNTDSRQTCANNRHQCSVHAECRDYATGFCCSCVAGYTGNGRQCVAEGSPQRVNGKVKGRIFVGSSQVPIVFENTDLHSYVVMNHGRSYTAISTIPETVGYSLLPLAPVGGIIGWMFAVEQDGFKNGFSITGGEFTRQAEVTFVGHPGNLVIKQRFSGIDEHGHLTIDTELEGRVPQIPFGSSVHIEPYTELYHYSTSVITSSSTREYTVTEPERDGASPSRIYTYQWRQTITFQECVHDDSRPALPSTQQLSVDSVFVLYNQEEKILRYALSNSIGPVREGSPDALQNPCYIGTHGCDTNAACRPGPRTQFTCECSIGFRGDGRTCYEVEKTRCQHEREHILGAAGATDPQRPIPPGLFVPECDAHGHYAPTQCHGSTGYCWCVDRDGREVEGTRTRPGMTPPCLSTVAPPIHQGPAVPTAVIPLPPGTHLLFAQTGKIERLPLEGNTMRKTEAKAFLHVPAKVIIGLAFDCVDKMVYWTDITEPSIGRASLHGGEPTTIIRQDLGSPEGIAVDHLGRNIFWTDSNLDRIEVAKLDGTQRRVLFETDLVNPRGIVTDSVRGNLYWTDWNRDNPKIETSYMDGTNRRILVQDDLGLPNGLTFDAFSSQLCWVDAGTNRAECLNPSQPSRRKALEGLQYPFAVTSYGKNLYFTDWKMNSVVALDLAISKETDAFQPHKQTRLYGITTALSQCPQGHNYCSVNNGGCTHLCLATPGSRTCRCPDNTLGVDCIEQK

SEQ ID NO: 8218 - protein, 500 aa, Homo sapiens
MRNWLVLLCPCVLGAALHLWLRLRSPPPACASGAGPADQLALFPQWKSTHYDVVVGVLSARNNHELRNVIRSTWMRHLLQHPTLSQRVLVKFIIGAHGCEVPVEDREDPYSCKLLNITNPVLNQEIEAFSLSEDTSSGLPEDRVVSVSFRVLYPIVITSLGVFYDANDVGFQRNITVKLYQAEQEEALFIARFSPPSCGVQVNKLWYKPVEQFILPESFEGTIVWESQDLHGLVSRNLHKVTVNDGGGVLRVITAGEGALPHEFLEGVEGVAGGFIYTIQEGDALLHNLHSRPQRLIDHIRNLHEEDALLKEESSIYDDIVFVDVVDTYRNVPAKLLNFYRWTVETTSFNLLLKTDDDCYIDLEAVFNRIVQKNLDGPNFWWGNFRLNWAVDRTGKWQELEYPSPAYPAFACGSGYVISKDIVKWLASNSGRLKTYQGEDVSMGIWMAAIGPKRYQDSLWLCEKTCETGMLSSPQYSPWELTELWKLKERCGDPCRCQAR

SEQ ID NO: 8219 - protein, 421 aa, Homo sapiens
MKKHSARVAPLSACNSPVLTLTKVEGEERPRDSPGPAEAQAPAGVEAGGRASRRCWTCSRAQLKKIFWGVAVVLCVCSSWAGSTQLAKLTFRKFDAPFTLTWFATNWNFLFFPLYYVGHVCKSTEKQSVKQRYRECCRFFGDNGLTLKVFFTKAAPFGVLWTLTNYLYLHAIKKINTTDVSVLFCCNKAFVFLLSWIVLRDRFMGVRIVAAILAIAGIVMMTYADGFHSHSVIGIALVVASASMSALYKVLFKLLLGSAKFGEAALFLSILGVFNILFITCIPIILYFTKVEYWSSFDDIPWGNLCGFSVLLLTFNIVLNFGIAVTYPTLMSLGIVLSIPVNAVIDHYTSQIVFNGVRVIAIIIIGLGFLLLLLPEEWDVWLIKLLTRLKVRKKEEPAEGAADLSSGPQSKNRRARPSFAR

SEQ ID NO: 8220 - protein, 490 aa, Homo sapiens
MGIREFPSGAPRGKSIAVGMRRSPDVSPRRLSDISPQLRQLKYLVVDEAIKEDLKWSRSVEDLTSGPVGLTSIEERILRITGYYGYQPWAASCKREERPRDSPGPAEAQAPAGVEAGGRASRRCWTCSRAQLKKIFWGVAVVLCVCSSWAGSTQLAKLTFRKFDAPFTLTWFATNWNFLFFPLYYVGHVCKSTEKQSVKQRYRECCRFFGDNGLTLKVFFTKAAPFGVLWTLTNYLYLHAIKKINTTDVSVLFCCNKAFVFLLSWIVLRDRFMGVRIVAAILAIAGIVMMTYADGFHSHSVIGIALVVASASMSALYKVLFKLLLGSAKFGEAALFLSILGVFNILFITCIPIILYFTKVEYWSSFDDIPWGNLCGFSVLLLTFNIVLNFGIAVTYPTLMSLGIVLSIPVNAVIDHYTSQIVFNGVRVIAIIIIGLGFLLLLLPEEWDVWLIKLLTRLKVRKKEEPAEGAADLSSGPQSKNRRARPSFAR

SEQ ID NO: 8221 - protein, 482 aa, Homo sapiens
MFFLVTSDESNKTWGRNTVFRQEEFEDVKRNFKKKGCTWGPNSIQMKDRTDCKERIRPLSDGNSPWSTILIKNQKTMPLASLFVDQPGSCEEPKLSPDGLEHRKPKQIKLPSQAYIDLPLGKDAQRENPAEAESWEEAASANAATVSIEMTPTNSLSRSPQRKKTESALYGCTVLLASVALGLDLRELHKAQAAEEPLPKEEKKKREGIFQRASKSRRSASPPTSLPSTCGEASSPPSLPLSSALGILSTPSFSTKCLLQMDSEDPLVDSAPVTCDSEMLTPDFCPTAPGSGREPALMPRLDTDCSVSRNLPSSFLQQTCGNVPYCASSKHRPSHHRRTMSDGNPTPTGATIISATGASALPLCPSPAPHSHLPREVSPKKHSTVHIVPQRRPASLRSRSDLPQAYPQTAVSQLAQTACVVGRPGPHPTQFLAAKERTKSHVPSLLDADVEGQSRDYTVPLCRMRSKTSRPSIYELEKEFLS

SEQ ID NO: 8222 - protein, 570 aa, Homo sapiens
MALRGAAGATDTPVSSAGGAPGGSASSSSTSSGGSASAGAGLWAALYDYEARGEDELSLRRGQLVEVLSQDAAVSGDEGWWAGQVQRRLGIFPANYVAPCRPAASPAPPPSRPSSPVHVAFERLELKELIGAGGFGQVYRATWQGQEVAVKAARQDPEQDAAAAAESVRREARLFAMLRHPNIIELRGVCLQQPHLCLVLEFARGGALNRALAAANAAPDPRAPGPRRARRIPPHVLVNWAVQIARGMLYLHEEAFVPILHRDLKSSNILLLEKIEHDDICNKTLKITDFGLAREWHRTTKMSTAGTYAWMAPEVIKSSLFSKGSDIWSYGVLLWELLTGEVPYRGIDGLAVAYGVAVNKLTLPIPSTCPEPFAKLMKECWQQDPHIRPSFALILEQLTAIEGAVMTEMPQESFHSMQDDWKLEIQQMFDELRTKEKELRSREEELTRAALQQKSQEELLKRREQQLAEREIDVLERELNILIFQLNQEKPKVKKRKGKFKRSRLKLKDGHRISLPSDFQHKITVQASPNLDKRRSLNSSSSSPPSSPTMMPRLRAIQCELSALPRGLLC

SEQ ID NO: 8223 - protein, 1036 aa, Homo sapiens
MALRGAAGATDTPVSSAGGAPGGSASSSSTSSGGSASAGAGLWAALYDYEARGEDELSLRRGQLVEVLSQDAAVSGDEGWWAGQVQRRLGIFPANYVAPCRPAASPAPPPSRPSSPVHVAFERLELKELIGAGGFGQVYRATWQGQEVAVKAARQDPEQDAAAAAESVRREARLFAMLRHPNIIELRGVCLQQPHLCLVLEFARGGALNRALAAANAAPDPRAPGPRRARRIPPHVLVNWAVQIARGMLYLHEEAFVPILHRDLKSSNILLLEKIEHDDICNKTLKITDFGLAREWHRTTKMSTAGTYAWMAPEVIKSSLFSKGSDIWSYGVLLWELLTGEVPYRGIDGLAVAYGVAVNKLTLPIPSTCPEPFAKLMKECWQQDPHIRPSFALILEQLTAIEGAVMTEMPQESFHSMQDDWKLEIQQMFDELRTKEKELRSREEELTRAALQQKSQEELLKRREQQLAEREIDVLERELNILIFQLNQEKPKVKKRKGKFKRSRLKLKDGHRISLPSDFQHKITVQASPNLDKRRSLNSSSSSPPSSPTMMPRLRAIQLTSDESNKTWGRNTVFRQEEFEDVKRNFKKKGCTWGPNSIQMKDRTDCKERIRPLSDGNSPWSTILIKNQKTMPLASLFVDQPGSCEEPKLSPDGLEHRKPKQIKLPSQAYIDLPLGKDAQRENPAEAESWEEAASANAATVSIEMTPTNSLSRSPQRKKTESALYGCTVLLASVALGLDLRELHKAQAAEEPLPKEEKKKREGIFQRASKSRRSASPPTSLPSTCGEASSPPSLPLSSALGILSTPSFSTKCLLQMDSEDPLVDSAPVTCDSEMLTPDFCPTAPGSGREPALMPRLDTDCSVSRNLPSSFLQQTCGNVPYCASSKHRPSHHRRTMSDGNPTPTGATIISATGASALPLCPSPAPHSHLPREVSPKKHSTVHIVPQRRPASLRSRSDLPQAYPQTAVSQLAQTACVVGRPGPHPTQFLAAKERTKSHVPSLLDADVEGQSRDYTVPLCRMRSKTSRPSIYELEKEFLS

SEQ ID NO: 8224 - protein, 755 aa, Homo sapiens
MPGGGPQGAPAAAGGGGVSHRAGSRDCLPPAACFRRRRLARRPGYMRSSTGPGIGFLSPAVGTLFRFPGGVSGEESHHSESRARQCGLDSRGLLVRSPVSKSAAAPTVTSVRGTSAHFGIQLRGGTRLPDRLSWPCGPGSAGWQQEFAAMDSSETLDASWEAACSDGARRVRAAGSLPSAELSSNSCSPGCGPEVPPTPPGSHSAFTSSFSFIRLSLGSAGERGEAEGCPPSREAESHCQSPQEMGAKAASLDGPHEDPRCLSRPFSLLATRVSADLAQAARNSSRPERDMHSLPDMDPGSSSSLDPSLAGCGGDGSSGSGDAHSWDTLLRKWEPVLRDCLLRNRRQMEVISLRLKLQKLQEDAVENDDYDKAETLQQRLEDLEQEKISLHFQLPSRQPALSSFLGHLAAQVQAALRRGATQQASGDDTHTPLRMEPRLLEPTAQDSLHVSITRRDWLLQEKQQLQKEIEALQARMFVLEAKDQQLRREIEEQEQQLQWQGCDLTPLVGQLSLGQLQEVSKALQDTLASAGQIPFHAEPPETIRSLQERIKSLNLSLKEITTKVCMSEKFCSTLRKKVNDIETQLPALLEAKMHAISGNHFWTAKDLTEEIRSLTSEREGLEGLLSKLLVLSSRNVKKLGSVKEDYNRLRREVEHQETAYDGVSLCRPVWSAVVRSCSLQPLPPEFKQFSCLSLRSSWDYRCPPPCLANFVFLVEMGFYHVDQTGLKLLTSSDPPSSASQSAGITDMSHCAWPLQ

SEQ ID NO: 8225 - protein, 678 aa, Homo sapiens
MPGGGPQGAPAAAGGGGVSHRAGSRDCLPPAACFRRRRLARRPGYMRSSTGPGIGFLSPAVGTLFRFPGGVSGEESHHSESRARQCGLDSRGLLVRSPVSKSAAAPTVTSVRGTSAHFGIQLRGGTRLPDRLSWPCGPGSAGWQQEFAAMDSSETLDASWEAACSDGARRVRAAGSLPSAELSSNSCSPGCGPEVPPTPPGSHSAFTSSFSFIRLSLGSAGERGEAEGCPPSREAESHCQSPQEMGAKAASLDGPHEDPRCLSRPFSLLATRVSADLAQAARNSSRPERDMHSLPDMDPGSSSSLDPSLAGCGGDGSSGSGDAHSWDTLLRKWEPVLRDCLLRNRRQMEVISLRLKLQKLQEDAVENDDYDKAETLQQRLEDLEQEKISLHFQLPSRQPALSSFLGHLAAQVQAALRRGATQQASGDDTHTPLRMEPRLLEPTAQDSLHVSITRRDWLLQEKQQLQKEIEALQARMFVLEAKDQQLRREIEEQEQQLQWQGCDLTPLVGQLSLGQLQEVSKALQDTLASAGQIPFHAEPPETIRSLQERIKSLNLSLKEITTKVCMSEKFCSTLRKKVNDIETQLPALLEAKMHAISGNHFWTAKDLTEEIRSLTSEREGLEGLLSKLLVLSSRNVKKLGSVKEDYNRLRREVEHQETAYGYKYCDAESWTQRSQQLA

SEQ ID NO: 8226 - protein, 832 aa, Homo sapiens
MPGGGPQGAPAAAGGGGVSHRAGSRDCLPPAACFRRRRLARRPGYMRSSTGPGIGFLSPAVGTLFRFPGGVSGEESHHSESRARQCGLDSRGLLVRSPVSKSAAAPTVTSVRGTSAHFGIQLRGGTRLPDRLSWPCGPGSAGWQQEFAAMDSSETLDASWEAACSDGARRVRAAGSLPSAELSSNSCSPGCGPEVPPTPPGSHSAFTSSFSFIRLSLGSAGERGEAEGCPPSREAESHCQSPQEMGAKAASLDGPHEDPRCLSRPFSLLATRVSADLAQAARNSSRPERDMHSLPDMDPGSSSSLDPSLAGCGGDGSSGSGDAHSWDTLLRKWEPVLRDCLLRNRRQMEVISLRLKLQKLQEDAVENDDYDKAETLQQRLEDLEQEKISLHFQLPSRQPALSSFLGHLAAQVQAALRRGATQQASGDDTHTPLRMEPRLLEPTAQDSLHVSITRRDWLLQEKQQLQKEIEALQARMFVLEAKDQQLRREIEEQEQQLQWQGCDLTPLVGQLSLGQLQEVSKALQDTLASAGQIPFHAEPPETIRSLQERIKSLNLSLKEITTKVCMSEKFCSTLRKKVNDIETQLPALLEAKMHAISGNHFWTAKDLTEEIRSLTSEREGLEGLLSKLLVLSSRNVKKLGSVKEDYNRLRREVEHQETAYETSVKENTMKYMETLKNKLCSCKCPLLGKVWEADLEACRLLIQSLQLQEARGSLSVEDERQMDDLEGAAPPIPPRLHSEDKRKTPLKESYILSAELGEKCEDIGKKLLYLEDQLHTAIHSHDEDLIQSLRRELQMVKETLQAMILQLQPAKEAGEREAAASCMTAGVHEAQA

SEQ ID NO: 8227 - protein, 187 aa, Homo sapiens
MKKTLLHEMIHAYLFVTNNDKDREGHGPEFCKHMHRINSLTGANITVYHTFHDEVDEYRRHWWRCNGPCQHRPPYYGYVKRATNREPSAHDYWWAEHQKTCGGTYIKIKEPENYSKKGKGKAKLGKEPVLAAENKDKPNRGEAQLVIPFSGKGYVLGETSNLPSPGKLITSHAINKTQDLLNQNHSA

SEQ ID NO: 8228 - protein, 725 aa, Homo sapiens
MAMAMSDSGASRLRRQLESGGFEARLYVKQLSQQSDGDRDLQEHRQRIQALAEETAQNLKRNVYQNYRQFIETAREISYLESEMYQLSHLLTEQKSSLESIPLTLLPAAAAAGAAAASGGEEGVGGAGGRDHLRGQAGFFSTPGGASRDGSGPGEEGKQRTLTTLLEKVEGCRHLLETPGQYLVYNGDLVEYDADHMAQLQRVHGFLMNDCLLVATWLPQRRGMYRYNALYSLDGLAVVNVKDNPPMKDMFKLLMFPESRIFQAENAKIKREWLEVLEDTKRALSEKRRREQEEAAAPRGPPQVTSKATNPFEDDEEEEPAVPEVEEEKVDLSMEWIQELPEDLDVCIAQRDFEGAVDLLDKLNHYLEDKPSPPPVKELRAKVEERVRQLTEVLVFELSPDRSLRGGPKATRRAVSQLIRLGQCTKACELFLRNRAAAVHTAIRQLRIEGATLLYIHKLCHVFFTSLLETAREFEIDFAGTDSGCYSAFVVWARSAMGMFVDAFSKQVFDSKESLSTAAECVKVAKEHCQQLGDIGLDLTFIIHALLVKDIQGALHSYKEIIIEATKHRNSEEMWRRMNLMTPEALGKLKEEMKSCGVSNFEQYTGDDCWVNLSYTVVAFTKQTMGFLEEALKLYFPELHMVLLESLVEIILVAVQHVDYSLRCEQDPEKKAFIRQNASFLYETVLPVVEKRFEEGVGKPAKQLQDLRNASRLIRVNPESTTSVV

SEQ ID NO: 8229 - protein, 680 aa, Homo sapiens
MESSSSSNSYFSVGPTSPSAVVLLYSKELKKWDEFEDILEERRHVSDLKFAMKCYTPLVYKGITPCKPIDIKCSVLNSEEIHYVIKQLSKESLQSVDVLREEVSEILDEMSHKLRLGAIRFCAFTLSKVFKQIFSKVCVNEEGIQKLQRAIQEHPVVLLPSHRSYIDFLMLSFLLYNYDLPVPVIAAGMDFLGMKMVGELLRMSGAFFMRRTFGGNKLYWAVFSEYVKTMLRNGYAPVEFFLEGTRSRSAKTLTPKFGLLNIVMEPFFKREVFDTYLVPISISYDKILEETLYVYELLGVPKPKESTTGLLKARKILSENFGSIHVYFGDPVSLRSLAAGRMSRSSYNLVPRYIPQKQSEDMHAFVTEVAYKMELLQIENMVLSPWTLIVAVLLQNRPSMDFDALVEKTLWLKGLTQAFGGFLIWPDNKPAEEVVPASILLHSNIASLVKDQVILKVDSGDSEVVDGLMLQHITLLMCSAYRNQLLNIFVRPSLVAVALQMTPGFRKEDVYSCFRFLRDVFADEFIFLPGNTLKDFEEGCYLLCKSEAIQVTTKDILVTEKGNTVLEFLVGLFKPFVESYQIICKYLLSEEEDHFSEEQYLAAVRKFTSQLLDQGTSQCYDVLSSDVQKNALAACVRLGVVEKKKINNNCIFNVNEPATTKLEEMLGCKTPIGKPATAKL

SEQ ID NO: 8230 - protein, 783 aa, Homo sapiens
MEEELKCPVCGSLFREPIILPCSHNVCLPCARTIAVQTPDGEQHLPQPLLLSRGSGLQAGAAAAASLEHDAAAGPACGGAGGSAAGGLGGGAGGGGDHADKLSLYSETDSGYGSYTPSLKSPNGVRVLPMVPAPPGSSAAAARGAACSSLSSSSSSITCPQCHRSASLDHRGLRGFQRNRLLEAIVQRYQQGRGAVPGTSAAAAVAICQLCDRTPPEPAATLCEQCDVLYCSACQLKCHPSRGPFAKHRLVQPPPPPPPPAEAASGPTGTAQGAPSGGGGCKSPGGAGAGATGGSTARKFPTCPEHEMENYSMYCVSCRTPVCYLCLEEGRHAKHEVKPLGAMWKQHKAQLSQALNGVSDKAKEAKEFLVQLKNILQQIQENGLDYEACLVAQCDALVDALTRQKAKLLTKVTKEREHKLKMVWDQINHCTLKLRQSTGLMEYCLEVIKENDPSGFLQISDALIKRVQVSQEQWVKGALEPKVSAEFDLTLDSEPLLQAIHQLDFIQMKCRVPPVPLLQLEKCCTRNNSVTLAWRMPPFTHSPVDGYILELDDGAGGQFREVYVGKETLCTIDGLHFNSTYNARVKAFNSSGVGPYSKTVVLQTSDVAWFTFDPNSGHRDIILSNDNQTATCSSYDDRVVLGTAAFSKGVHYWELHVDRYDNHPDPAFGVARASVVKDMMLGKDDKAWAMYVDNNRSWFMHCNSHTNRTEGGVCKGATVGVLLDLNKHTLTFFINGQQQGPTAFSHVDGVFMPALSLNRNVQVTLHTGLEVPTNLGRPKLSGN

SEQ ID NO: 8231 - protein, 231 aa, Homo sapiens
MGNGGRSGLQQGKGNVDGVAATPTAASASCQYRCIECNQEAKELYRDYNHGVLKITICIHGKLCIFCLLCEAYLRWWQLQDSNQNTAPDDLIRYAKEWDFYRMFAIAALEQTAYFIGIFTFLWVERPMTAKKKPNFILLLKALLLSSYGKLLLIPAVIWEHDYTSVCLKLIKVFVLTSNFQAIRVTLNINRKLSFLAVLSGLLLESIMVYFFQSMEWDVGSDYAIFKSQDF

SEQ ID NO: 8232 - protein, 860 aa, Homo sapiens
MAPAGCCCCCCFWGGAVAAAGAARRVLLLLLLGVLSAGLRPGALATEHYSPLSLLKQELQHRQQQEAPAGGGGCSPQSGDWGDQYSAECGESSFLNFHDSDCEPKGSSPCDSLLSLNTEKILSQAKSIAEQKRFPFATDNDSTNEELAIAYVLIGSGLYDEAIRHFSTMLQEEPDLVSAIYGRGIAYGKKGLHDIKNAELALFELSRVITLEPDRPEVFEQRAEILSPLGRINEAVNDLTKAIQLQPSARLYRHRGTLYFISEDYATAHEDFQQSLELNKNQPIAMLYKGLTFFHRGLLKEAIESFKEALKQKVDFIDAYKSLGQAYRELGNFEAATESFQKALLLNQNHVQTLQLRGMMLYHHGSLQEALKNFKRCLQLEPYNEVCQYMKGLSHVAMGQFYEGIKAQTKVMLNDPLPGQKASPEYLKVKYLREYSRYLHAHLDTPLTEYNIDVDLPGSFKDHWAKNLPFLIEDYEEQPGLQPHIKDVLHQNFESYKPEVQELICVADRLGSLMQYETPGFLPNKRIHRAMGLAALEVMQAVQRTWTNSKVRMNGKTRLMQWRDMFDIAVKWRRIADPDQPVLWLDQMPARSLSRGFNNHINLIRGQVINMRYLEYFEKILHFIKDRILVYHGANNPKGLLEVREALEKVHKVEDLLPIMKQFNTKTKDGFTVNTKVPSLKDQGKEYDGFTITITGDKVGNILFSVETQTTEERTQLYHAEIDALYKDLTAKGKVLILSSEFGEADAVCNLILSLVYYFYNLMPLSRGSSVIAYSVIVGALMASGKEVAGKIPKGKLVDFEAMTAPGSEAFSKVAKSWMNLKSISPSYKTLPSVSETFPTLRSMIEVLNTDSSPRCLKKL

SEQ ID NO: 8233 - protein, 806 aa, Homo sapiens
MAPAGCCCCCCFWGGAVAAAGAARRVLLLLLLGVLSAGLRPGALATEHYSPLSLLKQELQHRQQQEAPAGGGGCSPQSGDWGDQYSAECGESSFLNFHDSDCEPKGSSPCDSLLSLNTEKILSQAKSIAEQKRFPFATDNDSTNEELAIAYVLIGSGLYDEAIRHFSTMLQILSPLGRINEAVNDLTKAIQLQPSARLYRHRGTLYFISEDYATAHEDFQQSLELNKNQPIAMLYKGLTFFHRGLLKEAIESFKEALKQKVDFIDAYKSLGQAYRELGNFEAATESFQKALLLNQNHVQTLQLRGMMLYHHGSLQEALKNFKRCLQLEPYNEVCQYMKGLSHVAMGQFYEGIKAQTKVMLNDPLPGQKASPEYLKVKYLREYSRYLHAHLDTPLTEYNIDVDLPGSFKDHWAKNLPFLIEDYEEQPGLQPHIKDVLHQNFESYKPEVQELICVADRLGSLMQYETPGFLPNKRIHRAMGLAALEVMQAVQRTWTNSKVRMNGKTRLMQWRDMFDIAVKWRRIADPDQPVLWLDQMPARSLSRGFNNHINLIRGQVINMRYLEYFEKILHFIKDRILVYHGANNPKGLLEVREALEKVHKVEDLLPIMKFNTKTKDGFTVNTKVPSLKDQGKEYDGFTITITGDKVGNILFSVETQTTEERTQLYHAEIDALYKDLTAKGKVLILSSEFGEADAVCNLILSLVYYFYNLMPLSRGSSVIAYSVIVGALMASGKEVAGKIPKGKLVDFEAMTAPGSEAFSKVAKSWMNLKSISPSYKTLPSVSETFPTLRSMIEVLNTDSSPRCLKKL

SEQ ID NO: 8234 - protein, 627 aa, Homo sapiens
MPYLYRAPGPQAHPVPKDARITHSSGQSFEQMRQECLQRGTLFEDADFPASNSSLFYSERPQIPFVWKRPGFWQHSEWLDVVIDDRLPTFRDRLVFLHSADHNEFWSALLEKAYAKLNGSYEALKGGSAIEAMEDFTGGVAETFQTKEAPENFYEILEKALKRGSLLGCFIDTRSAAESEARTPFGLIKGHAYSVTGIDQVSFRGQRIELIRIRNPWGQVEWNGSWSDSSPEWRSVGPAEQKRLCHTALDDGEFWMAFKDFKAHFDKVEICNLTPDALEEDAIHKWEVTVHQGSWVRGSTAGGCRNFLDTFWTNPQIKLSLTEKDEGQEECSFLVALMQKDRRKLKRFGANVLTIGYAIYECPDKDEHLNKDFFRYHASRARSKTFINLREVSDRFKLPPGEYILIPSTFEPHQEADFCLRIFSEKKAITRDMDGNVDIDLPEPPKPTPPDQETEEEQRFRALFEQVAGEDMEVTAEELEYVLNAVLQKKKDIKFKKLSLISCKNIISLMDTSGNGKLEFDEFKVFWDKLKQWINLFLRFDADKSGTMSTYELRTALKAAGFQLSSHLLQLIVLRYADEELQLDFDDFLNCLVRLENASRVFQALSTKNKEFIHLNINEFIHLTMNI

SEQ ID NO: 8235 - protein, 485 aa, Homo sapiens
MRKRAPQSEMAPAGVSLRATILCLLAWAGLAAGDRVYIHPFHLVIHNESTCEQLAKANAGKPKDPTFIPAPIQAKTSPVDEKALQDQLVLVAAKLDTEDKLRAAMVGMLANFLGFRIYGMHSELWGVVHGATVLSPTAVFGTLASLYLGALDHTADRLQAILGVPWKDKNCTSRLDAHKVLSALQAVQGLLVAQGRADSQAQLLLSTVVGVFTAPGLHLKQPFVQGLALYTPVVLPRSLDFTELDVAAEKIDRFMQAVTGWKTGCSLMGASVDSTLAFNTYVHFQGKMKGFSLLAEPQEFWVDNSTSVSVPMLSGMGTFQHWSDIQDNFSVTQVPFTESACLLLIQPHYASDLDKVEGLTFQQNSLNWMKKLSPRTIHLTMPQLVLQGSYDLQDLLAQAELPAILHTELNLQKLSNDRIRVGEVLNSIFFELEADEREPTESTQQLNKPEVLEVTLNRPFLFAVYDQSATALHFLGRVANPLSTA

SEQ ID NO: 8236 - protein, 737 aa, Homo sapiens
MEKSRMNLPKGPDTLCFDKDEFMKEDFDVDHFVSDCRKRVQLEELRDDLELYYKLLKTAMVELINKDYADFVNLSTNLVGMDKALNQLSVPLGQLREEVLSLRSSVSEGIRAVDERMSKQEDIRKKKMCVLRLIQVIRSVEKIEKILNSQSSKETSALEASSPLLTGQILERIATEFNQLQFHAVQSKGMPLLDKVRPRIAGITAMLQQSLEGLLLEGLQTSDVDIIRHCLRTYATIDKTRDAEALVGQVLVKPYIDEVIIEQFVESHPNGLQVMYNKLLEFVPHHCRLLREVTGGAISSEKGNTVPGYDFLVNSVWPQIVQGLEEKLPSLFNPGNPDAFHEKYTISMDFVRRLERQCGSQASVKRLRAHPAYHSFNKKWNLPVYFQIRFREIAGSLEAALTDVLEDAPAESPYCLLASHRTWSSLRRCWSDEMFLPLLVHRLWRLTLQILARYSVFVNELSLRPISNESPKEIKKPLVTGSKEPSITQGNTEDQGSGPSETKPVVSISRTQLVYVVADLDKLQEQLPELLEIIKPKLEMIGFKNFSSISALEDSQSSFSACVPSLSSKIIQDLSDSCFGFLKSALEVPRLYRRTNKEVPTTASSYVDSALKPLFQLQSGHKDKLKQAIIQQWLEGTLSESTHKYYETVSDVLNSVKKMEESLKRLKQARKTTPANPVGPSGGMSDDDKIRLQLALDVEYLGEQIQKLGLQASDIKSFSALAELVAAAKDQATAEQP

SEQ ID NO: 8237 - protein, 738 aa, Homo sapiens
MEKSRMNLPKGPDTLCFDKDEFMKEDFDVDHFVSDCRKRVQLEELRDDLELYYKLLKTAMVELINKDYADFVNLSTNLVGMDKALNQLSVPLGQLREEVLSLRSSVSEGIRAVDERMSKQEDIRKKKMCVLRLIQVIRSVEKIEKILNSQSSKETSALEASSPLLTGQILERIATEFNQLQFHAVQSKGMPLLDKVRPRIAGITAMLQQSLEGLLLEGLQTSDVDIIRHCLRTYATIDKTRDAEALVGQVLVKPYIDEVIIEQFVESHPNGLQVMYNKLLEFVPHHCRLLREVTGGAISSEKGNTVPGYDFLVNSVWPQIVQGLEEKLPSLFNPGNPDAFHEKYTISMDFVRRLERQCGSQASVKRLRAHPAYHSFNKKWNLPVYFQIRFREIAGSLEAALTDVLEDAPAESPYCLLASHRTWSSLRRCWSDEMFLPLLVHRLWRLTLQILARYSVFVNELSLRPISNESPKEIKKPLVTGSKEPSITQGNTEDQGSGPSETKPVVSISRTQLVYVVADLDKLQEQLPELLEIIKPKLEMIGFKNFSSISAALEDSQSSFSACVPSLSSKIIQDLSDSCFGFLKSALEVPRLYRRTNKEVPTTASSYVDSALKPLFQLQSGHKDKLKQAIIQQWLEGTLSESTHKYYETVSDVLNSVKKMEESLKRLKQARKTTPANPVGPSGGMSDDDKIRLQLALDVEYLGEQIQKLGLQASDIKSFSALAELVAAAKDQATAEQP

SEQ ID NO: 8238 - protein, 325 aa, Homo sapiens
MKRVRTEQIQMAVSCYLKRRQYVDSDGPLKQGLRLSQTAEEMAANLTVQSESGCANIVSAAPCQAEPQQYEVQFGRLRNFLTDSDSQHSHEVMPLLYPLFVYLHLNLVQNSPKSTVESFYSRFHGMFLQNASQKDVIEQLQTTQTIQDILSNFKLRAFLDNKYVVRLQEDSYNYLIRYLQSDNNTALCKVLTLHIHLDVQPAKRTDYQLYASGSSSRSENNGLEPPDMPSPILQNEAALEVLQESIKRVKDGPPSLTTICFYAFYNTEQLLNTAEISPDSKLLAAGFDNSCIKLWSLRSKKLKSEPHQVDVSRIHLACDILEEEV

SEQ ID NO: 8239 - protein, 738 aa, Homo sapiens
MRGPPAWPLRLLEPPSPAEPGRLLPVACVWAAASRVPGSLSPFTGLRPARLWGAGPALLWGVGAARRWRSGCRGGGPGASRGVLGLARLLGLWARGPGSCRCGAFAGPGAPRLPRARFPGGPAAAAWAGDEAWRRGPAAPPGDKGRLRPAAAGLPEARKLLGLAYPERRRLAAAVGFLTMSSVISMSAPFFLGKIIDVIYTNPTVDYSDNLTRLCLGLSAVFLCGAAANAIRVYLMQTSGQRIVNRLRTSLFSSILRQEVAFFDKTRTGELINRLSSDTALLGRSVTENLSDGLRAGAQASVGISMMFFVSPNLATFVLSVVPPVSIIAVIYGRYLRKLTKVTQDSLAQATQLAEERIGNVRTVRAFGKEMTEIEKYASKVDHVMQLARKEAFARAGFFGATGLSGNLIVLSVLYKGGLLMGSAHMTVGELSSFLMYAFWVGISIGGLSSFYSELMKGLGAGGRLWELLEREPKLPFNEGVILNEKSFQGALEFKNVHFAYPARPEVPIFQDFSLSIPSGSVTALVGPSGSGKSTVLSLLLRLYDPASGTISLDGHDIRQLNPVWLRSKIGTVSQEPILFSCSIAENIAYGADDPSSVTAEEIQRVAEVANAVAFIRNFPQGFNTVVGEKGVLLSGGQKQRIAIARALLKNPKILLLDEATSALDAENEYLVQEALDRLMDGRTVLVIAHRLSTIKNANMVAVLDQGKITEYGKHEELLSKPNGIYRKLMNKQSFISA

SEQ ID NO: 8240 - protein, 377 aa, Homo sapiens
MCDEDETTALVCDNGSGLVKAGFAGDDAPRAVFPSIVGRPRHQGVMVGMGQKDSYVGDEAQSKRGILTLKYPIEHGIITNWDDMEKIWHHTFYNELRVAPEEHPTLLTEAPLNPKANREKMTQIMFETFNVPAMYVAIQAVLSLYASGRTTGIVLDSGDGVTHNVPIYEGYALPHAIMRLDLAGRDLTDYLMKILTERGYSFVTTAEREIVRDIKEKLCYVALDFENEMATAASSSSLEKSYELPDGQVITIGNERFRCPETLFQPSFIGMESAGIHETTYNSIMKCDIDIRKDLYANNVMSGGTTMYPGIADRMQKEITALAPSTMKIKIIAPPERKYSVWIGGSILASLSTFQQMWITKQEYDEAGPSIVHRKCF

SEQ ID NO: 8241 - protein, 218 aa, Homo sapiens
MSQTAMSETYDFLFKFLVIGNAGTGKSCLLHQFIEKKFKDDSNHTIGVEFGSKIINVGGKYVKLQIWDTAGQERFRSVTRSYYRGAAGALLVYDITSRETYNALTNWLTDARMLASQNIVIILCGNKKDLDADREVTFLEASRFAQENELMFLETSALTGENVEEAFVQCARKILNKIESGELDPERMGSGIQYGDAALRQLRSPRRAQAPNAQECGC

SEQ ID NO: 8242 - protein, 258 aa, Homo sapiens
MPPQQGDPAFPDRCEAPPVPPRRERGGRGGRGPGEPGGRGRAGGAEGRGVKCVLVGDGAVGKTSLVVSYTTNGYPTEYIPTAFDNFSAVVSVDGRPVRLQLCDTAGQDEFDKLRPLCYTNTDIFLLCFSVVSPSSFQNVSEKWVPEIRCHCPKAPIILVGTQSDLREDVKVLIELDKCKEKPVPEEAAKLCAEEIKAASYIECSALTQKNLKEVFDAAIVAGIQYSDTQQQPKKSKSRTPDKMKNLSKSWWKKYCCFV

SEQ ID NO: 8243 - protein, 385 aa, Homo sapiens
MAAPDLSTNLQEEATCAICLDYFTDPVMTDCGHNFCRECIRRCWGQPEGPYACPECRELSPQRNLRPNRPLAKMAEMARRLHPPSPVPQGVCPAHREPLAAFCGDELRLLCAACERSGEHWAHRVRPLQDAAEDLKAKLEKSLEHLRKQMQDALLFQAQADETCVLWQKMVESQRQNVLGEFERLRRLLAEEEQQLLQRLEEEELEVLPRLREGAAHLGQQSAHLAELIAELEGRCQLPALGLLQDIKDALRRVQDVKLQPPEVVPMELRTVCRVPGLVETLRRFRGRCGGPRWGDDSRRGPAKDLGSQPRVLCPATASSKLTVSWWWVVGKTSSAHTSDISCVGIFTPNNSSTSGNELGIQGFHSALNRIASADTTGVSTDPTD

SEQ ID NO: 8244 - protein, 858 aa, Homo sapiens
AGKTMAIAAQGACRSLTIYRCEFADQGVYVCDAHDAQSSASVKVQGRNIQIVRPLEDVEVMEKDGATFSCEVSHDEVPGQWFWEGSKLRPTDNVRIRQEGRTYTLIYRRVLAEDAGEIQFVAENAESRAQLRVKELPVTLVRPLRDKIAMEKHRGVLECQVSRASAQVRWFKGSQELQPGPKYELVSDGLYRKLIISDVHAEDEDTYTCDAGDVKTSAQFFVEEQSITIVRGLQDVTVMEPAPAWFECETSIPSVRPPKWLLGKTVLQAGGNVGLEQEGTVHRLMLRRTCSTMTGPVHFTVGKSRSSARLVVSDIPVVLTRPLEPKTGRELQSVVLSCDFRPAPKAVQWYKDDTPLSPSEKFKMSLEGQMAELRILRLMPADAGVYRCQAGSAHSSTEVTVEAREVTVTGPLQDAEATEEGWASFSCELSHEDEEVEWSLNGMPLYNDSFHEISHKGRRHTLVLKSIQRADAGIVRASSLKVSTSARLEVRVKPVVFLKALDDLSAEERGTLALQCEVSDPEAHVVWRKDGVQLGPSDKYDFLHTAGTRGLVVHDVSPEDAGLYTCHVGSEETRARVRVHDLHVGITKRLKTMEVLEGESCSFECVLSHESASDPAMWTVGGKTVGSSSRFQATRQGRKYILVVREAAPSDAGEVVFSVRGLTSKASLIVRERPAAIIKPLEDQWVAPGEDVELRCELSRAGTPVHWLKDRKAIRKSQKYDVVCEGTMAMLVIRGASLKDAGEYTCEVEASKSTASLHVEEKANCFTEELTNLQVEEKGTAVFTCKTEHPAATVTWRKGLLELRASGKHQPSQEGLTLRLTISALEKADSDTYTCDIGQAQSRAQLLVQGEAAKCARA

SEQ ID NO: 8245 - protein, 8923 aa, Homo sapiens
MDQPQFSGAPRFLTRPKAFVVSVGKDATLSCQIVGNPTPQVSWEKDQQPVAAGARFRLAQDGDLYRLTILDLALGDSGQYVCRARNAIGEAFAAVGLQVDAEAACAEQAPHFLLRPTSIRVREGSEATFRCRVGGSPRPAVSWSKDGRRLGEPDGPRVRVEELGEASALRIRAARPRDGGTYEVRAENPLGAASAAAALVVDSDAADTASRPGTSTAALLAHLQRRREAMRAEGAPASPPSTGTRTCTVTEGKHARLSCYVTGEPKPETVWKKDGQLVTEGRRHVVYEDAQENFVLKILFCKQSDRGLYTCTASNLVGQTYSSVLVVVREPAVPFKKRLQDLEVREKESATFLCEVPQPSTEAAWFKEETRLWASAKYGIEEEGTERRLTVRNVSADDDAVYICETPEGSRTVAELAVQGNLLRKLPRKTAVRVGDTAMFCVELAVPVGPVHWLRNQEEVVAGGRVAISAEGTRHTLTISQCCLEDVGQVAFMAGDCQTSTQFCVSAPRKPPLQPPVDPVVKARMESSVILSWSPPPHGERPVTIDGYLVEKKKLGTYTWIRCHEAEWVATPELTVADVAEEGNFQFRVSALNSFGQSPYLEFPGTVHLAPKLAVRTPLKAVQAVEGGEVTFSVDLTVASAGEWFLDGQALKASSVYEIHCDRTRHTLTIREVPASLHGAQLKFVANGIESSIRMEVRAAPGLTANKPPAAAAREVLARLHEEAQLLAELSDQAAAVTWLKDGRTLSPGPKYEVQASAGRRVLLVRDVARDDAGLYECVSRGGRIAYQLSVQGLARFLHKDMAGSCVDAVAGGPAQFECETSEAHVHVHWYKDGMELGHSGERFLQEDVGTRHRLVAATVTRQDEGTYSCRVGEDSVDFRLRVSEPKAVFAKEQPACREVQAEVGASATLSCEVAQDQMEVTWYKDGKKLSSSSKVHVEAVGCMRRLVVQQVGQADSGEYSCEARGQRVSFRLDVAEPKVVFAKEQLARRKLQAEAGASATLSCEVAQAQTEVTWYKDGKKLSSSSKVCMEATGCTRRLVVQQAGQADAGEYSCEAGGQRLSFHLDVKEPKVVFAKDQVAHSEVQAEAGASATLSCEVAQAQTEVMWYKDGKKLSSSLKVHVEAKGCRRRLVVQQAGKTDAGDYSCEARGQRVSFRLHITEPKMMFAKEQSVHNEVQAEAGASAMLSCEVAQAQTEVTWYKDGKKLSSSSKVGMEVKGCTRRLVLPQAGKADAGEYSCEAGGQRVSFHLHITEPKGVFAKEQSVHNEVQAEAGTTAMLSCEVAQPQTEVTWYKDGKKLSSSSKVRMEVKGCTRRLVVQQVGKADAGEYSCEAGGQRVSFQLHITEPKAVFAKEQLVHNEVRTEAGASATLSCEVAQAQTEVTWYKDGKKLSSSSKVRIEAAGCMRQLVVQQAGQADAGEYTCEAGGQRLSFHLDVSEPKAVFAKEQLAHRKVQAEAGAIATLSCEVAQAQTEVTWYKDGKKLSSSSKVRMEAVGCTRRLVVQQACQADTGEYSCEAGGQRLSFSLDVAEPKVVFAKEQPVHREVQAQAGASTTLSCEVAQAQTEVMWYKDGKKLSFSSKVRMEAVGCTRRLVVQQAGQAVAGEYSCEAGSQRLSFHLHVAEPKAVFAKEQPAHREVQAEAGASATLSCEVAQAQTEVTWYKDGKKLSSSLKVHVEAAGCTRRLVVQQAGQADTGEYSCEAGGQQLSFRLQVAEPKAVFAKEQPASREVQAEAGTSATLSCEVAQAQTEVTWYKDGKKLSSSSKVRMEAVGCTRRLVVQEAGQADAGEYSCKAGDQRLSFHLHVAEPKVVFAKEQPAHREVQAEAGASATLSCEVAQAQTEVTWYKDGKKLSSSSKVRVEAVGCTRRLVVQQAGQAEAGEYSCEAGGQQLSFRLQVAEPKAVFAKEQVVFAKDQPVHREVQAEAGTSTMLSCEVAQAQTEVMWYKDGKKLSSSSKMRVEAVGCTRRLVVQEAGQADAGEYSCEAGGQRLSFHLHVAEPKVVFAKEQPACREVQAEAGASATLSCEVAQGQMEVTWYKDGKKLSSSSKVHMEASGYTRRLVVQQAGQADAGEYSCEAGGQRLSFRLHVAELEPQISERPCRREPLVVKEHEDIILTATLATPSAATVTWLKDGVEIRRSKRHETASQGDTHTLTVHGAQVLDSAIYSCRVGAEGQDFPVQVEEVAAKFCRLLEPVCGELGGTVTLACELSPACAEVVWRCGNTQLRVGKRFQMVAEGPVRSLTVLGLRAEDAGEYVCESRDDHTSAQLTVSVPRVVKFMSGLSTVVAEEGGEATFQCVVSPSDVAVVWFRDGALLQPSEKFAISQSGASHSLTISDLVLEDAGQITVEAEGASSSAALRVREAPVLFKKKLEPQTVEERSSVTLEVELTRPWPELRWTRNATALAPGKNVEIHAEGARHRLVLHNVGFADRGFFGCETPDDKTQAKLTVEMRQVRLVRGLQAVEAREQGTATMEVQLSHADVDGSWTRDGLRFQQGPTCHLAVRGPMHTLTLSGLRPEDSGLMVFKAEGVHTSARLVVTELPVSFSRPLQDVVTTEKEKVTLECELSRPNVDVRWLKDGVELRAGKTMAIAAQGACRSLTIYRCEFADQGVYVCDAHDAQSSASVKVQGRNIQIVRPLEDVEVMEKDGATFSCEVSHDEVPGQWFWEGSKLRPTDNVRIRQEGRTYTLIYRRVLAEDAGEIQFVAENAESRAQLRVKELPVTLVRPLRDKIAMEKHRGVLECQVSRASAQVRWFKGSQELQPGPKYELVSDGLYRKLIISDVHAEDEDTYTCDAGDVKTSAQFFVEEQSITIVRGLQDVTVMEPAPAWFECETSIPSVRPPKWLLGKTVLQAGGNVGLEQEGTVHRLMLRRTCSTMTGPVHFTVGKSRSSARLVVSDIPVVLTRPLEPKTGRELQSVVLSCDFRPAPKAVQWYKDDTPLSPSEKFKMSLEGQMAELRILRLMPADAGVYRCQAGSAHSSTEVTVEAREVTVTGPLQDAEATEEGWASFSCELSHEDEEVEWSLNGMPLYNDSFHEISHKGRRHTLVLKSIQRADAGIVRASSLKVSTSARLEVRVKPVVFLKALDDLSAEERGTLALQCEVSDPEAHVVWRKDGVQLGPSDKYDFLHTAGTRGLVVHDVSPEDAGLYTCHVGSEETRARVRVHDLHVGITKRLKTMEVLEGESCSFECVLSHESASDPAMWTVGGKTVGSSSRFQATRQGRKYILVVREAAPSDAGEVVFSVRGLTSKASLIVRERPAAIIKPLEDQWVAPGEDVELRCELSRAGTPVHWLKDRKAIRKSQKYDVVCEGTMAMLVIRGASLKDAGEYTCEVEASKSTASLHVEEKANCFTEELTNLQVEEKGTAVFTCKTEHPAATVTWRKGLLELRASGKHQPSQEGLTLRLTISALEKADSDTYTCDIGQAQSRAQLLVQGRRVHIIEDLEDVDVQEGSSATFRCRISPANYEPVHWFLDKTPLHANELNEIDAQPGGYHVLTLRQLALKDSGTIYFEAGDQRASAALRVTEKPSVFSRELTDATITEGEDLTLVCETSTCDIPVCWTKDGKTLRGSARCQLSHEGHRAQLLITGATLQDSGRYKCEAGGACSSSIVRVHARPVRFQEALKDLEVLEGGAATLRCVLSSVAAPVKWCYGNNVLRPGDKYSLRQEGAMLELVVRNLRPQDSGRYSCSFGDQTTSATLTVTALPAQFIGKLRNKEATEGATATLRCELSKAAPVEWRKGSETLRDGDRYCLRQDGAMCELQIRGLAMVDAAEYSCVCGEERTSASLTIRPMPAHFIGRLRHQESIEGATATLRCELSKAAPVEWRKGRESLRDGDRHSLRQDGAVCELQICGLAVADAGEYSCVCGEERTSATLTVKALPAKFTEGLRNEEAVEGATAMLWCELSKVAPVEWRKGPENLRDGDRYILRQEGTRCELQICGLAMADAGEYLCVCGQERTSATLTIRALPARFIEDVKNQEAREGATAVLQCELNSAAPVEWRKGSETLRDGDRYSLRQDGTKCELQIRGLAMADTGEYSCVCGQERTSAMLTVRALPIKFTEGLRNEEATEGATAVLRCELSKMAPVEWWKGHETLRDGDRHSLRQDGARCELQIRGLVAEDAGEYLCMCGKERTSAMLTVRAMPSKFIEGLRNEEATEGDTATLWCELSKAAPVEWRKGHETLRDGDRHSLRQDGSRCELQIRGLAVVDAGEYSCVCGQERTSATLTVRALPARFIEDVKNQEAREGATAVLQCELSKAAPVEWRKGSETLRGGDRYSLRQDGTRCELQIHGLSVADTGEYSCVCGQERTSATLTVRALPARFTQDLKTKEASEGATATLQCELSKVAPVEWKKGPETLRDGGRYSLKQDGTRCELQIHDLSVADAGEYSCMCGQERTSATLTVRALPARFTEGLRNEEAMEGATATLQCELSKAAPVEWRKGLEALRDGDKYSLRQDGAVCELQIHGLAMADNGVYSCVCGQERTSATLTVRALPARFIEDMRNQKATEGATVTLQCKLRKAAPVEWRKGPNTLKDGDRYSLKQDGTSCELQIRGLVIADAGEYSCICEQERTSATLTVRALPARFIEDVRNHEATEGATAVLQCELSKAAPVEWRKGSETLRDGDRYSLRQDGTRCELQIRGLAVEDTGEYLCVCGQERTSATLTVRALPARFIDNMTNQEAREGATATLHCELSKVAPVEWRKGPETLRDGDRHSLRQDGTRCELQIRGLSVADAGEYSCVCGQERTSATLTIRALPAKFTKGLRNEEATEGATAMLQCELSKVAPVEWRKGPETLRDGDRYNLRQDGTRCELQIHGLSVADTGEYSCVCGQEKTSATLTVKAPQPVFREPLQSLQAEEGSTATLQCELSEPTATVVWSKGGLQLQANGRREPRLQGCTAELVLQDLQREDTGEYTCTCGSQATSATLTVTAAPVRFLRELQHQEVDEGGTAHLCCELSRAGASVEWRKGSLQLFPCAKYQMVQDGAAAELLVRGVEQEDAGDYTCDTGHTQSMASLSVRVPRPKFKTRLQSLEQETGDIARLCCQLSDAESGAVVQWLKEGVELHAGPKYEMRSQGATRELLIHQLEAKDTGEYACVTGGQKTAASLRVTEPEVTIVRGLVDAEVTADEDVEFSCEVSRAGATGVQWCLQGLPLQSNEVTEVAVRDGRIHTLRLKGVTPEDAGTVSFHLGNHASSAQLTVRAPEVTILEPLQDVQLSEGQDASFQCRLSRASGQEARWALGGVPLQANEMNDITVEQGTLHLLTLHKVTLEDAGTVSFHVGTCSSEAQLKVTAKNTVVRGLENVEALEGGEALFECQLSQPEVAAHTWLLDDEPVHTSENAEVVFFENGLRHLLLLKNLRPQDSCRVTFLAGDMVTSAFLTVRGWRLEILEPLKNAAVRAGAQACFTCTLSEAVPVGEASWYINGAAVQPDDSDWTVTADGSHHALLLRSAQPHHAGEVTFACRDAVASARLTVLGLPDPPEDAEVVARSSHTVTLSWAAPMSDGGGGLCGYRVEVKEGATGQWRLCHELVPGPECVVDGLAPGETYRFRVAAVGPVGAGEPVHLPQTVRLAEPPKPVPPQPSAPESRQVAAGEDVSLELEVVAEAGEVIWHKGMERIQPGGRFEVVSQGRQQMLVIKGFTAEDQGEYHCGLAQGSICPAAATFQVALSPASVDEAPQPSLPPEAAQEGDLHLLWEALARKRRMSREPTLDSISELPEEDGRSQRLPQEAEEVAPDLSEGYSTADELARTGDADLSHTSSDDESRAGTPSLVTYLKKAGRPGTSPLASKVGAPAAPSVKPQQQQEPLAAVRPPLGDLSTKDLGDPSMDKAAVKIQAAFKGYKVRKEMKQQEGPMFSHTFGDTEAQVGDALRLECVVASKADVRARWLKDGVELTDGRHHHIDQLGDGTCSLLITGLDRADAGCYTCQVSNKFGQVTHSACVVVSGSESEAESSSGGELDDAFRRAARRLHRLFRTKSPAEVSDEELFLSADEGPAEPEEPADWQTYREDEHFICIRFEALTEARQAVTRFQEMFATLGIGVEIKLVEQGPRRVEMCISKETPAPVVPPEPLPSLLTSDAAPVFLTELQNQEVQDGYPVSFDCVVTGQPMPSVRWFKDGKLLEEDDHYMINEDQQGGHQLIITAVVPADMGVYRCLAENSMGVSSTKAELRVDLTSTDYDTAADATESSSYFSAQGYLSSREQEGTESTTDEGQLPQVVEELRDLQVAPGTRLAKFQLKVKGYPAPRLYWFKDGQPLTASAHIRMTDKKILHTLEIISVTREDSGQYAAYISNAMGAAYSSARLLVRGPDEPEEKPASDVHEQLVPPRMLERFTPKKVKKGSSITFSVKVEGRPVPTVHWLREEAERGVLWIGPDTPGYTVASSAQQHSLVLLDVGRQHQGTYTCIASNAAGQALCSASLHVSGLPKVEEQEKVKEALISTFLQGTTQAISAQGLETASFADLGGQRKEEPLAAKEALGHLSLAEVGTEEFLQKLTSQITEMVSAKITQAKLQVPGGDSDEDSKTPSASPRHGRSRPSSSIQESSSESEDGDARGEIFDIYVVTADYLPLGAEQDAITLREGQYVEVLDAAHPLRWLVRTKPTKSSPSRQGWVSPAYLDRRLKLSPEWGAAEAPEFPGEAVSEDEYKARLSSVIQELLSSEQAFVEELQFLQSHHLQHLERCPHVPIAVAGQKAVIFRNVRDIGRFHSSFLQELQQCDTDDDVAMCFIKNQAAFEQYLEFLVGRVQAESVVVSTAIQEFYKKYAEEALLAGDPSQPPPPPLQHYLEQPVERVQRYQALLKELIRNKARNRQNCALLEQAYAVVSALPQRAENKLHVSLMENYPGTLQALGEPIRQGHFIVWEGAPGARMPWKGHNRHVFLFRNHLVICKPRRDSRTDTVSYVFRNMMKLSSIDLNDQVEGDDRAFEVWQEREDSVRKYLLQARTAIIKSSWVKEICGIQQRLALPVWRPPDFEEELADCTAELGETVKLACRVTGTPKPVISWYKDGKAVQVDPHHILIEDPDGSCALILDSLTGVDSGQYMCFAASAAGNCSTLGKILVQVPPRFVNKVRASPFVEGEDAQFTCTIEGAPYPQIRWYKDGALLTTGNKFQTLSEPRSGLLVLVIRAASKEDLGLYECELVNRLGSARASAELRIQSPMLQAQEQCHREQLVAAVEDTTLERADQEVTSVLKRLLGPKAPGPSTGDLTGPGPCPRGAPALQETGSQPPVTGTSEAPAVPPRVPQPLLHEGPEQEPEAIARAQEWTVPIRMEGAAWPGAGTGELLWDVHSHVVRETTQRTYTYQAIDTHTARPPSMQVTIEDVQAQTGGTAQFEAIIEGDPQPSVTWYKDSVQLVDSTRLSQQQEGTTYSLVLRHVASKDAGVYTCLAQNTGGQVLCKAELLVLGGDNEPDSEKQSHRRKLHSFYEVKEEIGRGVFGFVKRVQHKGNKILCAAKFIPLRSRTRAQAYRERDILAALSHPLVTGLLDQFETRKTLILILELCSSEELLDRLYRKGVVTEAEVKVYIQQLVEGLHYLHSHGVLHLDIKPSNILMVHPAREDIKICDFGFAQNITPAELQFSQYGSPEFVSPEIIQQNPVSEASDIWAMGVISYLSLTCSSPFAGESDRATLLNVLEGRVSWSSPMAAHLSEDAKDFIKATLQRAPQARPSAAQCLSHPWFLKSMPAEEAHFINTKQLKFLLARSRWQRSLMSYKSILVMRSIPELLRGPPDSPSLGVARHLCRDTGGSSSSSSSSDNELAPFARAKSLPPSPVTHSPLLHPRGFLRPSASLPEEAEASERSTEAPAPPASPEGAGPPAAQGCVPRHSVIRSLFYHQAGESPEHGALAPGSRRHPARRRHLLKGGYIAGALPGLREPLMEHRVLEEEAAREEQATLLAKAPSFETALRLPASGTHLAPGHSHSLEHDSPSTPRPSSEACGEAQRLPSAPSGGAPIRDMGHPQGSKQLPSTGGHPGTAQPERPSPDSPWGQPAPFCHPKQGSAPQEGCSPHPAVAPCPPGSFPPGSCKEAPLVPSSPFLGQPQAPPAPAKASPPLDSKMGPGDISLPGRPKPGPCSSPGSASQASSSQVSSLRVGSSQVGTEPGPSLDAEGWTQEAEDLSDSTPTLQRPQEQATMRKFSLGGRGGYAGVAGYGTFAFGGDAGGMLGQGPMWARIAWAVSQSEEEEQEEARAESQSEEQQEARAESPLPQVSARPVPEVGRAPTRSSPEPTPWEDIGQVSLVQIRDLSGDAEAADTISLDISEVDPAYLNLSDLYDIKYLPFEFMIFRKVPKSAQPEPPSPMAEEELAEFPEPTWPWPGELGPHAGLEITEESEDVDALLAEAAVGRKRKWSSPSRSLFHFPGRHLPLDEPAELGLRERVKASVEHISRILKGRPEGLEKEGPPRKKPGLASFRLSGLKSWDRAPTFLRELSDETVVLGQSVTLACQVSAQPAAQATWSKDGAPLESSSRVLISATLKNFQLLTILVVVAEDLGVYTCSVSNALGTVTTTGVLRKAERPSSSPCPDIGEVYADGVLLVWKPVESYGPVTYIVQCSLEGGSWTTLASDIFDCCYLTSKLSRGGTYTFRTACVSKAGMGPYSSPSEQVLLGGPSHLASEEESQGRSAQPLPSTKTFAFQTQIQRGRFSVVRQCWEKASGRALAAKIIPYHPKDKTAVLREYEALKGLRHPHLAQLHAAYLSPRHLVLILELCSGPELLPCLAERASYSESEVKDYLWQMLSATQYLHNQHILHLDLRSENMIITEYNLLKVVDLGNAQSLSQEKVLPSDKFKDYLETMELLEGQGAVPQTDIWAIGVTAFIMLSAEYPVSSEGARDLQRGLRKGLVRLSRCYAGLSGGAVAFLRSTLCAQPWGRPCASSCLQCPWLTEEGPACSRPAPVTFPTARLRVFVRNREKRRALLYKRHNLAQVR

SEQ ID NO: 8246 - protein, 439 aa, Homo sapiens
MTNMSWSFLTRLLEEIHNHSTFVGKVWLTVLVVFRIVLTAVGGEAIYSDEQAKFTCNTRQPGCDNVCYDAFAPLSHVRFWVFQIVVISTPSVMYLGYAVHRLARASEQERRRALRRRPGPRRAPRAHLPPPHAGWPEPADLGEEEPMLGLGEEEEEEETGAAEGAGEEAEEAGAEEACTKAVGADGKAAGTPGPTGQHDGRRRIQREGLMRVYVAQLVARAAFEVAFLVGQYLLYGFEVRPFFPCSRQPCPHVVDCFVSRPTEKTVFLLVMYVVSCLCLLLNLCEMAHLGLGSAQDAVRGRRGPPASAPAPAPRPPPCAFPAAAAGLACPPDYSLVVRAAERARAHDQNLANLALQALRDGAAAGDRDRDSSPCVGLPAASRGPPRAGAPASRTGSATSAGTVGEQGRPGTHERPGAKPRAGSEKGSASSRDGKTTVWI

SEQ ID NO: 8247 - protein, 723 aa, Homo sapiens
MGSRCALALAVLSALLCQVWSSGVFELKLQEFVNKKGLLGNRNCCRGGAGPPPCACRTFFRVCLKHYQASVSPEPPCTYGSAVTPVLGVDSFSLPDGGGADSAFSNPIRFPFGFTWPGTFSLIIEALHTDSPDDLATENPERLISRLATQRHLTVGEEWSQDLHSSGRTDLKYSYRFVCDEHYYGEGCSVFCRPRDDAFGHFTCGERGEKVCNPGWKGPYCTEPICLPGCDEQHGFCDKPGECKCRVGWQGRYCDECIRYPGCLHGTCQQPWQCNCQEGWGGLFCNQDLNYCTHHKPCKNGATCTNTGQGSYTCSCRPGYTGATCELGIDECDPSPCKNGGSCTDLENSYSCTCPPGFYGKICELSAMTCADGPCFNGGRCSDSPDGGYSCRCPVGYSGFNCEKKIDYCSSSPCSNGAKCVDLGDAYLCRCQAGFSGRHCDDNVDDCASSPCANGGTCRDGVNDFSCTCPPGYTGRNCSAPVSRCEHAPCHNGATCHERGHRYVCECARGYGGPNCQFLLPELPPGPAVVDLTEKLEGQGGPFPWVAVCAGVILVLMLLLGCAAVVVCVRLRLQKHRPPADPCRGETETMNNLANCQREKDISVSIIGATQIKNTNKKADFHGDHSADKNGFKARYPAVDYNLVQDLKGDDTAVRDAHSKRDTKCQPQGSSGEEKGTPTTLRGGEASERKRPDSGCSTSKDTKYQSVYVISEEKDECVIATEV

SEQ ID NO: 8248 - protein, 326 aa, Homo sapiens
MAAPASVMGPLGPSALGLLLLLLVVAPPRVAALVHRQPENQGISLTGSVACGRPSMEGKILGGVPAPERKWPWQVSVHYAGLHVCGGSILNEYWVLSAAHCFHRDKNIKIYDMYVGLVNLRVAGNHTQWYEVNRVILHPTYEMYHPIGGDVALVQLKTRIVFSESVLPVCLATPEVNLTSANCWATGWGLVSKQGETSDELQEMQLPLILEPWCHLLYGHMSYIMPDMLCAGDILNAKTVCEGDSGGPLVCEFNRSWLQIGIVSWGRGCSNPLYPGVYASVSYFSKWICDNIEITPTPAQPAPALSPALGPTLSVLMAMLAGWSVL

SEQ ID NO: 8249 - protein, 1699 aa, Homo sapiens
MSGEVRLRQLEQFILDGPAQTNGQCFSVETLLDILICLYDECNNSPLRREKNILEYLEWAKPFTSKVKQMRLHREDFEILKVIGRGAFGEVAVVKLKNADKVFAMKILNKWEMLKRAETACFREERDVLVNGDNKWITTLHYAFQDDNNLYLVMDYYVGGDLLTLLSKFEDRLPEDMARFYLAEMVIAIDSVHQLHYVHRDIKPDNILMDMNGHIRLADFGSCLKLMEDGTVQSSVAVGTPDYISPEILQAMEDGKGRYGPECDWWSLGVCMYEMLYGETPFYAESLVETYGKIMNHKERFQFPAQVTDVSENAKDLIRRLICSREHRLGQNGIEDFKKHPFFSGIDWDNIRNCEAPYIPEVSSPTDTSNFDVDDDCLKNSETMPPPTHTAFSGHHLPFVGFTYTSSCVLSDRSCLRVTAGPTSLDLDVNVQRTLDNNLATEAYERRIKRLEQEKLELSRKLQESTQTVQALQYSTVDGPLTASKDLEIKNLKEEIEKLRKQVTESSHLEQQLEEANAVRQELDDAFRQIKAYEKQIKTLQQEREDLNKELVQASERLKNQSKELKDAHCQRKLAMQEFMEINERLTELHTQKQKLARHVRDKEEEVDLVMQKVESLRQELRRTERAKKELEVHTEALAAEASKDRKLREQSEHYSKQLENELEGLKQKQISYSPGVCSIEHQQEITKLKTDLEKKSIFYEEELSKREGIHANEIKNLKKELHDSEGQQLALNKEIMILKDKLEKTRRESQSEREEFESEFKQQYEREKVLLTEENKKLTSELDKLTTLYENLSIHNQQLEEEVKDLADKKESVAHWEAQITEIIQWVSDEKDARGYLQALASKMTEELEALRNSSLGTRATDMPWKMRRFAKLDMSARLELQSALDAEIRAKQAIQEELNKVKASNIITECKLKDSEKKNLELLSEIEQLIKDTEELRSEKASKGRRTVDSTPLSVHTPTLRKKGCPGSTGFPPKRKTHQFFVKSFTTPTKCHQCTSLMVGLIRQGCSCEVCGFSCHITCVNKAPTTCPVPPEQTKGPLGIDPQKGIGTAYEGHVRIPKPAGVKKGWQRALAIVCDFKLFLYDIAEGKASQPSVVISQVIDMRDEEFSVSSVLASDVIHASRKDIPCIFRVTASQLSASNNKCSILMLADTENEKNKWVGVLSELHKILKKNKFRDRSVYVPKEAYDSTLPLIKTTQAAAIIDHERIALGNEEGLFVVHVTKDEIIRVGDNKKIHQIELIPNDQLVAVISGRNRHVRLFPMSALDGRETDFYKLSETKGCQTVTSGKVRHGALTCLCVAMKRQVLCYELFQSKTRHRKFKEIQVPYNVQWMAIFSEQLCVGFQSGFLRYPLNGEGNPYSMLHSNDHTLSFIAHQPMDAICAVEISSKEYLLCFNSIGIYTDCQGRRSRQQELMWPANPSSCCYNAPYLSVYSENAVDIFDVNSMEWIQTLPLKKVRPLNNEGSLNLLGLETIRLIYFKNKMAEGDELVVPETSDNSRKQMVRNINNKRRYSFRVPEEERMQQRREMLRDPEMRNKLISNPTNFNHIAHMGPGDGIQILKDLPMNPRPQESRTVFSGSVSIPSITKSRPEPGRSMSASSGLSARSSAQNGSALKREFSGGSYSAKRQPMPSPSEGSLSSGGMDQGSDAPARDFDGEDSDSPRHSTASNSSNLSSPPSPASPRKTKSLSLESTDRGSWDP

SEQ ID NO: 8250 - protein, 1638 aa, Homo sapiens
MSGEVRLRQLEQFILDGPAQTNGQCFSVETLLDILICLYDECNNSPLRREKNILEYLEWAKPFTSKVKQMRLHREDFEILKVIGRGAFGEVAVVKLKNADKVFAMKILNKWEMLKRAETACFREERDVLVNGDNKWITTLHYAFQDDNNLYLVMDYYVGGDLLTLLSKFEDRLPEDMARFYLAEMVIAIDSVHQLHYVHRDIKPDNILMDMNGHIRLADFGSCLKLMEDGTVQSSVAVGTPDYISPEILQAMEDGKGRYGPECDWWSLGVCMYEMLYGETPFYAESLVETYGKIMNHKERFQFPAQVTDVSENAKDLIRRLICSREHRLGQNGIEDFKKHPFFSGIDWDNIRNCEAPYIPEVSSPTDTSNFDVDDDCLKNSETMPPPTHTAFSGHHLPFVGFTYTSSCVLSDRSCLRVTAGPTSLDLDVNVQRTLDNNLATEAYERRIKRLEQEKLELSRKLQESTQTVQALQYSTVDGPLTASKDLEIKNLKEEIEKLRKQVTESSHLEQQLEEANAVRQELDDAFRQIKAYEKQIKTLQQEREDLNKLEVHTEALAAEASKDRKLREQSEHYSKQLENELEGLKQKQISYSPGVCSIEHQQEITKLKTDLEKKSIFYEEELSKREGIHANEIKNLKKELHDSEGQQLALNKEIMILKDKLEKTRRESQSEREEFESEFKQQYEREKVLLTEENKKLTSELDKLTTLYENLSIHNQQLEEEVKDLADKKESVAHWEAQITEIIQWVSDEKDARGYLQALASKMTEELEALRNSSLGTRATDMPWKMRRFAKLDMSARLELQSALDAEIRAKQAIQEELNKVKASNIITECKLKDSEKKNLELLSEIEQLIKDTEELRSEKGIEHQDSQHSFLAFLNTPTDALDQFETVDSTPLSVHTPTLRKKGCPGSTGFPPKRKTHQFFVKSFTTPTKCHQCTSLMVGLIRQGCSCEVCGFSCHITCVNKAPTTCPVPPEQTKGPLGIDPQKGIGTAYEGHVRIPKPAGVKKGWQRALAIVCDFKLFLYDIAEGKASQPSVVISQVIDMRDEEFSVSSVLASDVIHASRKDIPCIFRVTASQLSASNNKCSILMLADTENEKNKWVGVLSELHKILKKNKFRDRSVYVPKEAYDSTLPLIKTTQAAAIIDHERIALGNEEGLFVVHVTKDEIIRVGDNKKIHQIELIPNDQLVAVISGRNRHVRLFPMSALDGRETDFYKLSETKGCQTVTSGKVRHGALTCLCVAMKRQVLCYELFQSKTRHRKFKEIQVPYNVQWMAIFSEQLCVGFQSGFLRYPLNGEGNPYSMLHSNDHTLSFIAHQPMDAICAVEISSKEYLLCFNSIGIYTDCQGRRSRQQELMWPANPSSCCYNAPYLSVYSENAVDIFDVNSMEWIQTLPLKKVRPLNNEGSLNLLGLETIRLIYFKNKMAEGDELVVPETSDNSRKQMVRNINNKRRYSFRVPEEERMQQRREMLRDPEMRNKLISNPTNFNHIAHMGPGDGIQILKDLPMNPRPQESRTVFSGSVSIPSITKSRPEPGRSMSASSGLSARSSAQNGSALKREFSGGSYSAKRQPMPSPSEGSLSSGGMDQGSDAPARDFDGEDSDSPRHSTASNSSNLSSPPSPASPRKTKSLSLESTDRGSWDP

SEQ ID NO: 8251 - protein, 1719 aa, Homo sapiens
MSGEVRLRQLEQFILDGPAQTNGQCFSVETLLDILICLYDECNNSPLRREKNILEYLEWAKPFTSKVKQMRLHREDFEILKVIGRGAFGEVAVVKLKNADKVFAMKILNKWEMLKRAETACFREERDVLVNGDNKWITTLHYAFQDDNNLYLVMDYYVGGDLLTLLSKFEDRLPEDMARFYLAEMVIAIDSVHQLHYVHRDIKPDNILMDMNGHIRLADFGSCLKLMEDGTVQSSVAVGTPDYISPEILQAMEDGKGRYGPECDWWSLGVCMYEMLYGETPFYAESLVETYGKIMNHKERFQFPAQVTDVSENAKDLIRRLICSREHRLGQNGIEDFKKHPFFSGIDWDNIRNCEAPYIPEVSSPTDTSNFDVDDDCLKNSETMPPPTHTAFSGHHLPFVGFTYTSSCVLSDRSCLRVTAGPTSLDLDVNVQRTLDNNLATEAYERRIKRLEQEKLELSRKLQESTQTVQALQYSTVDGPLTASKDLEIKNLKEEIEKLRKQVTESSHLEQQLEEANAVRQELDDAFRQIKAYEKQIKTLQQEREDLNKELVQASERLKNQSKELKDAHCQRKLAMQEFMEINERLTELHTQKQKLARHVRDKEEEVDLVMQKVESLRQELRRTERAKKELEVHTEALAAEASKDRKLREQSEHYSKQLENELEGLKQKQISYSPGVCSIEHQQEITKLKTDLEKKSIFYEEELSKREGIHANEIKNLKKELHDSEGQQLALNKEIMILKDKLEKTRRESQSEREEFESEFKQQYEREKVLLTEENKKLTSELDKLTTLYENLSIHNQQLEEEVKDLADKKESVAHWEAQITEIIQWVSDEKDARGYLQALASKMTEELEALRNSSLGTRATDMPWKMRRFAKLDMSARLELQSALDAEIRAKQAIQEELNKVKASNIITECKLKDSEKKNLELLSEIEQLIKDTEELRSEKGIEHQDSQHSFLAFLNTPTDALDQFETVDSTPLSVHTPTLRKKGCPGSTGFPPKRKTHQFFVKSFTTPTKCHQCTSLMVGLIRQGCSCEVCGFSCHITCVNKAPTTCPVPPEQTKGPLGIDPQKGIGTAYEGHVRIPKPAGVKKGWQRALAIVCDFKLFLYDIAEGKASQPSVVISQVIDMRDEEFSVSSVLASDVIHASRKDIPCIFRVTASQLSASNNKCSILMLADTENEKNKWVGVLSELHKILKKNKFRDRSVYVPKEAYDSTLPLIKTTQAAAIIDHERIALGNEEGLFVVHVTKDEIIRVGDNKKIHQIELIPNDQLVAVISGRNRHVRLFPMSALDGRETDFYKLSETKGCQTVTSGKVRHGALTCLCVAMKRQVLCYELFQSKTRHRKFKEIQVPYNVQWMAIFSEQLCVGFQSGFLRYPLNGEGNPYSMLHSNDHTLSFIAHQPMDAICAVEISSKEYLLCFNSIGIYTDCQGRRSRQQELMWPANPSSCCYNAPYLSVYSENAVDIFDVNSMEWIQTLPLKKVRPLNNEGSLNLLGLETIRLIYFKNKMAEGDELVVPETSDNSRKQMVRNINNKRRYSFRVPEEERMQQRREMLRDPEMRNKLISNPTNFNHIAHMGPGDGIQILKDLPMNPRPQESRTVFSGSVSIPSITKSRPEPGRSMSASSGLSARSSAQNGSALKREFSGGSYSAKRQPMPSPSEGSLSSGGMDQGSDAPARDFDGEDSDSPRHSTASNSSNLSSPPSPASPRKTKSLSLESTDRGSWDP

SEQ ID NO: 8252 - protein, 631 aa, Homo sapiens
MEVLIGDPITTCLSPSVYDIICNLGFQLRENCDINSIVTQNGEVCWKTITDCVSYTESEQGLDYWGSVRLLGPVCEAVHSHFLSLTKGQFEIRYAPWFQWTSFPELFPEIFDALESLQSPAISLSLMKLTSCLERALGDVFLLIGKECPFLLRDLLSSEELAQVFSQSVMNVLKVFVGSPCGLNLRNVLWHGFASPEEIPPKYCSMMILLTAGLGQLLKSYLQNTKLTLAHRSFISLTNLEDLIVFPDVTYEVLSVLEEVMMKSAFILKIMLPYWEVALVKFKSHRFADCAILLLTQLETGLRNVFATLNRCPKRLLTAESTALYTTFDQILAKHLNDGKINQLPLFLGEPAMEFLWDFLNHQEGPRIRDHLSHGEINLHEFSKETTNQLLAFSLVLLLRFVDDCLLSVFKEKSAVELLISLAEGYSSRCHPVFQLKKQVLSCEESIRVWALLPFPEELTRQAVRLEDNSETNACHSLITKMTDELYHHMPENRCVLKDLDRLPTETPTSDTPLALAPRKPQPCRCRRRVRPSIRLLSPVLSLILLLIALELVNIHAVCGKNAHEYQQYLKFVKSILQYTENLVAYTSYEKNKWNETINLTHTALLKMWTFSEKKQMLIHLAKKSTSKVLL

SEQ ID NO: 8253 - protein, 678 aa, Homo sapiens
MEVLIGDPITTCLSPSVYDIICNLGFQLRENCDINSIVTQNGEVCWKTITDCVSYTESEQGLDYWGSVRLLGPVCEAVHSHFLSLTKGQFEIRYAPWFQWTSFPELFPEIFDALESLQSPAISLSLMKLTSCLERALGDVFLLIGKECPFLLRDLLSSEELAQVFSQSVMNVLKVFVGSPCGLNLRNVLWHGFASPEEIPPKYCSMMILLTAGLGQLLKSYLQNTKLTLAHRSFISLTNLEDLIVFPDVTYEVLSVLEEVMMKSAFILKIMLPYWEVALVKFKSHRFADCAILLLTQLETGLRNVFATLNRCPKRLLTAESTALYTTFDQILAKHLNDGKINQLPLFLGEPAMEFLWDFLNHQEGPRIRDHLSHGEINLHEFSKETTNQLLAFSLVLLLRFVDDCLLSVFKEKSAVELLISLAEGYSSRCHPVFQLKKQVLSCEESIRVWALLPFPEELTRQAVRLEDNSETNACHSLITKMTDELYHHMPENRCVLKDLDRLPTETWPQLLRELCSTPVPTLFCPRIVLEVLVVLRSISEQCRRVSSQVTVASELRHRQWVERTLRSRQRQNYLRMWSSIRLLSPVLSLILLLIALELVNIHAVCGKNAHEYQQYLKFVKSILQYTENLVAYTSYEKNKWNETINLTHTALLKMWTFSEKKQMLIHLAKKSTSKVLL

SEQ ID NO: 8254 - protein, 647 aa, Homo sapiens
MAAILGDTIMVAKGLVKLTQAAVETHLQHLGIGGELIMAARALQSTAVEQIGMFLGKVQGQDKHEEYFAENFGGPEGEFHFSVPHAAGASTDFSSASAPDQSAPPSLGHAHSEGPAPAYVASGPFREAGFPGQASSPLGRANGRLFANPRDSFSAMGFQRRFFHQDQSPVGGLTAEDIEKARQAKARPENKQHKQTLSEHARERKVPVTRIGRLANFGGLAVGLGFGALAEVAKKSLRSEDPSGKKAVLGSSPFLSEANAERIVRTLCKVRGAALKLGQMLSIQDDAFINPHLAKIFERVRQSADFMPLKQMMKTLNNDLGPNWRDKLEYFEERPFAAASIGQVHLARMKGGREVAMKIQYPGVAQSINSDVNNLMAVLNMSNMLPEGLFPEHLIDVLRRELALECDYQREAACARKFRDLLKGHPFFYVPEIVDELCSPHVLTTELVSGFPLDQAEGLSQEIRNEICYNILVLCLRELFEFHFMQTDPNWSNFFYDPQQHKVALLDFGATREYDRSFTDLYIQIIRAAADRDRETVRAKSIEMKFLTGYEVKVMEDAHLDAILILGEAFASDEPFDFGTQSTTEKIHNLIPVMLRHRLVPPPEETYSLHRKMGGSFLICSKLKARFPCKAMFEEAYSNYCKRQAQQ

SEQ ID NO: 8255 - protein, 595 aa, Homo sapiens
MFLGKVQGQDKHEEYFAENFGGPEGEFHFSVPHAAGASTDFSSASAPDQSAPPSLGHAHSEGPAPAYVASGPFREAGFPGQASSPLGRANGRLFANPRDSFSAMGFQRRFFHQDQSPVGGLTAEDIEKARQAKARPENKQHKQTLSEHARERKVPVTRIGRLANFGGLAVGLGFGALAEVAKKSLRSEDPSGKKAVLGSSPFLSEANAERIVRTLCKVRGAALKLGQMLSIQDDAFINPHLAKIFERVRQSADFMPLKQMMKTLNNDLGPNWRDKLEYFEERPFAAASIGQVHLARMKGGREVAMKIQYPGVAQSINSDVNNLMAVLNMSNMLPEGLFPEHLIDVLRRELALECDYQREAACARKFRDLLKGHPFFYVPEIVDELCSPHVLTTELVSGFPLDQAEGLSQEIRNEICYNILVLCLRELFEFHFMQTDPNWSNFFYDPQQHKVALLDFGATREYDRSFTDLYIQIIRAAADRDRETVRAKSIEMKFLTGYEVKVMEDAHLDAILILGEAFASDEPFDFGTQSTTEKIHNLIPVMLRHRLVPPPEETYSLHRKMGGSFLICSKLKARFPCKAMFEEAYSNYCKRQAQQ

SEQ ID NO: 8256 - protein, 644 aa, Homo sapiens
MAVYCYALNSLVIMNSANEMKSGGGPGPSGSETPPPPRRAVLSPGSVFSPGRGASFLFPPAESLSPEEPRSPGGWRSGRRRLNSSSGSGSGSSGSSVSSPSWAGRLRGDRQQVVAAGTLSPPGPEEAKRKLRILQRELQNVQVNQKVGMFEAHIQAQSSAIQAPRSPRLGRARSPSPCPFRSSSQPPGRVLVQGARSEERRTKSWGEQCPETSGTDSGRKGGPSLCSSQVKKGMPPLPGRAAPTGSEAQGPSAFVRMEKGIPASPRCGSPTAMEIDKRGSPTPGTRSCLAPSLGLFGASLTMATEVAARVTSTGPHRPQDLALTEPSGRARELEDLQPPEALVERQGQFLGSETSPAPERGGPRDGEPPGKMGKGYLPCGMPGSGEPEVGKRPEETTVSVQSAESSDSLSWSRLPRALASVGPEEARSGAPVGGGRWQLSDRVEGGSPTLGLLGGSPSAQPGTGNVEAGIPSGRMLEPLPCWDAAKDLKEPQCPPGDRVGVQPGNSRVWQGTMEKAGLAWTRGTGVQSEGTWESQRQDSDALPSPELLPQDPDKPFLRKACSPSNIPAVIITDMGTQEDGALEETQGSPRGNLPLRKLSSSSASSTGFSSSYEDSEEDISSDPERTLDPNSAFLHTLDQQKPRV

SEQ ID NO: 8257 - protein, 1172 aa, Homo sapiens
MVWRLVLLALWVWPSTQAGHQDKDTTFDLFSISNINRKTIGAKQFRGPDPGVPAYRFVRFDYIPPVNADDLSKITKIMRQKEGFFLTAQLKQDGKSRGTLLALEGPGLSQRQFEIVSNGPADTLDLTYWIDGTRHVVSLEDVGLADSQWKNVTVQVAGETYSLHVGCDLIDSFALDEPFYEHLQAEKSRMYVAKGSARESHFRGLLQNVHLVFENSVEDILSKKGCQQGQGAEINAISENTETLRLGPHVTTEYVGPSSERRPEVCERSCEELGNMVQELSGLHVLVNQLSENLKRVSNDNQFLWELIGGPPKTRNMSACWQDGRFFAENETWVVDSCTTCTCKKFKTICHQITCPPATCASPSFVEGECCPSCLHSVDGEEGWSPWAEWTQCSVTCGSGTQQRGRSCDVTSNTCLGPSIQTRACSLSKCDTRIRQDGGWSHWSPWSSCSVTCGVGNITRIRLCNSPVPQMGGKNCKGSGRETKACQGAPCPIDGRWSPWSPWSACTVTCAGGIRERTRVCNSPEPQYGGKACVGDVQERQMCNKRSCPVDGCLSNPCFPGAQCSSFPDGSWSCGSCPVGFLGNGTHCEDLDECALVPDICFSTSKVPRCVNTQPGFHCLPCPPRYRGNQPVGVGLEAAKTEKQVCEPENPCKDKTHNCHKHAECIYLGHFSDPMYKCECQTGYAGDGLICGEDSDLDGWPNLNLVCATNATYHCIKDNCPHLPNSGQEDFDKDGIGDACDDDDDNDGVTDEKDNCQLLFNPRQADYDKDEVGDRCDNCPYVHNPAQIDTDNNGEGDACSVDIDGDDVFNERDNCPYVYNTDQRDTDGDGVGDHCDNCPLVHNPDQTDVDNDLVGDQCDNNEDIDDDGHQNNQDNCPYISNANQADHDRDGQGDACDPDDDNDGVPDDRDNCRLVFNPDQEDLDGDGRGDICKDDFDNDNIPDIDDVCPENNAISETDFRNFQMVPLDPKGTTQIDPNWVIRHQGKELVQTANSDPGIAVGFDEFGSVDFSGTFYVNTDRDDDYAGFVFGYQSSSRFYVVMWKQVTQTYWEDQPTRAYGYSGVSLKVVNSTTGTGEHLRNALWHTGNTPGQVRTLWHDPRNIGWKDYTAYRWHLTHRPKTGYIRVLVHEGKQVMADSGPIYDQTYAGGRLGLFVFSQEMVYFSDLKYECRDI

SEQ ID NO: 8258 - protein, 1014 aa, Homo sapiens
MAESSDKLYRVEYAKSGRASCKKCSESIPKDSLRMAIMVQSPMFDGKVPHWYHFSCFWKVGHSIRHPDVEVDGFSELRWDDQQKVKKTAEAGGVTGKGQDGIGSKAEKTLGDFAAEYAKSNRSTCKGCMEKIEKGQVRLSKKMVDPEKPQLGMIDRWYHPGCFVKNREELGFRPEYSASQLKGFSLLATEDKEALKKQLPGVKSEGKRKGDEVDGVDEVAKKKSKKEKDKDSKLEKALKAQNDLIWNIKDELKKVCSTNDLKELLIFNKQQVPSGESAILDRVADGMVFGALLPCEECSGQLVFKSDAYYCTGDVTAWTKCMVKTQTPNRKEWVTPKEFREISYLKKLKVKKQDRIFPPETSASVAATPPPSTASAPAAVNSSASADKPLSNMKILTLGKLSRNKDEVKAMIEKLGGKLTGTANKASLCISTKKEVEKMNKKMEEVKEANIRVVSEDFLQDVSASTKSLQELFLAHILSPWGAEVKAEPVEVVAPRGKSGAALSKKSKGQVKEEGINKSEKRMKLTLKGGAAVDPDSGLEHSAHVLEKGGKVFSATLGLVDIVKGTNSYYKLQLLEDDKENRYWIFRSWGRVGTVIGSNKLEQMPSKEDAIEHFMKLYEEKTGNAWHSKNFTKYPKKFYPLEIDYGQDEEAVKKLTVNPGTKSKLPKPVQDLIKMIFDVESMKKAMVEYEIDLQKMPLGKLSKRQIQAAYSILSEVQQAVSQGSSDSQILDLSNRFYTLIPHDFGMKKPPLLNNADSVQAKVEMLDNLLDIEVAYSLLRGGSDDSSKDPIDVNYEKLKTDIKVVDRDSEEAEIIRKYVKNTHATTHNAYDLEVIDIFKIEREGECQRYKPFKQLHNRRLLWHGSRTTNFAGILSQGLRIAPPEAPVTGYMFGKGIYFADMVSKSANYCHTSQGDPIGLILLGEVALGNMYELKHASHISKLPKGKHSVKGLGKTTPDPSANISLDGVDVPLGTGISSGVNDTSLLYNEYIVYDIAQVNLKYLLKLKFNFKTSLW

SEQ ID NO: 8259 - protein, 774 aa, Homo sapiens
MWTPGGPPGSAGWDRRRLGARLRAAFAGLQELQGLRATQQERVRGALALQPPPAPAAPCGPHGLHGPEQQLEAALAALQEQLSRLRQQDIGLKTHLDQLDLQISKLQLDVGTASGEALDSDSRPSSGFYEMSDGGSCSLSTSCASVCSDHISPSLGSLLPVAQAHKARPSMGDWRPRSVDETTVPAWRPQATEEGARPPGSVEDAGQPWGTFWPRPVSTGDLDRALPADTGLQKASADAELLGLLCQGVDIPLHVPDPKYRQDLVSQGGREVYPYPSPLHAVALQSPLFVLTKETPQRGGPSFPRESPRGPAGLNTIQTGPVLEAGPARARAYIDRLLHLWGRETPAKGSEGEQGPLRHAASPSPQRQGGWSTDGGGRLLVFAPGREDEGGPAQSRGAGRGGPQQQGYMPLEGPQQSGSLPEEGSKPSNSCVLRETMVQASPSSKAQQTPSAQDYGRGNIISPSRMLDKSPSPASGHFAHPSFAASLKMGPPKSKAEKIKRSPMDKVLRFARQPLLLLDRPEGAHAAPQPSLEWDPAHWPTGRGGLQRRPALAWEAPGRSCSESTLYPMPVLVPLAVAPQESHRTSAQALFPFEASLLTSVARRKHRRWQSTVEISARARLASCPESNLGPPRPVARRAGGPLARGRPSLVRQDAYTRSDSEPSKHSAECDPRFPSVIPETSEGESSDHTTNRFGDRESSSSDEEGGAQSRDCDLALGYVAAGHAELAWTQEAPVSSGPLLSPVPKLCRIKASKALKKKIRRFQPTALKVMTMV

SEQ ID NO: 8260 - protein, 1781 aa, Homo sapiens
MRFYFQDKAAGNFATKCIRVSSTATTQDVIETLAEKFRPDMRMLSSPKYSLYEVHVSGEERRLDIDEKPLVVQLNWNKDDREGRFVLKNENDAIPPKKAQSNGPEKQEKEGVIQNFKRTLSKKEKKEKKKREKEALRQASDKDDRPFQGEDVENSRLAAEVYKDMPETSFTRTISNPEVVMKRRRQQKLEKRMQEFRSSDGRPDSGGTLRIYADSLKPNIPYKTILLSTTDPADFAVAEALEKYGLEKENPKDYCIARVMLPPGAQHSDEKGAKEIILDDDECPLQIFREWPSDKGILVFQLKRRPPDHIPKKTKKHLEGKTPKGKERADGSGYGSTLPPEKLPYLVELSPGRRNHFAYYNYHTYEDGSDSRDKPKLYRLQLSVTEVGTEKLDDNSIQLFGPGIQPHHCDLTNMDGVVTVTPRSMDAETYVEGQRISETTMLQSGMKVQFGASHVFKFVDPSQDHALAKRSVDGGLMVKGPRHKPGIVQETTFDLGGDIHSGTALPTSKSTTRLDSDRVSSASSTAERGMVKPMIRVEQQPDYRRQESRTQDASGPELILPASIEFRESSEDSFLSAIINYTNSSTVHFKLSPTYVLYMACRYVLSNQYRPDISPTERTHKVIAVVNKMVSMMEGVIQKQKNIAGALAFWMANASELLNFIKQDRDLSRITLDAQDVLAHLVQMAFKYLVHCLQSELNNYMPAFLDDPEENSLQRPKIDDVLHTLTGAMSLLRRCRVNAALTIQLFSQLFHFINMWLFNRLVTDPDSGLCSHYWGAIIRQQLGHIEAWAEKQGLELAADCHLSRIVQATTLLTMDKYAPDDIPNINSTCFKLNSLQLQALLQNYHCAPDEPFIPTDLIENVVTVAENTADELARSDGREVQLEEDPDLQLPFLLPEDGYSCDVVRNIPNGLQEFLDPLCQRGFCRLIPHTRSPGTWTIYFEGADYESHLLRENTELAQPLRKEPEIITVTLKKQNGMGLSIVAAKGAGQDKLGIYVKSVVKGGAADVDGRLAAGDQLLSVDGRSLVGLSQERAAELMTRTSSVVTLEVAKQGAIYHGLATLLNQPSPMMQRISDRRGSGKPRPKSEGFELYNNSTQNGSPESPQLPWAEYSEPKKLPGDDRLMKNRADHRSSPNVANQPPSPGGKSAYASGTTAKITSVSTGNLCTEEQTPPPRPEAYPIPTQTYTREYFTFPASKSQDRMAPPQNQWPNYEEKPHMHTDSNHSSIAIQRVTRSQEELREDKAYQLERHRIEAAMDRKSDSDMWINQSSSLDSSTSSQEHLNHSSKSVTPASTLTKSGPGRWKTPAAIPATPVAVSQPIRTDLPPPPPPPPVHYAGDFDGMSMDLPLPPPPSANQIGLPSAQVAAAERRKREEHQRWYEKEKARLEEERERKRREQERKLGQMRTQSLNPAPFSPLTAQQMKPEKPSTLQRPQETVIRELQPQQQPRTIERRDLQYITVSKEELSSGDSLSPDPWKRDAKEKLEKQQQMHIVDMLSKEIQELQSKPDRSAEESDRLRKLMLEWQFQKRLQESKQKDEDDEEEEDDDVDTMLIMQRLEAERRARDEERRRQQQLEEMRKREAEDRARQEEERRRQEEERTKRDAEEKRRQEEGYYSRLEAERRRQHDEAARRLLEPEAPGLCRPPLPRDYEPPSPSPAPGAPPPPPQRNASYLKTQVLSPDSLFTAKFVAYNEEEEEEDCSLAGPNSYPGSTGAAVGAHDACRDAKEKRSKSQDADSPGSSGAPENLTFKERQRLFSQGQDVSNKVKASRKLTELENELNTK

SEQ ID NO: 8261 - protein, 613 aa, Homo sapiens
ETAEQNSSLAVGLNDQLHDLSRSRSPAARSSASNIRERRARIARGRWDRVPDVATRRGLLRPAVSGKVRGRRRPSNVGFGNCSSAKALVSLKEGSLSNTWNEKYSSLQKTPVWKGRNTSSAVEMPFRNSKRSRLFSDEDDRQINTRSPKRNQRVAMVPQKFTATMSTPDKKASQKIGFRLRNLLKLPKAHKWCIYEWFYSNIDKPLFEGDNDFCVCLKESFPNLKTRKLTRVEWGKIRRLMGKPRRCSSAFFEEERSALKQKRQKIRLLQQRKVADVSQFKDLPDEIPLPLVIGTKVTARLRGVHDGLFTGQIDAVDTLNATYRVTFDRTGLGTHTIPDYEVLSNEPHETMPIAAFGQKQRPSRFFMTPPRLHYTPPLQSPIIDNDPLLGQSPWRSKISGSDTETLGGFPVEFLIQVTRLSKILMIKKEHIKKLREMNTEAEKLKSYSMPISIEFQRRYATIVLELEQLNKDLNKVLHKVQQYCYELAPDQGLQPADQPTDMRRRCEEEAQEIVRHANSSTGQPCVENENLTDLISRLTAILLQIKCLAEGGDLNSFEFKSLTDSLNDIKSTIDASNISCFQNNVEIHVAHIQSGLSQMGNLHAFAANNTNRD

SEQ ID NO: 8262 - protein, 415 aa, Homo sapiens
MDRSLRNVLVVSFGFLLLFTAYGGLQSLQSSLYSEEGLGVTALSTLYGGMLLSSMFLPPLLIERLGCKGTIILSMCGYVAFSVGNFFASWYTLIPTSILLGLGAAPLWSAQCTYLTITGNTHAEKAGKRGKDMVNQYFGIFFLIFQSSGVWGNLISSLVFGQTPSQGSGVLAVLMIAAFLQPIRDVQRESEGEKKSVPFWSTLLSTFKLYRDKRLCLLILLPLYSGLQQGFLSSEYTRSYVTCTLGIQFVGYVMICFSATDALCSVLYGKVSQYTGRAVLYVLGAVTHVSCMIALLLWRPRADHLAVFFVFSGLWGVADAVWQTQNNALYGVLFEKSKEAAFANYRLWEALGFVIAFGYSMFLCVHVKLYILLGVLSLTMVAYGLVECVESKNPIRPHAPGQVNQAEDEEIQTKM

SEQ ID NO: 8263 - protein, 319 aa, Homo sapiens
MPFPNCSAPSTVVATAVGVLLGLECGLGLLGNAVALWTFLFRVRVWKPYAVYLLNLALADLLLAACLPFLAAFYLSLQAWHLGRVGCWALHFLLDLSRSVGMAFLAAVALDRYLRVVHPRLKVNLLSPQAALGVSGLVWLLMVALTCPGLLISEAAQNSTRCHSFYSRADGSFSIIWQEALSCLQFVLPFGLIVFCNAGIIRALQKRLREPEKQPKLQRAQALVTLVVVLFALCFLPCFLARVLMHIFQNLGSCRALCAVAHTSDVTGSLTYLHSVLNPVVYCFSSPTFRSSYRRVFHTLRGKGQAAEPPDFNPRDSYS

SEQ ID NO: 8264 - protein, 807 aa, Homo sapiens
MMDSPFLELWQSKAVSIREQLGLGDRPNDSYCYNSAKNSTVLQGVTFGGIPTVLLIDVSCFLFLILVFSIIRRRFWDYGRIALVSEADSESRFQRLSSTSSSGQQDFENELGCCPWLTAIFRLHDDQILEWCGEDAIHYLSFQRHIIFLLVVVSFLSLCVILPVNLSGDLLDKDPYSFGRTTIANLQTDNDLLWLHTIFAVIYLFLTVGFMRHHTQSIKYKEENLVRRTLFITGLPRDARKETVESHFRDAYPTCEVVDVQLCYNVAKLIYLCKEKKKTEKSLTYYTNLQVKTGQRTLINPKPCGQFCCCEVLGCEWEDAISYYTRMKDRLLERITEEERHVQDQPLGMAFVTFQEKSMATYILKDFNACKCQSLQCKGEPQPSSHSRELYTSKWTVTFAADPEDICWKNLSIQGLRWWLQWLGINFTLFLGLFFLTTPSIILSTMDKFNVTKPIHALNNPIISQFFPTLLLWSFSALLPSIVYYSTLLESHWTKSGENQIMMTKVYIFLIFMVLILPSLGLTSLDFFFRWLFDKTSSEASIRLECVFLPDQGAFFVNYVIASAFIGNGMELLRLPGLILYTFRMIMAKTAADRRNVKQNQAFQYEFGAMYAWMLCVFTVIVAYSITCPIIAPFGLIYILLKHMVDRHNLYFVYLPAKLEKGIHFAAVNQALAAPILCLFWLYFFSFLRLGMKAPATLFTFLVLLLTILVCLAHTCFGCFKHLSPLNYKTEEPASDKGSEAEAHMPPPFTPYVPRILNGLASERTALSPQQQQQQTYGAIHNISGTIPGQCLAQSATGSVAAAPQEA

SEQ ID NO: 8265 - protein, 228 aa, Homo sapiens
METFIPIDLTTENQEMDKEETKTKPRLLRYEEKKYEDVKPLETQPAEIAEKETLEYKTVRTFSESLKSEKTEDYLRESIIQQHMVSPEPASLKEKGKSRRKKDQTHACPNVRKARPVSYDRTEPKDDDVIRNIIRLREKLGWQTILPQHSLKYGSSKIAIQKITLKKPLEDDGEFVYCLPRKSPKSLYNPYDLQVVSAHTAKHCKEFWVITASFISKRYLVICGAVYI

SEQ ID NO: 8266 - protein, 430 aa, Homo sapiens
METFIPIDLTTENQEMDKEETKTKPRLLRYEEKKYEDVKPLETQPAEIAEKETLEYKTVRTFSESLKSEKTEDYLRESIIQQHMVSPEPASLKEKGKSRRKKDQTHACPNVRKARPVSYDRTEPKDDDVIRNIIRLREKLGWQTILPQHSLKYGSSKIAIQKITLKKPLEDDGEFVYCLPRKSPKSLYNPYDLQVINIVGSVKEVELIPTLEWLSERRHYYLLRQFKIFSDFRMNKAFVTWKLNVKRIKTEKSRSFLYHHLFLADDLFQTCLVYIRGLCEDAINLKNYNDHENNLSAICLVKLDSSRTYSLDEFCEEQLQQATQALKQLEDIRNKAISEMKSTFLKVAEKNEIKEYFESKLSEDDTTHFKLPKYRRLLETFFKFVMLVDYIFQELIRQLMNTAVTLLLELFNGSAGMPFSVEKKNENLIR

SEQ ID NO: 8267 - protein, 368 aa, Homo sapiens
MAAAAEERMAEEGGGGQGDGGSSLASGSTQRQPPPPAPQHPQPGSQALPAPALAPDQLPQNNTLVALPIVAIENILSFMSYDEISQLRLVCKRMDLVCQRMLNQGFLKVERYHNLCQKQVKAQLPRRESERRNHSLARHADILAAVETRLSLLNMTFMKYVDSNLCCFIPGKVIDEIYRVLRYVNSTRAPQRAHEVLQELRDISSMAMEYFDEKIVPILKRKLPGSDVSGRLMGSPPVPGPSAALTTMQLFSKQNPSRQEVTKLQQQVKTNGAGVTVLRREISELRTKVQEQQKQLQDQDQKLLEQTQIIGEQNARLAELERKLREVMESAVGNSSGSGQNEESPRKRKKATEAIDSLRKSKRLRNRK

SEQ ID NO: 8268 - protein, 377 aa, Homo sapiens
MSSPGTESAGKSLQYRVDHLLSAVENELQAGSEKGDPTERELRVGLEESELWLRFKELTNEMIVTKNGRRMFPVLKVNVSGLDPNAMYSFLLDFVAADNHRWKYVNGEWVPGGKPEPQAPSCVYIHPDSPNFGAHWMKAPVSFSKVKLTNKLNGGGQIMLNSLHKYEPRIHIVRVGGPQRMITSHCFPETQFIAVTAYQNEEITALKIKYNPFAKAFLDAKERSDHKEMMEEPGDSQQPGYSQSYSDNSPACLSMLQSHDNWSSLGMPAHPSMLPVSHNASPPTSSSQYPSLWSVSNGAVTPGSQAAAVSNGLGAQFFRGSPAHYTPLTHPVSAPSSSGSPLYEGAAAATDIVDSQYDAAAQGRLIASWTPVSPPSM

SEQ ID NO: 8269 - protein, 703 aa, Homo sapiens
MAAQAAGVSRQRAATQGLGSNQNALKYLGQDFKTLRQQCLDSGVLFKDPEFPACPSALGYKDLGPGSPQTQGIIWKRPTELCPSPQFIVGGATRTDICQGGLGDCWLLAAIASLTLNEELLYRVVPRDQDFQENYAGIFHFQFWQYGEWVEVVIDDRLPTKNGQLLFLHSEQGNEFWSALLEKAYAKLNGCYEALAGGSTVEGFEDFTGGISEFYDLKKPPANLYQIIRKALCAGSLLGCSIDVSSAAEAEAITSQKLVKSHAYSVTGVEEVNFQGHPEKLIRLRNPWGEVEWSGAWSDDAPEWNHIDPRRKEELDKKVEDGEFWMSLSDFVRQFSRLEICNLSPDSLSSEEVHKWNLVLFNGHWTRGSTAGGCQNYPATYWTNPQFKIRLDEVDEDQEESIGEPCCTVLLGLMQKNRRWRKRIGQGMLSIGYAVYQVPKELESHTDAHLGRDFFLAYQPSARTSTYVNLREVSGRARLPPGEYLVVPSTFEPFKDGEFCLRVFSEKKAQALEIGDVVAGNPYEPHPSEVDQEDDQFRRLFEKLAGKDSEITANALKILLNEAFSKRTDIKFDGFNINTCREMISLLDSNGTGTLGAVEFKTLWLKIQKYLEIYWETDYNHSGTIDAHEMRTALRKAGFTLNSQVQQTIALRYACSKLGINFDSFVACMIRLETLFKLFSLLDEDKDGMVQLSLAEWLCCVLV

SEQ ID NO: 8270 - protein, 403 aa, Homo sapiens
MSSPGTESAGKSLQYRVDHLLSAVENELQAGSEKGDPTERELRVGLEESELWLRFKELTNEMIVTKNGRRMFPVLKVNVSGLDPNAMYSFLLDFVAADNHRWKYVNGEWVPGGKPEPQAPSCVYIHPDSPNFGAHWMKAPVSFSKVKLTNKLNGGGQIMLNSLHKYEPRIHIVRVGGPQRMITSHCFPETQFIAVTAYQNEEITALKIKYNPFAKAFLDAKERSDHKEMMEEPGDSQQPGYSQSGGWLLPGTSTLCPPANPHPQFGGALSLPSTHSCDRYPTLRSHRSSPYPSPYAHRNNSPTYSDNSPACLSMLQSHDNWSSLGMPAHPSMLPVSHNASPPTSSSQYPSLWSVSNGAVTPGSQAAAVSNGLGAQFFRGSPAHYTPLTHPVSAPSSSGSPLYE

SEQ ID NO: 8271 - protein, 789 aa, Homo sapiens
MEDGPSNNASCFRRLTECFLSPSLTDEKVKAYLSLHPQVLDEFVSESVSAETVEKWLKRKNNKSEDESAPKEVSRYQDTNMQGVVYELNSYIEQRLDTGGDNQLLLYELSSIIKIATKADGFALYFLGECNNSLCIFTPPGIKEGKPRLIPAGPITQGTTVSAYVAKSRKTLLVEDILGDERFPRGTGLESGTRIQSVLCLPIVTAIGDLIGILELYRHWGKEAFCLSHQEVATANLAWASVAIHQVQVCRGLAKQTELNDFLLDVSKTYFDNIVAIDSLLEHIMIYAKNLVNADRCALFQVDHKNKELYSDLFDIGEEKEGKPVFKKTKEIRFSIEKGIAGQVARTGEVLNIPDAYADPRFNREVDLYTGYTTRNILCMPIVSRGSVIGVVQMVNKISGSAFSKTDENNFKMFAVFCALALHCANMYHRIRHSECIYRVTMEKLSYHSICTSEEWQGLMQFTLPVRLCKEIELFHFDIGPFENMWPGIFVYMVHRSCGTSCFELEKLCRFIMSVKKNYRRVPYHNWKHAVTVAHCMYAILQNNHTLFTDLERKGLLIACLCHDLDHRGFSNSYLQKFDHPLAALYSTSTMEQHHFSQTVSILQLEGHNIFSTLSSSEYEQVLEIIRKAIIATDLALYFGNRKQLEEMYQTGSLNLNNQSHRDRVIGLMMTACDLCSVTKLWPVTKLTANDIYAEFWAEGDEMKKLGIQPIPMMDRDKKDEVPQGQLGFYNAVAIPCYTTLTQILPPTEPLLKACRDNLSQWEKVIRGEETATWISSPSVAQKAAASED

SEQ ID NO: 8272 - protein, 257 aa, Homo sapiens
MVAEKETLSLNKCPDKMPKRTKLLAQQPLPVHQPHSLVSEGFTVKAMMKNSVVRGPPAAGAFKERPTKPTAFRKFYERGDFPIALEHDSKGNKIAWKVEIEKLDYHHYLPLFFDGLCEMTFPYEFFARQGIHDMLEHGGNKILPVLPQLIIPIKNALNLRNRQVICVTLKVLQHLVVSAEMVGKALVPYYRQILPVLNIFKNMNVNSGDGIDYSQQKRENIGDLIQETLEAFERYGGENAFINIKYVVPTYESCLLN

SEQ ID NO: 8273 - protein, 336 aa, Homo sapiens
MESFNTFANRMKNIGVMNYLKISLQHALYLLHHGMLKDAKRNLSEAETWRHGENTSSREILINLIQAYKGLLQYYTWSEKKMELSKLDKDDYAYNAVAQDVFNHSWKTSANISALIKIPGVWDPFVKSYVEMLEFYGDRDGAQEVLTNYAYDEKFPSNPNAHIYLYNFLKRQKAPRSKLISVLKILYQIVPSHKLMLEFHTLLRKSEKEEHRKLGLEVLFGVLDFAGCTKNITAWKYLAKYLKNILMGNHLAWVQEEWNSRKNWWPGFHFSYFWAKSDWKEDTALACEKAFVAGLLLGKGCRYFRYILKQDHQILGKKIKRMKRSVKKYSIVNPRL

SEQ ID NO: 8274 - protein, 368 aa, Homo sapiens
MIVFVRFNSSHGFPVEVDSDTSIFQLKEVVAKRQGVPADQLRVIFAGKELRNDWTVQNCDLDQQSIVHIVQRPWRKGQEMNATGGDDPRNAAGGCEREPQSLTRVDLSSSVLPGDSVGLAVILHTDSRKDSPPAGSPAGRSIYNSFYVYCKGPCQRVQPGKLRVQCSTCRQATLTLTQGPSCWDDVLIPNRMSGECQSPHCPGTSAEFFFKCGAHPTSDKETSVALHLIATNSRNITCITCTDVRSPVLVFQCNSRHVICLDCFHLYCVTRLNDRQFVHDPQLGYSLPCVAGCPNSLIKELHHFRILGEEQYNRYQQYGAEECVLQMGGVLCPRPGCGAGLLPEPDQRKVTCEGGNGLGCGYGQRRTK

SEQ ID NO: 8275 - protein, 316 aa, Homo sapiens
MIVFVRFNSSHGFPVEVDSDTSIFQLKEVVAKRQGVPADQLRVIFAGKELRNDWTVQEFFFKCGAHPTSDKETSVALHLIATNSRNITCITCTDVRSPVLVFQCNSRHVICLDCFHLYCVTRLNDRQFVHDPQLGYSLPCVAGCPNSLIKELHHFRILGEEQYNRYQQYGAEECVLQMGGVLCPRPGCGAGLLPEPDQRKVTCEGGNGLGCGFAFCRECKEAYHEGECSAVFEASGTTTQAYRVDERAAEQARWEAASKETIKKTTKPCPRCHVPVEKNGGCMHMKCPQPQCRLEWCWNCGCEWNRVCMGDHWFDV

SEQ ID NO: 8276 - protein, 437 aa, Homo sapiens
MIVFVRFNSSHGFPVEVDSDTSIFQLKEVVAKRQGVPADQLRVIFAGKELRNDWTVQNCDLDQQSIVHIVQRPWRKGQEMNATGGDDPRNAAGGCEREPQSLTRVDLSSSVLPGDSVGLAVILHTDSRKDSPPAGSPAGRSIYNSFYVYCKGPCQRVQPGKLRVQCSTCRQATLTLTQEFFFKCGAHPTSDKETSVALHLIATNSRNITCITCTDVRSPVLVFQCNSRHVICLDCFHLYCVTRLNDRQFVHDPQLGYSLPCVAGCPNSLIKELHHFRILGEEQYNRYQQYGAEECVLQMGGVLCPRPGCGAGLLPEPDQRKVTCEGGNGLGCGFAFCRECKEAYHEGECSAVFEASGTTTQAYRVDERAAEQARWEAASKETIKKTTKPCPRCHVPVEKNGGCMHMKCPQPQCRLEWCWNCGCEWNRVCMGDHWFDV

SEQ ID NO: 8277 - protein, 465 aa, Homo sapiens
MIVFVRFNSSHGFPVEVDSDTSIFQLKEVVAKRQGVPADQLRVIFAGKELRNDWTVQNCDLDQQSIVHIVQRPWRKGQEMNATGGDDPRNAAGGCEREPQSLTRVDLSSSVLPGDSVGLAVILHTDSRKDSPPAGSPAGRSIYNSFYVYCKGPCQRVQPGKLRVQCSTCRQATLTLTQGPSCWDDVLIPNRMSGECQSPHCPGTSAEFFFKCGAHPTSDKETSVALHLIATNSRNITCITCTDVRSPVLVFQCNSRHVICLDCFHLYCVTRLNDRQFVHDPQLGYSLPCVAGCPNSLIKELHHFRILGEEQYNRYQQYGAEECVLQMGGVLCPRPGCGAGLLPEPDQRKVTCEGGNGLGCGFAFCRECKEAYHEGECSAVFEASGTTTQAYRVDERAAEQARWEAASKETIKKTTKPCPRCHVPVEKNGGCMHMKCPQPQCRLEWCWNCGCEWNRVCMGDHWFDV

SEQ ID NO: 8278 - protein, 488 aa, Homo sapiens
MFAAGLAPFYASNFSLWSAAYCSSAGPGGCSFPLDPAAVKKPSFCIADILHAGVGDLGAAPEGLAGASAAALTAHLGSVHPHASFQAAARSPLRPTPVVAPSEVPAGFPQRLSPLSAAYHHHHPQQQQQQQQPQQQQPPPPPRAGALQPPASGTRVVPNPHHSGSAPAPSSKDLKFGIDRILSAEFDPKVKEGNTLRDLTSLLTGGRPAGVHLSGLQPSAGQFFASLDPINEASAILSPLNSNPRNSVQHQFQDTFPGPYAVLTKDTMPQTYKRKRSWSRAVFSNLQRKGLEKRFEIQKYVTKPDRKQLAAMLGLTDAQVKVWFQNRRMKWRHSKEAQAQKDKDKEAGEKPSGGAPAADGEQDERSPSRSEGEAESESSDSESLDMAPSDTERTEGSERSLHQTTVIKAPVTGALITASSAGSGGSSGGGGNSFSFSSASSLSSSSTSAGCASSLGGGGASELLPATQPTASSAPKSPEPAQGALGCL

SEQ ID NO: 8279 - protein, 337 aa, Homo sapiens
MGAAGSSALARFVLLAQSRPGWLGVAALGLTAVALGAVAWRRAWPTRRRRLLQQVGTVAQLWIYPVKSCKGVPVSEAECTAMGLRSGNLRDRFWLVINQEGNMVTARQEPRLVLISLTCDGDTLTLSAAYTKDLLLPIKTPTTNAVHKCRVHGLEIEGRDCGEATAQWITSFLKSQPYRLVHFEPHMRPRRPHQIADLFRPKDQIAYSDTSPFLILSEASLADLNSRLEKKVKATNFRPNIVISGCDVYAEDSWDELLIGDVELKRVMACSRCILTTVDPDTGVMSRKEPLETLKSYRQCDPSERKLYGKSPLFGQYFVLENPGTIKVGDPVYLLGQ

SEQ ID NO: 8280 - protein, 795 aa, Homo sapiens
MSARTPLPTVNERDTENHTSVDGYTEPHIQPTKSSSRQNIPRCRNSITSATDEQPHIGNYRLQKTIGKGNFAKVKLARHVLTGREVAVKIIDKTQLNPTSLQKLFREVRIMKILNHPNIVKLFEVIETEKTLYLVMEYASGGEVFDYLVAHGRMKEKEARAKFRQIVSAVQYCHQKYIVHRDLKAENLLLDGDMNIKIADFGFSNEFTVGNKLDTFCGSPPYAAPELFQGKKYDGPEVDVWSLGVILYTLVSGSLPFDGQNLKELRERVLRGKYRIPFYMSTDCENLLKKLLVLNPIKRGSLEQIMKDRWMNVGHEEEELKPYTEPDPDFNDTKRIDIMVTMGFARDEINDALINQKYDEVMATYILLGRKPPEFEGGESLSSGNLCQRSRPSSDLNNSTLQSPAHLKVQRSISANQKQRRFSDHAGPSIPPAVSYTKRPQANSVESEQKEEWDKDVARKLGSTTVGSKSEMTASPLVGPERKKSSTIPSNNVYSGGSMARRNTYVCERTTDRYVALQNGKDSSLTEMSVSSISSAGSSVASAVPSARPRHQKSMSTSGHPIKVTLPTIKDGSEAYRPGTTQRVPAASPSAHSISTATPDRTRFPRGSSSRSTFHGEQLRERRSVAYNGPPASPSHETGAFAHARRGTSTGIISKITSKFVRRDPSEGEASGRTDTSRSTSGEPKERDKEEGKDSKPRSLRFTWSMKTTSSMDPNDMMREIRKVLDANNCDYEQKERFLLFCVHGDARQDSLVQWEMEVCKLPRLSLNGVRFKRISGTSIAFKNIASKIANELKL

SEQ ID NO: 8281 - protein, 758 aa, Homo sapiens
MSARTPLPTVNERDTENHTSVDGYTEPHIQPTKSSSRQNIPRCRNSITSATDEQPHIGNYRLQKTIGKGNFAKVKLARHVLTGREVAVKIIDKTQLNPTSLQKLFREVRIMKILNHPNIGEVFDYLVAHGRMKEKEARAKFRQIVSAVQYCHQKYIVHRDLKAENLLLDGDMNIKIADFGFSNEFTVGNKLDTFCGSPPYAAPELFQGKKYDGPEVDVWSLGVILYTLVSGSLPFDGQNLKELRERVLRGKYRIPFYMSTDCENLLKKLLVLNPIKRGSLEQIMKDRWMNVGHEEEELKPYTEPDPDFNDTKRIDIMVTMGFARDEINDALINQKYDEVMATYILLGRKPPEFEGGESLSSGNLCQRSRPSSDLNNSTLQSPAHLKVQRSISANQKQRRFSDHAGPSIPPAVSYTKRPQANSVESEQKEEWDKDVARKLGSTTVGSKSEMTASPLVGPERKKSSTIPSNNVYSGGSMARRNTYVCERTTDRYVALQNGKDSSLTEMSVSSISSAGSSVASAVPSARPRHQKSMSTSGHPIKVTLPTIKDGSEAYRPGTTQRVPAASPSAHSISTATPDRTRFPRGSSSRSTFHGEQLRERRSVAYNGPPASPSHETGAFAHARRGTSTGIISKITSKFVRRSTSGEPKERDKEEGKDSKPRSLRFTWSMKTTSSMDPNDMMREIRKVLDANNCDYEQKERFLLFCVHGDARQDSLVQWEMEVCKLPRLSLNGVRFKRISGTSIAFKNIASKIANELKL

SEQ ID NO: 8282 - protein, 1558 aa, Homo sapiens
MREAAAALVPPPAFAVTPAAAMEEPPPPPPPPPPPPEPETESEPECCLAARQEGTLGDSACKSPESDLEDFSDETNTENLYGTSPPSTPRQMKRMSTKHQRNNVGRPASRSNLKEKMNAPNQPPHKDTGKTVENVEEYSYKQEKKIRAALRTTERDRKKNVQCSFMLDSVGGSLPKKSIPDVDLNKPYLSLGCSNAKLPVSVPMPIARPARQTSRTDCPADRLKFFETLRLLLKLTSVSKKKDREQRGQENTSGFWLNRSNELIWLELQAWHAGRTINDQDFFLYTARQAIPDIINEILTFKVDYGSFAFVRDRAGFNGTSVEGQCKATPGTKIVGYSTHHEHLQRQRVSFEQVKRIMELLEYIEALYPSLQALQKDYEKYAAKDFQDRVQALCLWLNITKDLNQKLRIMGTVLGIKNLSDIGWPVFEIPSPRPSKGNEPEYEGDDTEGELKELESSTDESEEEQISDPRVPEIRQPIDNSFDIQSRDCISKKLERLESEDDSLGWGAPDWSTEAGFSRHCLTSIYRPFVDKALKQMGLRKLILRLHKLMDGSLQRARIALVKNDRPVEFSEFPDPMWGSDYVQLSRTPPSSEEKCSAVSWEELKAMDLPSFEPAFLVLCRVLLNVIHECLKLRLEQRPAGEPSLLSIKQLVRECKEVLKGGLLMKQYYQFMLQEVLEDLEKPDCNIDAFEEDLHKMLMVYFDYMRSWIQMLQQLPQASHSLKNLLEEEWNFTKEITHYIRGGEAQAGKLFCDIAGMLLKSTGSFLEFGLQESCAEFWTSADDSSASDEIRRSVIEISRALKELFHEARERASKALGFAKMLRKDLEIAAEFRLSAPVRDLLDVLKSKQYVKVQIPGLENLQMFVPDTLAEEKSIILQLLNAAAGKDCSKDSDDVLIDAYLLLTKHGDRARDSEDSWGTWEAQPVKVVPQVETVDTLRSMQVDNLLLVVMQSAHLTIQRKAFQQSIEGLMTLCQEQTSSQPVIAKALQQLKNDALELCNRISNAIDRVDHMFTSEFDAEVDESESVTLQQYYREAMIQGYNFGFEYHKEVVRLMSGEFRQKIGDKYISFARKWMNYVLTKCESGRGTRPRWATQGFDFLQAIEPAFISALPEDDFLSLQALMNECIGHVIGKPHSPVTGLYLAIHRNSPRPMKVPRCHSDPPNPHLIIPTPEGFRGSSVPENDRLASIAAELQFRSLSRHSSPTEERDEPAYPRGDSSGSTRRSWELRTLISQSKDTASKLGPIEAIQKSVRLFEEKRYREMRRKNIIGQVCDTPKSYDNVMHVGLRKVTFKWQRGNKIGEGQYGKVYTCISVDTGELMAMKEIRFQPNDHKTIKETADELKIFEGIKHPNLVRYFGVELHREEMYIFMEYCDEGTLEEVSRLGLQEHVIRLYSKQITIAINVLHEHGIVHRDIKGANIFLTSSGLIKLGDFGCSVKLKNNAQTMPGEVNSTLGTAAYMAPEVITRAKGEGHGRAADIWSLGCVVIEMVTGKRPWHEYEHNFQIMYKVGMGHKPPIPERLSPEGKDFLSHCLESDPKMRWTASQLLDHSFVKVCTDEE

SEQ ID NO: 8283 - protein, 1604 aa, Homo sapiens
MREAAAALVPPPAFAVTPAAAMEEPPPPPPPPPPPPEPETESEPECCLAARQEGTLGDSACKSPESDLEDFSDETNTENLYGTSPPSTPRQMKRMSTKHQRNNVGRPASRSNLKEKMNAPNQPPHKDTGKTVENVEEYSYKQEKKIRAALRTTERDRKKNVQCSFMLDSVGGSLPKKSIPDVDLNKPYLSLGCSNAKLPVSVPMPIARPARQTSRTDCPADRLKFFETLRLLLKLTSVSKKKDREQRGQENTSGFWLNRSNELIWLELQAWHAGRTINDQDFFLYTARQAIPDIINEILTFKVDYGSFAFVRDRAGFNGTSVEGQCKATPGTKIVGYSTHHEHLQRQRVSFEQVKRIMELLEYIEALYPSLQALQKDYEKYAAKDFQDRVQALCLWLNITKDLNQKLRIMGTVLGIKNLSDIGWPVFEIPSPRPSKGNEPEYEGDDTEGELKELESSTDESEEEQISDPRVPEIRQPIDNSFDIQSRDCISKKLERLESEDDSLGWGAPDWSTEAGFSRHCLTSIYRPFVDKALKQMGLRKLILRLHKLMDGSLQRARIALVKNDRPVEFSEFPDPMWGSDYVQLSRTPPSSEEKCSAVSWEELKAMDLPSFEPAFLVLCRVLLNVIHECLKLRLEQRPAGEPSLLSIKQLVRECKEVLKGGLLMKQYYQFMLQEVLEDLEKPDCNIDAFEEDLHKMLMVYFDYMRSWIQMLQQLPQASHSLKNLLEEEWNFTKEITHYIRGGEAQAGKLFCDIAGMLLKSTGSFLEFGLQESCAEFWTSADDSSASDEIRRSVIEISRALKELFHEARERASKALGFAKMLRKDLEIAAEFRLSAPVRDLLDVLKSKQYVKVQIPGLENLQMFVPDTLAEEKSIILQLLNAAAGKDCSKDSDDVLIDAYLLLTKHGDRARDSEDSWGTWEAQPVKVVPQVETVDTLRSMQVDNLLLVVMQSAHLTIQRKAFQQSIEGLMTLCQEQTSSQPVIAKALQQLKNDALELCNRISNAIDRVDHMFTSEFDAEVDESESVTLQQYYREAMIQGYNFGFEYHKEVVRLMSGEFRQKIGDKYISFARKWMNYVLTKCESGRGTRPRWATQGFDFLQAIEPAFISALPEDDFLSLQALMNECIGHVIGKPHSPVTAIHRNSPRPMKVPRCHSDPPNPHLIIPTPEGFSTRSMPSDARSHGSPAAAAAAAAAAVAASRPSPSGGDSVLPKSISSAHDTRGSSVPENDRLASIAAELQFRSLSRHSSPTEERDEPAYPRGDSSGSTRRSWELRTLISQSKDTASKLGPIEAIQKSVRLFEEKRYREMRRKNIIGQVCDTPKSYDNVMHVGLRKVTFKWQRGNKIGEGQYGKVYTCISVDTGELMAMKEIRFQPNDHKTIKETADELKIFEGIKHPNLVRYFGVELHREEMYIFMEYCDEGTLEEVSRLGLQEHVIRLYSKQITIAINVLHEHGIVHRDIKGANIFLTSSGLIKLGDFGCSVKLKNNAQTMPGEVNSTLGTAAYMAPEVITRAKGEGHGRAADIWSLGCVVIEMVTGKRPWHEYEHNFQIMYKVGMGHKPPIPERLSPEGKDFLSHCLESDPKMRWTASQLLDHSFVKVCTDEE

SEQ ID NO: 8284 - protein, 1012 aa, Homo sapiens
MRWGLRPRGPGAAALATARSLWGTPRLPCSPGWQGATKRLLVRSVSGASNHQPNSNSGRYRDTVLLPQTSFPMKLLGRQQPDTELEIQQKCGFSELYSWQRERKVKTEFCLHDGPPYANGDPHVGHALNKILKDIANRFHMMNGSKIHFVPGWDCHGLPIEIKVLSELGREAQNLSAMEIRKKARSFAKAAIEKQKSAFIRWGIMADWNNCYYTFDGKYEAKQLRTFYQMYDKGLVYRSYKPVFWSPSSRTALAEAELEYNPEHVSRSIYVKFPLLKPSPKLASLIDGSSPVSILVWTTQPWTIPANEAVCYMPESKYAVVKCSKSGDLYVLAADKVASVASTLETTFETISTLSGVDLENGTCSHPLIPDKASPLLPANHVTMAKGTGLVHTAPAHGMEDYGVASQHNLPMDCLVDEDGVFTDVAGPELQNKAVLEEGTDVVIKMLQTAKNLLKEEKLVHSYPYDWRTKKPVVIRASKQWFINITDIKTAAKELLKKVKFIPGSALNGMVEMMDRRPYWCISRQRVWGVPIPVFHHKTKDEYLINSQTTEHIVKLVEQHGSDIWWTLPPEQLLPKEVLSEVGGPDALEYVPGQDILDIWFDSGTSWSYVLPGPDQRADLYLEGKDQLGGWFQSSLLTSVAARKRAPYKTVIVHGFTLGEKGEKMSKSLGNVIHPDVVVNGGQDQSKEPPYGADVLRWWVADSNVFTEVAIGPSVLNAARDDISKLRNTLRFLLGNVADFNPETDSIPVNDMYVIDQYMLHLLQDLANKITELYKQYDFGKVVRLLRTFYTRELSNFYFSIIKDRLYCEKENDPKRRSCQTALVEILDVIVRSFAPILPHLAEEVFQHIPYIKEPKSVFRTGWISTSSIWKKPGLEEAVESACAMRDSFLGSIPGKNAAEYKVITVIEPGLLFEIIEMLQSEETSSTSQLNELMMASESTLLAQEPREMTADVIELKGKFLINLEGGDIREESSYKVIVMPTTKEKCPRCWKYTAESSDTLCPRCAEVVSGK

SEQ ID NO: 8285 - protein, 1512 aa, Homo sapiens
MATLSLTVNSGDPPLGALLAVEHVKDDVSISVEEGKENILHVSENVIFTDVNSILRYLARVATTAGLYGSNLMEHTEIDHWLEFSATKLSSCDSFTSTINELNHCLSLRTYLVGNSLSLADLCVWATLKGNAAWQEQLKQKKAPVHVKRWFGFLEAQQAFQSVGTKWDVSTTKARVAPEKKQDVGKFVELPGAEMGKVTVRFPPEASGYLHIGHAKAALLNQHYQVNFKGKLIMRFDDTNPEKEKEDFEKVILEDVAMLHIKPDQFTYTSDHFETIMKYAEKLIQEGKAYVDDTPAEQMKAEREQRIDSKHRKNPIEKNLQMWEEMKKGSQFGQSCCLRAKIDMSSNNGCMRDPTLYRCKIQPHPRTGNKYNVYPTYDFACPIVDSIEGVTHALRTTEYHDRDEQFYWIIEALGIRKPYIWEYSRLNLNNTVLSKRKLTWFVNEGLVDGWDDPRFPTVRGVLRRGMTVEGLKQFIAAQGSSRSVVNMEWDKIWAFNKKVIDPVAPRYVALLKKEVIPVNVPEAQEEMKEVAKHPKNPEVGLKPVWYSPKVFIEGADAETFSEGEMVTFINWGNLNITKIHKNADGKIISLDAKLNLENKDYKKTTKVTWLAETTHALPIPVICVTYEHLITKPVLGKDEDFKQYVNKNSKHEELMLGDPCLKDLKKGDIIQLQRRGFFICDQPYEPVSPYSCKEAPCVLIYIPDGHTKEMPTSGSKEKTKVEATKNETSAPFKERPTPSLNNNCTTSEDSLVLYNRVAVQGDVVRELKAKKAPKEDVDAAVKQLLSLKAEYKEKTGQEYKPGNPPAEIGQNISSNSSASILESKSLYDEVAAQGEVVRKLKAEKSPKAKINEAVECLLSLKAQYKEKTGKEYIPGQPPLSQSSDSSPTRNSEPAGLETPEAKVLFDKVASQGEVVRKLKTEKAPKDQVDIAVQELLQLKAQYKSLIGVEYKPVSATGAEDKDKKKKEKENKSEKQNKPQKQNDGQRKDPSKNQGGGLSSSGAGEGQGPKKQTRLGLEAKKEENLADWYSQVITKSEMIEYHDISGCYILRPWAYAIWEAIKDFFDAEIKKLGVENCYFPMFVSQSALEKEKTHVADFAPEVAWVTRSGKTELAEPIAIRPTSETVMYPAYAKWVQSHRDLPIKLNQWCNVVRWEFKHPQPFLRTREFLWQEGHSAFATMEEAAEEVLQILDLYAQVYEELLAIPVVKGRKTEKEKFAGGDYTTTIEAFISASGRAIQGGTSHHLGQNFSKMFEIVFEDPKIPGEKQFAYQNSWGLTTRTIGVMTMVHGDNMGLVLPPRVACVQVVIIPCGITNALSEEDKEALIAKCNDYRRRLLSVNIRVRADLRDNYSPGWKFNHWELKGVPIRLEVGPRDMKSCQFVAVRRDTGEKLTVAENEAETKLQAILEDIQVTLFTRASEDLKTHMVVANTMEDFQKILDSGKIVQIPFCGEIDCEDWIKKTTARDQDLEPGAPSMGAKSLCIPFKPLCELQPGAKCVCGKNPAKYYTLFGRSY

SEQ ID NO: 8286 - protein, 485 aa, Homo sapiens
MGRYSGKTCRLLFMLVLTVAFFVAELVSGYLGNSIALLSDSFNMLSDLISLCVGLSAGYIARRPTRGFSATYGYARAEVVGALSNAVFLTALCFTIFVEAVLRLARPERIDDPELVLIVGVLGLLVNVVGLLIFQDCAAWFACCLRGRSRRLQQRQQLAEGCVPGAFGGPQGAEDPRRAADPTAPGSDSAVTLRGTSVERKREKGATVFANVAGDSFNTQNEPEDMMKKEKKSEALNIRGVLLHVMGDALGSVVVVITAIIFYVLPLKSEDPCNWQCYIDPSLTVLMVIIILSSAFPLIKETAAILLQMVPKGVNMEELMSKLSAVPGISSVHEVHIWELVSGKIIATLHIKYPKDRGYQDASTKIREIFHHAGIHNVTIQFENVDLKEPLEQKDLLLLCNSPCISKGCAKQLCCPPGALPLAHVNGCAEHNGGPSLDTYGSDGLSRRDAREVAIEVSLDSCLSDHGQSLNKTQEDQCYVNRTHF

SEQ ID NO: 8287 - protein, 442 aa, Homo sapiens
MHYCVLSAFLILHLVTVALSLSTCSTLDMDQFMRKRIEAIRGQILSKLKLTSPPEDYPEPEEVPPEVISIYNSTRDLLQEKASRRAAACERERSDEEYYAKEVYKIDMPPFFPSETVCPVVTTPSGSVGSLCSRQSQVLCGYLDAIPPTFYRPYFRIVRFDVSAMEKNASNLVKAEFRVFRLQNPKARVPEQRIELYQILKSKDLTSPTQRYIDSKVVKTRAEGEWLSFDVTDAVHEWLHHKDRNLGFKISLHCPCCTFVPSNNYIIPNKSEELEARFAGIDGTSTYTSGDQKTIKSTRKKNSGKTPHLLLMLLPSYRLESQQTNRRKKRALDAAYCFRNVQDNCCLRPLYIDFKRDLGWKWIHEPKGYNANFCAGACPYLWSSDTQHSRVLSLYNTINPEASASPCCVSQDLEPLTILYYIGKTPKIEQLSNMIVKSCKCS

SEQ ID NO: 8288 - protein, 414 aa, Homo sapiens
MHYCVLSAFLILHLVTVALSLSTCSTLDMDQFMRKRIEAIRGQILSKLKLTSPPEDYPEPEEVPPEVISIYNSTRDLLQEKASRRAAACERERSDEEYYAKEVYKIDMPPFFPSENAIPPTFYRPYFRIVRFDVSAMEKNASNLVKAEFRVFRLQNPKARVPEQRIELYQILKSKDLTSPTQRYIDSKVVKTRAEGEWLSFDVTDAVHEWLHHKDRNLGFKISLHCPCCTFVPSNNYIIPNKSEELEARFAGIDGTSTYTSGDQKTIKSTRKKNSGKTPHLLLMLLPSYRLESQQTNRRKKRALDAAYCFRNVQDNCCLRPLYIDFKRDLGWKWIHEPKGYNANFCAGACPYLWSSDTQHSRVLSLYNTINPEASASPCCVSQDLEPLTILYYIGKTPKIEQLSNMIVKSCKCS

SEQ ID NO: 8289 - protein, 376 aa, Homo sapiens
MFGAAGRQPIGAPAAGNSWHFSRTMEELVHDLVSALEESSEQARGGFAETGDHSRSISCPLKRQARKRRGRKRRSYNVHHPWETGHCLSEGSDSSLEEPSKDYRENHNNNKKDHSDSDDQMLVAKRRPSSNLNNNVRGKRPLWHESDFAVDNVGNRTLRRRRKVKRMAVDLPQDISNKRTMTQPPEGCRDQDMDSDRAYQYQEFTKNKVKKRKLKIIRQGPKIQDEGVVLESEETNQTNKDKMECEEQKVSDELMSESDSSSLSSTDAGLFTNDEGRQGDDEQSDWFYEKESGGACGITGVVPWWEKEDPTELDKNVPDPVFESILTGSFPLMSHPSRRGFQARLSRLHGMSSKNIKKSGGTPTSMATNWTSEIPL

SEQ ID NO: 8290 - protein, 528 aa, Homo sapiens
MFGAAGRQPIGAPAAGNSWHFSRTMEELVHDLVSALEESSEQARGGFAETGDHSRSISCPLKRQARKRRGRKRRSYNVHHPWETGHCLSEGSDSSLEEPSKDYRENHNNNKKDHSDSDDQMLVAKRRPSSNLNNNVRGKRPLWHESDFAVDNVGNRTLRRRRKVKRMAVDLPQDISNKRTMTQPPEGCRDQDMDSDRAYQYQEFTKNKVKKRKLKIIRQGPKIQDEGVVLESEETNQTNKDKMECEEQKVSDELMSESDSSSLSSTDAGLFTNDEGRQGDDEQSDWFYEKESGGACGITGVVPWWEKEDPTELDKNVPDPVFESILTGSFPLMSHPSRRGFQARLSRLHGMSSKNIKKSGGTPTSMVPIPGPVGNKRMVHFSPDSHHHDHWFSPGARTEHDQHQLLRDNRAERGHKKNCSVRTASRQTSMHLGSLCTGDIKRRRKAAPLPGPTTAGFVGENAQPILENNIGNRMLQNMGWTPGSGLGRDGKGISEPIQAMQRPKGLGLGFPLPKSTSATTTPNAGKSA

SEQ ID NO: 8291 - protein, 470 aa, Homo sapiens
MWRECDWGLGAVKSDLACVPSAKRLLCRMSNKDRHIDSSCSSFIKTEPSSPASLTDSVNHHSPGGSSDASGSYSSTMNGHQNGLDSPPLYPSAPILGGSGPVRKLYDDCSSTIVEDPQTKCEYMLNSMPKRLCLVCGDIASGYHYGVASCEACKAFFKRTIQGNIEYSCPATNECEITKRRRKSCQACRFMKCLKVGMLKEGVRLDRVRGGRQKYKRRIDAENSPYLNPQLVQPAKKPLLWSDPADNKIVSHLLVAEPEKIYAMPDPTVPDSDIKALTTLCDLADRELVVIIGWAKHIPGFSTLSLADQMSLLQSAWMEILILGVVYRSLSFEDELVYADDYIMDEDQSKLAGLLDLNNAILQLVKKYKSMKLEKEEFVTLKAIALANSDSMHIEDVEAVQKLQDVLHEALQDYEAGQHMEDPRRAGKMLMTLPLLRQTSTKAVQHFYNIKLEGKVPMHKLFLEMLEAKV

SEQ ID NO: 8292 - protein, 1546 aa, Homo sapiens
MNCPVLSLGSGFLFQVIEMLIFAYFASISLTESRGLFPRLENVGAFKKVSIVPTQAVCGLPDRSTFCHSSAAAESIQFCTQRFCIQDCPYRSSHPTYTALFSAGLSSCITPDKNDLHPNAHSNSASFIFGNHKSCFSSPPSPKLMASFTLAVWLKPEQQGVMCVIEKTVDGQIVFKLTISEKETMFYYRTVNGLQPPIKVMTLGRILVKKWIHLSVQVHQTKISFFINGVEKDHTPFNARTLSGSITDFASGTVQIGQSLNGLEQFVGRMQDFRLYQVALTNREILEVFSGDLLRLHAQSHCRCPGSHPRVHPLAQRYCIPNDAGDTADNRVSRLNPEAHPLSFVNDNDVGTSWVSNVFTNITQLNQGVTISVDLENGQYQVFYIIIQFFSPQPTEIRIQRKKENSLDWEDWQYFARNCGAFGMKNNGDLEKPDSVNCLQLSNFTPYSRGNVTFSILTPGPNYRPGYNNFYNTPSLQEFVKATQIRFHFHGQYYTTETAVNLRHRYYAVDEITISGRCQCHGHADNCDTTSQPYRCLCSQESFTEGLHCDRCLPLYNDKPFRQGDQVYAFNCKPCQCNSHSKSCHYNISVDPFPFEHFRGGGGVCDDCEHNTTGRNCELCKDYFFRQVGADPSAIDVCKPCDCDTVGTRNGSILCDQIGGQCNCKRHVSGRQCNQCQNGFYNLQELDPDGCSPCNCNTSGTVDGDITCHQNSGQCKCKANVIGLRCDHCNFGFKFLRSFNDVGCEPCQCNLHGSVNKFCNPHSGQCECKKEAKGLQCDTCRENFYGLDVTNCKACDCDTAGSLPGTVCNAKTGQCICKPNVEGRQCNKCLEGNFYLRQNNSFLCLPCNCDKTGTINGSLLCNKSTGQCPCKLGVTGLRCNQCEPHRYNLTIDNFQHCQMCECDSLGTLPGTICDPISGQCLCVPNRQGRRCNQCQPGFYISPGNATGCLPCSCHTTGAVNHICNSLTGQCVCQDASIAGQRCDQCKDHYFGFDPQTGRCQPCNCHLSGALNETCHLVTGQCFCKQFVTGSKCDACVPSASHLDVNNLLGCSKTPFQQPPPRGQVQSSSAINLSWSPPDSPNAHWLTYSLLRDGFEIYTTEDQYPYSIQYFLDTDLLPYTKYSYYIETTNVHGSTRSVAVTYKTKPGVPEGNLTLSYIIPIGSDSVTLTWTTLSNQSGPIEKYILSCAPLAGGQPCVSYEGHETSATIWNLVPFAKYDFSVQACTSGGCLHSLPITVTTAQAPPQRLSPPKMQKISSTELHVEWSPPAELNGIIIRYELYMRRLRSTKETTSEESRVFQSSGWLSPHSFVESANENALKPPQTMTTITGLEPYTKYEFRVLAVNMAGSVSSAWVSERTGESAPVFMIPPSVFPLSSYSLNISWEKPADNVTRGKVVGYDINMLSEQSPQQSIPMAFSQLLHTAKSQELSYTVEGLKPYRIYEFTITLCNSVGCVTSASGAGQTLAAAPAQLRPPLVKGINSTTIHLRWFPPEELNGPSPIYQLERRESSLPALMTTMMKGIRFIGNGYCKFPSSTHPVNTDFTGKCV

SEQ ID NO: 8293 - protein, 555 aa, Homo sapiens
MPTTVDDVLEHGGEFHFFQKQMFFLLALLSATFAPIYVGIVFLGFTPDHRCRSPGVAELSLRCGWSPAEELNYTVPGPGPAGEASPRQCRRYEVDWNQSTFDCVDPLASLDTNRSRLPLGPCRDGWVYETPGSSIVTEFNLVCANSWMLDLFQSSVNVGFFIGSMSIGYIADRFGRKLCLLTTVLINAAAGVLMAISPTYTWMLIFRLIQGLVSKAGWLIGYILITEFVGRRYRRTVGIFYQVAYTVGLLVLAGVAYALPHWRWLQFTVSLPNFFFLLYYWCIPESPRWLISQNKNAEAMRIIKHIAKKNGKSLPASLQRLRLEEETGKKLNPSFLDLVRTPQIRKHTMILMYNWFTSSVLYQGLIMHMGLAGDNIYLDFFYSALVEFPAAFMIILTIDRIGRRYPWAASNMVAGAACLASVFIPGDLQWLKIIISCLGRMGITMAYEIVCLVNAELYPTFIRNLGVHICSSMCDIGGIITPFLVYRLTNIWLELPLMVFGVLGLVAGGLVLLLPETKGKALPETIEEAENMQRPRKNKEKMIYLQVQKLDIPLN

SEQ ID NO: 8294 - protein, 3114 aa, Homo sapiens
MSWALEEWKEGLPTRALQKIQELEGQLDKLKKEKQQRQFQLDSLEAALQKQKQKVENEKTEGTNLKRENQRLMEICESLEKTKQKISHELQVKESQVNFQEGQLNSGKKQIEKLEQELKRCKSELERSQQAAQSADVSLNPCNTPQKIFTTPLTPSQYYSGSKYEDLKEKYNKEVEERKRLEAEVKALQAKKASQTLPQATMNHRDIARHQASSSVFSWQQEKTPSHLSSNSQRTPIRRDFSASYFSGEQEVTPSRSTLQIGKRDANSSFFDNSSSPHLLDQLKAQNQELRNKINELELRLQGHEKEMKGQVNKFQELQLQLEKAKVELIEKEKVLNKCRDELVRTTAQYDQASTKYTALEQKLKKLTEDLSCQRQNAESARCSLEQKIKEKEKEFQEELSRQQRSFQTLDQECIQMKARLTQELQQAKNMHNVLQAELDKLTSVKQQLENNLEEFKQKLCRAEQAFQASQIKENELRRSMEEMKKENNLLKSHSEQKAREVCHLEAELKNIKQCLNQSQNFAEEMKAKNTSQETMLRDLQEKINQQENSLTLEKLKLAVADLEKQRDCSQDLLKKREHHIEQLNDKLSKTEKESKALLSALELKKKEYEELKEEKTLFSCWKSENEKLLTQMESEKENLQSKINHLETCLKTQQIKSHEYNERVRTLEMDRENLSVEIRNLHNVLDSKSVEVETQKLAYMELQQKAEFSDQKHQKEIENMCLKTSQLTGQVEDLEHKLQLLSNEIMDKDRCYQDLHAEYESLRDLLKSKDASLVTNEDHQRSLLAFDQQPAMHHSFANIIGEQGSMPSERSECRLEADQSPKNSAILQNRVDSLEFSLESQKQMNSDLQKQCEELVQIKGEIEENLMKAEQMHQSFVAETSQRISKLQEDTSAHQNVVAETLSALENKEKELQLLNDKVETEQAEIQELKKSNHLLEDSLKELQLLSETLSLEKKEMSSIISLNKREIEELTQENGTLKEINASLNQEKMNLIQKSESFANYIDEREKSISELSDQYKQEKLILLQRCEETGNAYEDLSQKYKAAQEKNSKLECLLNECTSLCENRKNELEQLKEAFAKEHQEFLTKLAFAEERNQNLMLELETVQQALRSEMTDNQNNSKSEAGGLKQEIMTLKEEQNKMQKEVNDLLQENEQLMKVMKTKHECQNLESEPIRNSVKERESERNQCNFKPQMDLEVKEISLDSYNAQLVQLEAMLRNKELKLQESEKEKECLQHELQTIRGDLETSNLQDMQSQEISGLKDCEIDAEEKYISGPHELSTSQNDNAHLQCSLQTTMNKLNELEKICEILQAEKYELVTELNDSRSECITATRKMAEEVGKLLNEVKILNDDSGLLHGELVEDIPGGEFGEQPNEQHPVSLAPLDESNSYEHLTLSDKEVQMHFAELQEKFLSLQSEHKILHDQHCQMSSKMSELQTYVDSLKAENLVLSTNLRNFQGDLVKEMQLGLEEGLVPSLSSSCVPDSSSLSSLGDSSFYRALLEQTGDMSLLSNLEGAVSANQCSVDEVFCSSLQEENLTRKETPSAPAKGVEELESLCEVYRQSLEKLEEKMESQGIMKNKEIQELEQLLSSERQELDCLRKQYLSENEQWQQKLTSVTLEMESKLAAEKKQTEQLSLELEVARLQLQGLDLSSRSLLGIDTEDAIQGRNESCDISKEHTSETTERTPKHDVHQICDKDAQQDLNLDIEKITETGAVKPTGECSGEQSPDTNYEPPGEDKTQGSSECISELSFSGPNALVPMDFLGNQEDIHNLQLRVKETSNENLRLLHVIEDRDRKVESLLNEMKELDSKLHLQEVQLMTKIEACIELEKIVGELKKENSDLSEKLEYFSCDHQELLQRVETSEGLNSDLEMHADKSSREDIGDNVAKVNDSWKERFLDVENELSRIRSEKASIEHEALYLEADLEVVQTEKLCLEKDNENKQKVIVCLEEELSVVTSERNQLRGELDTMSKKTTALDQLSEKMKEKTQELESHQSECLHCIQVAEAEVKEKTELLQTLSSDVSELLKDKTHLQEKLQSLEKDSQALSLTKCELENQIAQLNKEKELLVKESESLQARLSESDYEKLNVSKALEAALVEKGEFALRLSSTQEEVHQLRRGIEKLRVRIEADEKKQLHIAEKLKERERENDSLKDKVENLERELQMSEENQELVILDAENSKAEVETLKTQIEEMARSLKVFELDLVTLRSEKENLTKQIQEKQGQLSELDKLLSSFKSLLEEKEQAEIQIKEESKTAVEMLQNQLKELNEAVAALCGDQEIMKATEQSLDPPIEEEHQLRNSIEKLRARLEADEKKQLCVLQQLKESEHHADLLKGRVENLERELEIARTNQEHAALEAENSKGEVETLKAKIEGMTQSLRGLELDVVTIRSEKENLTNELQKEQERISELEIINSSFENILQEKEQEKVQMKEKSSTAMEMLQTQLKELNERVAALHNDQEACKAKEQNLSSQVECLELEKAQLLQGLDEAKNNYIVLQSSVNGLIQEVEDGKQKLEKKDEEISRLKNQIQDQEQLVSKLSQVEGEHQLWKEQNLELRNLTVELEQKIQVLQSKNASLQDTLEVLQSSYKNLENELELTKMDKMSFVEKVNKMTAKETELQREMHEMAQKTAELQEELSGEKNRLAGELQLLLEEIKSSKDQLKELTLENSELKKSLDCMHKDQVEKEGKVREEIAEYQLRLHEAEKKHQALLLDTNKQYEVEIQTYREKLTSKEECLSSQKLEIDLLKSSKEELNNSLKATTQILEELKKTKMDNLKYVNQLKKENERAQGKMKLLIKSCKQLEEEKEILQKELSQLQAAQEKQKTGTVMDTKVDELTTEIKELKETLEEKTKEADEYLDKYCSLLISHEKLEKAKEMLETQVAHLCSQQSKQDSRGSPLLGPVVPGPSPIPSVTEKRLSSGQNKASGKRQRSSGIWENGRGPTPATPESFSKKSKKAVMSGIHPAEDTEGTEFEPEGLPEVVKKGFADIPTGKTSPYILRRTTMATRTSPRLAAQKLALSPLSLGKENLAESSKPTAGGSRSQKVKVAQRSPVDSGTILREPTTKSVPVNNLPERSPTDSPREGLRVKRGRLVPSPKAGLESNGSENCKVQ

SEQ ID NO: 8295 - protein, 1187 aa, Homo sapiens
MPFGLKLRRTRRYNVLSKNCFVTRIRLLDSNVIECTLSVESTGQECLEAVAQRLELRETHYFGLWFLSKSQQARWVELEKPLKKHLDKFANEPLLFFGVMFYVPNVSWLQQEATRYQYYLQVKKDVLEGRLRCTLDQVIRLAGLAVQADFGDYNQFDSQDFLREYVLFPMDLALEEAVLEELTQKVAQEHKAHSGILPAEAELMYINEVERLDGFGQEIFPVKDNHGNCVHLGIFFMGIFVRNRIGRQAVIYRWNDMGNITHNKSTILVELINKEETALFHTDDIENAKYISRLFATRHKFYKQNKICTEQSNSPPPIRRQPTWSRSSLPRQQPYILPPVHVQCGEHYSETHTSQDSIFHGNEEALYCNSHNSLDLNYLNGTVTNGSVCSVHSVNSLNCSQSFIQASPVSSNLSIPGSDIMRADYIPSHRHSAIIVPSYRPTPDYETVMRQMKRGILHTDSQSQSLRNLNIINTHAYNQPEDLVYSQPEMRERHPYTVPYGPQGVYSNKLVSPSDQRNPKNNVVPSKPGASAISHTVSTPELANMQLQGSHNYSTAHMLKNYLFRPPPPYPRPRPATSTPDLASHRHKYVSGSSPDLVTRKVQLSVKTFQEDSSPVVHQSLQEVSEPLTATKHHGTVNKRHSLEVMNSMVRGMEAMTLKSLHLPMARRNTLREQGPPEEGSGSHEVPQLPQYHHKKTFSDATMLIHSSESEEEEEEAPESVPQIPMLREKMEYSAQLQAALARIPNKPPPEYPGPRKSVSNGALRQDQASLPPAMARARVLRHGPAKAISMSRTDPPAVNGASLGPSISEPDLTSVKERVKKEPVKERPVSEMFSLEDSIIEREMMIRNLEKQKMAGLEAQKRPLMLAALNGLSVARVSGREENRVDATRVPMDERFRTLKKKLEEGMVFTEYEQIPKKKANGIFSTAALPENAERSRIREVVPYEENRVELIPTKENNTGYINASHIKVVVGGAEWHYIATQGPLPHTCHDFWQMVWEQGVNVIAMVTAEEEGGRTKSHRYWPKLGSKHSSATYGKFKVTTKFRTDSVCYATTGLKVKHLLSGQERTVWHLQYTDWPDHGCPEDVQGFLSYLEEIQSVRRHTNSMLEGTKNRHPPIVVHCSAGVGRTGVLILSELMIYCLEHNEKVEVPMMLRLLREQRMFMIQTIAQYKFVYQVLIQFLQNSRLI

SEQ ID NO: 8296 - protein, 737 aa, Homo sapiens; identical to SEQ ID NO: 1483

SEQ ID NO: 8297 - protein, 1054 aa, Homo sapiens
MTSYRERSADLARFYTVTEPQRHPRGYTVYKVTARIIVWKRYSDFKKLHKELWQIHKNLFRHSELFPPFAKGIVFGRFDETVIEERRQCAEDLLQFSANIPALYNSKQLEDFFKGGIINDSSELIGPAEAHSDSLIDTFPECSTEGFSSDSDLVSLTVDVDSLAELDDGMASNQNSPIRTFGLNLSSDSSALGAVASDSEQSKTEEERESRSLFPGSLKPKLGKRDYLEKAGELIKLALKKEEEDDYEAASDFYRKGVDLLLEGVQGESSPTRREAVKRRTAEYLMRAESISSLYGKPQLDDVSQPPGSLSSRPLWNLRSPAEELKAFRVLGVIDKVLLVMDTRTEQTFILKGLRKSSEYSRNRKTIIPRCVPNMVCLHKYIISEESVFLVLQHAEGGKLWSYISKFLNRSPEESFDIKEVKKPTLAKVHLQQPTSSPQDSSSFESRGSDGGSMLKALPLKSSLTPSSQDDSNQEDDGQDSSPKWPDSGSSSEEECTTSYLTLCNEYGQEKIEPGSLNEEPFMKTEGNGVDTKAIKSFPAHLAADSDSPSTQLRAHELKFFPNDDPEAVSSPRTSDSLSRSKNSPMEFFRIDSKDSASELLGLDFGEKLYSLKSEPLKPFFTLPDGDSASRSFNTSESKVEFKAQDTISRGSDDSVPVISFKDAAFDDVSGTDEGRPDLLVNLPGELESTREAAAMGPTKFTQTNIGIIENKLLEAPDVLCLRLSTEQCQAHEEKGIEELSDPSGPKSYSITEKHYAQEDPRMLFVAAVDHSSSGDMSLLPSSDPKFQGLGVVESAVTANNTEESLFRICSPLSGANEYIASTDTLKTEEVLLFTDQTDDLAKEEPTSLFQRDSETKGESGLVLEGDKEIHQIFEDLDKKLALASRFYIPEGCIQRWAAEMVVALDALHREGIVCRDLNPNNILLNDRGHIQLTYFSRWSEVEDSCDSDAIERMYCAPEVGAITEETEACDWWSLGAVLFELLTGKTLVECHPAGINTHTTLNMPECVSEEARSLIQQLLQFNPLERLGAGVAGVEDIKSHPFFTPVDWAELMR

SEQ ID NO: 8298 - protein, 1066 aa, Homo sapiens
MTSYRERSADLARFYTVTEPQRHPRGYTVYKVTARVVSRRNPEDVQEIIVWKRYSDFKKLHKELWQIHKNLFRHSELFPPFAKGIVFGRFDETVIEERRQCAEDLLQFSANIPALYNSKQLEDFFKGGIINDSSELIGPAEAHSDSLIDTFPECSTEGFSSDSDLVSLTVDVDSLAELDDGMASNQNSPIRTFGLNLSSDSSALGAVASDSEQSKTEEERESRSLFPGSLKPKLGKRDYLEKAGELIKLALKKEEEDDYEAASDFYRKGVDLLLEGVQGESSPTRREAVKRRTAEYLMRAESISSLYGKPQLDDVSQPPGSLSSRPLWNLRSPAEELKAFRVLGVIDKVLLVMDTRTEQTFILKGLRKSSEYSRNRKTIIPRCVPNMVCLHKYIISEESVFLVLQHAEGGKLWSYISKFLNRSPEESFDIKEVKKPTLAKVHLQQPTSSPQDSSSFESRGSDGGSMLKALPLKSSLTPSSQDDSNQEDDGQDSSPKWPDSGSSSEEECTTSYLTLCNEYGQEKIEPGSLNEEPFMKTEGNGVDTKAIKSFPAHLAADSDSPSTQLRAHELKFFPNDDPEAVSSPRTSDSLSRSKNSPMEFFRIDSKDSASELLGLDFGEKLYSLKSEPLKPFFTLPDGDSASRSFNTSESKVEFKAQDTISRGSDDSVPVISFKDAAFDDVSGTDEGRPDLLVNLPGELESTREAAAMGPTKFTQTNIGIIENKLLEAPDVLCLRLSTEQCQAHEEKGIEELSDPSGPKSYSITEKHYAQEDPRMLFVAAVDHSSSGDMSLLPSSDPKFQGLGVVESAVTANNTEESLFRICSPLSGANEYIASTDTLKTEEVLLFTDQTDDLAKEEPTSLFQRDSETKGESGLVLEGDKEIHQIFEDLDKKLALASRFYIPEGCIQRWAAEMVVALDALHREGIVCRDLNPNNILLNDRGHIQLTYFSRWSEVEDSCDSDAIERMYCAPEVGAITEETEACDWWSLGAVLFELLTGKTLVECHPAGINTHTTLNMPECVSEEARSLIQQLLQFNPLERLGAGVAGVEDIKSHPFFTPVDWAELMR

SEQ ID NO: 8299 - protein, 554 aa, Homo sapiens
MPTVDDILEQVGESGWFQKQAFLILCLLSAAFAPICVGIVFLGFTPDHHCQSPGVAELSQRCGWSPAEELNYTVPGLGPAGEAFLGQCRRYEVDWNQSALSCVDPLASLATNRSHLPLGPCQDGWVYDTPGSSIVTEFNLVCADSWKLDLFQSCLNAGFLFGSLGVGYFADRFGRKLCLLGTVLVNAVSGVLMAFSPNYMSMLLFRLLQGLVSKGNWMAGYTLITEFVGSGSRRTVAIMYQMAFTVGLVALTGLAYALPHWRWLQLAVSLPTFLFLLYYWCVPESPRWLLSQKRNTEAIKIMDHIAQKNGKLPPADLKMLSLEEDVTEKLSPSFADLFRTPRLRKRTFILMYLWFTDSVLYQGLILHMGATSGNLYLDFLYSALVEIPGAFIALITIDRVGRIYPMAMSNLLAGAACLVMIFISPDLHWLNIIIMCVGRMGITIAIQMICLVNAELYPTFVRNLGVMVCSSLCDIGGIITPFIVFRLREVWQALPLILFAVLGLLAAGVTLLLPETKGVALPETMKDAENLGRKAKPKENTIYLKVQTSEPSGT

SEQ ID NO: 8300 - protein, 273 aa, Homo sapiens
MRAAGVGLVDCHCHLSAPDFDRDLDDVLEKAKKANVVALVAVAEHSGEFEKIMQLSERYNGFVLPCLGVHPVQGLPPEDQRSVTLKDLDVALPIIENYKDRLLAIGEVGLDFSPRFAGTGEQKEEQRQVLIRQIQLAKRLNLPVNVHSRSAGRPTINLLQEQGAEKVLLHAFDGRPSVAMEGVRAGYFFSIPPSIIRSGQQKLVKQLPLTSICLETDSPALGPEKQVRNEPWNISISAEYIAQVKGISVEEVIEVTTQNALKLFPKLRHLLQK

SEQ ID NO: 8301 - protein, 274 aa, Homo sapiens
MRAAGVGLVDCHCHLSAPDFDRDLDDVLEKAKKANVVALVAVAEHSGEFEKIMQLSERYNGFVLPCLGVHPVQGLPPEDQRSVTLKDLDVALPIIENYKDRLLAIGEVGLDFSPRFAGTGEQKEEQRQVLIRQIQLAKRLNLPVNVHSRSAGRPTINLLQEQGAEKVLLHAFDGRPSVAMEGVRAGYFFSIPPSIIRSGQKQKLVKQLPLTSICLETDSPALGPEKQVRNEPWNISISAEYIAQVKGISVEEVIEVTTQNALKLFPKLRHLLQK

SEQ ID NO: 8302 - protein, 281 aa, Homo sapiens
MAGSPELVVLDPPWDKELAAGTESQALVSATPREDFRVRCTSKRAVTEMLQLCGRFVQKLGDALPEEIREPALRDAQWTFESAVQENISINGQAWQEASDNCFMDSDIKVLEDQFDEIIVDIATKRKQYPRKILECVIKTIKAKQEILKQYHPVVHPLDLKYDPDPAPHMENLKCRGETVAKEISEAMKSLPALIEQGEGFSQVLRMQPVIHLQRIHQEVFSSCHRKPDAKPENFITQIETTPTETASRKTSDMVLKRKQTKDCPQRKWYPLRPKKINLDT

SEQ ID NO: 8303 - protein, 730 aa, Homo sapiens
MLFNSVLRQPQLGVLRNGWSSQYPLQSLLTGYQCSGNDEHTSYGETGVPVPPFGCTFSSAPNMEHVLAVANEEGFVRLYNTESQSFRKKCFKEWMAHWNAVFDLAWVPGELKLVTAAGDQTAKFWDVKAGELIGTCKGHQCSLKSVAFSKFEKAVFCTGGRDGNIMVWDTRCNKKDGFYRQVNQISGAHNTSDKQTPSKPKKKQNSKGLAPSVDFQQSVTVVLFQDENTLVSAGAVDGIIKVWDLRKNYTAYRQEPIASKSFLYPGSSTRKLGYSSLILDSTGSTLFANCTDDNIYMFNMTGLKTSPVAIFNGHQNSTFYVKSSLSPDDQFLVSGSSDEAAYIWKVSTPWQPPTVLLGHSQEVTSVCWCPSDFTKIATCSDDNTLKIWRLNRGLEEKPGGDKLSTVGWASQKKKESRPGLVTVTSSQSTPAKAPRAKCNPSNSSPSSAACAPSCAGDLPLPSNTPTFSIKTSPAKARSPINRRGSVSSVSPKPPSSFKMSIRNWVTRTPSSSPPITPPASETKIMSPRKALIPVSQKSSQAEACSESRNRVKRRLDSSCLESVKQKCVKSCNCVTELDGQVENLHLDLCCLAGNQEDLSKDSLGPTKSSKIEGAGTSISEPPSPISPYASESCGTLPLPLRPCGEGSEMVGKENSSPENKNWLLAMAAKRKAENPSPRSPSSQTPNSRRQSGKKLPSPVTITPSSMRKICTYFHRKSQEDFCGPEHSTEL

SEQ ID NO: 8304 - protein, 942 aa, Homo sapiens
MASNSTKSFLADAGYGEQELDANSALMELDKGLRSGKLGEQCEAVVRFPRLFQKYPFPILINSAFLKLADVFRVGNNFLRLCVLKVTQQSEKHLEKILNVDEFVKRIFSVIHSNDPVARAITLRMLGSLASIIPERKNAHHSIRQSLDSHDNVEVEAAVFAAANFSAQSKDFAVGICNKISEMIQGLATPVDLKLKLIPILQHMHHDAILASSARQLLQQLVTSYPSTKMVIVSLHTFTLLAASSLVDTPKQIQLLLQYLKNDPRKAVKRLAIQDLKLLANKTPHTWSRENIQALCECALQTPYDSLKLGMLSVLSTLSGTIAIKHYFSIVPGNVSSSPRSSDLVKLAQECCYHNNRGIAAHGVRVLTNITVSCQEKDLLALEQDAVFGLESLLVLCSQDDSPGAQATLKIALNCMVKLAKGRPHLSQSVVETLLTQLHSAQDAARILMCHCLAAIAMQLPVLGDGMLGDLMELYKVIGRSATDKQQELLVSLATVIFVASQKALSVESKAVIKQQLESVSNGWTVYRIARQASRMGNHDMAKELYQSLLTQVASEHFYFWLNSLKEFSHAEQCLTGLQEENYSSALSCIAESLKFYHKGIASLTAASTPLNPLSFQCEFVKLRIDLLQAFSQLICTCNSLKTSPPPAIATTIAMTLGNDLQRCGRISNQMKQSMEEFRSLASRYGDLYQASFDADSATLRNVELQQQSCLLISHAIEALILDPESASFQEYGSTGTAHADSEYERRMMSVYNHVLEEVESLNRKYTPVSYMRYFFQKLQSTSIKLALSPSPRNPAEPIAVQNNQQLALKVEGVVQHGSKPGLFRKIQSVCLNVSSTLQSKSGQDYKIPIDNMTNEMEQRVEPHNDYFSTQFLLNFAILGTHNITVESSVKDANGIVWKTGPRTTIFVKSLEDPYSQQIRLQQQQAQQPLQQQQQRNAYTRF

SEQ ID NO: 8305 - protein, 948 aa, Homo sapiens
MASNSTKSFLADAGYGEQELDANSALMELDKGLRSGKLGEQCEAVVRFPRLFQKYPFPILINSAFLKLADVFRVGNNFLRLCVLKVTQQSEKHLEKILNVDEFVKRIFSVIHSNDPVARAITLRMLGSLASIIPERKNAHHSIRQSLDSHDNVEVEAAVFAAANFSAQSKDFAVGICNKISEMIQGLATPVDLKLKLIPILQHMHHDAILASSARQLLQQLVTSYPSTKMVIVSLHTFTLLAASSLVDTPKQIQLLLQYLKNDPRKAVKRLAIQDLKLLANKTPHTWSRENIQALCECALQTPYDSLKLGMLSVLSTLSGTIAIKHYFSIVPGNVSSSPRSSDLVKLAQECCYHNNRGIAAHGVRVLTNITVSCQEKDLLALEQDAVFGLESLLVLCSQDDSPGAQATLKIALNCMVKLAKGRPHLSQSVVETLLTQLHSAQDAARILMCHCLAAIAMQLPVLGDGMLGDLMELYKVIGRSATDKQQELLVSLATVIFVASQKALSVESKAVIKQQLESVSNGWTVYRIARQASRMGNHDMAKELYQSLLTQVASEHFYFWLNSLKEFSHAEQCLTGLQEENYSSALSCIAESLKFYHKGIASLTAASTPLNPLSFQCEFVKLRIDLLQAFSQLICTCNSLKTSPPPAIATTIAMTLGNDLQRCGRISNQMKQSMEEFRSLASRYGDLYQASFDADSATLRNVELQQQSCLLISHAIEALILDPESASFQEYGSTGTAHADSEYERRMMSVYNHVLEEHTACLCNAIIALLKVPLSFQRYFFQKLQSTSIKLALSPSPRNPAEPIAVQNNQQLALKVEGVVQHGSKPGLFRKIQSVCLNVSSTLQSKSGQDYKIPIDNMTNEMEQRVEPHNDYFSTQFLLNFAILGTHNITVESSVKDANGIVWKTGPRTTIFVKSLEDPYSQQIRLQQQQAQQPLQQQQQRNAYTRF

SEQ ID NO: 8306 - protein, 962 aa, Homo sapiens
MASNSTKSFLADAGYGEQELDANSALMELDKGLRSGKLGEQCEAVVRFPRLFQKYPFPILINSAFLKLADVFRVGNNFLRLCVLKVTQQSEKHLEKILNVDEFVKRIFSVIHSNDPVARAITLRMLGSLASIIPERKNAHHSIRQSLDSHDNVEVEAAVFAAANFSAQSKDFAVGICNKISEMIQGLATPVDLKLKLIPILQHMHHDAILASSARQLLQQLVTSYPSTKMVIVSLHTFTLLAASSLVDTPKQIQLLLQYLKNDPRKAVKRLAIQDLKLLANKTPHTWSRENIQALCECALQTPYDSLKLGMLSVLSTLSGTIAIKHYFSIVPGNVSSSPRSSDLVKLAQECCYHNNRGIAAHGVRVLTNITVSCQEKDLLALEQDAVFGLESLLVLCSQDDSPGAQATLKIALNCMVKLAKGRPHLSQSVVETLLTQLHSAQDAARILMCHCLAAIAMQLPVLGDGMLGDLMELYKVIGRSATDKQQELLVSLATVIFVASQKALSVESKAVIKQQLESVSNGWTVYRIARQASRMGNHDMAKELYQSLLTQVASEHFYFWLNSLKEFSHAEQCLTGLQEENYSSALSCIAESLKFYHKGIASLTAASTPLNPLSFQCEFVKLRIDLLQAFSQLICTCNSLKTSPPPAIATTIAMTLGNDLQRCGRISNQMKQSMEEFRSLASRYGDLYQASFDADSATLRNVELQQQSCLLISHAIEALILDPESASFQEYGSTGTAHADSEYERRMMSVYNHVLEEVESLNRKYTPVSYMHTACLCNAIIALLKVPLSFQRYFFQKLQSTSIKLALSPSPRNPAEPIAVQNNQQLALKVEGVVQHGSKPGLFRKIQSVCLNVSSTLQSKSGQDYKIPIDNMTNEMEQRVEPHNDYFSTQFLLNFAILGTHNITVESSVKDANGIVWKTGPRTTIFVKSLEDPYSQQIRLQQQQAQQPLQQQQQRNAYTRF

SEQ ID NO: 8307 - protein, 195 aa, Homo sapiens
MSLISWLRWNEAPSRLSTRSPAEMVLETLMMELTGQMREAERQQRERSNAVRKVCTGVDYSWLASTPRSTYDLSPIERLQLEDVCVKIHPSYCGPAILRFRQLLAEQEPEVQEVSQLFRSVLQEVLERMKQEEEAHKLTRQWSLRPRGSLATFKTRARISPFASDIRTISEDVERDTPPPLRSWSMPEFRAPKAD

SEQ ID NO: 8308 - protein, 495 aa, Homo sapiens
MRVGAEYQARIPEFDPGATKYTDKDNGGMLVWSPYHSIPDAKLDEYIAIAKEKHGYNVEQALGMLFWHKHNIEKSLADLPNFTPFPDEWTVEDKVLFEQAFSFHGKSFHRIQQMLPDKTIASLVKYYYSWKKTRSRTSLMDRQARKLANRHNQGDSDDDVEETHPMDGNDSDYDPKKEAKKEGNTEQPVQTSKIGLGRREYQSLQHRHHSQRSKCRPPKGMYLTQEDVVAVSCSPNAANTILRQLDMELISLKRQVQNAKQVNSALKQKMEGGIEEFKPPESNQKINARWTTEEQLLAVQGVRKYGKDFQAIADVIGNKTVGQVKNFFVNYRRRFNLEEVLQEWEAEQGTQASNGDASTLGEETKSASNVPSGKSTDEEEEAQTPQAPRTLGPSPPAPSSTPTPTAPIATLNQPPPLLRPTLPAAPALHRQPPPLQQQARFIQPRPTLNQPPPPLIRPANSMPPRLNPRPVLSTVGGQQPPSLIGIQTDSQSSLH

SEQ ID NO: 8309 - protein, 436 aa, Homo sapiens
MPGMMEKGPELLGKNRSANGSAKSPAGGGGSGASSTNGGLHYSEPESGCSSDDEHDVGMRVGAEYQARIPEFDPGATKYTDKDNGGMLVWSPYHSIPDAKLDEYIAIAKEKHGYNVEQALGMLFWHKHNIEKSLADLPNFTPFPDEWTVEDKVLFEQAFSFHGKSFHRIQQMLPDKTIASLVKYYYSWKKTRSRTSLMDRQARKLANRHNQGDSDDDVEETHPMDGNDSDYDPKKEAKKEGNTEQPVQTSKIGLGRREYQSLQHRHHSQRSKCRPPKGMYLTQEDVVAVSCSPNAANTILRQLDMELISLKRQVQNAKQVNSALKQKMEGGIEEFKPPESNQKINARWTTEEQLLAVQGTDPTGSSDTGSITSCPIIHSNTNSPYCHSEPASTTSSSNTACCPGSSPAASSTPAAGSVHPAPANFKSASTTSYSPC

SEQ ID NO: 8310 - protein, 913 aa, Homo sapiens
MTMAGGRRGLVAPQNTFLENIVRRSNDTNFVLGNAQIVDWPIVYSNDGFCKLSGYHRAEVMQKSSTCSFMYGELTDKDTIEKVRQTFENYEMNSFEILMYKKNRTPVWFFVKIAPIRNEQDKVVLFLCTFSDITAFKQPIEDDSCKGWGKFARLTRALTSSRGVLQQLAPSVQKGENVHKHSRLAEVLQLGSDILPQYKQEAPKTPPHIILHYCVFKTTWDWIILILTFYTAILVPYNVSFKTRQNNVAWLVVDSIVDVIFLVDIVLNFHTTFVGPAGEVISDPKLIRMNYLKTWFVIDLLSCLPYDVINAFENVDEGISSLFSSLKVVRLLRLGRVARKLDHYIEYGAAVLVLLVCVFGLAAHWMACIWYSIGDYEIFDEDTKTIRNNSWLYQLAMDIGTPYQFNGSGSGKWEGGPSKNSVYISSLYFTMTSLTSVGFGNIAPSTDIEKIFAVAIMMIGSLLYATIFGNVTTIFQQMYANTNRYHEMLNSVRDFLKLYQVPKGLSERVMDYIVSTWSMSRGIDTEKVLQICPKDMRADICVHLNRKVFKEHPAFRLASDGCLRALAMEFQTVHCAPGDLIYHAGESVDSLCFVVSGSLEVIQDDEVVAILGKGDVFGDVFWKEATLAQSCANVRALTYCDLHVIKRDALQKVLEFYTAFSHSFSRNLILTYNLRKRIVFRKISDVKREEEERMKRKNEAPLILPPDHPVRRLFQRFRQQKEARLAAERGGRDLDDLDVEKGNVLTEHASANHSLVKASVVTVRESPATPVSFQAASTSGVPDHAKLQAPGSECLGPKGGGGDCAKRKSWARFKDACGKSEDWNKVSKAESMETLPERTKASGEATLKKTDSCDSGITKSDLRLDNVGEARSPQDRSPILAEVKHSFYPIPEQTLQATVLEGLTLLPRLVSNS

SEQ ID NO: 8311 - protein, 183 aa, Homo sapiens
MRLDGLTPPALPRCVSTMFSFTGMWRYFDVGLHNFLIRYVYIPVGGSQHGLLGTLFSTAMTFAFVSYWHGGYDYLWCWAALNWLGVTVENGVRRLVETPCIQDSLARYFSPQARRRFHAALASCSTSMLILSNLVFLGGNEVGKTYWNRIFIQGWPWVTLSVLGFLYCYSHVGIAWAQTYATD

SEQ ID NO: 8312 - protein, 467 aa, Homo sapiens
MALHPRRVRLKPWLVAQVDSGLYPGLIWLHRDSKRFQIPWKHATRHSPQQEEENTIFKAWAVETGKYQEGVDDPDPAKWKAQLRCALNKSREFNLMYDGTKEVPMNPVKIYQVCDIPQPQGSIINPGSTGSAPWDEKDNDVDEEDEEDELDQSQHHVPIQDTFPFLNINGSPMAPASVGNCSVGNCSPEAVWPKTEPLEMEVPQAPIQPFYSSPELWISSLPMTDLDIKFQYRGKEYGQTMTVSNPQGCRLFYGDLGPMPDQEELFGPVSLEQVKFPGPEHITNEKQKLFTSKLLDVMDRGLILEVSGHAIYAIRLCQCKVYWSGPCAPSLVAPNLIERQKKVKLFCLETFLSDLIAHQKGQIEKQPPFEIYLCFGEEWPDGKPLERKLILVQVIPVVARMIYEMFSGDFTRSFDSGSVRLQISTPDIKDNIVAQLKQLYRILQTQESWQPMQPTPSMQLPPALPPQ

SEQ ID NO: 8313 - protein, 1894 aa, Homo sapiens
MEQRRPWPRALEVDSRSVVLLSVVWVLLAPPAAGMPQFSTFHSENRDWTFNHLTVHQGTGAVYVGAINRVYKLTGNLTIQVAHKTGPEEDNKSCYPPLIVQPCSEVLTLTNNVNKLLIIDYSENRLLACGSLYQGVCKLLRLDDLFILVEPSHKKEHYLSSVNKTGTMYGVIVRSEGEDGKLFIGTAVDGKQDYFPTLSSRKLPRDPESSAMLDYELHSDFVSSLIKIPSDTLALVSHFDIFYIYGFASGGFVYFLTVQPETPEGVAINSAGDLFYTSRIVRLCKDDPKFHSYVSLPFGCTRAGVEYRLLQAAYLAKPGDSLAQAFNITSQDDVLFAIFSKGQKQYHHPPDDSALCAFPIRAINLQIKERLQSCYQGEGNLELNWLLGKDVQCTKAPVPIDDNFCGLDINQPLGGSTPVEGLTLYTTSRDRMTSVASYVYNGYSVVFVGTKSGKLKKIRADGPPHGGVQYEMVSVLKDGSPILRDMAFSIDQRYLYVMSERQVTRVPVESCEQYTTCGECLSSGDPHCGWCALHNMCSRRDKCQQAWEPNRFAASISQCVSLAVHPSSISVSEHSRLLSLVVSDAPDLSAGIACAFGNLTEVEGQVSGSQVICISPGPKDVPVIPLDQDWFGLELQLRSKETGKIFVSTEFKFYNCSAHQLCLSCVNSAFRCHWCKYRNLCTHDPTTCSFQEGRINISEDCPQLVPTEEILIPVGEVKPITLKARNLPQPQSGQRGYECVLNIQGAIHRVPALRFNSSSVQCQNSSYQYDGMDISNLAVDFAVVWNGNFIIDNPQDLKVHLYKCAAQRESCGLCLKADRKFECGWCSGERRCTLHQHCTSPSSPWLDWSSHNVKCSNPQITEILTVSGPPEGGTRVTIHGVNLGLDFSEIAHHVQVAGVPCTPLPGEYIIAEQIVCEMGHALVGTTSGPVRLCIGECKPEFMTKSHQQYTFVNPSVLSLNPIRGPESGGTMVTITGHYLGAGSSVAVYLGNQTCEFYGRSMSEIVCVSPPSSNGLGPVPVSVSVDRAHVDSNLQFEYIDDPRVQRIEPEWSIASGHTPLTITGFNLDVIQEPRIRVKFNGKESVNVCKVVNTTTLTCLAPSLTTDYRPGLDTVERPDEFGFVFNNVQSLLIYNDTKFIYYPNPTFELLSPTGVLDQKPGSPIILKGKNLCPPASGGAKLNYTVLIGETPCAVTVSETQLLCEPPNLTGQHKVMVHVGGMVFSPGSVSVISDSLLTLPAIVSIAAGGSLLLIIVIIVLIAYKRKSRENDLTLKRLQMQMDNLESRVALECKEAFAELQTDINELTSDLDRSGIPYLDYRTYAMRVLFPGIEDHPVLRELEVQGNGQQHVEKALKLFAQLINNKVFLLTFIRTLELQRSFSMRDRGNVASLIMTGLQGRLEYATDVLKQLLSDLIDKNLENKNHPKLLLRRTESVAEKMLTNWFAFLLHKFLKECAGEPLFMLYCAIKQQMEKGPIDAITGEARYSLSEDKLIRQQIEYKTLILNCVNPDNENSPEIPVKVLNCDTITQVKEKILDAVYKNVPYSQRPRAVDMDLEWRQGRIARVVLQDEDITTKIEGDWKRLNTLMHYQVSDRSVVALVPKQTSSYNIPASASISRTSISRYDSSFRYTGSPDSLRSRAPMITPDLESGVKVWHLVKNHDHGDQKEGDRGSKMVSEIYLTRLLATKGTLQKFVDDLFETLFSTVHRGSALPLAIKYMFDFLDEQADRHSIHDTDVRHTWKSNCLPLRFWVNVIKNPQFVFDIHKGSITDACLSVVAQTFMDSCSTSEHRLGKDSPSNKLLYAKDIPSYKSWVERYYADIAKLPAISDQDMNAYLAEQSRLHAVEFNMLSALNEIYSYVSKYSEELIGALEQDEQARRQRLAYKVEQLINAMSIES

SEQ ID NO: 8314 - protein, 2489 aa, Homo sapiens
MGASSPRSPEPVGPPAPGLPFCCGGSLLAVVVLLALPVAWGQCNAPEWLPFARPTNLTDEFEFPIGTYLNYECRPGYSGRPFSIICLKNSVWTGAKDRCRRKSCRNPPDPVNGMVHVIKGIQFGSQIKYSCTKGYRLIGSSSATCIISGDTVIWDNETPICDRIPCGLPPTITNGDFISTNRENFHYGSVVTYRCNPGSGGRKVFELVGEPSIYCTSNDDQVGIWSGPAPQCIIPNKCTPPNVENGILVSDNRSLFSLNEVVEFRCQPGFVMKGPRRVKCQALNKWEPELPSCSRVCQPPPDVLHAERTQRDKDNFSPGQEVFYSCEPGYDLRGAASMRCTPQGDWSPAAPTCEVKSCDDFMGQLLNGRVLFPVNLQLGAKVDFVCDEGFQLKGSSASYCVLAGMESLWNSSVPVCEQIFCPSPPVIPNGRHTGKPLEVFPFGKTVNYTCDPHPDRGTSFDLIGESTIRCTSDPQGNGVWSSPAPRCGILGHCQAPDHFLFAKLKTQTNASDFPIGTSLKYECRPEYYGRPFSITCLDNLVWSSPKDVCKRKSCKTPPDPVNGMVHVITDIQVGSRINYSCTTGHRLIGHSSAECILSGNAAHWSTKPPICQRIPCGLPPTIANGDFISTNRENFHYGSVVTYRCNPGSGGRKVFELVGEPSIYCTSNDDQVGIWSGPAPQCIIPNKCTPPNVENGILVSDNRSLFSLNEVVEFRCQPGFVMKGPRRVKCQALNKWEPELPSCSRVCQPPPDVLHAERTQRDKDNFSPGQEVFYSCEPGYDLRGAASMRCTPQGDWSPAAPTCEVKSCDDFMGQLLNGRVLFPVNLQLGAKVDFVCDEGFQLKGSSASYCVLAGMESLWNSSVPVCEQIFCPSPPVIPNGRHTGKPLEVFPFGKTVNYTCDPHPDRGTSFDLIGESTIRCTSDPQGNGVWSSPAPRCGILGHCQAPDHFLFAKLKTQTNASDFPIGTSLKYECRPEYYGRPFSITCLDNLVWSSPKDVCKRKSCKTPPDPVNGMVHVITDIQVGSRINYSCTTGHRLIGHSSAECILSGNAAHWSTKPPICQRIPCGLPPTIANGDFISTNRENFHYGSVVTYRCNPGSGGRKVFELVGEPSIYCTSNDDQVGIWSGPAPQCIIPNKCTPPNVENGILVSDNRSLFSLNEVVEFRCQPGFVMKGPRRVKCQALNKWEPELPSCSRVCQPPPDVLHAERTQRDKDNFSPGQEVFYSCEPGYDLRGAASMRCTPQGDWSPAAPTCEVKSCDDFMGQLLNGRVLFPVNLQLGAKVDFVCDEGFQLKGSSASYCVLAGMESLWNSSVPVCEQIFCPSPPVIPNGRHTGKPLEVFPFGKAVNYTCDPHPDRGTSFDLIGESTIRCTSDPQGNGVWSSPAPRCGILGHCQAPDHFLFAKLKTQTNASDFPIGTSLKYECRPEYYGRPFSITCLDNLVWSSPKDVCKRKSCKTPPDPVNGMVHVITDIQVGSRINYSCTTGHRLIGHSSAECILSGNTAHWSTKPPICQRIPCGLPPTIANGDFISTNRENFHYGSVVTYRCNLGSRGRKVFELVGEPSIYCTSNDDQVGIWSGPAPQCIIPNKCTPPNVENGILVSDNRSLFSLNEVVEFRCQPGFVMKGPRRVKCQALNKWEPELPSCSRVCQPPPEILHGEHTPSHQDNFSPGQEVFYSCEPGYDLRGAASLHCTPQGDWSPEAPRCAVKSCDDFLGQLPHGRVLFPLNLQLGAKVSFVCDEGFRLKGSSVSHCVLVGMRSLWNNSVPVCEHIFCPNPPAILNGRHTGTPSGDIPYGKEISYTCDPHPDRGMTFNLIGESTIRCTSDPHGNGVWSSPAPRCELSVRAGHCKTPEQFPFASPTIPINDFEFPVGTSLNYECRPGYFGKMFSISCLENLVWSSVEDNCRRKSCGPPPEPFNGMVHINTDTQFGSTVNYSCNEGFRLIGSPSTTCLVSGNNVTWDKKAPICEIISCEPPPTISNGDFYSNNRTSFHNGTVVTYQCHTGPDGEQLFELVGERSIYCTSKDDQVGVWSSPPPRCISTNKCTAPEVENAIRVPGNRSFFTLTEIIRFRCQPGFVMVGSHTVQCQTNGRWGPKLPHCSRVCQPPPEILHGEHTLSHQDNFSPGQEVFYSCEPSYDLRGAASLHCTPQGDWSPEAPRCTVKSCDDFLGQLPHGRVLLPLNLQLGAKVSFVCDEGFRLKGRSASHCVLAGMKALWNSSVPVCEQIFCPNPPAILNGRHTGTPFGDIPYGKEISYACDTHPDRGMTFNLIGESSIRCTSDPQGNGVWSSPAPRCELSVPAACPHPPKIQNGHYIGGHVSLYLPGMTISYICDPGYLLVGKGFIFCTDQGIWSQLDHYCKEVNCSFPLFMNGISKELEMKKVYHYGDYVTLKCEDGYTLEGSPWSQCQADDRWDPPLAKCTSRTHDALIVGTLSGTIFFILLIIFLSWIILKHRKGNNAHENPKEVAIHLHSQGGSSVHPRTLQTNEENSRVLP

SEQ ID NO: 8315 - protein, 2039 aa, Homo sapiens
MGASSPRSPEPVGPPAPGLPFCCGGSLLAVVVLLALPVAWGQCNAPEWLPFARPTNLTDEFEFPIGTYLNYECRPGYSGRPFSIICLKNSVWTGAKDRCRRKSCRNPPDPVNGMVHVIKGIQFGSQIKYSCTKGYRLIGSSSATCIISGDTVIWDNETPICDRIPCGLPPTIANGDFISTNRENFHYGSVVTYRCNPGSGGRKVFELVGEPSIYCTSNDDQVGIWSGPAPQCIIPNKCTPPNVENGILVSDNRSLFSLNEVVEFRCQPGFVMKGPRRVKCQALNKWEPELPSCSRVCQPPPDVLHAERTQRDKDNFSPGQEVFYSCEPGYDLRGAASMRCTPQGDWSPAAPTCEVKSCDDFMGQLLNGRVLFPVNLQLGAKVDFVCDEGFQLKGSSASYCVLAGMESLWNSSVPVCEQIFCPSPPVIPNGRHTGKPLEVFPFGKTVNYTCDPHPDRGTSFDLIGESTIRCTSDPQGNGVWSSPAPRCGILGHCQAPDHFLFAKLKTQTNASDFPIGTSLKYECRPEYYGRPFSITCLDNLVWSSPKDVCKRKSCKTPPDPVNGMVHVITDIQVGSRINYSCTTGHRLIGHSSAECILSGNAAHWSTKPPICQRIPCGLPPTIANGDFISTNRENFHYGSVVTYRCNPGSGGRKVFELVGEPSIYCTSNDDQVGIWSGPAPQCIIPNKCTPPNVENGILVSDNRSLFSLNEVVEFRCQPGFVMKGPRRVKCQALNKWEPELPSCSRVCQPPPDVLHAERTQRDKDNFSPGQEVFYSCEPGYDLRGAASMRCTPQGDWSPAAPTCEVKSCDDFMGQLLNGRVLFPVNLQLGAKVDFVCDEGFQLKGSSASYCVLAGMESLWNSSVPVCEQIFCPSPPVIPNGRHTGKPLEVFPFGKAVNYTCDPHPDRGTSFDLIGESTIRCTSDPQGNGVWSSPAPRCGILGHCQAPDHFLFAKLKTQTNASDFPIGTSLKYECRPEYYGRPFSITCLDNLVWSSPKDVCKRKSCKTPPDPVNGMVHVITDIQVGSRINYSCTTGHRLIGHSSAECILSGNTAHWSTKPPICQRIPCGLPPTIANGDFISTNRENFHYGSVVTYRCNLGSRGRKVFELVGEPSIYCTSNDDQVGIWSGPAPQCIIPNKCTPPNVENGILVSDNRSLFSLNEVVEFRCQPGFVMKGPRRVKCQALNKWEPELPSCSRVCQPPPEILHGEHTPSHQDNFSPGQEVFYSCEPGYDLRGAASLHCTPQGDWSPEAPRCAVKSCDDFLGQLPHGRVLFPLNLQLGAKVSFVCDEGFRLKGSSVSHCVLVGMRSLWNNSVPVCEHIFCPNPPAILNGRHTGTPSGDIPYGKEISYTCDPHPDRGMTFNLIGESTIRCTSDPHGNGVWSSPAPRCELSVRAGHCKTPEQFPFASPTIPINDFEFPVGTSLNYECRPGYFGKMFSISCLENLVWSSVEDNCRRKSCGPPPEPFNGMVHINTDTQFGSTVNYSCNEGFRLIGSPSTTCLVSGNNVTWDKKAPICEIISCEPPPTISNGDFYSNNRTSFHNGTVVTYQCHTGPDGEQLFELVGERSIYCTSKDDQVGVWSSPPPRCISTNKCTAPEVENAIRVPGNRSFFTLTEIIRFRCQPGFVMVGSHTVQCQTNGRWGPKLPHCSRVCQPPPEILHGEHTLSHQDNFSPGQEVFYSCEPSYDLRGAASLHCTPQGDWSPEAPRCTVKSCDDFLGQLPHGRVLLPLNLQLGAKVSFVCDEGFRLKGRSASHCVLAGMKALWNSSVPVCEQIFCPNPPAILNGRHTGTPFGDIPYGKEISYACDTHPDRGMTFNLIGESSIRCTSDPQGNGVWSSPAPRCELSVPAACPHPPKIQNGHYIGGHVSLYLPGMTISYICDPGYLLVGKGFIFCTDQGIWSQLDHYCKEVNCSFPLFMNGISKELEMKKVYHYGDYVTLKCEDGYTLEGSPWSQCQADDRWDPPLAKCTSRTHDALIVGTLSGTIFFILLIIFLSWIILKHRKGNNAHENPKEVAIHLHSQGGSSVHPRTLQTNEENSRVLP

SEQ ID NO: 8316 - protein, 2039 aa, Homo sapiens
MGASSPRSPEPVGPPAPGLPFCCGGSLLAVVVLLALPVAWGQCNAPEWLPFARPTNLTDEFEFPIGTYLNYECRPGYSGRPFSIICLKNSVWTGAKDRCRRKSCRNPPDPVNGMVHVIKGIQFGSQIKYSCTKGYRLIGSSSATCIISGDTVIWDNETPICDRIPCGLPPTITNGDFISTNRENFHYGSVVTYRCNPGSGGRKVFELVGEPSIYCTSNDDQVGIWSGPAPQCIIPNKCTPPNVENGILVSDNRSLFSLNEVVEFRCQPGFVMKGPRRVKCQALNKWEPELPSCSRVCQPPPDVLHAERTQRDKDNFSPGQEVFYSCEPGYDLRGAASMRCTPQGDWSPAAPTCEVKSCDDFMGQLLNGRVLFPVNLQLGAKVDFVCDEGFQLKGSSASYCVLAGMESLWNSSVPVCEQIFCPSPPVIPNGRHTGKPLEVFPFGKTVNYTCDPHPDRGTSFDLIGESTIRCTSDPQGNGVWSSPAPRCGILGHCQAPDHFLFAKLKTQTNASDFPIGTSLKYECRPEYYGRPFSITCLDNLVWSSPKDVCKRKSCKTPPDPVNGMVHVITDIQVGSRINYSCTTGHRLIGHSSAECILSGNAAHWSTKPPICQRIPCGLPPTIANGDFISTNRENFHYGSVVTYRCNPGSGGRKVFELVGEPSIYCTSNDDQVGIWSGPAPQCIIPNKCTPPNVENGILVSDNRSLFSLNEVVEFRCQPGFVMKGPRRVKCQALNKWEPELPSCSRVCQPPPDVLHAERTQRDKDNFSPGQEVFYSCEPGYDLRGAASMRCTPQGDWSPAAPTCEVKSCDDFMGQLLNGRVLFPVNLQLGAKVDFVCDEGFQLKGSSASYCVLAGMESLWNSSVPVCEQIFCPSPPVIPNGRHTGKPLEVFPFGKTVNYTCDPHPDRGTSFDLIGESTIRCTSDPQGNGVWSSPAPRCGILGHCQAPDHFLFAKLKTQTNASDFPIGTSLKYECRPEYYGRPFSITCLDNLVWSSPKDVCKRKSCKTPPDPVNGMVHVITDIQVGSRINYSCTTGHRLIGHSSAECILSGNTAHWSTKPPICQRIPCGLPPTIANGDFISTNRENFHYGSVVTYRCNLGSRGRKVFELVGEPSIYCTSNDDQVGIWSGPAPQCIIPNKCTPPNVENGILVSDNRSLFSLNEVVEFRCQPGFVMKGPRRVKCQALNKWEPELPSCSRVCQPPPEILHGEHTPSHQDNFSPGQEVFYSCEPGYDLRGAASLHCTPQGDWSPEAPRCAVKSCDDFLGQLPHGRVLFPLNLQLGAKVSFVCDEGFRLKGSSVSHCVLVGMRSLWNNSVPVCEHIFCPNPPAILNGRHTGTPSGDIPYGKEISYTCDPHPDRGMTFNLIGESTIRCTSDPHGNGVWSSPAPRCELSVRAGHCKTPEQFPFASPTIPINDFEFPVGTSLNYECRPGYFGKMFSISCLENLVWSSVEDNCRRKSCGPPPEPFNGMVHINTDTQFGSTVNYSCNEGFRLIGSPSTTCLVSGNNVTWDKKAPICEIISCEPPPTISNGDFYSNNRTSFHNGTVVTYQCHTGPDGEQLFELVGERSIYCTSKDDQVGVWSSPPPRCISTNKCTAPEVENAIRVPGNRSFFTLTEIIRFRCQPGFVMVGSHTVQCQTNGRWGPKLPHCSRVCQPPPEILHGEHTLSHQDNFSPGQEVFYSCEPSYDLRGAASLHCTPQGDWSPEAPRCTVKSCDDFLGQLPHGRVLLPLNLQLGAKVSFVCDEGFRLKGRSASHCVLAGMKALWNSSVPVCEQIFCPNPPAILNGRHTGTPFGDIPYGKEISYACDTHPDRGMTFNLIGESSIRCTSDPQGNGVWSSPAPRCELSVPAACPHPPKIQNGHYIGGHVSLYLPGMTISYICDPGYLLVGKGFIFCTDQGIWSQLDHYCKEVNCSFPLFMNGISKELEMKKVYHYGDYVTLKCEDGYTLEGSPWSQCQADDRWDPPLAKCTSRTHDALIVGTLSGTIFFILLIIFLSWIILKHRKGNNAHENPKEVAIHLHSQGGSSVHPRTLQTNEENSRVLP

SEQ ID NO: 8317 - protein, 2039 aa, Homo sapiens
MGASSPRSPEPVGPPAPGLPFCCGGSLLAVVVLLALPVAWGQCNAPEWLPFARPTNLTDEFEFPIGTYLNYECRPGYSGRPFSIICLKNSVWTGAKDRCRRKSCRNPPDPVNGMVHVIKGIQFGSQIKYSCTKGYRLIGSSSATCIISGDTVIWDNETPICDRIPCGLPPTITNGDFISTNRENFHYGSVVTYRCNPGSGGRKVFELVGEPSIYCTSNDDQVGIWSGPAPQCIIPNKCTPPNVENGILVSDNRSLFSLNEVVEFRCQPGFVMKGPRRVKCQALNKWEPELPSCSRVCQPPPDVLHAERTQRDKDNFSPGQEVFYSCEPGYDLRGAASMRCTPQGDWSPAAPTCEVKSCDDFMGQLLNGRVLFPVNLQLGAKVDFVCDEGFQLKGSSASYCVLAGMESLWNSSVPVCEQIFCPSPPVIPNGRHTGKPLEVFPFGKTVNYTCDPHPDRGTSFDLIGESTIRCTSDPQGNGVWSSPAPRCGILGHCQAPDHFLFAKLKTQTNASDFPIGTSLKYECRPEYYGRPFSITCLDNLVWSSPKDVCKRKSCKTPPDPVNGMVHVITDIQVGSRINYSCTTGHRLIGHSSAECILSGNAAHWSTKPPICQRIPCGLPPTIANGDFISTNRENFHYGSVVTYRCNPGSGGRKVFELVGEPSIYCTSNDDQVGIWSGPAPQCIIPNKCTPPNVENGILVSDNRSLFSLNEVVEFRCQPGFVMKGPRRVKCQALNKWEPELPSCSRVCQPPPDVLHAERTQRDKDNFSPGQEVFYSCEPGYDLRGAASMRCTPQGDWSPAAPTCEVKSCDDFMGQLLNGRVLFPVNLQLGAKVDFVCDEGFQLKGSSASYCVLAGMESLWNSSVPVCEQIFCPSPPVIPNGRHTGKPLEVFPFGKAVNYTCDPHPDRGTSFDLIGESTIRCTSDPQGNGVWSSPAPRCGILGHCQAPDHFLFAKLKTQTNASDFPIGTSLKYECRPEYYGRPFSITCLDNLVWSSPKDVCKRKSCKTPPDPVNGMVHVITDIQVGSRINYSCTTGHRLIGHSSAECILSGNTAHWSTKPPICQRIPCGLPPTIANGDFISTNRENFHYGSVVTYRCNLGSRGRKVFELVGEPSIYCTSNDDQVGIWSGPAPQCIIPNKCTPPNVENGILVSDNRSLFSLNEVVEFRCQPGFVMKGPRRVKCQALNKWEPELPSCSRVCQPPPEILHGEHTPSHQDNFSPGQEVFYSCEPGYDLRGAASLHCTPQGDWSPEAPRCAVKSCDDFLGQLPHGRVLFPLNLQLGAKVSFVCDEGFRLKGSSVSHCVLVGMRSLWNNSVPVCEHIFCPNPPAILNGRHTGTPSGDIPYGKEISYTCDPHPDRGMTFNLIGESTIRCTSDPHGNGVWSSPAPRCELSVRAGHCKTPEQFPFASPTIPINDFEFPVGTSLNYECRPGYFGKMFSISCLENLVWSSVEDNCRRKSCGPPPEPFNGMVHINTDTQFGSTVNYSCNEGFRLIGSPSTTCLVSGNNVTWDKKAPICEIISCEPPPTISNGDFYSNNRTSFHNGTVVTYQCHTGPDGEQLFELVGERSIYCTSKDDQVGVWSSPPPRCISTNKCTAPEVENAIRVPGNRSFFTLTEIIRFRCQPGFVMVGSHTVQCQTNGRWGPKLPHCSRVCQPPPEILHGEHTLSHQDNFSPGQEVFYSCEPSYDLRGAASLHCTPQGDWSPEAPRCTVKSCDDFLGQLPHGRVLLPLNLQLGAKVSFVCDEGFRLKGRSASHCVLAGMKALWNSSVPVCEQIFCPNPPAILNGRHTGTPFGDIPYGKEISYACDTHPDRGMTFNLIGESSIRCTSDPQGNGVWSSPAPRCELSVPAACPHPPKIQNGHYIGGHVSLYLPGMTISYICDPGYLLVGKGFIFCTDQGIWSQLDHYCKEVNCSFPLFMNGISKELEMKKVYHYGDYVTLKCEDGYTLEGSPWSQCQADDRWDPPLAKCTSRTHDALIVGTLSGTIFFILLIIFLSWIILKHRKGNNAHENPKEVAIHLHSQGGSSVHPRTLQTNEENSRVLP

SEQ ID NO: 8318 - protein, 222 aa, Homo sapiens
MLSRAVCGTSRQLAPVLGYLGSRQKHSLPDLPYDYGALEPHINAQIMQLHHSKHHAAYVNNLNVTEEKYQEALAKGDVTAQIALQPALKFNGGGHINHSIFWTNLSPNGGGEPKGELLEAIKRDFGSFDKFKEKLTAASVGVQGSGWGWLGFNKERGHLQIAACPNQDPLQGTTGLIPLLGIDVWEHAYYLQYKNVRPDYLKAIWNVINWENVTERYMACKK

SEQ ID NO: 8319 - protein, 1092 aa, Homo sapiens
MGAAGLLGVFLALVAPGVLGISCGSPPPILNGRISYYSTPIAVGTVIRYSCSGTFRLIGEKSLLCITKDKVDGTWDKPAPKCEYFNKYSSCPEPIVPGGYKIRGSTPYRHGDSVTFACKTNFSMNGNKSVWCQANNMWGPTRLPTCVSVFPLECPALPMIHNGHHTSENVGSIAPGLSVTYSCESGYLLVGEKIINCLSSGKWSAVPPTCEEARCKSLGRFPNGKVKEPPILRVGVTANFFCDEGYRLQGPPSSRCVIAGQGVAWTKMPVCEEIFCPSPPPILNGRHIGNSLANVSYGSIVTYTCDPDPEEGVNFILIGESTLRCTVDSQKTGTWSGPAPRCELSTSAVQCPHPQILRGRMVSGQKDRYTYNDTVIFACMFGFTLKGSKQIRCNAQGTWEPSAPVCEKECQAPPNILNGQKEDRHMVRFDPGTSIKYSCNPGYVLVGEESIQCTSEGVWTPPVPQCKVAACEATGRQLLTKPQHQFVRPDVNSSCGEGYKLSGSVYQECQGTIPWFMEIRLCKEITCPPPPVIYNGAHTGSSLEDFPYGTTVTYTCNPGPERGVEFSLIGESTIRCTSNDQERGTWSGPAPLCKLSLLAVQCSHVHIANGYKISGKEAPYFYNDTVTFKCYSGFTLKGSSQIRCKADNTWDPEIPVCEKGCQSPPGLHHGRHTGGNTVFFVSGMTVDYTCDPGYLLVGNKSIHCMPSGNWSPSAPRCEETCQHVRQSLQELPAGSRVELVNTSCQDGYQLTGHAYQMCQDAENGIWFKKIPLCKVIHCHPPPVIVNGKHTGMMAENFLYGNEVSYECDQGFYLLGEKKLQCRSDSKGHGSWSGPSPQCLRSPPVTRCPNPEVKHGYKLNKTHSAYSHNDIVYVDCNPGFIMNGSRVIRCHTDNTWVPGVPTCIKKAFIGCPPPPKTPNGNHTGGNIARFSPGMSILYSCDQGYLLVGEALLLCTHEGTWSQPAPHCKEVNCSSPADMDGIQKGLEPRKMYQYGAVVTLECEDGYMLEGSPQSQCQSDHQWNPPLAVCRSRSLAPVLCGIAAGLILLTFLIVITLYVISKHRARNYYTDTSQKEAFHLEAREVYSVDPYNPAS

SEQ ID NO: 8320 - protein, 1033 aa, Homo sapiens
MGAAGLLGVFLALVAPGVLGISCGSPPPILNGRISYYSTPIAVGTVIRYSCSGTFRLIGEKSLLCITKDKVDGTWDKPAPKCEYFNKYSSCPEPIVPGGYKIRGSTPYRHGDSVTFACKTNFSMNGNKSVWCQANNMWGPTRLPTCVSVFPLECPALPMIHNGHHTSENVGSIAPGLSVTYSCESGYLLVGEKIINCLSSGKWSAVPPTCEEARCKSLGRFPNGKVKEPPILRVGVTANFFCDEGYRLQGPPSSRCVIAGQGVAWTKMPVCEEIFCPSPPPILNGRHIGNSLANVSYGSIVTYTCDPDPEEGVNFILIGESTLRCTVDSQKTGTWSGPAPRCELSTSAVQCPHPQILRGRMVSGQKDRYTYNDTVIFACMFGFTLKGSKQIRCNAQGTWEPSAPVCEKECQAPPNILNGQKEDRHMVRFDPGTSIKYSCNPGYVLVGEESIQCTSEGVWTPPVPQCKVAACEATGRQLLTKPQHQFVRPDVNSSCGEGYKLSGSVYQECQGTIPWFMEIRLCKEITCPPPPVIYNGAHTGSSLEDFPYGTTVTYTCNPGPERGVEFSLIGESTIRCTSNDQERGTWSGPAPLCKLSLLAVQCSHVHIANGYKISGKEAPYFYNDTVTFKCYSGFTLKGSSQIRCKADNTWDPEIPVCEKETCQHVRQSLQELPAGSRVELVNTSCQDGYQLTGHAYQMCQDAENGIWFKKIPLCKVIHCHPPPVIVNGKHTGMMAENFLYGNEVSYECDQGFYLLGEKKLQCRSDSKGHGSWSGPSPQCLRSPPVTRCPNPEVKHGYKLNKTHSAYSHNDIVYVDCNPGFIMNGSRVIRCHTDNTWVPGVPTCIKKAFIGCPPPPKTPNGNHTGGNIARFSPGMSILYSCDQGYLLVGEALLLCTHEGTWSQPAPHCKEVNCSSPADMDGIQKGLEPRKMYQYGAVVTLECEDGYMLEGSPQSQCQSDHQWNPPLAVCRSRSLAPVLCGIAAGLILLTFLIVITLYVISKHRARNYYTDTSQKEAFHLEAREVYSVDPYNPAS

SEQ ID NO: 8321 - protein, 971 aa, Homo sapiens
MGAAGLLGVFLALVAPGVLGISCGSPPPILNGRISYYSTPIAVGTVIRYSCSGTFRLIGEKSLLCITKDKVDGTWDKPAPKCEYFNKYSSCPEPIVPGGYKIRGSTPYRHGDSVTFACKTNFSMNGNKSVWCQANNMWGPTRLPTCVSVFPLECPALPMIHNGHHTSENVGSIAPGLSVTYSCESGYLLVGEKIINCLSSGKWSAVPPTCEEARCKSLGRFPNGKVKEPPILRVGVTANFFCDEGYRLQGPPSSRCVIAGQGVAWTKMPVCEEIFCPSPPPILNGRHIGNSLANVSYGSIVTYTCDPDPEEGVNFILIGESTLRCTVDSQKTGTWSGPAPRCELSTSAVQCPHPQILRGRMVSGQKDRYTYNDTVIFACMFGFTLKGSKQIRCNAQGTWEPSAPVCEKECQAPPNILNGQKEDRHMVRFDPGTSIKYSCNPGYVLVGEESIQCTSEGVWTPPVPQCKVAACEATGRQLLTKPQHQFVRPDVNSSCGEGYKLSGSVYQECQGTIPWFMEIRLCKEITCPPPPVIYNGAHTGSSLEDFPYGTTVTYTCNPGPERGVEFSLIGESTIRCTSNDQERGTWSGPAPLCKLSLLAVQCSHVHIANGYKISGKEAPYFYNDTVTFKCYSGFTLKGSSQIRCKADNTWDPEIPVCEKETCQHVRQSLQELPAGSRVELVNTSCQDGYQLTGHAYQMCQDAENGIWFKKIPLCKVIHCHPPPVIVNGKHTGMMAENFLYGNEVSYECDQGFYLLGEKKLQCRSDSKGHGSWSGPSPQCLRSPPVTRCPNPEVKHGYKLNKTHSAYSHNDIVYVDCNPGFIMNGSRVIRCHTDNTWVPGVPTCIKKEVNCSSPADMDGIQKGLEPRKMYQYGAVVTLECEDGYMLEGSPQSQCQSDHQWNPPLAVCRSRSLAPVLCGIAAGLILLTFLIVITLYVISKHRARNYYTDTSQKEAFHLEAREVYSVDPYNPAS

SEQ ID NO: 8322 - protein, 731 aa, Homo sapiens
MKLRSSHNASKTLNANNMETLIECQSEGDIKEHPLLASCESEDSICQLIEVKKRKKVLSWPFLMRRLSPASDFSGALETDLKASLFDQPLSIICGDSDTLPRPIQDILTILCLKGPSTEGIFRRAANEKARKELKEELNSGDAVDLERLPVHLLAVVFKDFLRSIPRKLLSSDLFEEWMGALEMQDEEDRIEALKQVADKLPRPNLLLLKHLVYVLHLISKNSEVNRMDSSNLAICIGPNMLTLENDQSLSFEAQKDLNNKVKTLVEFLIDNCFEIFGENIPVHSSITSDDSLEHTDSSDVSTLQNDSAYDSNDPDVESNSSSGISSPSRQPQVPMATAAGLDSAGPQDAREVSPEPIVSTVARLKSSLAQPDRRYSEPSMPSSQECLESRVTNQTLTKSEGDFPVPRVGSRLESEEAEDPFPEEVFPAVQGKTKRPVDLKIKNLAPGSVLPRALVLKAFSSSSLDASSDSSPVASPSSPKRNFFSRHQSFTTKTEKGKPSREIKKHSMSFTFAPHKKVLTKNLSAGSGKSQDFTRDHVPRGVRKESQLAGRIVQENGCETHNQTARGFCLRPHALSVDDVFQGADWERPGSPPSYEEAMQGPAARLVASESQTVGSMTVGSMRARMLEAHCLLPPLPPAHHVEDSRHRGSKEPLPGHGLSPLPERWKQSRTVHASGDSLGHVSGPGRPELLPLRTVSESVQRNKRDCLVRRCSQPVFEADQFQYAKESYI

SEQ ID NO: 8323 - protein, 550 aa, Homo sapiens
MTVARPSVPAALPLLGELPRLLLLVLLCLPAVWGDCGLPPDVPNAQPALEGRTSFPEDTVITYKCEESFVKIPGEKDSVICLKGSQWSDIEEFCNRSCEVPTRLNSASLKQPYITQNYFPVGTVVEYECRPGYRREPSLSPKLTCLQNLKWSTAVEFCKKKSCPNPGEIRNGQIDVPGGILFGATISFSCNTGYKLFGSTSSFCLISGSSVQWSDPLPECREIYCPAPPQIDNGIIQGERDHYGYRQSVTYACNKGFTMIGEHSIYCTVNNDEGEWSGPPPECRGKSLTSKVPPTVQKPTTVNVPTTEVSPTSQKTTTKTTTPNAQGTETPSVLQKHTTENVSATRTPPTPQKPTTVNVPATIVTPTPKPTTINVPATGVSSTPQRHTIVNVSATGTLPTLQKPTRANDSATKSPAAAQTSFISKTLSTKTPSAAQNPMMTNASATQATLTAQKFTTAKVAFTQSPSAARKSTNVHSPVTNGLKSTQRFPSAHITATRSTPVSRTTKHFHETTPNKGSGTTSGTTRLLSGHTCFTLTGLLGTLVTMGLLT

SEQ ID NO: 8324 - protein, 597 aa, Homo sapiens
MHPPKTPSGALHRKRKMAAWPFSRLWKVSDPILFQMTLIAALLPAVLGNCGPPPTLSFAAPMDITLTETRFKTGTTLKYTCLPGYVRSHSTQTLTCNSDGEWVYNTFCIYKRCRHPGELRNGQVEIKTDLSFGSQIEFSCSEGFFLIGSTTSRCEVQDRGVGWSHPLPQCEIVKCKPPPDIRNGRHSGEENFYAYGFSVTYSCDPRFSLLGHASISCTVENETIGVWRPSPPTCEKITCRKPDVSHGEMVSGFGPIYNYKDTIVFKCQKGFVLRGSSVIHCDADSKWNPSPPACEPNSCINLPDIPHASWETYPRPTKEDVYVVGTVLRYRCHPGYKPTTDEPTTVICQKNLRWTPYQGCEALCCPEPKLNNGEITQHRKSRPANHCVYFYGDEISFSCHETSRFSAICQGDGTWSPRTPSCGDICNFPPKIAHGHYKQSSSYSFFKEEIIYECDKGYILVGQAKLSCSYSHWSAPAPQCKALCRKPELVNGRLSVDKDQYVEPENVTIQCDSGYGVVGPQSITCSGNRTWYPEVPKCEWETPEGCEQVLTGKRLMQCLPNPEDVKMALEVYKLSLEIEQLELQRDSARQSTLDKEL

SEQ ID NO: 8325 - protein, 471 aa, Homo sapiens
MSGASSSEQNNNSYETKTPNLRMSEKKCSWASYMTNSPTLIVMIGLPARGKTYVSKKLTRYLNWIGVPTKVFNLGVYRREAVKSYKSYDFFRHDNEEAMKIRKQCALVALEDVKAYLTEENGQIAVFDATNTTRERRDMILNFAEQNSFKVFFVESVCDDPDVIAANILEVKVSSPDYPERNRENVMEDFLKRIECYKVTYRPLDPDNYDKDLSFIKVINVGQRFLVNRVQDYIQSKIVYYLMNIHVQPRTIYLCRHGESEFNLLGKIGGDSGLSVRGKQFAQALRKFLEEQEITDLKVWTSQLKRTIQTAESLGVPYEQWKILNEIDAGVCEEMTYAEIEKRYPEEFALRDQEKYLYRYPGGESYQDLVQRLEPVIMELERQGNVLVISHQAVMRCLLAYFLDKGADELPYLRCPLHTIFKLTPVAYGCKVETIKLNVEAVNTHRDKPTAAETTLAVRRRPSAASLMLPC

SEQ ID NO: 8326 - protein, 505 aa, Homo sapiens
MSGASSSEQNNNSYETKTPNLRMSEKKCSWASYMTNSPTLIVMIGLPARGKTYVSKKLTRYLNWIGVPTKVFNLGVYRREAVKSYKSYDFFRHDNEEAMKIRKQCALVALEDVKAYLTEENGQIAVFDATNTTRERRDMILNFAEQNSFKVFFVESVCDDPDVIAANILEVKVSSPDYPERNRENVMEDFLKRIECYKVTYRPLDPDNYDKDLSFIKVINVGQRFLVNRVQDYIQSKIVYYLMNIHVQPRTIYLCRHGESEFNLLGKIGGDSGLSVRGKQFAQALRKFLEEQEITDLKVWTSQLKRTIQTAESLGVPYEQWKILNEIDAGVCEEMTYAEIEKRYPEEFALRDQEKYLYRYPGGESYQDLVQRLEPVIMELERQGNVLVISHQAVMRCLLAYFLDKGADELPYLRCPLHTIFKLTPVAYGCKVETIKLNVEAVNTHRDKPTNNFPKNQTPVRMRRNSFTPLSSSNTIRRPRNYSVGSRPLKPLSPLRAQDMQEGAD

SEQ ID NO: 8327 - protein, 612 aa, Homo sapiens
MGAAPSPTQASSRGGGPGPPAPTRAVSSSSRARGGALSALGPSPARPLTTSPAPAPPPRSRPARQQPDPQCWEKRGGAGGDTKGGAAGPGPGRLRGMDAEYPAFEPPLCSELKHLCRRLREAYRELKEDLTPFKDDRYYRLAPMRLYTLSKRHFVLVFVVFFICFGLTIFVGIRGPKVIQTSAANFSLNNSKKLKPIQILSNPLSTYNQQLWLTCVVELDQSKETSIKTSFPMTVKVDGVAQDGTTMYIHNKVHNRTRTLTCAGKCAEIIVAHLGYLNYTQYTVIVGFEHLKLPIKGMNFTWKTYNPAFSRLEIWFRFFFVVLTFIVTCLFAHSLRKFSMRDWGIEQKWMSVLLPLLLLYNDPFFPLSFLVNSWLPGMLDDLFQSMFLCALLLFWLCVYHGIRVQGERKCLTFYLPKFFIVGLLWLASVTLGIWQTVNELHDPMYQYRVDTGNFQGMKVFFMVVAAVYILYLLFLIVRACSELRHMPYVDLRLKFLTALTFVVLVISIAILYLRFGAQVLQDNFVAELSTHYQNSAEFLSFYGLLNFYLYTLAFVYSPSKNALYESQLKDNPAFSMLNDSDDDVIYGSDYEEMPLQNGQAIRAKYKEESDSD

SEQ ID NO: 8328 - protein, 678 aa, Homo sapiens
MYAAVEHGPVLCSDSNILCLSWKGRVPKSEKEKPVCRRRYYEEGWLATGNGRGVVGVTFTSSHCRRDRSTPQRINFNLRGHNSEVVLVRWNEPYQKLATCDADGGIFVWIQYEGRWSVELVNDRGAQVSDFTWSHDGTQALISYRDGFVLVGSVSGQRHWSSEINLESQITCGIWTPDDQQVLFGTADGQVIVMDCHGRMLAHVLLHESDGVLGMSWNYPIFLVEDSSESDTDSDDYAPPQDGPAAYPIPVQNIKPLLTVSFTSGDISLMNNYDDLSPTVIRSGLKEVVAQWCTQGDLLAVAGMERQTQLGELPNGPLLKSAMVKFYNVRGEHIFTLDTLVQRPIISICWGHRDSRLLMASGPALYVVRVEHRVSSLQLLCQQAIASTLREDKDVSKLTLPPRLCSYLSTAFIPTIKPPIPDPNNMRDFVSYPSAGNERLHCTMKRTEDDPEVGGPCYTLYLEYLGGLVPILKGRRISKLRPEFVIMDPRTDSKPDEIYGNSLISTVIDSCNCSDSSDIELSDDWAAKKSPKISRASKSPKLPRISIEARKSPKLPRAAQELSRSPRLPLRKPSVGSPSLTRREFPFEDITQHNYLAQVTSNIWGTKFKIVGLAAFLPTNLGAVIYKTSLLHLQPRQMTIYLPEVRKISMDYINLPVFNPNVFSEDEDDLPGDAVWTD

SEQ ID NO: 8329 - protein, 1543 aa, Homo sapiens
MYAAVEHGPVLCSDSNILCLSWKGRVPKSEKEKPVCRRRYYEEGWLATGNGRGVVGVTFTSSHCRRDRSTPQRINFNLRGHNSEVVLVRWNEPYQKLATCDADGGIFVWIQYEGRWSVELVNDRGAQVSDFTWSHDGTQALISYRDGFVLVGSVSGQRHWSSEINLESQITCGIWTPDDQQVLFGTADGQVIVMDCHGRMLAHVLLHESDGVLGMSWNYPIFLVEDSSESDTDSDDYAPPQDGPAAYPIPVQNIKPLLTVSFTSGDISLMNNYDDLSPTVIRSGLKEVVAQWCTQGDLLAVAGMERQTQLGELPNGPLLKSAMVKFYNVRGEHIFTLDTLVQRPIISICWGHRDSRLLMASGPALYVVRVEHRVSSLQLLCQQAIASTLREDKDVSKLTLPPRLCSYLSTAFIPTIKPPIPDPNNMRDFVSYPSAGNERLHCTMKRTEDDPEVGGPCYTLYLEYLGGLVPILKGRRISKLRPEFVIMDPRTDSKPDEIYGNSLISTVIDSCNCSDSSDIELSDDWAAKKSPKISRASKSPKLPRISIEARKSPKLPRAAQELSRSPRLPLRKPSVGSPSLTRREFPFEDITQHNYLAQVTSNIWGTKFKIVGLAAFLPTNLGAVIYKTSLLHLQPRQMTIYLPEVRKISMDYINLPVFNPNVFSEDEDDLPVTGASGVPENSPPCTVNIPIAPIHSSAQAMSPTQSIGLVQSLLANQNVQLDVLTNQTTAVGTAEHAGDSATQYPVSNRYSNPGQVIFGSVEMGRIIQNPPPLSLPPPPQGPMQLSTVGHGDRDHEHLQKSAKALRPTPQLAAEGDAVVFSAPQEVQVTKINPPPPYPGTIPAAPTTAAPPPPLPPPQPPVDVCLKKGDFSLYPTSVHYQTPLGYERITTFDSSGNVEEVCRPRTRMLCSQNTYTLPGPGSSATLRLTATEKKVPQPCSSATLNRLTVPRYSIPTGDPPPYPEIASQLAQGRGAAQRSDNSLIHATLRRNNREATLKMAQLADSPRAPLQPLAKSKGGPGGVVTQLPARPPPALYTCSQCSGTGPSSQPGASLAHTASASPLASQSSYSLLSPPDSARDRTDYVNSAFTEDEALSQHCQLEKPLRHPPLPEAAVTLKRPPPYQWDPMLGEDVWVPQERTAQTSGPNPLKLSSLMLSQGQHLDVSRLPFISPKSPASPTATFQTGYGMGVPYPGSYNNPPLPGVQAPCSPKDALSPTQFAQQEPAVVLQPLYPPSLSYCTLPPMYPGSSTCSSLQLPPVALHPWSSYSACPPMQNPQGTLPPKPHLVVEKPLVSPPPADLQSHLGTEVMVETADNFQEVLSLTESPVPQRTEKFGKKNRKRLDSRAEEGSVQAITEGKVKKEARTLSDFNSLISSPHLGREKKKVKSQKDQLKSKKLNKTNEFQDSSESEPELFISGDELMNQSQGSRKGWKSKRSPRAAGELEEAKCRRASEKEDGRLGSQGFVYVMANKQPLWNEATQVYQLDFGGRVTQESAKNFQIELEGRQVMQFGRIDGSAYILDFQYPFSAVQAFAVALANVTQRLK

SEQ ID NO: 8330 - protein, 531 aa, Homo sapiens
MSLAAYCVICCRRIGTSTSPPKSGTHWRDIRNIIKFTGSLILGGSLFLTYEVLALKKAVTLDTQVVEREKMKSYIYVHTVSLDKGENHGIAWQARKELHKAVRKVLATSAKILRNPFADPFSTVDIEDHECAVWLLLRKSKSDDKTTRLEAVREMSETHHWHDYQYRIIAQACDPKTLIGLARSEESDLRFFLLPPPLPSLKEDSSTEEELRQLLASLPQTELDECIQYFTSLALSESSQSLAAQKGGLWCFGGNGLPYAESFGEVPSATVEMFCLEAIVKHSEISTHCDKIEANGGLQLLQRLYRLHKDCPKVQRNIMRVIGNMALNEHLHSSIVRSGWVSIMAEAMKSPHIMESSHAARILANLDRETVQEKYQDGVYVLHPQYRTSQPIKADVLFIHGLMGAAFKTWRQQDSEQAVIEKPMEDEDRYTTCWPKTWLAKDCPALRIISVEYDTSLSDWRARCPMERRSLLSISSGIVEGLESPLHSEATNFLGSSELLVLGIGQWFGYHIAWEVFLSKRCCWKPLRSQK

SEQ ID NO: 8331 - protein, 568 aa, Homo sapiens
MKWKEKLGDGVYDTFMMIDETKCPPCSNVLCNPSEPPPPRRLNMTTEQFTGDHTQHFLDGGEMKVEQLFQEFGNRKSNTIQSDGISDSEKCSPTVSQGKSSDCLNTVKSNSSSKAPKVVPLTPEQALKQYKHHLTAYEKLEIINYPEIYFVGPNAKKRHGVIGGPNNGGYDDADGAYIHVPRDHLAYRYEVLKIIGKGSFGQVARVYDHKLRQYVALKMVRNEKRFHRQAAEEIRILEHLKKQDKTGSMNVIHMLESFTFRNHVCMAFELLSIDLYELIKKNKFQGFSVQLVRKFAQSILQSLDALHKNKIIHCDLKPENILLKHHGRSSTKVIDFGSSCFEYQKLYTYIQSRFYRAPEIILGSRYSTPIDIWSFGCILAELLTGQPLFPGEDEGDQLACMMELLGMPPPKLLEQSKRAKYFINSKGIPRYCSVTTQADGRVVLVGGRSRRGKKRGPPGSKDWGTALKGCDDYLFIEFLKRCLHWDPSARLTPAQALRHPWISKSVPRPLTTIDKVSGKRVVNPASAFQGLGSKLPPVVGIANKLKANLMSETNGSIPLCSVLPKLIS

SEQ ID NO: 8332 - protein, 588 aa, Homo sapiens
MGGTARGPGRKDAGPPGAGLPPQQRRLGDGVYDTFMMIDETKCPPCSNVLCNPSEPPPPRRLNMTTEQFTGDHTQHFLDGGEMKVEQLFQEFGNRKSNTIQSDGISDSEKCSPTVSQGKSSDCLNTVKSNSSSKAPKVVPLTPEQALKQYKHHLTAYEKLEIINYPEIYFVGPNAKKRHGVIGGPNNGGYDDADGAYIHVPRDHLAYRYEVLKIIGKGSFGQVARVYDHKLRQYVALKMVRNEKRFHRQAAEEIRILEHLKKQDKTGSMNVIHMLESFTFRNHVCMAFELLSIDLYELIKKNKFQGFSVQLVRKFAQSILQSLDALHKNKIIHCDLKPENILLKHHGRSSTKVIDFGSSCFEYQKLYTYIQSRFYRAPEIILGSRYSTPIDIWSFGCILAELLTGQPLFPGEDEGDQLACMMELLGMPPPKLLEQSKRAKYFINSKGIPRYCSVTTQADGRVVLVGGRSRRGKKRGPPGSKDWGTALKGCDDYLFIEFLKRCLHWDPSARLTPAQALRHPWISKSVPRPLTTIDKVSGKRVVNPASAFQGLGSKLPPVVGIANKLKANLMSETNGSIPLCSVLPKLIS

SEQ ID NO: 8333 - protein, 839 aa, Homo sapiens
MGGKAGNKGAVGIRFQFHSTSFCFICSHLTAGQSQVKERNEDYKEITQKLCFPMGRNVFSHDYVFWCGDFNYRIDLTYEEVFYFVKRQDWKKLLEFDQLQLQKSSGKIFKDFHEGAINFGPTYKYDVGSAAYDTSDKCRTPAWTDRVLWWRKKHPFDKTAGELNLLDSDLDVDTKVRHTWSPGALQYYGRAELQASDHRPVLAIVEVEVQEVDVGARERVFQEVSSFQGPLDATVVVNLQSPTLEEKNEFPEDLRTELMQTLGSYGTIVLVRINQGQMLVTFADSHSALSVLDVDGMKVKGRAVKIRPKTKDWLKGLREEIIRKRDSMAPVSPTANSCLLEENFDFTSLDYESEGDILEDDEDYLVDEFNQPGVSDSELGGDDLSDVPGPTALAPPSKSPALTKKKQHPTYKDDADLVELKRELEAVGEFRHRSPSRSLSVPNRPRPPQPPQRPPPPTGLMVKKSASDASISSGTHGQYSILQTARLLPGAPQQPPKARTGISKPYNVKQIKTTNAQEAEAAIRCLLEARGGASEEALSAVAPRDLEASSEPEPTPGAAKPETPQAPPLLPRRPPPRVPAIKKPTLRRTGKPLSPEEQFEQQTVHFTIGPPETSVEAPPVVTAPRVPPVPKPRTFQPGKAAERPSHRKPASDEAPPGAGASVPPPLEAPPLVPKVPPRRKKSAPAAFHLQVLQSNSQLLQGLTYNSSDSPSGHPPAAGTVFPQGDFLSTSSATSPDSDGTKAMKPEAAPLLGDYQDPFWNLLHHPKLLNNTWLSKSSDPLDSGTRSPKRDPIDPVSAGASAAKAELPPDHEHKTLGHWVTISDQEKRTALQVFDPLAKT

SEQ ID NO: 8334 - protein, 424 aa, Homo sapiens
MDSGPLWDANPTPRGTLSAPNATTPWLGRDEELAKVEIGVLATVLVLATGGNLAVLLTLGQLGRKRSRMHLFVLHLALTDLAVALFQVLPQLLWDITYRFQGPDLLCRAVKYLQVLSMFASTYMLLAMTLDRYLAVCHPLRSLQQPGQSTYLLIAAPWLLAAIFSLPQVFIFSLREVIQGSGVLDCWADFGFPWGPRAYLTWTTLAIFVLPVTMLTACYSLICHEICKNLKVKTQAWRVGGGGWRTWDRPSPSTLAATTRGLPSRVSSINTISRAKIRTVKMTFVIVLAYIACWAPFFSVQMWSVWDKNAPDEDSTNVAFTISMLLGNLNSCCNPWIYMGFNSHLLPRPLRHLACCGGPQPRMRRRLSDGSLSSRHTTLLTRSSCPATLSLSLSLTLSGRPRPEESPRDLELADGEGTAETIIF

SEQ ID NO: 8335 - protein, 791 aa, Homo sapiens
MSQPRPRYVVDRAAYSLTLFDDEFEKKDRTYPVGEKLRNAFRCSSAKIKAVVFGLLPVLSWLPKYKIKDYIIPDLLGGLSGGSIQVPQGMAFALLANLPAVNGLYSSFFPLLTYFFLGGVHQMVPGTFAVISILVGNICLQLAPESKFQVFNNATNESYVDTAAMEAERLHVSATLACLTAIIQMGLGFMQFGFVAIYLSESFIRGFMTAAGLQILISVLKYIFGLTIPSYTGPGSIVFTFIDICKNLPHTNIASLIFALISGAFLVLVKELNARYMHKIRFPIPTEMIVVVVATAISGGCKMPKKYHMQIVGEIQRGFPTPVSPVVSQWKDMIGTAFSLAIVSYVINLAMGRTLANKHGYDVDSNQEMIALGCSNFFGSFFKIHVICCALSVTLAVDGAGGKSQVASLCVSLVVMITMLVLGIYLYPLPKSVLGALIAVNLKNSLKQLTDPYYLWRKSKLDCCIWVVSFLSSFFLSLPYGVAVGVAFSVLVVVFQTQFRNGYALAQVMDTDIYVNPKTYNRAQDIQGIKIITYCSPLYFANSEIFRQKVIAKTGMDPQKVLLAKQKYLKKQEKRRMRPTQQRRSLFMKTKTVSLQELQQDFENAPPTDPNNNQTPANGTSVSYITFSPDSSSPAQSEPPASAEAPGEPSDMLASVPPFVTFHTLILDMSGVSFVDLMGIKALAKLSSTYGKIGVKVFLVNIHAQVYNDISHGGVFEDGSLECKHVFPSIHDAVLFAQANARDVTPGHNFQGAPGDAELSLYDSEEDIRSYWDLEQEMFGSMFHAETLTAL

SEQ ID NO: 8336 - protein, 553 aa, Homo sapiens
MVQRLWVSRLLRHRKAQLLLVNLLTFGLEVCLAAGITYVPPLLLEVGVEEKFMTMVLGIGPVLGLVCVPLLGSASDHWRGRYGRRRPFIWALSLGILLSLFLIPRAGWLAGLLCPDPRPLELALLILGVGLLDFCGQVCFTPLEALLSDLFRDPDHCRQAYSVYAFMISLGGCLGYLLPAIDWDTSALAPYLGTQEECLFGLLTLIFLTCVAATLLVAEEAALGPTEPAEGLSAPSLSPHCCPCRARLAFRNLGALLPRLHQLCCRMPRTLRRLFVAELCSWMALMTFTLFYTDFVGEGLYQGVPRAEPGTEARRHYDEGVRMGSLGLFLQCAISLVFSLVMDRLVQRFGTRAVYLASVAAFPVAAGATCLSHSVAVVTASAALTGFTFSALQILPYTLASLYHREKQVFLPKYRGDTGGASSEDSLMTSFLPGPKPGAPFPNGHVGAGGSGLLPPPPALCGASACDVSVRVVVGEPTEARVVPGRGICLDLAILDSAFLLSQVAPSLFMGSIVQLSQSVTAYMVSAAGLGLVAIYFATQVVFDKSDLAKYSA

SEQ ID NO: 8337 - protein, 514 aa, Homo sapiens
MGCDGRVSGLLRRNLQPTLTYWSVFFSFGLCIAFLGPTLLDLRCQTHSSLPQISWVFFSQQLCLLLGSALGGVFKRTLAQSLWALFTSSLAISLVFAVIPFCRDVKVLASVMALAGLAMGCIDTVANMQLVRMYQKDSAVFLQVLHFFVGFGALLSPLIADPFLSEANCLPANSTANTTSRGHLFHVSRVLGQHHVDAKPWSNQTFPGLTPKDGAGTRVSYAFWIMALINLPVPMAVLMLLSKERLLTCCPQRRPLLLSADELALETQPPEKEDASSLPPKFQSHLGHEDLFSCCQRKNLRGAPYSFFAIHITGALVLFMTDGLTGAYSAFVYSYAVEKPLSVGHKVAGYLPSLFWGFITLGRLLSIPISSRMKPATMVFINVVGVVVTFLVLLIFSYNVVFLFVGTASLGLFLSSTFPSMLAYTEDSLQYKGCATTVLVTGAGVGEMVLQMLVGSIFQAQGSYSFLVCGVIFGCLAFTFYILLLFFHRMHPGLPSVPTQDRSIGMENSECYQR

SEQ ID NO: 8338 - protein, 884 aa, Homo sapiens
MEGDGVPWGSEPVSGPGPGGGGMIRELCRGFGRYRRYLGRLRQNLRETQKFFRDIKCSHNHTCLSSLTGGGGAERGPAGDVAETGLQAGQLSCISFPPKEEKYLQQIVDCLPCILILGQDCNVKCQLLNLLLGVQVLPTTKLGSEESCKLRRLRFTYGTQTRVSLALPGQYELVHTLVAHQGNWETIPEEDLEVQENNEDAAHVLAELEVTMHHALLQEVDVVVAPCQGLRPTVDVLGDLVNDFLPVITYALHKDELSERDEQELQEIRKYFSFPVFFFKVPKLGSEIIDSSTRRMESERSPLYRQLIDLGYLSSSHWNCGAPGQDTKAQSMLVEQSEKLRHLSTFSHQVLQTRLVDAAKALNLVHCHCLDIFINQAFDMQRDLQITPKRLEYTRKKENELYESLMNIANRKQEEMKDMIVETLNTMKEELLDDATNMEFKDVIVPENGEPVGTREIKCCIRQIQELIISRLNQAVANKLISSVDYLRESFVGTLERCLQSLEKSQDVSVHITSNYLKQILNAAYHVEVTFHSGSSVTRMLWEQIKQIIQRITWVSPPAITLEWKRKVAQEAIESLSASKLAKSICSQFRTRLNSSHEAFAASLRQLEAGHSGRLEKTEDLWLRVRKDHAPRLARLSLESCSLQDVLLHRKPKLGQELGRGQYGVVYLCDNWGGHFPCALKSVVPPDEKHWNDLALEFHYMRSLPKHERLVDLHGSVIDYNYGGGSSIAVLLIMERLHRDLYTGLKAGLTLETRLQIALDVVEGIRFLHSQGLVHRDIKLKNVLLDKQNRAKITDLGFCKPEAMMSGSIVGTPIHMAPELFTGARPERLPVFDEECWQLMEACWDGDPLKRPLLGIVQPMLQGIMNRLCKSNSEQPNRGLDDST

SEQ ID NO: 8339 - protein, 929 aa, Homo sapiens
MEGDGVPWGSEPVSGPGPGGGGMIRELCRGFGRYRRYLGRLRQNLRETQKFFRDIKCSHNHTCLSSLTGGGGAERGPAGDVAETGLQAGQLSCISFPPKEEKYLQQIVDCLPCILILGQDCNVKCQLLNLLLGVQVLPTTKLGSEESCKLRRLRFTYGTQTRVSLALPGQYELVHTLVAHQGNWETIPEEDLEVQENNEDAAHVLAELEVTMHHALLQEVDVVVAPCQGLRPTVDVLGDLVNDFLPVITYALHKDELSERDEQELQEIRKYFSFPVFFFKVPKLGSEIIDSSTRRMESERSPLYRQLIDLGYLSSSHWNCGAPGQDTKAQSMLVEQSEKLRHLSTFSHQVLQTRLVDAAKALNLVHCHCLDIFINQAFDMQRDLQITPKRLEYTRKKENELYESLMNIANRKQEEMKDMIVETLNTMKEELLDDATNMEFKDVIVPENGEPVGTREIKCCIRQIQELIISRLNQAVANKLISSVDYLRESFVGTLERCLQSLEKSQDVSVHITSNYLKQILNAAYHVEVTFHSGSSVTRMLWEQIKQIIQRITWVSPPAITLEWKRKVAQEAIESLSASKLAKSICSQFRTRLNSSHEAFAASLRQLEAGHSGRLEKTEDLWLRVRKDHAPRLARLSLESCSLQDVLLHRKPKLGQELGRGQYGVVYLCDNWGGHFPCALKSVVPPDEKHWNDLALEFHYMRSLPKHERLVDLHGSVIDYNYGGGSSIAVLLIMERLHRDLYTGLKAGLTLETRLQIALDVVEGIRFLHSQGLVHRDIKLKNVLLDKQNRAKITDLGFCKPEAMMSGSIVGTPIHMAPELFTGKYDNSVDVYAFGILFWYICSGSVKLPEAFERCASKDHLWNNVRRGARPERLPVFDEECWQLMEACWDGDPLKRPLLGIVQPMLQGIMNRLCKSNSEQPNRGLDDST

SEQ ID NO: 8340 - protein, 255 aa, Homo sapiens
MKVLATSFVLGSLGLAFYLPLVVTTPKTLAIPEKLQEAVGKVIINATTCTVTCGLGYKEETVCEVGPDGVRRKCQTRRLECLTNWICGMLHFTILIGKEFELSCLSSDILEFGQEAFRFTWRLARGVISTDDEVFKPFQANSHFVKFKYAQEYDSGTYRCDVQLVKNLRLVKRLYFGLRVLPPNLVNLNFHQSLTEDQKLIDEGLEVNLDSYSKPHHPKWKKKVASALGIGIAIGVVGGVLVRIVLCALRGGLQQ

SEQ ID NO: 8341 - protein, 1040 aa, Homo sapiens
SIQNELTQPPTITKQSAKDHIVDPRDNILIECEAKGNPAPSFHWTRNSRFFNIAKDPRVSMRRRSGTLVIDFRSGGRPEEYEGEYQCFARNKFGTALSNRIRLQVSKSPLWPKENLDPVVVQEGAPLTLQCNPPPGLPSPVIFWMSSSMEPITQDKRVSQGHNGDLYFSNVMLQDMQTDYSCNARFHFTHTIQQKNPFTLKVLTTRGVAERTPSFMYPQGTASSQMVLRGMDLLLECIASGVPTPDIAWYKKGGDLPSDKAKFENFNKALRITNVSEEDSGEYFCLASNKMGSIRHTISVRVKAAPYWLDEPKNLILAPGEDGRLVCRANGNPKPTVQWMVNGEPLQSAPPNPNREVAGDTIIFRDTQISSRAVYQCNTSNEHGYLLANAFVSVLDVPPRMLSPRNQLIRVILYNRTRLDCPFFGSPIPTLRWFKNGQGSNLDGGNYHVYENGSLEIKMIRKEDQGIYTCVATNILGKAENQVRLEVKDPTRIYRMPEDQVARRGTTVQLECRVKHDPSLKLTVSWLKDDEPLYIGNRMKKEDDSLTIFGVAERDQGSYTCVASTELDQDLAKAYLTVLADQATPTNRLAALPKGRPDRPRDLELTDLAERSVRLTWIPGDANNSPITDYVVQFEEDQFQPGVWHDHSKYPGSVNSAVLRLSPYVNYQFRVIAINEVGSSHPSLPSERYRTSGAPPESNPGDVKGEGTRKNNMEITWTPMNATSAFGPNLRYIVKWRRRETREAWNNVTVWGSRYVVGQTPVYVPYEIRVQAENDFGKGPEPESVIGYSGEDLPSAPRRFRVRQPNLETINLEWDHPEHPNGIMIGYTLKYVAFNGTKVGKQIVENFSPNQTKFTVQRTDPVSRYRFTLSARTQVGSGEAVTEESPAPPNEATPTAAYTNNQADIATQGWFIGLMCAIALLVLILLIVCFIKRSRGGKYPVREKKDVPLGPEDPKEEDGSFDYSDEDNKPLQGSQTSLDGTIKQQESDDSLVDYGEGGEGQFNEDGSFIGQYTVKKDKEETEGNESSEATSPVNAIYSLA

SEQ ID NO: 8342 - protein, 713 aa, Homo sapiens
MRLLVAPLLLAWVAGATAAVPVVPWHVPCPPQCACQIRPWYTPRSSYREATTVDCNDLFLTAVPPALPAGTQTLLLQSNSIVRVDQSELGYLANLTELDLSQNSFSDARDCDFHALPQLLSLHLEENQLTRLEDHSFAGLASLQELYLNHNQLYRIAPRAFSGLSNLLRLHLNSNLLRAIDSRWFEMLPNLEILMIGGNKVDAILDMNFRPLANLRSLVLAGMNLREISDYALEGLQSLESLSFYDNQLARVPRRALEQVPGLKFLDLNKNPLQRVGPGDFANMLHLKELGLNNMEELVSIDKFALVNLPELTKLDITNNPRLSFIHPRAFHHLPQMETLMLNNNALSALHQQTVESLPNLQEVGLHGNPIRCDCVIRWANATGTRVRFIEPQSTLCAEPPDLQRLPVREVPFREMTDHCLPLISPRSFPPSLQVASGESMVLHCRALAEPEPEIYWVTPAGLRLTPAHAGRRYRVYPEGTLELRRVTAEEAGLYTCVAQNLVGADTKTVSVVVGRALLQPGRDEGQGLELRVQETHPYHILLSWVTPPNTVSTNLTWSSASSLRGQGATALARLPRGTHSYNITRLLQATEYWACLQVAFADAHTQLACVWARTKEATSCHRALGDRPGLIAILALAVLLLAAGLAAHLGTGQPRKGVGGRRPLPPAWAFWGWSAPSVRVVSAPLVLPWNPGRKLPRSSEGETLLPPLSQNS

SEQ ID NO: 8343 - protein, 1271 aa, Homo sapiens
MEAVKTFNSELYSLNDYKPPISKAKMTQITKAAIKAIKFYKHVVQSVEKFIQKCKPEYKVPGLYVIDSIVRQSRHQFGQEKDVFAPRFSNNIISTFQNLYRCPGDDKSKIVRVLNLWQKNNVFKSEIIQPLLDMAAGIPPPVVTPVLASTTTAMSNTPGTPVTPVTPANVVQGLPDPWVSQITNTDTLAAVAQILQSPQGQQLQQLIQTLQIQQQKPQPSILQALDAGLVVQLQALTAQLTAAAAAANTLTPLEQGVSFNKKLMDRFDFGEDSEHSEEPKKEIPASQLSHVSESVNNSIFHQIAEQLQQQNLEHLRQQLLEQQQPQKATPQDSQEGTFGSEHSASPSQGSSQQHFLEPEVNLDDSIDIQQQDMDIDEGQDGVEEEVFEQEAKKVAVRSRSRTHSRSRSRSPRKRRSRSRSGSRKRKHRKRSRSRSRERKRKSSRSYSSERRAREREKERQKKGLPPIRSKTLSVCSTTLWVGQVDKKATQQDLTNLFEEFGQIESINMIPPRGCAYVCMVHRQDAFRALQKLSSGSYKIGSKVIKIAWALNKGVKTEYKQFWDVDLGVTYIPWEKVKVDDLEGFAEGGMIDQETVNTEWETVKSSEPVKETVQTTQSPTPVEKETVVTTQAEVFPPPVAMLQIPVAPAVPTVSLVPPAFPVSMPVPPPGFSPIPPPPFLRASFNPSQPPPGFMPPPVPPPVVPPPTIPPVVPTSLVQPSLSMTPETVKDVGFGSLVIPGGSVASNLATSALPAGNVFNAPTKQAEPEEKVPHLIDHQISSGENTRSVIPNDISSNAAILGGQPPNVTSNSGILGVQRPNVSSNSEILGVRPSNVSSSSGIIAAQPPNILNNSGILGIQPPSVSNSSGLLGVLPPNIPNNSGLVGVQPPNVPNTPGLLGTQPPAGPQNLPPLSIPNQRMPTMPMLDIRPGLIPQAPGPRFPLIQPGIPPQRGIPPPSVLDSALHPPPRGPFPPGDIFSQPERPFLAPGRQSVDNVTNPEKRIPLGNDNIQQEGDRDYRFPPIETRESISRPPPVDVRDVVGRPIDPREGPGRPPLDGRDHFGRPPVDIRENLVRPGIDHLGRRDHFGFNPEKPWGHRGDFDEREHRVLPVYGGPKGLHEERGRFRSGNYRFDPRSGPWNRGFGQEVHRDFDDRRRPWERQRDRDDRDFDFCREMNGNRLGRDRIQNTWVPPPHARVFDYFEGATSQRKGDNVPQVNGENTERHAQPPPIPVQNDPELYEKLTSSNEINKEKSDTVADIESEPVVESTETEGT

SEQ ID NO: 8344 - protein, 1337 aa, Homo sapiens
MPQPLLPALPPLSSPSGAGSCGPSGGECSGRRLFRRRARGLRSDNMEAVKTFNSEDCASTPACTDCFSSSMDTRSILYSLNDYKPPISKAKMTQITKAAIKAIKFYKHVVQSVEKFIQKCKPEYKVPGLYVIDSIVRQSRHQFGQEKDVFAPRFSNNIISTFQNLYRCPGDDKSKIVRVLNLWQKNNVFKSEIIQPLLDMAAGIPPPVVTPVLASTTTAMSNTPGTPVTPVTPANVVQGLPDPWVSQITNTDTLAAVAQILQSPQGQQLQQLIQTLQIQQQKPQPSILQALDAGLVVQLQALTAQLTAAAAAANTLTPLEQGVSFNKKLMDRFDFGEDSEHSEEPKKEIPASQLSHVSESVNNSIFHQIAEQLQQQNLEHLRQQLLEQQQPQKATPQDSQEGTFGSEHSASPSQGSSQQHFLEPEVNLDDSIDIQQQDMDIDEGQDGVEEEVFEQEAKKVAVRSRSRTHSRSRSRSPRKRRSRSRSGSRKRKHRKRSRSRSRERKRKSSRSYSSERRAREREKERQKKGLPPIRSKTLSVCSTTLWVGQVDKKATQQDLTNLFEEFGQIESINMIPPRGCAYVCMVHRQDAFRALQKLSSGSYKIGSKVIKIAWALNKGVKTEYKQFWDVDLGVTYIPWEKVKVDDLEGFAEGGMIDQETVNTEWETVKSSEPVKETVQTTQSPTPVEKETVVTTQAEVFPPPVAMLQIPVAPAVPTVSLVPPAFPVSMPVPPPGFSPIPPPPFLRASFNPSQPPPGFMPPPVPPPVVPPPTIPPVVPTSLVQPSLSMTPETVKDVGFGSLVIPGGSVASNLATSALPAGNVFNAPTKQAEPEEKVPHLIDHQISSGENTRSVIPNDISSNAAILGGQPPNVTSNSGILGVQRPNVSSNSEILGVRPSNVSSSSGIIAAQPPNILNNSGILGIQPPSVSNSSGLLGVLPPNIPNNSGLVGVQPPNVPNTPGLLGTQPPAGPQNLPPLSIPNQRMPTMPMLDIRPGLIPQAPGPRFPLIQPGIPPQRGIPPPSVLDSALHPPPRGPFPPGDIFSQPERPFLAPGRQSVDNVTNPEKRIPLGNDNIQQEGDRDYRFPPIETRESISRPPPVDVRDVVGRPIDPREGPGRPPLDGRDHFGRPPVDIRENLVRPGIDHLGRRDHFGFNPEKPWGHRGDFDEREHRVLPVYGGPKGLHEERGRFRSGNYRFDPRSGPWNRGFGQEVHRDFDDRRRPWERQRDRDDRDFDFCREMNGNRLGRDRIQNTWVPPPHARVFDYFEGATSQRKGDNVPQVNGENTERHAQPPPIPVQNDPELYEKLTSSNEINKEKSDTVADIESEPVVESTETEGT

SEQ ID NO: 8345 - protein, 1634 aa, Homo sapiens
MSSTQGNGEHWKSLESVGISRKELAMAEALQMEYDALSRLRHDKEENRAKQNADPSLISWDEPGVDFYSKPAGRRTDLKLLRGLSGSDPTLNYNSLSPQEGPPNHSTSQGPQPGSDPWPKGSLSGDYLYIFDGSDGGVSSSPGPGDIEGSCKKLSPPPLPPRASIWDTPPLPPRKGSPSSSKISQPSDINTFSLVEQLPGKLLEHRILEEEEVLGGGGQGRLLGSVDYDGINDAITRLNLKSTYDAEMLRDATRGWKEGRGPLDFSKDTSGKPVARSKTMPPQVPPRTYASRYGNRKNATPGKNRRISAAPVGSRPHTVANGHELFEVSEERDEEVAAFCHMLDILRSGSDIQDYFLTGYVWSAVTPSPEHLGDEVNLKVTVLCDRLQEALTFTCNCSSTVDLLIYQTLCYTHDDLRNVDVGDFVLKPCGLEEFLQNKHALGSHEYIQYCRKFDIDIRLQLMEQKVVRSDLARTVNDDQSPSTLNYLVHLQERPVKQTISRQALSLLFDTYHNEVDAFLLADGDFPLKADRVVQSVKAICNALAAVETPEITSALNQLPPCPSRMQPKIQKDPSVLAVRENREKVVEALTAAILDLVELYCNTFNADFQTAVPGSRKHDLVQEACHFARSLAFTVYATHRIPIIWATSYEDFYLSCSLSHGGKELCSPLQTRRAHFSKYLFHLIVWDQQICFPVQVNRLPRETLLCATLYALPIPPPGSSSEANKQRRVPEALGWVTTPLFNFRQVLTCGRKLLGLWPATQENPSARWSAPNFHQPDSVILQIDFPTSAFDIKFTSPPGDKFSPRYEFGSLREEDQRKLKDIMQKESLYWLTDADKKRLWEKRYYCHSEVSSLPLVLASAPSWEWACLPDIYVLLKQWTHMNHQDALGLLHATFPDQEVRRMAVQWIGSLSDAELLDYLPQLVQALKYECYLDSPLVRFLLKRAVSDLRVTHYFFWLLKDGLKDSQFSIRYQYLLAALLCCCGKGLREEFNRQCWLVNALAKLAQQVREAAPSARQGILRTGLEEVKQFFALNGSCRLPLSPSLLVKGIVPRDCSYFNSNAVPLKLSFQNVDPLGENIRVIFKCGDDLRQDMLTLQMIRIMSKIWVQEGLDMRMVIFRCFSTGRGRGMVEMIPNAETLRKIQVEHGVTGSFKDRPLADWLQKHNPGEDEYEKAVENFIYSCAGCCVATYVLGICDRHNDNIMLKTTGHMFHIDFGRFLGHAQMFGNIKRDRAPFVFTSDMAYVINGGDKPSSRFHDFVDLCCQAYNLIRKHTHLFLNLLGLMLSCGIPELSDLEDLKYVYDALRPQDTEANATTYFTRLIESSLGSVATKLNFFIHNLAQMKFTGSDDRLTLSFASRTHTLKSSGRISDVFLCRHEKIFHPNKGYIYVVKVMRENTHEATYIQRTFEEFQELHNKLRLLFPSSHLPSFPSRFVIGRSRGEAVAERRREELNGYIWHLIHAPPEVAECDLVYTFFHPLPRDEKAMGTSPAPKSSDGTWARPVGKVGGEVKLSISYKNNKLFIMVMHIRGLQLLQDGNDPDPYVKIYLLPDPQKTTKRKTKVARKTCNPTYNEMLVYDGIPKGDLQQRELQLSVLSEQGFWENVLLGEVNIRLRELDLAQEKTGWFALGSRSHGTL

SEQ ID NO: 8346 - protein, 713 aa, Homo sapiens
MEPGTGGSRKRLGPRAGFRFWPPFFPRRSQAGSSKFPTPLGPENSGNPTLLSSAQPETRVSYWTKLLSQLLAPLPGLLQKVLIWSQLFGGMFPTRWLDFAGVYSALRALKGREKPAAPTAQKSLSSLQLDSSDPSVTSPLDWLEEGIHWQYSPPDLKLELKAKGSALDPAAQAFLLEQQLWGVELLPSSLQSRLYSNRELGSSPSGPLNIQRIDNFSVVSYLLNPSYLDCFPRLEVSYQNSDGNSEVVGFQTLTPESSCLREDHCHPQPLSAELIPASWQGCPPLSTEGLPEIHHLRMKRLEFLQQASKGQDLPTPDQDNGYHSLEEEHSLLRMDPKHCRDNPTQFVPAAGDIPGNTQESTEEKIELLTTEVPLALEEESPSEGCPSSEIPMEKEPGEGRISVVDYSYLEGDLPISARPACSNKLIDYILGGASSDLETSSDPEGEDWDEEAEDDGFDSDSSLSDSDLEQDPEGLHLWNSFCSVDPYNPQNFTATIQTAARIVPEEPSDSEKDLSGKSDLENSSQSGSLPETPEHSSGEEDDWESSADEAESLKLWNSFCNSDDPYNPLNFKAPFQTSGENEKGCRDSKTPSESIVAISECHTLLSCKVQLLGSQESECPDSVQRDVLSGGRHTHVKRKKVTFLEEVTEYYISGDEDRKGPWEEFARDGCRFQKRIQETEDAIGYCLTFEHRERMFNRLQGTCFKGLNVLKQC

SEQ ID NO: 8347 - protein, 394 aa, Homo sapiens
MAVPPSAPQPRASFHLRRHTPCPQCSWGMEEKAAASASCREPPGPPRAAAVAYFGISVDPDDILPGALRLIQELRPHWKPEQVRTKRFTDGITNKLVACYVEEDMQDCVLVRVYGERTELLVDRENEVRNFQLLRAHSCAPKLYCTFQNGLCYEYMQGVALEPEHIREPRLFRLIALEMAKIHTIHANGSLPKPILWHKMHNYFTLVKNEINPSLSADVPKVEVLERELAWLKEHLSQLESPVVFCHNDLLCKNIIYDSIKGHVRFIDYEYAGYNYQAFDIGNHFNEFAGVNEVDYCLYPARETQLQWLHYYLQAQKGMAVTPREVQRLYVQVNKFALGPSCVSSTMTASLQCCRVGNRHGEIARLTLSGLFPGVSLLLGSLGPHPEPVLHHRL

SEQ ID NO: 8348 - protein, 386 aa, Homo sapiens
MAVPPSAPQPRASFHLRRHTPCPQCSWGMEEKAAASASCREPPGPPRAAAVAYFGISVDPDDILPGALRLIQELRPHWKPEQVRTKRFTDGITNKLVACYVEEDMQDCVLVRVYGERTELLVDRENEVRNFQLLRAHSCAPKLYCTFQNGLCYEYMQGVALEPEHIREPRLFRLIALEMAKIHTIHANGSLPKPILWHKMHNYFTLVKNEINPSLSADVPKVEVLERELAWLKEHLSQLESPVVFCHNDLLCKNIIYDSIKGHVRFIDYEYAGYNYQAFDIGNHFNEFAGVNEVDYCLYPARETQLQWLHYYLQAQKGMAVTPREVQRLYVQVNKFALASHFFWALWALIQNQYSTIDFDFLRYAVIRFNQYFKVKPQASALEMPK

SEQ ID NO: 8349 - protein, 622 aa, Homo sapiens
MSMRSPISAQLALDGVGTMVNCTIKSEEKKEPCHEAPQGSATAAEPQPGDPARASQDSADPQAPAQGNFRGSWDCSSPEGNGSPEPKRPGVSEAASGSQEKLDFNRNLKEVVPAIEKLLSSDWKERFLGRNSMEAKDVKGTQESLAEKELQLLVMIHQLSTLRDQLLTAHSEQKNMAAMLFEKQQQQMELARQQQEQIAKQQQQLIQQQHKINLLQQQIQQVNMPYVMIPAFPPSHQPLPVTPDSQLALPIQPIPCKPVEYPLQLLHSPPAPVVKRPGAMATHHPLQEPSQPLNLTAKPKAPELPNTSSSPSLKMSSCVPRPPSHGGPTRDLQSSPPSLPLGFLGEGDAVTKAIQDARQLLHSHSGALDGSPNTPFRKDLISLDSSPAKERLEDGCVHPLEEAMLSCDMDGSRHFPESRNSSHIKRPMNAFMVWAKDERRKILQAFPDMHNSSISKILGSRWKSMTNQEKQPYYEEQARLSRQHLEKYPDYKYKPRPKRTCIVEGKRLRVGEYKALMRTRRQDARQSYVIPPQAGQVQMSSSDVLYPRAAGMPLAQPLVEHYVPRSLDPNMPVIVNTCSLREEGEGTDDRHSVADGEMYRYSEDEDSEGEEKSDGELVVLTD

SEQ ID NO: 8350 - protein, 509 aa, Homo sapiens
MSVMSSKRPASPYGEADGEVAMVTSRQKVEEEESDGLPAFHLPLHVSFPNKPHSEEFQPVSLLTQETCGHRTPTSQHNTMEVDGNKVMSSFAPHNSSTSPQKAEEGGRQSGESLSSTALGTPERRKGSLADVVDTLKQRKMEELIKNEPEETPSIEKLLSKDWKDKLLAMGSGNFGEIKGTPESLAEKERQLMGMINQLTSLREQLLAAHDEQKKLAASQIEKQRQQMELAKQQQEQIARQQQQLLQQQHKINLLQQQIQVQGQLPPLMIPVFPPDQRTLAAAAQQGFLLPPGFSYKAGCSDPYPVQLIPTTMAAAAAATPGLGPLQLQQLYAAQLAAMQVSPGGKLPGIPQGNLGAAVSPTSIHTDKSTNSPPPKSKDEVAQPLNLSAKPKTSDGKSPTSPTSPHMPALRINSGAGPLKASVPAALASPSARVSTIGYLNDHDAVTKAIQEARQMKEQLRREQQVLDGKVAVVNSLGLNNCRTEKEVLESQSQEFIGNPEGVVAMNPT

SEQ ID NO: 8351 - protein, 438 aa, Homo sapiens
MTSYMAIDGSALQVPLRQKPRRKTQGFLTMSRRRISCKDLGHADCQGWLYKKKEKGSFLSNKWKKFWVILKGSSLYWYSNQMAEKADGFVNLPDFTVERASECKKKHAFKISHPQIKTFYFAAENVQEMNVWLNKLGSAVIHQESTTKDEECYSESEQEDPEIAAETPPPPHASQTQSLTAQQASSSSPSLSGTSYSFSSLENTVKTPSSFPSSLSKERQSLPDTVNSLSAAEDEGQPITFAVQVHSPVPSEAGIHKALENSFVTSESGFLNSLSSDDTSSLSSNHDHLTVPDKPAGSKIMDKEETKVSEDDEMEKLYKSLEQASLSPLGDRRPSTKKELRKSFVKRCKNPSINEKLHKIRTLNSTLKCKEHDLAMINQLLDDPKLTARKYREWKVMNTLLIQDIYQQQRASPAPDDTDDTPQELKKSPSSPSVENSI

SEQ ID NO: 8352 - protein, 1186 aa, Homo sapiens
MCEVMPTINEGDRLGPPHGADADANFEQLMVNMLDEREKLLESLRESQETLAATQSRLQDAIHERDQLQRHLNSALPQEFATLTRELSMCREQLLEREEEISELKAERNNTRLLLEHLECLVSRHERSLRMTVVKRQAQSPSGVSSEVEVLKALKSLFEHHKALDEKVRERLRAALERVTTLEEQLAGAHQQVSALQQGAGVRDGAAEEEGTVELGPKRLWKEDTGRVEELQELLEKQNFELSQARERLVTLTTTVTELEEDLGTARRDLIKSEELSSKHQRDLREALAQKEDMEERITTLEKRYLAAQREATSIHDLNDKLENELANKESLHRQCEEKARHLQELLEVAEQKLQQTMRKAETLPEVEAELAQRIAALTKAEERHGNIEEHLRQLEGQLEEKNQELARVRQREKMNEDHNKRLSDTVDRLLSESNERLQLHLKERMAALEEKGRLSEEIEKLRQEVDQLKGRGGPFVDGVHSRSHMGSAADVRFSLGTTTHAPPGVHRRYSALREESAKDWETSPLPGMLAPAAGPAFDSDPEISDVDEDEPGGLVGSADVVSPSGHSDAQTLAMMLQEQLDAINEEIRMIQEEKESTELRAEEIETRVTSGSMEALNLKQLRKRGSIPTSLTALSLASASPPLSGRSTPKLTSRSAAQDLDRMGVMTLPSDLRKHRRKLLSPVSREENREDKATIKCETSPPSSPRTLRLEKLGHPALSQEEGKSALEDQGSNPSSSNSSQDSLHKGAKRKGIKSSIGRLFGKKEKGRLIQLSRDGATGHVLLTDSEFSMQEPMVPAKLGTQAEKDRRLKKKHQLLEDARRKGMPFAQWDGPTVVSWLELWVGMPAWYVAACRANVKSGAIMSALSDTEIQREIGISNALHRLKLRLAIQEMVSLTSPSAPPTSRTSSGNVWVTHEEMETLETSTKTDSEEGSWAQTLAYGDMNHEWIGNEWLPSLGLPQYRSYFMECLVDARMLDHLTKKDLRVHLKMVDSFHRTSLQYGIMCLKRLNYDRKELEKRREESQHEIKDVLVWTNDQVVHWVQSIGLRDYAGNLHESGVHGALLALDENFDHNTLALILQIPTQNTQARQVMEREFNNLLALGTDRKLDDGDDKVFRRAPSWRKRFRPREHHGRGGMLSASAETLPAGFRVSTLGTLQPPPAPPKKIMPEAHSHYLYGHMLSAFRD

SEQ ID NO: 8353 - protein, 235 aa, Homo sapiens
MRTQVYEGLCKNYFSLAVLQRDRIKLLFFDILVFLSVFLLFLLFLVDIMANNTTSLGSPWPENFWEDLIMSFTVSMAIGLVLGGFIWAVFICLSRRRRASAPISQWSSSRRSRSSYTHGLNRTGFYRHSGCERRSNLSLASLTFQRQASLEQANSFPRKSSFRASTFHPFLQCPPLPVETESQLVTLPSSNISPTISTSHSLSRPDYWSSNSLRVGLSTPPPPAYESIIKAFPDS

SEQ ID NO: 8354 - protein, 1433 aa, Homo sapiens
MATSRGASRCPRDIANVMQRLQDEQEIVQKRTFTKWINSHLAKRKPPMVVDDLFEDMKDGVKLLALLEVLSGQKLPCEQGRRMKRIHAVANIGTALKFLEGRKSMHRGSPIKLVNINSTDIADGRPSIVLGLMWTIILYFQIEELTSNLPQLQSLSSSASSVDSIVSSETPSPPSKRKVTTKIQGNAKKALLKWVQYTAGKQTGIEVKDFGKSWRSGVAFHSVIHAIRPELVDLETVKGRSNRENLEDAFTIAETELGIPRLLDPEDVDVDKPDEKSIMTYVAQFLKHYPDIHNASTDGQEDDREDRVIFKEMKVWIEQFERDLTRAQMVESNLQDKYQSFKHFRVQYEMKRKQIEHLIQPLHRDGKLSLDQALVKQSWDRVTSRLFDWHIQLDKSLPAPLGTIGAWLYRAEVALREEITVQQVHEETANTIQRKLEQHKDLLQNTDAHKRAFHEIYRTRSVNGIPVPPDQLEDMAERFHFVSSTSELHLMKMEFLELKYRLLSLLVLAESKLKSWIIKYGRRESVEQLLQNYVSFIENSKFFEQYEVTYQILKQTAEMYVKADGSVEEAENVMKFMNETTAQWRNLSVEVRSVRSMLEEVISNWDRYGNTVASLQAWLEDAEKMLNQSENAKKDFFRNLPHWIQQHTAMNDAGNFLIETCDEMVSRDLKQQLLLLNGRWRELFMEVKQYAQADEMDRMKKEYTDCVVTLSAFATEAHKKLSEPLEVSFMNVKLLIQDLEDIEQRVPVMDAQYKIITKTAHLITKESPQEEGKEMFATMSKLKEQLTKVKECYSPLLYESQQLLIPLEELEKQMTSFYDSLGKINEIITVLEREAQSSALFKQKHQELLACQENCKKTLTLIEKGSQSVQKFVTLSNVLKHFDQTRLQRQIADIHVAFQSMVKKTGDWKKHVETNSRLMKKFEESRAELEKVLRIAQEGLEEKGDPEELLRRHTEFFSQLDQRVLNAFLKACDELTDILPEQEQQGLQEAVRKLHKQWKDLQGEAPYHLLHLKIDVEKNRFLASVEECRTELDRETKLMPQEGSEKIIKEHRVFFSDKGPHHLCEKRLQLIEELCVKLPVRDPVRDTPGTCHVTLKELRAAIDSTYRKLMEDPDKWKDYTSRFSEFSSWISTNETQLKGIKGEAIDTANHGEVKRAVEEIRNGVTKRGETLSWLKSRLKVLTEVSSENEAQKQGDELAKLSSSFKALVTLLSEVEKMLSNFGDCVQYKEIVKNSLEELISGSKEVQEQAEKILDTENLFEAQQLLLHHQQKTKRISAKKRDVQQQIAQAQQGEGGLPDRGHEELRKLESTLDGLERSRERQERRIQVTLRKWERFETNKETVVRYLFQTGSSHERFLSFSSLESLSSELEQTKEFSKRTESIAVQAENLVKEASEIPLGPQNKQLLQQQAKSIKEQVKKLEDTLEEEYVIDKS

SEQ ID NO: 8355 - protein, 1654 aa, Homo sapiens
EKIEQNGLALIQNKKEDVSSIVMSTLRELGQTWANLDHMVGQLKILLKSVLDQWSSHKVAFDKINSYLMEARYSLSRFRLLTGSLEAVQVQVDNLQNLQDDLEKQERSLQKFGSITNQLLKECHPPVTETLTNTLKEVNMRWNNLLEEIAEQLQSSKALLQLWQRYKDYSKQCASTVQQQEDRTNELLKAATNKDIADDEVATWIQDCNDLLKGLGTVKDSLFFLHELGEQLKQQVDASAASAIQSDQLSLSQHLCALEQALCKQQTSLQAGVLDYETFAKSLEALEAWIVEAEEILQGQDPSHSSDLSTIQERMEELKGQMLKFSSMAPDLDRLNELGYRLPLNDKEIKRMQNLNRHWSLISSQTTERFSKLQSFLLQHQTFLEKCETWMEFLVQTEQKLAVEISGNYQHLLEQQRAHELFQAEMFSRQQILHSIIIDGQRLLEQGQVDDRDEFNLKLTLLSNQWQGVIRRAQQRRGIIDSQIRQWQRYREMAEKLRKWLVEVSYLPMSGLGSVPIPLQQARTLFDEVQFKEKVFLRQQGSYILTVEAGKQLLLSADSGAEAALQAELAEIQEKWKSASMRLEEQKKKLAFLLKDWEKCEKGIADSLEKLRTFKKKLSQSLPDHHEELHAEQMRCKELENAVGSWTDDLTQLSLLKDTLSAYISADDISILNERVELLQRQWEELCHQLSLRRQQIGERLNEWAVFSEKNKELCEWLTQMESKVSQNGDILIEEMIEKLKKDYQEEIAIAQENKIQLQQMGERLAKASHESKASEIEYKLGKVNDRWQHLLDLIAARVKKLKETLVAVQQLDKNMSSLRTWLAHIESELAKPIVYDSCNSEEIQRKLNEQQELQRDIEKHSTGVASVLNLCEVLLHDCDACATDAECDSIQQATRNLDRRWRNICAMSMERRLKIEETWRLWQKFLDDYSRFEDWLKSSERTAAFPSSSGVIYTVAKEELKKFEAFQRQVHECLTQLELINKQYRRLARENRTDSACSLKQMVHEGNQRWDNLQKRVTSILRRLKHFIGQREEFETARDSILVWLTEMDLQLTNIEHFSECDVQAKIKQLKAFQQEISLNHNKIEQIIAQGEQLIEKSEPLDAAIIEEELDELRRYCQEVFGRVERYHKKLIRLPLPDDEHDLSDRELELEDSAALSDLHWHDRSADSLLSPQPSSNLSLSLAQPLRSERSGRDTPASVDSIPLEWDHDYDLSRDLESAMSRALPSEDEEGQDDKDFYLRGAVGLSDVMIPESPEAYVKLTENAIKNTSGDHSALESQIRQLGKALDDSRFQIQQTENIIRSKTPTGPELDTSYKGYMKLLGECSSSIDSVKRLEHKLKEEEESLPGFVNLHSTETQTAGVIDRWELLQAQALSKELRMKQNLQKWQQFNSDLNSIWAWLGDTEEELEQLQRLELSTDIQTIELQIKKLKELQKAVDHRKAIILSINLCSPEFTQADSKESRDLQDRLSQMNGRWDRVCSLLEEWRGLLQDALMQCQGFHEMSHGLLLMLENIDRRKNEIVPIDSNLDAEILQDHHKQLMQIKHELLESQLRVASLQDMSCQLLVNAEGTDCLEAKEKVHVIGNRLKLLLKEVSRHIKELEKLLDVSSSQQDLSSWSSADELDTSGSVSPTSGRSTPNRQKTVHKRWLRFLPF

SEQ ID NO: 8356 - protein, 1725 aa, Homo sapiens
MATSRGASRCPRDIANVMQRLQDEQEIVQKRTFTKWINSHLAKRKPPMVVDDLFEDMKDGVKLLALLEVLSGQKLPCEQGRRMKRIHAVANIGTALKFLEGRKIKLVNINSTDIADGRPSIVLGLMWTIILYFQIEELTSNLPQLQSLSSSASSVDSIVSSETPSPPSKRKVTTKIQGNAKKALLKWVQYTAGKQTGIEVKDFGKSWRSGVAFHSVIHAIRPELVDLETVKGRSNRENLEDAFTIAETELGIPRLLDPEDVDVDKPDEKSIMTYVAQFLKHYPDIHNASTDGQEDDEILPGFPSFANSVQNFKREDRVIFKEMKVWIEQFERDLTRAQMVESNLQDKYQSFKHFRVQYEMKRKQIEHLIQPLHRDGKLSLDQALVKQSWDRVTSRLFDWHIQLDKSLPAPLGTIGAWLYRAEVALREEITVQQVHEETANTIQRKLEQHKDLLQNTDAHKRAFHEIYRTRSVNGIPVPPDQLEDMAERFHFVSSTSELHLMKMEFLELKYRLLSLLVLAESKLKSWIIKYGRRESVEQLLQNYVSFIENSKFFEQYEVTYQILKQTAEMYVKADGSVEEAENVMKFMNETTAQWRNLSVEVRSVRSMLEEVISNWDRYGNTVASLQAWLEDAEKMLNQSENAKKDFFRNLPHWIQQHTAMNDAGNFLIETCDEMVSRDLKQQLLLLNGRWRELFMEVKQYAQADEMDRMKKEYTDCVVTLSAFATEAHKKLSEPLEVSFMNVKLLIQDLEDIEQRVPVMDAQYKIITKTAHLITKESPQEEGKEMFATMSKLKEQLTKVKECYSPLLYESQQLLIPLEELEKQMTSFYDSLGKINEIITVLEREAQSSALFKQKHQELLACQENCKKTLTLIEKGSQSVQKFVTLSNVLKHFDQTRLQRQIADIHVAFQSMVKKTGDWKKHVETNSRLMKKFEESRAELEKVLRIAQEGLEEKGDPEELLRRHTEFFSQLDQRVLNAFLKACDELTDILPEQEQQGLQEAVRKLHKQWKDLQGEAPYHLLHLKIDVEKNRFLASVEECRTELDRETKLMPQEGSEKIIKEHRVFFSDKGPHHLCEKRLQLIEELCVKLPVRDPVRDTPGTCHVTLKELRAAIDSTYRKLMEDPDKWKDYTSRFSEFSSWISTNETQLKGIKGEAIDTANHGEVKRAVEEIRNGVTKRGETLSWLKSRLKVLTEVSSENEAQKQGDELAKLSSSFKALVTLLSEVEKMLSNFGDCVQYKEIVKNSLEELISGSKEVQEQAEKILDTENLFEAQQLLLHHQQKTKRISAKKRDVQQQIAQAQQGEGGLPDRGHEELRKLESTLDGLERSRERQERRIQVTLRKWERFETNKETVVRYLFQTGSSHERFLSFSSLESLSSELEQTKEFSKRTESIAVQAENLVKEASEIPLGPQNKQLLQQQAKSIKEQVKKLEDTLEEDIKTMEMVKTKWDHFGSNFETLSVWITEKEKELNALETSSSAMDMQISQIKVTIQEIESKLSSIVGLEEEAQSFAQFVTTGESARIKAKLTQIRRYGEELREHAQCLEGTILGHLSQQQKFEENLRKIQQSVSEFEDKLAVPIKICSSATETYKVLQEHMDLCQALESLSSAITAFSASARKVVNRDSCVQEAAALQQQYEDILRRAKERQTALENLLAHWQRLEKELSSFLTWLERGEAKASSPEMDISADRVKVEGELQLIQASSRKCEEGKNKMLFVTVTLFKIIK

SEQ ID NO: 8357 - protein, 8797 aa, Homo sapiens
MATSRGASRCPRDIANVMQRLQDEQEIVQKRTFTKWINSHLAKRKPPMVVDDLFEDMKDGVKLLALLEVLSGQKLPCEQGRRMKRIHAVANIGTALKFLEGRKIKLVNINSTDIADGRPSIVLGLMWTIILYFQIEELTSNLPQLQSLSSSASSVDSIVSSETPSPPSKRKVTTKIQGNAKKALLKWVQYTAGKQTGIEVKDFGKSWRSGVAFHSVIHAIRPELVDLETVKGRSNRENLEDAFTIAETELGIPRLLDPEDVDVDKPDEKSIMTYVAQFLKHYPDIHNASTDGQEDDEILPGFPSFANSVQNFKREDRVIFKEMKVWIEQFERDLTRAQMVESNLQDKYQSFKHFRVQYEMKRKQIEHLIQPLHRDGKLSLDQALVKQSWDRVTSRLFDWHIQLDKSLPAPLGTIGAWLYRAEVALREEITVQQVHEETANTIQRKLEQHKDLLQNTDAHKRAFHEIYRTRSVNGIPVPPDQLEDMAERFHFVSSTSELHLMKMEFLELKYRLLSLLVLAESKLKSWIIKYGRRESVEQLLQNYVSFIENSKFFEQYEVTYQILKQTAEMYVKADGSVEEAENVMKFMNETTAQWRNLSVEVRSVRSMLEEVISNWDRYGNTVASLQAWLEDAEKMLNQSENAKKDFFRNLPHWIQQHTAMNDAGNFLIETCDEMVSRDLKQQLLLLNGRWRELFMEVKQYAQADEMDRMKKEYTDCVVTLSAFATEAHKKLSEPLEVSFMNVKLLIQDLEDIEQRVPVMDAQYKIITKTAHLITKESPQEEGKEMFATMSKLKEQLTKVKECYSPLLYESQQLLIPLEELEKQMTSFYDSLGKINEIITVLEREAQSSALFKQKHQELLACQENCKKTLTLIEKGSQSVQKFVTLSNVLKHFDQTRLQRQIADIHVAFQSMVKKTGDWKKHVETNSRLMKKFEESRAELEKVLRIAQEGLEEKGDPEELLRRHTEFFSQLDQRVLNAFLKACDELTDILPEQEQQGLQEAVRKLHKQWKDLQGEAPYHLLHLKIDVEKNRFLASVEECRTELDRETKLMPQEGSEKIIKEHRVFFSDKGPHHLCEKRLQLIEELCVKLPVRDPVRDTPGTCHVTLKELRAAIDSTYRKLMEDPDKWKDYTSRFSEFSSWISTNETQLKGIKGEAIDTANHGEVKRAVEEIRNGVTKRGETLSWLKSRLKVLTEVSSENEAQKQGDELAKLSSSFKALVTLLSEVEKMLSNFGDCVQYKEIVKNSLEELISGSKEVQEQAEKILDTENLFEAQQLLLHHQQKTKRISAKKRDVQQQIAQAQQGEGGLPDRGHEELRKLESTLDGLERSRERQERRIQVTLRKWERFETNKETVVRYLFQTGSSHERFLSFSSLESLSSELEQTKEFSKRTESIAVQAENLVKEASEIPLGPQNKQLLQQQAKSIKEQVKKLEDTLEEDIKTMEMVKTKWDHFGSNFETLSVWITEKEKELNALETSSSAMDMQISQIKVTIQEIESKLSSIVGLEEEAQSFAQFVTTGESARIKAKLTQIRRYGEELREHAQCLEGTILGHLSQQQKFEENLRKIQQSVSEFEDKLAVPIKICSSATETYKVLQEHMDLCQALESLSSAITAFSASARKVVNRDSCVQEAAALQQQYEDILRRAKERQTALENLLAHWQRLEKELSSFLTWLERGEAKASSPEMDISADRVKVEGELQLIQALQNEVVSQASFYSKLLQLKESLFSVASKDDVKMMKLHLEQLDERWRDLPQIINKRINFLQSVVAEHQQFDELLLSFSVWIKLFLSELQTTSEISIMDHQVALTRHKDHAAEVESKKGELQSLQGHLAKLGSLGRAEDLHLLQGKAEDCFQLFEEASQVVERRQLALSHLAEFLQSHASLSGILRQLRQTVEATNSMNKNESDLIEKDLNDALQNAKALESAAVSLDGILSKAQYHLKIGSSEQRTSCRATADQLCGEVERIQNLLGTKQSEADALAVLKKAFQDQKEELLKSIEDIEERTDKERLKEPTRQALQQRLRVFNQLEDELNSHEHELCWLKDKAKQIAQKDVAFAPEVDREINRLEVTWDDTKRLIHENQGQCCGLIDLMREYQNLKSAVSKVLENASSVIVTRTTIKDQEDLKWAFSKHETAKNKMNYKQKDLDNFTSKGKHLLSELKKIHSSDFSLVKTDMESTVDKWLDVSEKLEENMDRLRVSLSIWDDVLSTRDEIEGWSNNCVPQMAENISNLDNHLRAEELLKEFESEVKNKALRLEELHSKVNDLKELTKNLETPPDLQFIEADLMQKLEHAKEITEVAKGTLKDFTAQSTQVEKFINDITTWFTKVEESLMNCAQNETCEALKKVKDIQKELQSQQSNISSTQENLNSLCRKYHSAELESLGRAMTGLIKKHEAVSQLCSKTQASLQESLEKHFSESMQEFQEWFLGAKAAAKESSDRTGDSKVLEAKLHDLQNILDSVSDGQSKLDAVTQEGQTLYAHLSKQIVSSIQEQITKANEEFQAFLKQCLKDKQALQDCASELGSFEDQHRKLNLWIHEMEERFNTENLGESKQHIPEKKNEVHKVEMFLGELLAARESLDKLSQRGQLLSEEGHGAGQEGRLCSQLLTSHQNLLRMTKEKLRSCQVALQEHEALEEALQSMWFWVKAIQDRLACAESTLGSKDTLEKRLSQIQDILLMKGEGEVKLNMAIGKGEQALRSSNKEGQRVIQTQLETLKEVWADIMSSSVHAQSTLESVISQWNDYVERKNQLEQWMESVDQKIEHPLQPQPGLKEKFVLLDHLQSILSEAEDHTRALHRLIAKSRELYEKTEDESFKDTAQEELKTQFNDIMTVAKEKMRKVEEIVKDHLMYLDAVHEFTDWLHSAKEELHRWSDMSGDSSATQKKLSKIKELIDSREIGASRLSRVESLAPEVKQNTTASGCELMHTEMQALRADWKQWEDSVFQTQSCLENLVSQMALSEQEFSGQVAQLEQALEQFSALLKTWAQQLTLLEGKNTDEEIVECWHKGQEILDALQKAEPRTEDLKSQLNELCRFSRDLSTYSGKVSGLIKEYNCLCLQASKGCQNKEQILQQRFRKAFRDFQQWLVNAKITTAKCFDIPQNISEVSTSLQKIQEFLSESENGQHKLNMMLSKGELLSTLLTKEKAKGIQAKVTAAKEDWKNFHSNLHQKESALENLKIQMKDFEVSAEPIQDWLSKTEKMVHESSNRLYDLPAKRREQQKLQSVLEEIHCYEPQLNRLKEKAQQLWEGQAASKSFRHRVSQLSSQYLALSNLTKEKVSRLDRIVAEHNQFSLGIKELQDWMTDAIHMLDSYCHPTSDKSVLDSRTLKLEALLSVKQEKEIQMKMIVTRGESVLQNTSPEGIPTIQQQLQSVKDMWASLLSAGIRCKSQLEGALSKWTSYQDGVRQFSGWMDSMEANLNESERQHAELRDKTTMLGKAKLLNEEVLSYSSLLETIEVKGAGMTEHYVTQLELQDLQERYRAIQERAKEAVTKSEKLVRLHQEYQRDLKAFEVWLGQEQEKLDQYSVLEGDAHTHETTLRDLQELQVHCAEGQALLNSVLHTREDVIPSGIPQAEDRALESLRQDWQAYQHRLSETRTQFNNVVNKLRLMEQKFQQVDEWLKTAEEKVSPRTRRQSNRATKEIQLHQMKKWHEEVTAYRDEVEEVGARAQEILDESHVNSRMGCQATQLTSRYQALLLQVLEQIKFLEEEIQSLEESESSLSSYSDWYGSTHKNFKNVATKIDKVDTVMMGKKLKTLEVLLKDMEKGHSLLKSAREKGERAVKYLEEGEAERLRKEIHDHMEQLKELTSTVRKEHMTLEKGLHLAKEFSDKCKALTQWIAEYQEILHVPEEPKMELYEKKAQLSKYKSLQQTVLSHEPSVKSVREKGEALLELVQDVTLKDKIDQLQSDYQDLCSIGKEHVFSLEAKVKDHEDYNSELQEVEKWLLQMSGRLVAPDLLETSSLETITQQLAHHKAMMEEIAGFEDRLNNLQMKGDTLIGQCADHLQAKLKQNVHAHLQGTKDSYSAICSTAQRMYQSLEHELQKHVSRQDTLQQCQAWLSAVQPDLEPSPQPPLSRAEAIKQVKHFRALQEQARTYLDLLCSMCDLSNASVKTTAKDIQQTEQTIEQKLVQAQNLTQGWEEIKHLKSELWIYLQDADQQLQNMKRRHSELELNIAQNMVSQVKDFVKKLQSKQASVNTIIEKVNKLTKKEESPEHKEINHLNDQWLDLCRQSNNLCLQREEDLQRTRDYHDCMNVVEVFLEKFTTEWDNLARSDAESTAVHLEALKKLALALQERKYAIEDLKDQKQKMIEHLNLDDKELVKEQTSHLEQRWFQLEDLIKRKIQVSVTNLEELNVVQSRFQELMEWAEEQQPNIAEALKQSPPPDMAQNLLMDHLAICSELEAKQMLLKSLIKDADRVMADLGLNERQVIQKALSDAQSHVNCLSDLVGQRRKYLNKALSEKTQFLMAVFQATSQIQQHERKIMFREHICLLPDDVSKQVKTCKSAQASLKTYQNEVTGLWAQGRELMKEVTEQEKSEVLGKLQELQSVYDSVLQKCSHRLQELEKNLVSRKHFKEDFDKACHWLKQADIVTFPEINLMNESSELHTQLAKYQNILEQSPEYENLLLTLQRTGQTILPSLNEVDHSYLSEKLNALPRQFNVIVALAKDKFYKVQEAILARKEYASLIELTTQSLSELEAQFLRMSKVPTDLAVEEALSLQDGCRAILDEVAGLGEAVDELNQKKEGFRSTGQPWQPDKMLHLVTLYHRLKRQTEQRVSLLEDTTSAYQEHEKMCQQLERQLKSVKEEQSKVNEETLPAEEKLKMYHSLAGSLQDSGIVLKRVTIHLEDLAPHLDPLAYEKARHQIQSWQGELKLLTSAIGETVTECESRMVQSIDFQTEMSRSLDWLRRVKAELSGPVYLDLNLQDIQEEIRKIQIHQEEVQSSLRIMNALSHKEKEKFTKAKELISADLEHSLAELSELDGDIQEALRTRQATLTEIYSQCQRYYQVFQAANDWLEDAQELLQLAGNGLDVESAEENLKSHMEFFSTEDQFHSNLEELHSLVATLDPLIKPTGKEDLEQKVASLELRSQRMSRDSGAQVDLLQRCTAQWHDYQKAREEVIELMNDTEKKLSEFSLLKTSSSHEAEEKLSEHKALVSVVNSFHEKIVALEEKASQLEKTGNDASKATLSRSMTTVWQRWTRLRAVAQDQEKILEDAVDEWTGFNNKVKKATEMIDQLQDKLPGSSAEKASKAELLTLLEYHDTFVLELEQQQSALGMLRQQTLSMLQDGAAPTPGEEPPLMQEITAMQDRCLNMQEKVKTNGKLVKQELKDREMVETQINSVKCWVQETKEYLGNPTIEIDAQLEELQILLTEATNHRQNIEKMAEEQKEKYLGLYTILPSELSLQLAEVALDLKIRDQIQDKIKEVEQSKATSQELSRQIQKLAKDLTTILTKLKAKTDNVVQAKTDQKVLGEELDGCNSKLMELDAAVQKFLEQNGQLGKPLAKKIGKLTELHQQTIRQAENRLSKLNQAASHLEEYNEMLELILKWIEKAKVLAHGTIAWNSASQLREQYILHQTLLEESKEIDSELEAMTEKLQYLTSVYCTEKMSQQVAELGRETEELRQMIKIRLQNLQDAAKDMKKFEAELKKLQAALEQAQATLTSPEVGRLSLKEQLSHRQHLLSEMESLKPKVQAVQLCQSALRIPEDVVASLPLCHAALRLQEEASRLQHTAIQQCNIMQEAVVQYEQYEQEMKHLQQLIEGAHREIEDKPVATSNIQELQAQISRHEELAQKIKGYQEQIASLNSKCKMLTMKAKHATMLLTVTEVEGLAEGTEDLDGELLPTPSAHPSVVMMTAGRCHTLLSPVTEESGEEGTNSEISSPPACRSPSPVANTDASVNQDIAYYQALSAERLQTDAAKIHPSTSASQEFYEPGLEPSATAKLGDLQRSWETLKNVISEKQRTLYEALERQQKYQDSLQSISTKMEAIELKLSESPEPGRSPESQMAEHQALMDEILMLQDEINELQSSLAEELVSESCEADPAEQLALQSTLTVLAERMSTIRMKASGKRQLLEEKLNDQLEEQRQEQALQRYRCEADELDSWLLSTKATLDTALSPPKEPMDMEAQLMDCQNMLVEIEQKVVALSELSVHNENLLLEGKAHTKDEAEQLAGKLRRLKGSLLELQRALHDKQLNMQGTAQEKEESDVDLTATQSPGVQEWLAQARTTWTQQRQSSLQQQKELEQELAEQKSLLRSVASRGEEILIQHSAAETSGDAGEKPDVLSQELGMEGEKSSAEDQMRMKWESLHQEFSTKQKLLQNVLEQEQEQVLYSRPNRLLSGVPLYKGDVPTQDKSAVTSLLDGLNQAFEEVSSQSGGAKRQSIHLEQKLYDGVSATSTWLDDVEERLFVATALLPEETETCLFNQEILAKDIKEMSEEMDKNKNLFSQAFPENGDNRDVIEDTLGCLLGRLSLLDSVVNQRCHQMKERLQQILNFQNDLKVLFTSLADNKYIILQKLANVFEQPVAEQIEAIQQAEDGLKEFDAGIIELKRRGDKLQVEQPSMQELSKLQDMYDELMMIIGSRRSGLNQNLTLKSQYERALQDLADLLETGQEKMAGDQKIIVSSKEEIQQLLDKHKEYFQGLESHMILTETLFRKIISFAVQKETQFHTELMAQASAVLKRAHKRGVELEYILETWSHLDEDQQELSRQLEVVESSIPSVGLVEENEDRLIDRITLYQHLKSSLNEYQPKLYQVLDDGKRLLISISCSDLESQLNQLGECWLSNTNKMSKELHRLETILKHWTRYQSESADLIHWLQSAKDRLEFWTQQSVTVPQELEMVRDHLNAFLEFSKEVDAQSSLKSSVLSTGNQLLRLKKVDTATLRSELSRIDSQWTDLLTNIPAVQEKLHQLQMDKLPSRHAISEVMSWISLMENVIQKDEDNIKNSIGYKAIHEYLQKYKGFKIDINCKQLTVDFVNQSVLQISSQDVESKRSDKTDFAEQLGAMNKSWQILQGLVTEKIQLLEGLLESWSEYENNVQCLKTWFETQEKRLKQQHRIGDQASVQNALKDCQDLEDLIKAKEKEVEKIEQNGLALIQNKKEDVSSIVMSTLRELGQTWANLDHMVGQLKILLKSVLDQWSSHKVAFDKINSYLMEARYSLSRFRLLTGSLEAVQVQVDNLQNLQDDLEKQERSLQKFGSITNQLLKECHPPVTETLTNTLKEVNMRWNNLLEEIAEQLQSSKALLQLWQRYKDYSKQCASTVQQQEDRTNELLKAATNKDIADDEVATWIQDCNDLLKGLGTVKDSLFFLHELGEQLKQQVDASAASAIQSDQLSLSQHLCALEQALCKQQTSLQAGVLDYETFAKSLEALEAWIVEAEEILQGQDPSHSSDLSTIQERMEELKGQMLKFSSMAPDLDRLNELGYRLPLNDKEIKRMQNLNRHWSLISSQTTERFSKLQSFLLQHQTFLEKCETWMEFLVQTEQKLAVEISGNYQHLLEQQRAHELFQAEMFSRQQILHSIIIDGQRLLEQGQVDDRDEFNLKLTLLSNQWQGVIRRAQQRRGIIDSQIRQWQRYREMAEKLRKWLVEVSYLPMSGLGSVPIPLQQARTLFDEVQFKEKVFLRQQGSYILTVEAGKQLLLSADSGAEAALQAELAEIQEKWKSASMRLEEQKKKLAFLLKDWEKCEKGIADSLEKLRTFKKKLSQSLPDHHEELHAEQMRCKELENAVGSWTDDLTQLSLLKDTLSAYISADDISILNERVELLQRQWEELCHQLSLRRQQIGERLNEWAVFSEKNKELCEWLTQMESKVSQNGDILIEEMIEKLKKDYQEEIAIAQENKIQLQQMGERLAKASHESKASEIEYKLGKVNDRWQHLLDLIAARVKKLKETLVAVQQLDKNMSSLRTWLAHIESELAKPIVYDSCNSEEIQRKLNEQQELQRDIEKHSTGVASVLNLCEVLLHDCDACATDAECDSIQQATRNLDRRWRNICAMSMERRLKIEETWRLWQKFLDDYSRFEDWLKSSERTAAFPSSSGVIYTVAKEELKKFEAFQRQVHECLTQLELINKQYRRLARENRTDSACSLKQMVHEGNQRWDNLQKRVTSILRRLKHFIGQREEFETARDSILVWLTEMDLQLTNIEHFSECDVQAKIKQLKAFQQEISLNHNKIEQIIAQGEQLIEKSEPLDAAIIEEELDELRRYCQEVFGRVERYHKKLIRLPLPDDEHDLSDRELELEDSAALSDLHWHDRSADSLLSPQPSSNLSLSLAQPLRSERSGRDTPASVDSIPLEWDHDYDLSRDLESAMSRALPSEDEEGQDDKDFYLRGAVGLSGDHSALESQIRQLGKALDDSRFQIQQTENIIRSKTPTGPELDTSYKGYMKLLGECSSSIDSVKRLEHKLKEEEESLPGFVNLHSTETQTAGVIDRWELLQAQALSKELRMKQNLQKWQQFNSDLNSIWAWLGDTEEELEQLQRLELSTDIQTIELQIKKLKELQKAVDHRKAIILSINLCSPEFTQADSKESRDLQDRLSQMNGRWDRVCSLLEEWRGLLQDALMQCQGFHEMSHGLLLMLENIDRRKNEIVPIDSNLDAEILQDHHKQLMQIKHELLESQLRVASLQDMSCQLLVNAEGTDCLEAKEKVHVIGNRLKLLLKEVSRHIKELEKLLDVSSSQQDLSSWSSADELDTSGSVSPTSGRSTPNRQKTPRGKCSLSQPGPSVSSPHSRSTKGGSDSSLSEPGPGRSGRGFLFRVLRAALPLQLLLLLLIGLACLVPMSEEDYSCALSNNFARSFHPMLRYTNGPPPL

SEQ ID NO: 8358 - protein, 1355 aa, Homo sapiens
ETFAKSLEALEAWIVEAEEILQGQDPSHSSDLSTIQERMEELKGQMLKFSSMAPDLDRLNELGYRLPLNDKEIKRMQNLNRHWSLISSQTTERFSKLQSFLLQHQTFLEKCETWMEFLVQTEQKLAVEISGNYQHLLEQQRAHELFQAEMFSRQQILHSIIIDGQRLLEQGQVDDRDEFNLKLTLLSNQWQGVIRRAQQRRGIIDSQIRQWQRYREMAEKLRKWLVEVSYLPMSGLGSVPIPLQQARTLFDEVQFKEKVFLRQQGSYILTVEAGKQLLLSADSGAEAALQAELAEIQEKWKSASMRLEEQKKKLAFLLKDWEKCEKGIADSLEKLRTFKKKLSQSLPDHHEELHAEQMRCKELENAVGSWTDDLTQLSLLKDTLSAYISADDISILNERVELLQRQWEELCHQLSLRRQQIGERLNEWAVFSEKNKELCEWLTQMESKVSQNGDILIEEMIEKLKKDYQEEIAIAQENKIQLQQMGERLAKASHESKASEIEYKLGKVNDRWQHLLDLIAARVKKLKETLVAVQQLDKNMSSLRTWLAHIESELAKPIVYDSCNSEEIQRKLNEQQELQRDIEKHSTGVASVLNLCEVLLHDCDACATDAECDSIQQATRNLDRRWRNICAMSMERRLKIEETWRLWQKFLDDYSRFEDWLKSSERTAAFPSSSGVIYTVAKEELKKFEAFQRQVHECLTQLELINKQYRRLARENRTDSACSLKQMVHEGNQRWDNLQKRVTSILRRLKHFIGQREEFETARDSILVWLTEMDLQLTNIEHFSECDVQAKIKQLKAFQQEISLNHNKIEQIIAQGEQLIEKSEPLDAAIIEEELDELRRYCQEVFGRVERYHKKLIRLPLPDDEHDLSDRELELEDSAALSDLHWHDRSADSLLSPQPSSNLSLSLAQPLRSERSGRDTPASVDSIPLEWDHDYDLSRDLESAMSRALPSEDEEGQDDKDFYLRGAVGLSGDHSALESQIRQLGKALDDSRFQIQQTENIIRSKTPTGPELDTSYKGYMKLLGECSSSIDSVKRLEHKLKEEEESLPGFVNLHSTETQTAGVIDRWELLQAQALSKELRMKQNLQKWQQFNSDLNSIWAWLGDTEEELEQLQRLELSTDIQTIELQIKKLKELQKAVDHRKAIILSINLCSPEFTQADSKESRDLQDRLSQMNGRWDRVCSLLEEWRGLLQDALMQCQGFHEMSHGLLLMLENIDRRKNEIVPIDSNLDAEILQDHHKQLMQIKHELLESQLRVASLQDMSCQLLVNAEGTDCLEAKEKVHVIGNRLKLLLKEVSRHIKELEKLLDVSSSQQDLSSWSSADELDTSGSVSPTSGRSTPNRQKTVHKRWLRFLPF

SEQ ID NO: 8359 - protein, 315 aa, Homo sapiens
MDVNKFEASVGFLDVKKFLSTWKLQNPRTHFVLSPHCFMGGIMAPKDIMTNTHAKSILNSMNSLRKSNTLCDVTLRVEQKDFPAHRIVLAACSDYFCAMFTSELSEKGKPYVDIQGLTASTMEILLDFVYTETVHVTVENVQELLPAACLLQLKGVKQACCEFLESQLDPSNCLGIRDFAETHNCVDLMQAAEVFSQKHFPEVVQHEEFILLSQGEVEKLIKCDEIQVDSEEPVFEAVINWVKHAKKEREESLPNLLQYVRMPLLTPRYITDVIDAEPFIRCSLQCRDLVDEAKKFHLRPELRSQMQGPRTRARL

SEQ ID NO: 8360 - protein, 568 aa, Homo sapiens
MGGIMAPKDIMTNTHAKSILNSMNSLRKSNTLCDVTLRVEQKDFPAHRIVLAACSDYFCAMFTSELSEKGKPYVDIQGLTASTMEILLDFVYTETVHVTVENVQELLPAACLLQLKGVKQACCEFLESQLDPSNCLGIRDFAETHNCVDLMQAAEVFSQKHFPEVVQHEEFILLSQGEVEKLIKCDEIQVDSEEPVFEAVINWVKHAKKEREESLPNLLQYVRMPLLTPRYITDVIDAEPFIRCSLQCRDLVDEAKKFHLRPELRSQMQGPRTRARLGANEVLLVVGGFGSQQSPIDVVEKYDPKTQEWSFLPSITRKRRYVASVSLHDRIYVIGGYDGRSRLSSVECLDYTADEDGVWYSVAPMNVRRGLAGATTLGDMIYVSGGFDGSRRHTSMERYDPNIDQWSMLGDMQTAREGAGLVVASGVIYCLGGYDGLNILNSVEKYDPHTGHWTNVTPMATKRSGAGVALLNDHIYVVGGFDGTAHLSSVEAYNIRTDSWTTVTSMTTPRCYVGATVLRGRLYAIAGYDGNSLLSSIECYDPIIDSWEVVTSMGTQRCDAGVCVLREK

SEQ ID NO: 8361 - protein, 1580 aa, Homo sapiens
MEAATTLHPGPRPALPLGGPGPLGEFLPPPECPVFEPSWEEFADPFAFIHKIRPIAEQTGICKVRPPPDWQPPFACDVDKLHFTPRIQRLNELEAQTRVKLNFLDQIAKYWELQGSTLKIPHVERKILDLFQLNKLVAEEGGFAVVCKDRKWTKIATKMGFAPGKAVGSHIRGHYERILNPYNLFLSGDSLRCLQKPNLTTDTKDKEYKPHDIPQRQSVQPSETCPPARRAKRMRAERQSLAVLPRLECSGAILAHCNLRLLDSSNSSASASQAMNIKIEPEETTEARTHNLRRRMGCPTPKCENEKEMKSSIKQEPIERKDYIVENEKEKPKSRSKKATNAVDLYVCLLCGSGNDEDRLLLCDGCDDSYHTFCLIPPLHDVPKGDWRCPKCLAQECSKPQEAFGFEQAARDYTLRTFGEMADAFKSDYFNMPVHMVPTELVEKEFWRLVSTIEEDVTVEYGADIASKEFGSGFPVRDGKIKLSPEEEEYLDSGWNLNNMPVMEQSVLAHITADICGMKLPWLYVGMCFSSFCWHIEDHWSYSINYLHWGEPKTWYGVPGYAAEQLENVMKKLAPELFVSQPDLLHQLVTIMNPNTLMTHEVPVYRTNQCAGEFVITFPRAYHSGFNQGFNFAEAVNFCTVDWLPLGRQCVEHYRLLHRYCVFSHDEMICKMASKADVLDVVVASTVQKDMAIMIEDEKALRETVRKLGVIDSERMDFELLPDDERQCVKCKTTCFMSAISCSCKPGLLVCLHHVKELCSCPPYKYKLRYRYTLDDLYPMMNALKLRAESYNEWALNVNEALEAKINKKKSLVSFKALIEESEMKKFPDNDLLRHLRLVTQDAEKCASVAQQLLNGKRQTRYRSGGGKSQNQLTVNELRQFVTQLYALPCVLSQTPLLKDLLNRVEDFQQHSQKLLSEETPSAAELQDLLDVSFEFDVELPQLAEMRIRLEQARWLEEVQQACLDPSSLTLDDMRRLIDLGVGLAPYSAVEKAMARLQELLTVSEHWDDKAKSLLKARPRHSLNSLATAVKEIEEIPAYLPNGAALKDSVQRARDWLQDVEGLQAGGRVPVLDTLIELVTRGRSIPVHLNSLPRLETLVAEVQAWKECAVNTFLTENSPYSLLEVLCPRCDIGLLGLKRKQRKLKEPLPNGKKKSTKLESLSDLERALTESKETASAMATLGEARLREMEALQSLRLANEGKLLSPLQDVDIKICLCQKAPAAPMIQCELCRDAFHTSCVAVPSISQGLRIWLCPHCRRSEKPPLEKILPLLASLQRIRVRLPEGDALRYMIERTVNWQHRAQQLLSSGNLKFVQDRVGSGLLYSRWQASAGQVSDTNKVSQPPGTTSFSLPDDWDNRTSYLHSPFSTGRSCIPLHGVSPEVNELLMEAQLLQVSLPEIQELYQTLLAKPSPAQQTDRSSPVRPSSEKNDCCRGKRDGINSLERKLKRRLEREGLSSERWERVKKMRTPKKKKIKLSHPKDMNNFKLERERSYELVRSAETHSLPSDTSYSEQEDSEDEDAICPAVSCLQPEGDEVDWVQCDGSCNQWFHQVCVGVSPEMAEKEDYICVRCTVKDAPSRK

SEQ ID NO: 8362 - protein, 1544 aa, Homo sapiens
MEAATTLHPGPRPALPLGGPGPLGEFLPPPECPVFEPSWEEFADPFAFIHKIRPIAEQTGICKVRPPPDWQPPFACDVDKLHFTPRIQRLNELEAQTRVKLNFLDQIAKYWELQGSTLKIPHVERKILDLFQLNKLVAEEGGFAVVCKDRKWTKIATKMGFAPGKAVGSHIRGHYERILNPYNLFLSGDSLRCLQKPNLTTDTKDKEYKPHDIPQRQSVQPSETCPPARRAKRMRAEAMNIKIEPEETTEARTHNLRRRMGCPTPKCENEKEMKSSIKQEPIERKDYIVENEKEKPKSRSKKATNAVDLYVCLLCGSGNDEDRLLLCDGCDDSYHTFCLIPPLHDVPKGDWRCPKCLAQECSKPQEAFGFEQAARDYTLRTFGEMADAFKSDYFNMPVHMVPTELVEKEFWRLVSTIEEDVTVEYGADIASKEFGSGFPVRDGKIKLSPEEEEYLDSGWNLNNMPVMEQSVLAHITADICGMKLPWLYVGMCFSSFCWHIEDHWSYSINYLHWGEPKTWYGVPGYAAEQLENVMKKLAPELFVSQPDLLHQLVTIMNPNTLMTHEVPVYRTNQCAGEFVITFPRAYHSGFNQGFNFAEAVNFCTVDWLPLGRQCVEHYRLLHRYCVFSHDEMICKMASKADVLDVVVASTVQKDMAIMIEDEKALRETVRKLGVIDSERMDFELLPDDERQCVKCKTTCFMSAISCSCKPGLLVCLHHVKELCSCPPYKYKLRYRYTLDDLYPMMNALKLRAESYNEWALNVNEALEAKINKKKSLVSFKALIEESEMKKFPDNDLLRHLRLVTQDAEKCASVAQQLLNGKRQTRYRSGGGKSQNQLTVNELRQFVTQLYALPCVLSQTPLLKDLLNRVEDFQQHSQKLLSEETPSAAELQDLLDVSFEFDVELPQLAEMRIRLEQARWLEEVQQACLDPSSLTLDDMRRLIDLGVGLAPYSAVEKAMARLQELLTVSEHWDDKAKSLLKARPRHSLNSLATAVKEIEEIPAYLPNGAALKDSVQRARDWLQDVEGLQAGGRVPVLDTLIELVTRGRSIPVHLNSLPRLETLVAEVQAWKECAVNTFLTENSPYSLLEVLCPRCDIGLLGLKRKQRKLKEPLPNGKKKSTKLESLSDLERALTESKETASAMATLGEARLREMEALQSLRLANEGKLLSPLQDVDIKICLCQKAPAAPMIQCELCRDAFHTSCVAVPSISQGLRIWLCPHCRRSEKPPLEKILPLLASLQRIRVRLPEGDALRYMIERTVNWQHRAQQLLSSGNLKFVQDRVGSGLLYSRWQASAGQVSDTNKVSQPPGTTSFSLPDDWDNRTSYLHSPFSTGRSCIPLHGVSPEVNELLMEAQLLQVSLPEIQELYQTLLAKPSPAQQTDRSSPVRPSSEKNDCCRGKRDGINSLERKLKRRLEREGLSSERWERVKKMRTPKKKKIKLSHPKDMNNFKLERERSYELVRSAETHSLPSDTSYSEQEDSEDEDAICPAVSCLQPEGDEVDWVQCDGSCNQWFHQVCVGVSPEMAEKEDYICVRCTVKDAPSRK

SEQ ID NO: 8363 - protein, 419 aa, Homo sapiens
MRNIFKRNQEPIVAPATTTATMPIGPVDNSTESGGAGESQEDMFAKLKEKLFNEINKIPLPPWALIAIAVVAGLLLLTCCFCICKKCCCKKKKNKKEKGKGMKNAMNMKDMKGGQDDDDAETGLTEGEGEGEEEKEPENLGKLQFSLDYDFQANQLTVGVLQAAELPALDMGGTSDPYVKVFLLPDKKKKYETKVHRKTLNPAFNETFTFKVPYQELGGKTLVMAIYDFDRFSKHDIIGEVKVPMNTVDLGQPIEEWRDLQGGEKEEPEKLGDICTSLRYVPTAGKLTVCILEAKNLKKMDVGGLSDPYVKIHLMQNGKRLKKKKTTVKKKTLNPYFNESFSFEIPFEQIQKVQVVVTVLDYDKLGKNEAIGKIFVGSNATGTELRHWSDMLANPRRPIAQWHSLKPEEEVDALLGKNK

SEQ ID NO: 8364 - protein, 967 aa, Homo sapiens
MPSPPGLRALWLCAALCASRRAGGAPQPGPGPTACPAPCHCQEDGIMLSADCSELGLSAVPGDLDPLTAYLDLSMNNLTELQPGLFHHLRFLEELRLSGNHLSHIPGQAFSGLYSLKILMLQNNQLGGIPAEALWELPSLQSLRLDANLISLVPERSFEGLSSLRHLWLDDNALTEIPVRALNNLPALQAMTLALNRISHIPDYAFQNLTSLVVLHLHNNRIQHLGTHSFEGLHNLETLDLNYNKLQEFPVAIRTLGRLQELGFHNNNIKAIPEKAFMGNPLLQTIHFYDNPIQFVGRSAFQYLPKLHTLSLNGAMDIQEFPDLKGTTSLEILTLTRAGIRLLPSGMCQQLPRLRVLELSHNQIEELPSLHRCQKLEEIGLQHNRIWEIGADTFSQLSSLQALDLSWNAIRSIHPEAFSTLHSLVKLDLTDNQLTTLPLAGLGGLMHLKLKGNLALSQAFSKDSFPKLRILEVPYAYQCCPYGMCASFFKASGQWEAEDLHLDDEESSKRPLGLLARQAENHYDQDLDELQLEMEDSKPHPSVQCSPTPGPFKPCEYLFESWGIRLAVWAIVLLSVLCNGLVLLTVFAGGPVPLPPVKFVVGAIAGANTLTGISCGLLASVDALTFGQFSEYGARWETGLGCRATGFLAVLGSEASVLLLTLAAVQCSVSVSCVRAYGKSPSLGSVRAGVLGCLALAGLAAALPLASVGEYGASPLCLPYAPPEGQPAALGFTVALVMMNSFCFLVVAGAYIKLYCDLPRGDFEAVWDCAMVRHVAWLIFADGLLYCPVAFLSFASMLGLFPVTPEAVKSVLLVVLPLPACLNPLLYLLFNPHFRDDLRRLRPRAGDSGPLAYAAAGELEKSSCDSTQALVAFSDVDLILEASEAGRPPGLETYGFPSVTLISCQQPGAPRLEGSHCVEPEGNHFGNPQPSMDGELLLRAEGSTPAGGGLSGGGGFQPSGLAFASHV

SEQ ID NO: 8365 - protein, 399 aa, Homo sapiens
MGASFWPIRQAREQQRRALSFRQTSWLSEPPLGPAPHLSMVQAHGGRSRAQPLTLSLGAAMTQPPPEKTPAKKHVRLQERRGSNVALMLDVRSLGAVEPICSVNTPREVTLHFLRTAGHPLTRWALQRQPPSPKQLEEEFLKIPSNFVSPEDLDIPGHASKDRYKTILPNPQSRVCLGRAQSQEDGDYINANYIRGYDGKEKVYIATQGPMPNTVSDFWEMVWQEEVSLIVMLTQLREGKEKCVHYWPTEEETYGPFQIRIQDMKECPEYTVRQLTIQYQEERRSVKHILFSAWPDHQTPESAGPLLRLVAEVEESPETAAHPGPIVVHCSAGIGRTGCFIATRIGCQQLKARGEVDILGIVCQLRLDRGGMIQTAEQYQFLHHTLALYAGQLPEEPSP

SEQ ID NO: 8366 - protein, 481 aa, Homo sapiens
MRWLWPLAVSLAVILAVGLSRVSGGAPLHLGRHRAETQEQQSRSKRGTEDEEAKGVQQYVPEEWAEYPRPIHPAGLQPTKPLVATSPNPGKDGGTPDSGQELRGNLTGAPGQRLQIQNPLYPVTESSYSAYAIMLLALVVFAVGIVGNLSVMCIVWHSYYLKSAWNSILASLALWDFLVLFFCLPIVIFNEITKQRLLGDVSCRAVPFMEVSSLGVTTFSLCALGIDRFHVATSTLPKVRPIERCQSILAKLAVIWVGSMTLAVPELLLWQLAQEPAPTMGTLDSCIMKPSASLPESLYSLVMTYQNARMWWYFGCYFCLPILFTVTCQLVTWRVRGPPGRKSECRASKHEQCESQLNSTVVGLTVVYAFCTLPENVCNIVVAYLSTELTRQTLDLLGLINQFSTFFKGAITPVLLLCICRPLGQAFLDCCCCCCCEECGGASEASAANGSDNKLKTEVSSSIYFHKPRESPPLLPLGTPC

SEQ ID NO: 8367 - protein, 600 aa, Homo sapiens
MSRVAKYRRQVSEDPDIDSLLETLSPEEMEELEKELDVVDPDGSVPVGLRQRNQTEKQSTGVYNREAMLNFCEKETKKLMQREMSMDESKQVETKTDAKNGEERGRDASKKALGPRRDSDLGKEPKRGGLKKSFSRDRDEAGGKSGEKPKEEKIIRGIDKGRVRAAVDKKEAGKDGRGEERAVATKKEEEKKGSDRNTGLSRDKDKKREEMKEVAKKEDDEKVKGERRNTDTRKEGEKMKRAGGNTDMKKEDEKVKRGTGNTDTKKDDEKVKKNEPLHEKEAKDDSKTKTPEKQTPSGPTKPSEGPAKVEEEAAPSIFDEPLERVKNNDPEMTEVNVNNSDCITNEILVRFTEALEFNTVVKLFALANTRADDHVAFAIAIMLKANKTITSLNLDSNHITGKGILAIFRALLQNNTLTELRFHNQRHICGGKTEMEIAKLLKENTTLLKLGYHFELAGPRMTVTNLLSRNMDKQRQKRLQEQRQAQEAKGEKKDLLEVPKAGAVAKGSPKPSPQPSPKPSPKNSPKKGGAPAAPPPPPPPLAPPLIMENLKNSLSPATQRKMGDKVLPAQEKNSRDQLLAAIRSSNLKQLKKVEVPKLLQ

SEQ ID NO: 8368 - protein, 441 aa, Homo sapiens
MAVVPASLSGQDVGSFAYLTIKDRIPQILTKVIDTLHRHKSEFFEKHGEEGVEAEKKAISLLSKLRNELQTDKPFIPLVEKFVDTDIWNQYLEYQQSLLNESDGKSRWFYSPWLLVECYMYRRIHEAIIQSPPIDYFDVFKESKEQNFYGSQESIIALCTHLQQLIRTIEDLDENQLKDEFFKLLQISLWGNKCDLSLSGGESSSQNTNVLNSLEDLKPFILLNDMEHLWSLLSNCKKTREKASATRVYIVLDNSGFELVTDLILADFLLSSELATEVHFYGKTIPWFVSDTTIHDFNWLIEQVKHSNHKWMSKCGADWEEYIKMGKWVYHNHIFWTLPHEYCAMPQVAPDLYAELQKAHLILFKGDLNYRKLTGDRKWEFSVPFHQALNGFHPAPLCTIRTLKAEIQVGLQPGQGEQLLASEPSWWTTGKYGIFQYDGPL

SEQ ID NO: 8369 - protein, 1483 aa, Homo sapiens
MLHLPLPRSGRTVNFPRSWDESSSISSGLSDASDNLSSEEFNASSSLNSLPSTPTASRRNSTIVLRTDSEKRSLAESGLSWFSESEEKAPKKLEYDSGSLKMEPGTSKWRRERPESCDDSSKGGELKKPISLGHPGSLKKGKTPPVAVTSPITHTAQSALKVAGKPEGKATDKGKLAVKNTGLQRSSSDAGRDRLSDAKKPPSGIARPSTSGSFGYKKPPPATGTATVMQTGGSATLSKIQKSSGIPVKPVNGRKTSLDVSNSAEPGFLAPGARSNIQYRSLPRPAKSSSMSVTGGRGGPRPVSSSIDPSLLSTKQGGLTPSRLKEPTKVASGRTTPAPVNQTDREKEKAKAKAVALDSDNISLKSIGSPESTPKNQASHPTATKLAELPPTPLRATAKSFVKPPSLANLDKVNSNSLDLPSSSDTTHASKVPDLHATSSASGGPLPSCFTPSPAPILNINSASFSQGLELMSGFSVPKETRMYPKLSGLHRSMESLQMPMSLPSAFPSSTPVPTPPAPPAAPTEEETEELTWSGSPRAGQLDSNQRDRNTLPKKGLRYQLQSQEETKERRHSHTIGGLPESDDQSELPSPPALPMSLSAKGQLTNIVSPTAATTPRITRSNSIPTHEAAFELYSGSQMGSTLSLAERPKGMIRSGSFRDPTDDVHGSVLSLASSASSTYSSAEERMQSEQIRKLRRELESSQEKVATLTSQLSANANLVAAFEQSLVNMTSRLRHLAETAEEKDTELLDLRETIDFLKKKNSEAQAVIQGALNASETTPKELRIKRQNSSDSISSLNSITSHSSIGSSKDADAKKKKKKSWLRSSFNKAFSIKKGPKSASSYSDIEEIATPDSSAPSSPKLQHGSTETASPSIKSSTSSSVGTDVTEGPAHPAPHTRLFHANEEEEPEKKEVSELRSELWEKEMKLTDIRLEALNSAHQLDQLRETMHNMQLEVDLLKAENDRLKVAPGPSSGSTPGQVPGSSALSSPRRSLGLALTHSFGPSLADTDLSPMDGISTCGPKEEVTLRVVVRMPPQHIIKGDLKQQEFFLGCSKVSGKVDWKMLDEAVFQVFKDYISKMDPASTLGLSTESIHGYSISHVKRVLDAEPPEMPPCRRGVNNISVSLKGLKEKCVDSLVFETLIPKPMMQHYISLLLKHRRLVLSGPSGTGKTYLTNRLAEYLVERSGREVTEGIVSTFNMHQQSCKDLQLYLSNLANQIDRETGIGDVPLVILLDDLSEAGSISELVNGALTCKYHKCPYIIGTTNQPVKMTPNHGLHLSFRMLTFSNNVEPANGFLVRYLRRKLVESDSDINANKEELLRVLDWVPKLWYHLHTFLEKHSTSDFLIGPCFFLSCPIGIEDFRTWFIDLWNNSIIPYLQEGAKDGIKVHGQKAAWEDPVEWVRDTLPWPSAQQDQSKLYHLPPPTVGPHSIASPPEDRTVKDSTPSSLDSDPLMAMLLKLQEAANYIESPDRETILDPNLQATL

SEQ ID NO: 8370 - protein, 1877 aa, Homo sapiens
MLGSSVKSVQPEVELSSGGGDEGADEPRGAGRKAAAADGRGMLPKRAKAPGGGGGMAKASAAELKVFKSGSVDSRVPGGPPASNLRKQKSLTNLSFLTDSEKKLQLYEPEWSDDMAKAPKGLGKVGSKGREAPLMSKTLSKSEHSLFQAKGSPAGGAKTPLAPLAPNLGKPSRIPRGPYAEVKPLSKAPEAAVSEDGKSDDELLSSKAKAQKSSGPVPSAKGQEERAFLKVDPELVVTVLGDLEQLLFSQMLDPESQRKRTVQNVLDLRQNLEETMSSLRGSQVTHSSLEMTCYDSDDANPRSVSSLSNRSSPLSWRYGQSSPRLQAGDAPSVGGSCRSEGTPAWYMHGERAHYSHTMPMRSPSKLSHISRLELVESLDSDEVDLKSGYMSDSDLMGKTMTEDDDITTGWDESSSISSGLSDASDNLSSEEFNASSSLNSLPSTPTASRRNSTIVLRTDSEKRSLAESGLSWFSESEEKAPKKLEYDSGSLKMEPGTSKWRRERPESCDDSSKGGELKKPISLGHPGSLKKGKTPPVAVTSPITHTAQSALKVAGKPEGKATDKGKLAVKNTGLQRSSSDAGRDRLSDAKKPPSGIARPSTSGSFGYKKPPPATGTATVMQTGGSATLSKIQKSSGIPVKPVNGRKTSLDVSNSAEPGFLAPGARSNIQYRSLPRPAKSSSMSVTGGRGGPRPVSSSIDPSLLSTKQGGLTPSRLKEPTKVASGRTTPAPVNQTDREKEKAKAKAVALDSDNISLKSIGSPESTPKNQASHPTATKLAELPPTPLRATAKSFVKPPSLANLDKVNSNSLDLPSSSDTTHASKVPDLHATSSASGGPLPSCFTPSPAPILNINSASFSQGLELMSGFSVPKETRMYPKLSGLHRSMESLQMPMSLPSAFPSSTPVPTPPAPPAAPTEEETEELTWSGSPRAGQLDSNQRDRNTLPKKGLRYQLQSQEETKERRHSHTIGGLPESDDQSELPSPPALPMSLSAKGQLTNIVSPTAATTPRITRSNSIPTHEAAFELYSGSQMGSTLSLAERPKGMIRSGSFRDPTDDVHGSVLSLASSASSTYSSAEERMQSEQIRKLRRELESSQEKVATLTSQLSANANLVAAFEQSLVNMTSRLRHLAETAEEKDTELLDLRETIDFLKKKNSEAQAVIQGALNASETTPKELRIKRQNSSDSISSLNSITSHSSIGSSKDADAKKKKKKSWVYELRSSFNKAFSIKKGPKSASSYSDIEEIATPDSSAPSSPKLQHGSTETASPSIKSSTSSSVGTDVTEGPAHPAPHTRLFHANEEEEPEKKEVSELRSELWEKEMKLTDIRLEALNSAHQLDQLRETMHNMQLEVDLLKAENDRLKVAPGPSSGSTPGQVPGSSALSSPRRSLGLALTHSFGPSLADTDLSPMDGISTCGPKEEVTLRVVVRMPPQHIIKGDLKQQEFFLGCSKVSGKVDWKMLDEAVFQVFKDYISKMDPASTLGLSTESIHGYSISHVKRVLDAEPPEMPPCRRGVNNISVSLKGLKEKCVDSLVFETLIPKPMMQHYISLLLKHRRLVLSGPSGTGKTYLTNRLAEYLVERSGREVTEGIVSTFNMHQQSCKDLQLYLSNLANQIDRETGIGDVPLVILLDDLSEAGSISELVNGALTCKYHKCPYIIGTTNQPVKMTPNHGLHLSFRMLTFSNNVEPANGFLVRYLRRKLVESDSDINANKEELLRVLDWVPKLWYHLHTFLEKHSTSDFLIGPCFFLSCPIGIEDFRTWFIDLWNNSIIPYLQEGAKDGIKVHGQKAAWEDPVEWVRDTLPWPSAQQDQSKLYHLPPPTVGPHSIASPPEDRTVKDSTPSSLDSDPLMAMLLKLQEAANYIESPDRETILDPNLQATL

SEQ ID NO: 8371 - protein, 1830 aa, Homo sapiens
MDARIVHALLAGRMLGSSVKSVQPEVELSSGGGDEGADEPRGAGRKAAAADGRGMLPKRAKAPGGGGGMAKASAAELKVFKSGSVDSRVPGGPPASNLRKQKSLTNLSFLTDSEKKLQLYEPEWSDDMAKAPKGLGKVGSKGREAPLMSKTLSKSEHSLFQAKGSPAGGAKTPLAPLAPNLGKPSRIPRGPYAEVKPLSKAPEAAVSEDGKSDDELLSSKAKAQKSSGPVPSAKGQEERAFLKVDPELVVTVLGDLEQLLFSQMLDPESQRKRTVQNVLDLRQNLEETMSSLRGSQVTHSSLEMTCYDSDDANPRSVSSLSNRSSPLSWRYGQSSPRLQAGDAPSVGGSCRSEGTPAWYMHGERAHYSHTMPMRSPSKLSHISRLELVESLDSDEVDLKSGYMSDSDLMGKTMTEDDDITTGWDESSSISSGLSDASDNLSSEEFNASSSLNSLPSTPTASRRNSTIVLRTDSEKRSLAESGLSWFSESEEKAPKKLEYDSGSLKMEPGTSKWRRERPESCDDSSKGGELKKPISLGHPGSLKKGKTPPVAVTSPITHTAQSALKVAGKPEGKATDKGKLAVKNTGLQRSSSDAGRDRLSDAKKPPSGIARPSTSGSFGYKKPPPATGTATVMQTGGSATLSKIQKSSGIPVKPVNGRKTSLDVSNSAEPGFLAPGARSNIQYRSLPRPAKSSSMSVTGGRGGPRPVSSSIDPSLLSTKQGGLTPSRLKEPTKVASGRTTPAPVNQTDREKEKAKAKAVALDSDNISLKSIGSPESTPKNQASHPTATKLAELPPTPLRATAKSFVKPPSLANLDKVNSNSLDLPSSSDTTHASKVPDLHATSSASGGPLPSCFTPSPAPILNINSASFSQGLELMSGFSVPKETRMYPKLSGLHRSMESLQMPMSLPSAFPSSTPVPTPPAPPAAPTEEETEELTWSGSPRAGQLDSNQRDRNTLPKKGLRYQLQSQEETKERRHSHTIGGLPESDDQSELPSPPALPMSLSAKGQLTNIVHGSVLSLASSASSTYSSAEERMQSEQIRKLRRELESSQEKVATLTSQLSANANLVAAFEQSLVNMTSRLRHLAETAEEKDTELLDLRETIDFLKKKNSEAQAVIQGALNASETTPKELRIKRQNSSDSISSLNSITSHSSIGSSKDADAKKKKKKSWLRSSFNKAFSIKKGPKSASSYSDIEEIATPDSSAPSSPKLQHGSTETASPSIKSSTSSSVGTDVTEGPAHPAPHTRLFHANEEEEPEKKEVSELRSELWEKEMKLTDIRLEALNSAHQLDQLRETMHNMQLEVDLLKAENDRLKVAPGPSSGSTPGQVPGSSALSSPRRSLGLALTHSFGPSLADTDLSPMDGISTCGPKEEVTLRVVVRMPPQHIIKGDLKQQEFFLGCSKVSGKVDWKMLDEAVFQVFKDYISKMDPASTLGLSTESIHGYSISHVKRVLDAEPPEMPPCRRGVNNISVSLKGLKEKCVDSLVFETLIPKPMMQHYISLLLKHRRLVLSGPSGTGKTYLTNRLAEYLVERSGREVTEGIVSTFNMHQQSCKDLQLYLSNLANQIDRETGIGDVPLVILLDDLSEAGSISELVNGALTCKYHKCPYIIGTTNQPVKMTPNHGLHLSFRMLTFSNNVEPANGFLVRYLRRKLVESDSDINANKEELLRVLDWVPKLWYHLHTFLEKHSTSDFLIGPCFFLSCPIGIEDFRTWFIDLWNNSIIPYLQEGAKDGIKVHGQKAAWEDPVEWVRDTLPWPSAQQDQSKLYHLPPPTVGPHSIASPPEDRTVKDSTPSSLDSDPLMAMLLKLQEAANYIESPDRETILDPNLQATL

SEQ ID NO: 8372 - protein, 331 aa, Homo sapiens
GREGLLGQRRPQDGQARSSCSPGGRTPAARDSIVREVIQNSKEVLSLLQEKNPAFKPVLAIIQAGDDNLMQEINQNLAEEAGLNITHICLPPDSSEAEIIDEILKINEDTRVHGLALQISENLFSNKVLNALKPEKDVDGVTDINLGKLVRGDAHECFVSPVAKAVIELLEKSVGVNLDGKKILVVGAHGSLEAALQCLFQRKGSMTMSIQWKTRQLQSKLHEADIVVLGSPKPEEIPLTWIQPGTTVLNCSHDFLSGKVGCGSPRIHFGGLIEEDDVILLAAALRIQNMVSSGRRWLREQQHRRWRLHCLKLQPLSPVPSDIEISRGQTP

SEQ ID NO: 8373 - protein, 127 aa, Homo sapiens
MTAAATATVLKEGVLEKRSGGLLQLWKRKRCVLTERGLQLFEAKGTGGRPKELSFARIKAVECVESTGRHIYFTLVTEGGGEIDFRCPLEDPGWNAQITLGLVKFKNQQAIQTVRARQSLGTGTLVS

SEQ ID NO: 8374 - protein, 978 aa, Homo sapiens
MGTRLPLVLRQLRRPPQPPGPPRRLRVPCRASSGGGGGGGGGREGLLGQRRPQDGQARSSCSPGGRTPAARDSIVREVIQNSKEVLSLLQEKNPAFKPVLAIIQAGDDNLMQEINQNLAEEAGLNITHICLPPDSSEAEIIDEILKINEDTRVHGLALQISENLFSNKVLNALKPEKDVDGVTDINLGKLVRGDAHECFVSPVAKAVIELLEKSGVNLDGKKILVVGAHGSLEAALQCLFQRKGSMTMSIQWKTRQLQSKLHEADIVVLGSPKPEEIPLTWIQPGTTVLNCSHDFLSGKVGCGSPRIHFGGLIEEDDVILLAAALRIQNMVSSGRRWLREQQHRRWRLHCLKLQPLSPVPSDIEISRGQTPKAVDVLAKEIGLLADEIEIYGKSKAKVRLSVLERLKDQADGKYVLVAGITPTPLGEGKSTVTIGLVQALTAHLNVNSFACLRQPSQGPTFGVKGGAAGGGYAQVIPMEEFNLHLTGDIHAITAANNLLAAAIDTRILHENTQTDKALYNRLVPLVNGVREFSEIQLARLKKLGINKTDPSTLTEEEVSKFARLDIDPSTITWQRVLDTNDRFLRKITIGQGNTEKGHYRQAQFDIAVASEIMAVLALTDSLADMKARLGRMVVASDKSGQPVTADDLGVTGALTVLMKDAIKPNLMQTLEGTPVFVHAGPFANIAHGNSSVLADKIALKLVGEEGFVVTEAGFGADIGMEKFFNIKCRASGLVPNVVVLVATVRALKMHGGGPSVTAGVPLKKEYTEENIQLVADGCCNLQKQIQITQLFGVPVVVALNVFKTDTRAEIDLVCELAKRAGAFDAVPCYHWSVGGKGSVDLARAVREAASKRSRFQFLYDVQVPIVDKIRTIAQAVYGAKDIELSPEAQAKIDRYTQQGFGNLPICMAKTHLSLSHQPDKKGVPRDFILPISDVRASIGAGFIYPLVGTMSTMPGLPTRPCFYDIDLDTETEQVKGLF

SEQ ID NO: 8375 - protein, 726 aa, Homo sapiens
MNHSPLKTALAYECFQDQDNSTLALPSDQKMKTGTSGRQRVQEQVMMTVKRQKSKSSQSSTLSHSNRGSMYDGLADNYNYGTTSRSSYYSKFQAGNGSWGYPIYNGTLKREPDNRRFSSYSQMENWSRHYPRGSCNTTGAGSDICFMQKIKASRSEPDLYCDPRGTLRKGTLGSKGQKTTQNRYSFYSTCSGQKAIKKCPVRPPSCASKQDPVYIPPISCNKDLSFGHSRASSKICSEDIECSGLTIPKAVQYLSSQDEKYQAIGAYYIQHTCFQDESAKQQVYQLGGICKLVDLLRSPNQNVQQAAAGALRNLVFRSTTNKLETRRQNGIREAVSLLRRTGNAEIQKQLTGLLWNLSSTDELKEELIADALPVLADRVIIPFSGWCDGNSNMSREVVDPEVFFNATGCLRNLSSADAGRQTMRNYSGLIDSLMAYVQNCVAASRCDDKSVENCMCVLHNLSYRLDAEVPTRYRQLEYNARNAYTEKSSTGCFSNKSDKMMNNNYDCPLPEEETNPKGSGWLYHSDAIRTYLNLMGKSKKDATLEACAGALQNLTASKGLMSSGMSQLIGLKEKGLPQIARLLQSGNSDVVRSGASLLSNMSRHPLLHRVMGNQVFPEVTRLLTSHTGNTSNSEDILSSACYTVRNLMASQPQLAKQYFSSSMLNNIINLCRSSASPKAAEAARLLLSDMWSSKELQGVLRQQGFDRNMLGTLAGANSLRNFTSRF

SEQ ID NO: 8376 - protein, 1854 aa, Homo sapiens
MEPSSPQDEGLRKKQPKKPVPEILPRPPRALFCLTLENPLRKACISIVEWKPFETIILLTIFANCVALAVYLPMPEDDNNSLNLGLEKLEYFFLIVFSIEAAMKIIAYGFLFHQDAYLRSGWNVLDFTIVFLGVFTVILEQVNVIQSHTAPMSSKGAGLDVKALRAFRVLRPLRLVSGVPSLQVVLNSIFKAMLPLFHIALLVLFMVIIYAIIGLELFKGKMHKTCYFIGTDIVATVENEEPSPCARTGSGRRCTINGSECRGGWPGPNHGITHFDNFGFSMLTVYQCITMEGWTDVLYWVNDAIGNEWPWIYFVTLILLGSFFILNLVLGVLSGEFTKEREKAKSRGTFQKLREKQQLDEDLRGYMSWITQGEVMDVEDFREGKLSLDEGGSDTESLYEIAGLNKIIQFIRHWRQWNRIFRWKCHDIVKSKVFYWLVILIVALNTLSIASEHHNQPLWLTRLQDIANRVLLSLFTTEMLMKMYGLGLRQYFMSIFNRFDCFVVCSGILEILLVESGAMTPLGISVLRCIRLLRIFKITKYWTSLSNLVASLLNSIRSIASLLLLLFLFIVIFALLGMQLFGGRYDFEDTEVRRSNFDNFPQALISVFQVLTGEDWTSMMYNGIMAYGGPSYPGMLVCIYFIILFVCGNYILLNVFLAIAVDNLAEAESLTSAQKAKAEEKKRRKMSKGLPDKSEEEKSTMAKKLEQKPKGEGIPTTAKLKIDEFESNVNEVKDPYPSADFPGDDEEDEPEIPLSPRPRPLAELQLKEKAVPIPEASSFFIFSPTNKIRVLCHRIVNATWFTNFILLFILLSSAALAAEDPIRADSMRNQILKHFDIGFTSVFTVEIVLKMTTYGAFLHKGSFCRNYFNMLDLLVVAVSLISMGLESSAISVVKILRVLRVLRPLRAINRAKGLKHVVQCMFVAISTIGNIVLVTTLLQFMFACIGVQLFKGKFFRCTDLSKMTEEECRGYYYVYKDGDPMQIELRHREWVHSDFHFDNVLSAMMSLFTVSTFEGWPQLLYKAIDSNAEDVGPIYNNRVEMAIFFIIYIILIAFFMMNIFVGFVIVTFQEQGETEYKNCELDKNQRQCVQYALKARPLRCYIPKNPYQYQVWYIVTSSYFEYLMFALIMLNTICLGMQHYNQSEQMNHISDILNVAFTIIFTLEMILKLMAFKARGYFGDPWNVFDFLIVIGSIIDVILSEIDDPDESARISSAFFRLFRVMRLIKLLSRAEGVRTLLWTFIKSFQALPYVALLIVMLFFIYAVIGMQMFGKIALVDGTQINRNNNFQTFPQAVLLLFRCATGEAWQEILLACSYGKLCDPESDYAPGEEYTCGTNFAYYYFISFYMLCAFLVINLFVAVIMDNFDYLTRDWSILGPHHLDEFKAIWAEYDPEAKGRIKHLDVVTLLRRIQPPLGFGKFCPHRVACKRLVGMNMPLNSDGTVTFNATLFALVRTALKIKTEGNFEQANEELRAIIKKIWKRTSMKLLDQVIPPIGDDEVTVGKFYATFLIQEHFRKFMKRQEEYYGYRPKKDIVQIQAGLRTIEEEAAPEICRTVSGDLAAEEELERAMVEAAMEEGIFRRTGGLFGQVDNFLERTNSLPPVMANQRPLQFAEIEMEEMESPVFLEDFPQDPRTNPLARANTNNANANVAYGNSNHSNSHVFSSVHYEREFPEETETPATRGRALGQPCRVLGPHSKPCVEMLKGLLTQRAMPRGQAPPAPCQCPRVESSMPEDRKSSTPGSLHEETPHSRSTRENTSRCSAPATALLIQKALVRGGLGTLAADANFIMATGQALADACQMEPEEVEIMATELLKGREAPEGMASSLGCLNLGSSLGSLDQHQGSQETLIPPRL

SEQ ID NO: 8377 - protein, 1648 aa, Homo sapiens
MSLHSTHNRNNSGDILDIPSSQNSSSLNALTHSSRLKLHLKSDMSECENDDPLLRSAGKVRDINRTYVISASRKTADMPLTPNPVGRLALQRRTTRNKESSLLVSELEDTTEKTAETRLTLQRRAKTDSAEKWKTAEIDSVKMTLNVGGETENNGVSKESRTNVRIVNNAKNSFVASSVPLDEDPQVIEMMADKKYKETFSAPSRANENVALKYSSNRPPIASLSQTEVVRSGHLTTKPTQSKLDIKVLGTGNLYHRSIGKEIAKTSNKFGSLEKRTPTKCTTEHKLTTKCSLPQLKSPAPSILKNRMSNLQVKQRPKSSFLANKQERSAENTILPEEETVVQNTSAGKDPLKVENSQVTVAVRVRPFTKREKIEKASQVVFMSGKEITVEHPDTKQVYNFIYDVSFWSFDECHPHYASQTTVYEKLAAPLLERAFEGFNTCLFAYGQTGSGKSYTMMGFSEEPGIIPRFCEDLFSQVARKQTQEVSYHIEMSFFEVYNEKIHDLLVCKDENGQRKQPLRVREHPVYGPYVEALSMNIVSSYADIQSWLELGNKQRATAATGMNDKSSRSHSVFTLVMTQTKTEFVEGEEHDHRITSRINLIDLAGSERCSTAHTNGDRLKEGVSINKSLLTLGKVISALSEQANQRSVFIPYRESVLTWLLKESLGGNSKTAMIATISPAASNIEETLSTLRYANQARLIVNIAKVNEDMNAKLIRELKAEIAKLKAAQRNSRNIDPERYRLCRQEITSLRMKLHQQERDMAEMQRVWKEKFEQAEKRKLQETKELQKAGIMFQMDNHLPNLVNLNEDPQLSEMLLYMIKEGTTTVGKYKPNSSHDIQLSGVLIADDHCTIKNFGGTVSIIPVGEAKTYVNGKHILEITVLRHGDRVILGGDHYFRFNHPVEVQKGKRPSGRDTPISEGPKDFEFAKNELLMAQRSQLEAEIKEAQLKAKEEMMQGIQIAKEMAQQELSSQKAAYESKIKALEAELREESQRKKMQEINNQKANHKIEELEKAKQHLEQEIYVNKKRLEMETLATKQALEDHSIRHARILEALETEKQKIAKEVQILQQNRNNRDKTFTVQTTWSSMKLSMMIQEANAISSKLKTYYVFGRHDISDKSSSDTSIRVRNLKLGISTFWSLEKFESKLAAMKELYESNGSNRGEDAFCDPEDEWEPDITDAPVSSLSRRRSRSLMKNRRISGCLHDIQVHPIKNLHSSHSSGLMDKSSTIYSNSAESFLPGICKELIGSSLDFFGQSYDEERTIADSLINSFLKIYNGLFAISKAHEEQDEESQDNLFSSDRAIQSLTIQTACAFEQLVVLMKHWLSDLLPCTNIARLEDELRQEVKKLGGYLQLFLQGCCLDISSMIKEAQKNAIQIVQQAVKYVGQLAVLKGSKLHFLENGNNKAASVQEEFMDAVCDGVGLGMKILLDSGLEKAKELQHELFRQCTKNEVTKEMKTNAMGLIRSLENIFAESKIKSFRRQVQEENFEYQDFKRMVNRAPEFLKLKHCLEKAIEIIISALKGCHSDINLLQTCVESIRNLASDFYSDFSVPSTSVGSYESRVTHIVHQELESLAKSLLFCFESEESPDLLKPWETYNQNTKEEHQQSKSSGIDGSKNKGVPKRVYELHGSSPAVSSEECTPSRIQWV

SEQ ID NO: 8378 - protein, 376 aa, Homo sapiens
DLEELCPVCGDKVSGYHYGLLTCESCKGFFKRTVQNNKRYTCIENQNCQIDKTQRKRCPYCRFQKCLSVGMKLEAVRADRMRGGRNKFGPMYKRDRALKQQKKALIRANGLKLEAMSQVIQAMPSDLTISSAIQNIHSASKGLPLNHAALPPTDYDRSPFVTSPISMTMPPHGSLQGYQTYGHFPSRAIKSEYPDPYTSSPESIMGYSYMDSYQTSSPASIPHLILELLKCEPDEPQVQAKIMAYLQQEQANRSKHEKLSTFGLMCKMADQTLFSIVEWARSSIFFRELKGLTLSPSLECSGTILAHGNLHLLHSSDSPASASRVAGITGVHHNTHLIFVFLVEMGFCHVGQAGLKTPDLRVICLPRPPKVLGLWA

SEQ ID NO: 8379 - protein, 541 aa, Homo sapiens
MSSNSDTGDLQESLKHGLTPIGAGLPDRHGSPIPARGRLVMLPKVETEALGLARSHGEQGQMPENMQVSQFKMVNYSYDEDLEELCPVCGDKVSGYHYGLLTCESCKGFFKRTVQNNKRYTCIENQNCQIDKTQRKRCPYCRFQKCLSVGMKLEAVRADRMRGGRNKFGPMYKRDRALKQQKKALIRANGLKLEAMSQVIQAMPSDLTISSAIQNIHSASKGLPLNHAALPPTDYDRSPFVTSPISMTMPPHGSLQGYQTYGHFPSRAIKSEYPDPYTSSPESIMGYSYMDSYQTSSPASIPHLILELLKCEPDEPQVQAKIMAYLQQEQANRSKHEKLSTFGLMCKMADQTLFSIVEWARSSIFFRELKVDDQMKLLQNCWSELLILDHIYRQVVHGKEGSIFLVTGQQVDYSIIASQAGATLNNLMSHAQELVAKLRSLQFDQREFVCLKFLVLFSLDVKNLENFQLVEGVQEQVNAALLDYTMCNYPQQTEKFGQLLLRLPEIRAISMQAEEYLYYKHLNGDVPYNNLLIEMLHAKRA

SEQ ID NO: 8380 - protein, 735 aa, Homo sapiens
MTMYLWLKLLAFGFAFLDTEVFVTGQSPTPSPTGVSSVQTPHLPTHADSQTPSAGTDTQTFSGSAANAKLNPTPGSNAISDVPGERSTASTFPTDPVSPLTTTLSLAHHSSAALPARTSNTTITANTSDAYLNASETTTLSPSGSAVISTTTIATTPSKPTCDEKYANITVDYLYNKETKLFTAKLNVNENVECGNNTCTNNEVHNLTECKNASVSISHNSCTAPDKTLILDVPPGVEKFQLHDCTQVEKADTTICLKWKNIETFTCDTQNITYRFQCGNMIFDNKEIKLENLEPEHEYKCDSEILYNNHKFTNASKIIKTDFGSPGEPQIIFCRSEAAHQGVITWNPPQRSFHNFTLCYIKETEKDCLNLDKNLIKYDLQNLKPYTKYVLSLHAYIIAKVQRNGSAAMCHFTTKSAPPSQVWNMTVSMTSDNSMHVKCRPPRDRNGPHERYHLEVEAGNTLVRNESHKNCDFRVKDLQYSTDYTFKAYFHNGDYPGEPFILHHSTSYNSKALIAFLAFLIIVTSIALLVVLYKIYDLHKKRSCNLDEQQELVERDDEKQLMNVEPIHADILLETYKRKIADEGRLFLAEFQSIPRVFSKFPIKEARKPFNQNKNRYVDILPYDYNRVELSEINGDAGSNYINASYIDGFKEPRKYIAAQGPRDETVDDFWRMIWEQKATVIVMVTRCEEGNRNKCAEYWPSMEEGTRAFGDVVVKINQHKRCPDYIIQKLNIVN

SEQ ID NO: 8381 - protein, 286 aa, Homo sapiens
HEQVGSMGLVEMLHRSNLLALVGGGSSPKFSEISVLIWDDAREGKDSKEKLVLEFTFTKPVLSVRMRHDKIVIVLKNRIYVYSFPDNPRKLFEFDTRDNPKGLCDLCPSLEKQLLVFPGHKCGSLQLVPGTVVASASQKGTLIRLFDTQSKEKLVELRRGTDPATLYCINFSHDSSFLCASSDKGTVHIFALKDTRLNRRSALARVGKVGPMIGQYVDSQWSLASFTVPAESACICAFGRNTSKNVNSVIAICVDGTFHKYVFTPDGNCNREAFDVYLDICDDDDF

SEQ ID NO: 8382 - protein, 302 aa, Homo sapiens
MDEQSQGMQGPPVPQFQPQKALRPDMGYNTLANFRIEKKIGRGQFSEVYRAACLLDGVPVALKKVQIFDLMDAKARADCIKEIDLLKQLNHPNVIKYYASFIEDNELNIVLELADAGDLSRMIKHFKKQKRLIPERTVWKYFVQLCSALEHMHSRRVMHRDIKPANVFITATGVVKLGDLGLGRFFSSKTTAAHSLVGTPYYMSPERIHENGYNFKSDIWSLGCLLYEMAALQSPFYGDKMNLYSLCKKIEQCDYPPLPSDHYSEELRQLVNMCINPDPEKRPDVTYVYDVAKRMHACTASS

SEQ ID NO: 8383 - protein, 426 aa, Homo sapiens
MDCRTKANPDRTFDLVLKVKCHASENEDPVVLWKFPEDFGDQEILQSVPKFCFPFDVERVSQNQVGQHFTFVLTDIESKQRFGFCRLTSGGTICLCILSYLPWFEVYYKLLNTLADYLAKELENDLNETLRSLYNHPVPKANTPVNLSVNQEIFIACEQVLKDQPALVPHSYFIAPDVTGLPTIPESRNLTEYFVAVDVNNMLQLYASMLHERRIVIISSKLSTLTACIHGSAALLYPMYWQHIYIPVLPPHLLDYCCAPMPYLIGIHSSLIERVKNKSLEDVVMLNVDTNTLESPFSDLNNLPSDVVSALKNKLKKQSTATGDGVARAFLRAQAALFGSYRDALRYKPGEPITFCEESFVKHRSSVMKQFLETAINLQLFKQFIDGRLAKLNAGRGFSDVFEEEITSGGFCGGKDKLQYDYPFSQ

SEQ ID NO: 8384 - protein, 674 aa, Homo sapiens
MTSNGVALLNFYNMPSTPSFVGCLQDIKIDWNHITLENISSGSSLNVKAGCVRKDWCESQPCQSRGRCINLWLSYQCDCHRPYEGPNCLREYVAGRFGQDDSTGYVIFTLDESYGDTISLSMFVRTLQPSGLLLALENSTYQYIRVWLERGRLAMLTPNSPKLVVKFVLNDGNVHLISLKIKPYKIELYQSSQNLGFISASTWKIEKGDVIYIGGLPDKQETELNGGFFKGCIQDVRLNNQNLEFFPNPTNNASLNPVLVNVTQGCAGDNSCKSNPCHNGGVCHSRWDDFSCSCPALTSGKACEEVQWCGFSPCPHGAQCQPVLQGFECIANAVFNGQSGQILFRSNGNITRELTNITFGFRTRDANVIILHAEKEPEFLNISIQDSRLFFQLQSGNSFYMLSLTSLQSVNDGTWHEVTLSMTDPLSQTSRWQMEVDNETPFVTSTIATGSLNFLKDNTDIYVGDRAIDNIKGLQGCLSTIEIGGIYLSYFENVHGFINKPQEEQFLKISTNSVVTGCLQLNVCNSNPCLHGGNCEDIYSSYHCSCPLGWSGKHCELNIDECFSNPCIHGNCSDRVAAYHCTCEPGYTGVNCEVDIDNCQSHQCANGATCISHTNGYSCLCFGNFTGKFCRQSRLPSTVCGNEKTNLTCYNGGNCTEFQTELKCMCRPGFTGEW

SEQ ID NO: 8385 - protein, 1294 aa, Homo sapiens
MALKNINYLLIFYLSFSLLIYIKNSFCNKNNTRCLSNSCQNNSTCKDFSKDNDCSCSDTANNLDKDCDNMKDPCFSNPCQGSATCVNTPGERSFLCKCPPGYSGTICETTIGSCGKNSCQHGGICHQDPIYPVCICPAGYAGRFCEIDHDECASSPCQNGAVCQDGIDGYSCFCVPGYQGRHCDLEVDECASDPCKNEATCLNEIGRYTCICPHNYSGYTGAQCEIDLNECNSNPCQSNGECVELSSEKQYGRITGLPSSFSYHEASGYVCICQPGFTGIHCEEDVNECSSNPCQNGGTCENLPGNYTCHCPFDNLSRTFYGGRDCSDILLGCTHQQCLNNGTCIPHFQDGQHGFSCLCPSGYTGSLCEIATTLSFEGDGFLWVKSGSVTTKGSVCNIALRFQTVQPMALLLFRSNRDVFVKLELLSGYIHLSIQVNNQSKVLLFISHNTSDGEWHFVEVIFAEAVTLTLIDDSCKEKCIAKAPTPLESDQSICAFQNSFLGGLPVGMTSNGVALLNFYNMPSTPSFVGCLQDIKIDWNHITLENISSGSSLNVKAGCVRKDWCESQPCQSRGRCINLWLSYQCDCHRPYEGPNCLREYVAGRFGQDDSTGYVIFTLDESYGDTISLSMFVRTLQPSGLLLALENSTYQYIRVWLERGRLAMLTPNSPKLVVKFVLNDGNVHLISLKIKPYKIELYQSSQNLGFISASTWKIEKGDVIYIGGLPDKQETELNGGFFKGCIQDVRLNNQNLEFFPNPTNNASLNPVLVNVTQGCAGDNSCKSNPCHNGGVCHSRWDDFSCSCPALTSGKACEEVQWCGFSPCPHGAQCQPVLQGFECIANAVFNGQSGQILFRSNGNITRELTNITFGFRTRDANVIILHAEKEPEFLNISIQDSRLFFQLQSGNSFYMLSLTSLQSVNDGTWHEVTLSMTDPLSQTSRWQMEVDNETPFVTSTIATGSLNFLKDNTDIYVGDRAIDNIKGLQGCLSTIEIGGIYLSYFENVHGFINKPQEEQFLKISTNSVVTGCLQLNVCNSNPCLHGGNCEDIYSSYHCSCPLGWSGKHCELNIDECFSNPCIHGNCSDRVAAYHCTCEPGYTGVNCEVDIDNCQSHQCANGATCISHTNGYSCLCFGNFTGKFCRQSRLPSTVCGNEKTNLTCYNGGNCTEFQTELKCMCRPGFTGEWCEKDIDECASDPCVNGGLCQDLLNKFQCLCDVAFAGERCEVDLADDLISDIFTTIGSVTVALLLILLLAIVASVVTSNKRATQGTYSPSRQEKEGSRVEMWNLMPPPAMERLI

SEQ ID NO: 8386 - protein, 1406 aa, Homo sapiens
MALKNINYLLIFYLSFSLLIYIKNSFCNKNNTRCLSNSCQNNSTCKDFSKDNDCSCSDTANNLDKDCDNMKDPCFSNPCQGSATCVNTPGERSFLCKCPPGYSGTICETTIGSCGKNSCQHGGICHQDPIYPVCICPAGYAGRFCEIDHDECASSPCQNGAVCQDGIDGYSCFCVPGYQGRHCDLEVDECASDPCKNEATCLNEIGRYTCICPHNYSGVNCELEIDECWSQPCLNGATCQDALGAYFCDCAPGFLGDHCELNTDECASQPCLHGGLCVDGENRYSCNCTGSGFTGTHCETLMPLCWSKPCHNNATCEDSVDNYTCHCWPGYTGAQCEIDLNECNSNPCQSNGECVELSSEKQYGRITGLPSSFSYHEASGYVCICQPGFTGIHCEEDVNECSSNPCQNGGTCENLPGNYTCHCPFDNLSRTFYGGRDCSDILLGCTHQQCLNNGTCIPHFQDGQHGFSCLCPSGYTGSLCEIATTLSFEGDGFLWVKSGSVTTKGSVCNIALRFQTVQPMALLLFRSNRDVFVKLELLSGYIHLSIQVNNQSKVLLFISHNTSDGEWHFVEVIFAEAVTLTLIDDSCKEKCIAKAPTPLESDQSICAFQNSFLGGLPVGMTSNGVALLNFYNMPSTPSFVGCLQDIKIDWNHITLENISSGSSLNVKAGCVRKDWCESQPCQSRGRCINLWLSYQCDCHRPYEGPNCLREYVAGRFGQDDSTGYVIFTLDESYGDTISLSMFVRTLQPSGLLLALENSTYQYIRVWLERGRLAMLTPNSPKLVVKFVLNDGNVHLISLKIKPYKIELYQSSQNLGFISASTWKIEKGDVIYIGGLPDKQETELNGGFFKGCIQDVRLNNQNLEFFPNPTNNASLNPVLVNVTQGCAGDNSCKSNPCHNGGVCHSRWDDFSCSCPALTSGKACEEVQWCGFSPCPHGAQCQPVLQGFECIANAVFNGQSGQILFRSNGNITRELTNITFGFRTRDANVIILHAEKEPEFLNISIQDSRLFFQLQSGNSFYMLSLTSLQSVNDGTWHEVTLSMTDPLSQTSRWQMEVDNETPFVTSTIATGSLNFLKDNTDIYVGDRAIDNIKGLQGCLSTIEIGGIYLSYFENVHGFINKPQEEQFLKISTNSVVTGCLQLNVCNSNPCLHGGNCEDIYSSYHCSCPLGWSGKHCELNIDECFSNPCIHGNCSDRVAAYHCTCEPGYTGVNCEVDIDNCQSHQCANGATCISHTNGYSCLCFGNFTGKFCRQSRLPSTVCGNEKTNLTCYNGGNCTEFQTELKCMCRPGFTGEWCEKDIDECASDPCVNGGLCQDLLNKFQCLCDVAFAGERCEVDLADDLISDIFTTIGSVTVALLLILLLAIVASVVTSNKRATQGTYSPSRQEKEGSRVEMWNLMPPPAMERLI

SEQ ID NO: 8387 - protein, 909 aa, Homo sapiens
MKKRRKVTSNLEKIHLGYHKDSSEGNVAVECDQVTYTHSAGRPTPEALHCYQELPPSPDQRKLLSSLQYNKNLLKYLNDDRQKQPSFCDLLIIVEGKEFSAHKVVVAVGSSYFHACLSKNPSTDVVTLDHVTHSVFQHLLEFLYTSEFFVYKYEIPLVLEAAKFLDIIDAVKLLNNENVAPFHSELTEKSSPEETLNELTGRLSNNHQCKFCSRHFCYKKSLENHLAKTHRSLLLGKKHGLKMLERSFSARRSKRNRKCPVKFDDTSDDEQESGDGSDNLNQENFDKEKSDRNDSEDPGSEYNAEEDELEEEMSDEYSDIEEQSEKDHNDAEEEPEAGDSVGNVHEGLTPVVIQNSNKKILQCPKCDKTFDRIGKYESHTRVHTGEKPFECDICHQRYSTKSNLTVHRKKHSNETEFHKKEHKCPYCNKLHASKKTLAKHVKRFHPENAQEFISIKKTKSESWKCDICKKSFTRRPHLEEHMILHSQDKPFKCTYCEEHFKSRFARLKHQEKFHLGPFPCDICGRQFNDTGNLKRHIECTHGGKRKWTCFICGKSVRERTTLKEHLRIHSGEKPHLCSICGQSFRHGSSYRLHLRVHHDDKRYECDECGKTFIRHDHLTKHKKIHSGEKAHQCEECGKCFGRRDHLTVHYKSVHLGEKVWQKYKATFHQCDVCKKIFKGKSSLEMHFRTHSGEKPYKCQICNQSFRIKKTLTKHLVIHSDARPFNCQHCNATFKRKDKLKYHIDHVHEIKSPDDPLSTSEEKLVSLPVEYSSDDKIFQTETKQYMDQPKVYQSEAKTMLQNVSAEVCVPVTLVPVQMPDTPSDLVRHTTTLPPSSHEILSPQPQSTDYPRAADLAFLEKYTLTPQPANIVHPVRPEQMLDPREQSYLGTLLGLDSTTGVQNISTNEHHS

SEQ ID NO: 8388 - protein, 1142 aa, Homo sapiens
MSLRAYTARCRLNRLRRAACRLFTSEKMVKAIKKLEIEIEARRLIVRKDRHLWKDVGERQKVLNWLLSYNPLWLRIGLETTYGELISLEDNSDVTGLAMFILNRLLWNPDIAAEYRHPTVPHLYRDGHEEALSKFTLKKLLLLVCFLDYAKISRLIDHDPCLFCKDAEFKASKEILLAFSRDFLSGEGDLSRHLGLLGLPVNHVQTPFDEFDFAVTNLAVDLQCGVRLVRTMELLTQNWDLSKKLRIPAISRLQKMHNVDIVLQVLKSRGIELSDEHGNTILSKDIVDRHREKTLRLLWKIAFAFQVDISLNLDQLKEEIAFLKHTKSIKKTISLLSCHSDDLINKKKGKRDSGSFEQYSENIKLLMDWVNAVCAFYNKKVENFTVSFSDGRVLCYLIHHYHPCYVPFDAICQRTTQTVECTQTGSVVLNSSSESDDSSLDMSLKAFDHENTSELYKELLENEKKNFHLVRSAVRDLGGIPAMINHSDMSNTIPDEKVVITYLSFLCARLLDLRKEIRAARLIQTTWRKYKLKTDLKRHQEREKAARIIQLAVINFLAKQRLRKRVNAALVIQKYWRRVLAQRKLLMLKKEKLEKVQNKAASLIQAMWRRYRAKKYLCKVKAACKIQAWYRCWRAHKEYLAILKAVKIIQGCFYTKLERTRFLNVRASAIIIQRKWRAILPAKIAHEHFLMIKRHRAACLIQAHYRGYKGRQVFLRQKSAALIIQKYIRAREAGKHERIKYIEFKKSTVILQALVRGWLVRKRFLEQRAKIRLLHFTAAAYYHLNAVRIQRAYKLYLAVKNANKQVNSVICIQRWFRARLQEKRFIQKYHSIKKIEHEGQECLSQRNRAASVIQKAVRHFLLRKKQEKFTSGIIKIQALWRGYSWRKKNDCTKIKAIRLSLQVVNREIREENKLYKRTALALHYLLTYKHLSAILEALKHLEVVTRLSPLCCENMAQSGAISKIFVLIRSCNRSIPCMEVIRYAVQVLLNVSKYEKTTSAVYDVENCIDILLELLQIYREKPGNKVADKGGSIFTKTCCLLAILLKTTNRASDVRSRSKVVDRIYSLYKLTAHKHKMNTERILYKQKKNSSISIPFIPETPVRTRIVSRLKPDWVLRRDNMEEITNPLQAIQMVMDTLGIPY

SEQ ID NO: 8389 - protein, 3477 aa, Homo sapiens
MANRRVGRGCWEVSPTERRPPAGLRGPAAEEEASSPPVLSLSHFCRSPFLCFGDVLLGASRTLSLALDNPNEEVAEVKISHFPAADLGFSVSQRCFVLQPKEKIVISVNWTPLKEGRVREIMTFLVNDVLKHQAILLGNAEEQKKKKRSLWDTIKKKKISASTSHNRRVSNIQNVNKTFSVSQKVDRVRSPLQACENLAMNEGGPPTENNSLILEENKIPISPISPAFNECHGATCLPLSVRRSTTYSSLHASENRELLNVHSANVSKVSFNEKAVTETSFNSVNVNGQRGENSKLSLTPNCSSTLNITQSQIHFLSPDSFVNNSHGANNELELVTCLSSDMFMKDNSQPVHLESTIAHEIYQKILSPDSFIKDNYGLNQDLESESVNPILSPNQFLKDNMAYMCTSQQTCKVPLSNENSQVPQSPEDWRKSEVSPRIPECQGSKSPKAIFEELVEMKSNYYSFIKQNNPKFSAVQDISSHSHNKQPKRRPILSATVTKRKATCTRENQTEINKPKAKRCLNSAVGEHEKVINNQKEKEDFHSYLPIIDPILSKSKSYKNEVTPSSTTASVARKRKSDGSMEDANVRVAITEHTEVREIKRIHFSPSEPKTSAVKKTKNVTTPISKRISNREKLNLKKKTDLSIFRTPISKTNKRTKPIIAVAQSSLTFIKPLKTDIPRHPMPFAAKNMFYDERWKEKQEQGFTWWLNFILTPDDFTVKTNISEVNAATLLLGIENQHKISVPRAPTKEEMSLRAYTARCRLNRLRRAACRLFTSEKMVKAIKKLEIEIEARRLIVRKDRHLWKDVGERQKVLNWLLSYNPLWLRIGLETTYGELISLEDNSDVTGLAMFILNRLLWNPDIAAEYRHPTVPHLYRDGHEEALSKFTLKKLLLLVCFLDYAKISRLIDHDPCLFCKDAEFKASKEILLAFSRDFLSGEGDLSRHLGLLGLPVNHVQTPFDEFDFAVTNLAVDLQCGVRLVRTMELLTQNWDLSKKLRIPAISRLQKMHNVDIVLQVLKSRGIELSDEHGNTILSKDIVDRHREKTLRLLWKIAFAFQVDISLNLDQLKEEIAFLKHTKSIKKTISLLSCHSDDLINKKKGKRDSGSFEQYSENIKLLMDWVNAVCAFYNKKVENFTVSFSDGRVLCYLIHHYHPCYVPFDAICQRTTQTVECTQTGSVVLNSSSESDDSSLDMSLKAFDHENTSELYKELLENEKKNFHLVRSAVRDLGGIPAMINHSDMSNTIPDEKVVITYLSFLCARLLDLRKEIRAARLIQTTWRKYKLKTDLKRHQEREKAARIIQLAVINFLAKQRLRKRVNAALVIQKYWRRVLAQRKLLMLKKEKLEKVQNKAASLIQGYWRRYSTRQRFLKLKYYSIILQSRIRMIIAVTSYKRYLWATVTIQRHWRAYLRRKQDQQRYEMLKSSTLIIQSMFRKWKQRKMQSQVKATVILQRAFREWHLRKQAKEENSAIIIQSWYRMHKELRKYIYIRSCVVIIQKRFRCFQAQKLYKRRKESILTIQKYYKAYLKGKIERTNYLQKRAAAIQLQAAFRRLKAHNLCRQIRAACVIQSYWRMRQDRVRFLNLKKTIIKFQAHVRKHQQRQKYKKMKKAAVIIQTHFRAYIFAMKVLASYQKTRSAVIVLQSAYRGMQARKMYIHILTSVIKIQSYYRAYVSKKEFLSLKNATIKLQSTVKMKQTRKQYLHLRAAALFIQQCYRSKKIAAQKREEYMQMRESCIKLQAFVRGYLVRKQMRLQRKAVISLQSYFRMRKARQYYLKMYKAIIVIQNYYHAYKAQVNQRKNFLQVKKAATCLQAAYRGYKVRQLIKQQSIAALKIQSAFRGYNKRVKYQSVLQSIIKIQRWYRAYKTLHDTRTHFLKTKAAVISLQSAYRGWKVRKQIRREHQAALKIQSAFRMAKAQKQFRLFKTAALVIQQNFRAWTAGRKQCMEYIELRHAVLVLQSMWKGKTLRRQLQRQHKCAIIIQSYYRMHVQQKKWKIMKKAALLIQKYYRAYSIGREQNHLYLKTKAAVVTLQSAYRGMKVRKRIKDCNKAAVTIQSKYRAYKTKKKYATYRASAIIIQRWYRGIKITNHQHKEYLNLKKTAIKIQSVYRGIRVRRHIQHMHRAATFIKAMFKMHQSRISYHTMRKAAIVIQVRCRAYYQGKMQREKYLTILKAVKVLQASFRGVRVRRTLRKMQTAATLIQSNYRRYRQQTYFNKLKKITKTVQQRYWAMKERNIQFQRYNKLRHSVIYIQAIFRGKKARRHLKMMHIAATLIQRRFRTLMMRRRFLSLKKTAILIQRKYRAHLCTKHHLQFLQVQNAVIKIQSSYRRWMIRKRMREMHRAATFIQSTFRMHRLHMRYQALKQASVVIQQQYQANRAAKLQRQHYLRQRHSAVILQAAFRGMKTRRHLKSMHSSATLIQSRFRSLLVRRRFISLKKATIFVQRKYRATICAKHKLYQFLHLRKAAITIQSSYRRLMVKKKLQEMQRAAVLIQATFRMYRTYITFQTWKHASILIQQHYRTYRAAKLQRENYIRQWHSAVVIQAAYKGMKARQLLREKHKASIVIQSTYRMYRQYCFYQKLQWATKIIQEKYRANKKKQKVFQHNELKKETCVQAGFQDMNIKKQIQEQHQAAIIIQKHCKAFKIRKHYLHLRATVVSIQRRYRKLTAVRTQAVICIQSYYRGFKVRKDIQNMHRAATLIQSFYRMHRAKVDYETKKTAIVVIQNYYRLYVRVKTERKNFLAVQKSVRTIQAAFRGMKVRQKLKNVSEEKMAAIVNQSALCCYRSKTQYEAVQSEGVMIQEWYKASGLACSQEAEYHSQSRAAVTIQKAFCRMVTRKLETQKCAALRIQFFLQMAVYRRRFVQQKRAAITLQHYFRTWQTRKQFLLYRKAAVVLQNHYRAFLSAKHQRQVYLQIRSSVIIIQARSKGFIQKRKFQEIKNSTIKIQAMWRRYRAKKYLCKVKAACKIQAWYRCWRAHKEYLAILKAVKIIQGCFYTKLERTRFLNVRASAIIIQRKWRAILPAKIAHEHFLMIKRHRAACLIQAHYRGYKGRQVFLRQKSAALIIQKYIRAREAGKHERIKYIEFKKSTVILQALVRGWLVRKRFLEQRAKIRLLHFTAAAYYHLNAVRIQRAYKLYLAVKNANKQVNSVICIQRWFRARLQEKRFIQKYHSIKKIEHEGQECLSQRNRAASVIQKAVRHFLLRKKQEKFTSGIIKIQALWRGYSWRKKNDCTKIKAIRLSLQVVNREIREENKLYKRTALALHYLLTYKHLSAILEALKHLEVVTRLSPLCCENMAQSGAISKIFVLIRSCNRSIPCMEVIRYAVQVLLNVSKYEKTTSAVYDVENCIDILLELLQIYREKPGNKVADKGGSIFTKTCCLLAILLKTTNRASDVRSRSKVVDRIYSLYKLTAHKHKMNTERILYKQKKNSSISIPFIPETPVRTRIVSRLKPDWVLRRDNMEEITNPLQAIQMVMDTLGIPY

SEQ ID NO: 8390 - protein, 661 aa, Homo sapiens
MRLKNLTFIIILIISGELYAEEKPCGFPHVENGRIAQYYYTFKSFYFPMSIDKKLSFFCLAGYTTESGRQEEQTTCTTEGWSPEPRCFKKCTKPDLSNGYISDVKLLYKIQENMRYGCASGYKTTGGKDEEVVQCLSDGWSSQPTCRKEHETCLAPELYNGNYSTTQKTFKVKDKVQYECATGYYTAGGKKTEEVECLTYGWSLTPKCTKLKCSSLRLIENGYFHPVKQTYEEGDVVQFFCHENYYLSGSDLIQCYNFGWYPESPVCEGRRNRCPPPPLPINSKIQTHSTTYRHGEIVHIECELNFEIHGSAEIRCEDGKWTEPPKCIEGQEKVACEEPPFIENGAANLHSKIYYNGDKVTYACKSGYLLHGSNEITCNRGKWTLPPECVENNENCKHPPVVMNGAVADGILASYATGSSVEYRCNEYYLLRGSKISRCEQGKWSSPPVCLEPCTVNVDYMNRNNIEMKWKYEGKVLHGDLIDFVCKQGYDLSPLTPLSELSVQCNRGEVKYPLCTRKESKGMCTSPPLIKHGVIISSTVDTYENGSSVEYRCFDHHFLEGSREAYCLDGMWTTPPLCLEPCTLSFTEMEKNNLLLKWDFDNRPHILHGEYIEFICRGDTYPAELYITGSILRMQCDRGQLKYPRCIPRQSTLSYQEPLRT

SEQ ID NO: 8391 - protein, 270 aa, Homo sapiens
MWLLVSVILISRISSVGGEAMFCDFPKINHGILYDEEKYKPFSQVPTGEVFYYSCEYNFVSPSKSFWTRITCAEEGWSPTPKCLRLCFFPFVENGHSESSGQTHLEGDTVQIICNTGYRLQNNENNISCVERGWSTPPKCRSTISAEKCGPPPPIDNGDITSFLLSVYAPGSSVEYQCQNLYQLEGNNQITCRNGQWSEPPKCLDPCVISQEIMEKYNIKLKWTNQQKLYSRTGDIVEFVCKSGYHPTKSHSFRAMCQNGKLVYPSCEEK

SEQ ID NO: 8392 - protein, 577 aa, Homo sapiens
MLLLINVILTLWVSCANGQVKPCDFPEIQHGGLYYKSLRRLYFPAAAGQSYSYYCDQNFVTPSGSYWDYIHCTQDGWSPTVPCLRTCSKSDVEIENGFISESSSIYILNEETQYNCKPGYATAEGNSSGSITCLQNGWSTQPICIKFCDMPVFENSRAKSNGMWFKLHDTLDYECYDGYESSYGNTTDSIVCGEDGWSHLPTCYNSSENCGPPPPISNGDTTSFPQKVYLPWSRVEYQCQSYYELQGSKYVTCSNGDWSEPPRCISMKPCEFPEIQHGHLYYENTRRPYFPVATGQSYSYYCDQNFVTPSGSYWDYIHCTQDGWLPTVPCLRTCSKSDIEIENGFISESSSIYILNKEIQYKCKPGYATADGNSSGSITCLQNGWSAQPICIKFCDMPVFENSRAKSNGMRFKLHDTLDYECYDGYEISYGNTTGSIVCGEDGWSHFPTCYNSSEKCGPPPPISNGDTTSFLLKVYVPQSRVEYQCQSYYELQGSNYVTCSNGEWSEPPRCIHPCIITEENMNKNNIQLKGKSDIKYYAKTGDTIEFMCKLGYNANTSVLSFQAVCREGIVEYPRCE

SEQ ID NO: 8393 - protein, 331 aa, Homo sapiens
MLLLINVILTLWVSCANGQEVKPCDFPEIQHGGLYYKSLRRLYFPAAAGQSYSYYCDQNFVTPSGSYWDYIHCTQDGWLPTVPCLRTCSKSDIEIENGFISESSSIYILNKEIQYKCKPGYATADGNSSGSITCLQNGWSAQPICIKFCDMPVFENSRAKSNGMRFKLHDTLDYECYDGYEISYGNTTGSIVCGEDGWSHFPTCYNSSEKCGPPPPISNGDTTSFLLKVYVPQSRVEYQCQSYYELQGSNYVTCSNGEWSEPPRCIHPCIITEENMNKNNIQLKGKSDIKYYAKTGDTIEFMCKLGYNANTSVLSFQAVCREGIVEYPRCE

SEQ ID NO: 8394 - protein, 355 aa, Homo sapiens
MWLLVSVILISRISSVGGEESCSVAPRMVFSGMISAHCNIPLLGSSDSSASASQVAGITGVHHHTWLIFVFLVEMGFRHVGQAGLKLLTSSDPPTSASQSAGITAMFCDFPKINHGILYDEEKYKPFSQVPTGEVFYYSCEYNFVSPSKSFWTRITCAEEGWSPTPKCLRLCFFPFVENGHSESSGQTHLEGDTVQIICNTGYRLQNNENNISCVERGWSTPPKCRSTISAEKCGPPPPIDNGDITSFLLSVYAPGSSVEYQCQNLYQLEGNNQITCRNGQWSEPPKCLDPCVISQEIMEKYNIKLKWTNQQKLYSRTGDIVEFVCKSGYHPTKSHSFRAMCQNGKLVYPSCEEK

SEQ ID NO: 8395 - protein, 271 aa, Homo sapiens
MWLLVSVILISRISSVGGEATFCDFPKINHGILYDEEKYKPFSQVPTGEVFYYSCEYNFVSPSKSFWTRITCTEEGWSPTPKCLRLCFFPFVENGHSESSGQTHLEGDTVQIICNTGYRLQNNENNISCVERGWSTPPKCRSTDSTGKCGPPPPIDNGDITSFPLSVYAPASSVEYQCQNLYQLEGNKRITCRNGQWSEPPKCLHPCVISREIMENYNIALRWTAKQKLYLRTGESAEFVCKRGYRLSSRSHTLRTTCWDGKLEYPTCAKR

SEQ ID NO: 8396 - protein, 330 aa, Homo sapiens
MLLLINVILTLWVSCANGQVKPCDFPDIKHGGLFHENMRRPYFPVAVGKYYSYYCDEHFETPSGSYWDYIHCTQNGWSPAVPCLRKCYFPYLENGYNQNYGRKFVQGNSTEVACHPGYGLPKAQTTVTCTEKGWSPTPRCIRVRTCSKSDIEIENGFISESSSIYILNKEIQYKCKPGYATADGNSSGSITCLQNGWSAQPICINSSEKCGPPPPISNGDTTSFLLKVYVPQSRVEYQCQPYYELQGSNYVTCSNGEWSEPPRCIHPCIITEENMNKNNIKLKGRSDRKYYAKTGDTIEFMCKLGYNANTSILSFQAVCREGIVEYPRCE

SEQ ID NO: 8397 - protein, 232 aa, Homo sapiens
MLLLINVILTLWVSCANGQVKPCDFPDIKHGGLFHENMRRPYFPVAVGKYYSYYCDEHFETPSGSYWDYIHCTQNGWSPAVPCLRKCYFPYLENGYNQNYGRKFVQGNSTEVACHPGYGLPKAQTTVTCTEKGWSPTPRCIRVRTCSKSDIEIENGFISESSSIYILNKEIQYKCKPGYATADGNSSGSITCLQNGWSAQPICITACIAFRAHAQKSCTCRGRNECLILNFC

SEQ ID NO: 8398 - protein, 1231 aa, Homo sapiens
MRLLAKIICLMLWAICVAEDCNELPPRRNTEILTGSWSDQTYPEGTQAIYKCRPGYRSLGNVIMVCRKGEWVALNPLRKCQKRPCGHPGDTPFGTFTLTGGNVFEYGVKAVYTCNEGYQLLGEINYRECDTDGWTNDIPICEVVKCLPVTAPENGKIVSSAMEPDREYHFGQAVRFVCNSGYKIEGDEEMHCSDDGFWSKEKPKCVEISCKSPDVINGSPISQKIIYKENERFQYKCNMGYEYSERGDAVCTESGWRPLPSCEEKSCDNPYIPNGDYSPLRIKHRTGDEITYQCRNGFYPATRGNTAKCTSTGWIPAPRCTLKPCDYPDIKHGGLYHENMRRPYFPVAVGKYYSYYCDEHFETPSGSYWDHIHCTQDGWSPAVPCLRKCYFPYLENGYNQNHGRKFVQGKSIDVACHPGYALPKAQTTVTCMENGWSPTPRCIRVKTCSKSSIDIENGFISESQYTYALKEKAKYQCKLGYVTADGETSGSITCGKDGWSAQPTCIKSCDIPVFMNARTKNDFTWFKLNDTLDYECHDGYESNTGSTTGSIVCGYNGWSDLPICYERECELPKIDVHLVPDRKKDQYKVGEVLKFSCKPGFTIVGPNSVQCYHFGLSPDLPICKEQVQSCGPPPELLNGNVKEKTKEEYGHSEVVEYYCNPRFLMKGPNKIQCVDGEWTTLPVCIVEESTCGDIPELEHGWAQLSSPPYYYGDSVEFNCSESFTMIGHRSITCIHGVWTQLPQCVAIDKLKKCKSSNLIILEEHLKNKKEFDHNSNIRYRCRGKEGWIHTVCINGRWDPEVNCSMAQIQLCPPPPQIPNSHNMTTTLNYRDGEKVSVLCQENYLIQEGEEITCKDGRWQSIPLCVEKIPCSQPPQIEHGTINSSRSSQESYAHGTKLSYTCEGGFRISEENETTCYMGKWSSPPQCEGLPCKSPPEISHGVVAHMSDSYQYGEEVTYKCFEGFGIDGPAIAKCLGEKWSHPPSCIKTDCLSLPSFENAIPMGEKKDVYKAGEQVTYTCATYYKMDGASNVTCINSRWTGRPTCRDTSCVNPPTVQNAYIVSRQMSKYPSGERVRYQCRSPYEMFGDEEVMCLNGNWTEPPQCKDSTGKCGPPPPIDNGDITSFPLSVYAPASSVEYQCQNLYQLEGNKRITCRNGQWSEPPKCLHPCVISREIMENYNIALRWTAKQKLYSRTGESVEFVCKRGYRLSSRSHTLRTTCWDGKLEYPTCAKR

SEQ ID NO: 8399 - protein, 1111 aa, Homo sapiens
MVDLESEVPPLPPRYRFRDLLLGDQGWQNDDRVQVEFYMNENTFKERLKLFFIKNQRSSLRIRLFNFSLKLLSCLLYIIRVLLENPSQGNEWSHIFWVNRSLPLWGLQVSVALISLFETILLGYLSYKGNIWEQILRIPFILEIINAVPFIISIFWPSLRNLFVPVFLNCWLAKHALENMINDLHRAIQRTQSAMFNQVLILISTLLCLIFTCICGIQHLERIGKKLNLFDSLYFCIVTFSTVGFGDVTPETWSSKLFVVAMICVALVVLPIQFEQLAYLWMERQKSGGNYSRHRAQTEKHVVLCVSSLKIDLLMDFLNEFYAHPRLQDYYVVILCPTEMDVQVRRVLQIPMWSQRVIYLQGSALKDQDLLRAKMDDAEACFILSSRCEVDRTSSDHQTILRAWAVKDFAPNCPLYVQILKPENKFHIKFADHVVCEEEFKYAMLALNCICPATSTLITLLVHTSRGQEGQQSPEQWQKMYGRCSGNEVYHIVLEESTFFAEYEGKSFTYASFHAHKKFGVCLIGVRREDNKNILLNPGPRYIMNSTDICFYINITKEENSAFKNQDQQRKSNVSRSFYHGPSRLPVHSIIASMGTVAIDLQDTSCRSASGPTLSLPTEGSKEIRRPSIAPVLEVADTSSIQTCDLLSDQSEDETTPDEEMSSNLEYAKGYPPYSPYIGSSPTFCHLLHEKVPFCCLRLDKSCQHNYYEDAKAYGFKNKLIIVAAETAGNGLYNFIVPLRAYYRPKKELNPIVLLLDNPLDDLLRCGVTFAANMVVVDKESTMSAEEDYMADAKTIVNVQTLFRLFSSLSIITELTHPANMRFMQFRAKDCYSLALSKLEKKERERGSNLAFMFRLPFAAGRVFSISMLDTLLYQSFVKDYMISITRLLLGLDTTPGSGFLCSMKITADDLWIRTYARLYQKLCSSTGDVPIGIYRTESQKLTTSESQISISVEEWEDTKDSKEQGHHRSNHRNSTSSDQSDHPLLRRKSMQWARRLSRKGPKHSGKTAEKITQQRLNLYRRSERQELAELVKNRMKHLGLSTVGYDEMNDHQSTLSYILINPSPDTRIELNDVVYLIRPDPLAYLPNSEPSRRNSICNVTGQDSREETQL

SEQ ID NO: 8400 - protein, 531 aa, Homo sapiens
MADVLSVLRQYNIQKKEIVVKGDEVIFGEFSWPKNVKTNYVVWGTGKEGQPREYYTLDSILFLLNNVHLSHPVYVRRAATENIPVVRRPDRKDLLGYLNGEASTSASIDRSAPLEIGLQRSTQVKRAADEVLAEAKKPRIEDEECVRLDKERLAARLEGHKEGIVQTEQIRSLSEAMSVEKIAAIKAKIMAKKRSTIKTDLDDDITALKQRSFVDAEVDVTRDIVSRERVWRTRTTILQSTGKNFSKNIFAILQSVKAREEGRAPEQRPAPNAAPVDPTLRTKQPIPAAYNRYDQERFKGKEETEGFKIDTMGTYHGMTLKSVTEGASARKTQTPAAQPVPRPVSQARPPPNQKKGSRTPIIIIPAATTSLITMLNAKDLLQDLKFVPSDEKKKQGCQRENETLIQRRKDQMQPGGTAISVTVPYRVVDQPLKLMPQDWDRVVAVFVQGPAWQFKGWPWLLPDGSPVDIFAKIKAFHLKYDEVRLDPNVQKWDVTVLELSYHKRHLDRPVFLRFWETLDRYMVKHKSHLRF

SEQ ID NO: 8401 - protein, 538 aa, Homo sapiens
MEESVNQMQPLNEKQIANSQDGYVWQVTDMNRLHRFLCFGSEGGTYYIKEQKLGLENAEALIRLIEDGRGCEVIQEIKSFSQEGRTTKQEPMLFALAICSQCSDISTKQAAFKAVSEVCRIPTHLFTFIQFKKDLKESMKCGMWGRALRKAIADWYNEKGGMALALAVTKYKQRNGWSHKDLLRLSHLKPSSEGLAIVTKYITKGWKEVHELYKEKALSVETEKLLKYLEAVEKVKRTRDELEVIHLIEEHRLVREHLLTNHLKSKEVWKALLQEMPLTALLRNLGKMTANSVLEPGNSEVSLVCEKLCNEKLLKKARIHPFHILIALETYKTGHGLRGKLKWRPDEEILKALDAAFYKTFKTVEPTGKRFLLAVDVSASMNQRVLGSILNASTVAAAMCMVVTRTEKDSYVVAFSDEMVPCPVTTDMTLQQVLMAMSQIPAGGTDCSLPMIWAQKTNTPADVFIVFTDNETFAGGVHPAIALREYRKKMDIPAKLIVCGMTSNGFTIADPDDRGMLDMCGFDTGALDVIRNFTLDMI

SEQ ID NO: 8402 - protein, 518 aa, Homo sapiens
MEESVNQMQPLNEKQIANSQDGYVWQVTDMNRLHRFLCFGSEGGTYYIKEQKLGLENAEALIRLIEDGRGCEVIQEIKSFSQEGRTTKQEPMLFALAICSQCSDISTKQAAFKAVSEVCRIPTHLFTFIQFKKDLKESMKCGMWGRALRKAIADWYNEKGGMALALAVTKYKQRNGWSHKDLLRLSHLKPSSEGLAIVTKYITKGWKEVHELYKEKALSVETEKLLKYLEAVEKVKRTRDELEVIHLIEEHRLVREHLLTNHLKSKEVWKALLQEMPLTALLRNLGKMTANSVLEPGNSEVSLVCEKLCNEKLLKKARIHPFHILIALETYKTGHGLRGKLKWRPDEEILKALDAAFYKTFKTVEPTGKRFLLAVDVSASMNQRVLGSILNASTVAAAMCMVVTRTEKDSYVVAFSDEMVPCPVTTDMTLQQVLMAMSQIPAGGTDCSLPMIWAQKTNTPADVFIVFTDNETFAGGVHPAIALREYRKKMDIPAKLIVCGMTSNGFTIADPDDRDTVK

SEQ ID NO: 8403 - protein, 525 aa, Homo sapiens
MEESVNQMQPLNEKQIANSQDGYVWQVTDMNRLHRFLCFGSEGGTYYIKEQKLGLENAEALIRLIEDGRGCEVIQEIKSFSQEGRTTKQEPMLFALAICSQCSDISTKQAAFKAVSEVCRIPTHLFTFIQFKKDLKESMKCGMWGRALRKAIADWYNEKGGMALALAVTKYKQRNGWSHKDLLRLSHLKPSSEGLAIVTKYITKGWKEVHELYKEKALSVETEKLLKYLEAVEKVKRTRDELEVIHLIEEHRLVREHLLTNHLKSKEVWKALLQEMPLTALLRNLGKMTANSVLEPGNSEVSLVCEKLCNEKLLKKARIHPFHILIALETYKTGHGLRGKLKWRPDEEILKALDAAFYKTFKTVEPTGKRFLLAVDVSASMNQRVLGSILNASTVAAAMCMVVTRTEKDSYVVAFSDEMVPCPVTTDMTLQQVLMAMSQIPAGGTDCSLPMIWAQKTNTPADVFIVFTDNETFAGGVHPAIALREYRKKMDIPAKLIVCGMTSNGFTIADPDDRALQNTLLNKSF

SEQ ID NO: 8404 - protein, 534 aa, Homo sapiens
MEESVNQMQPLNEKQIANSQDGYVWQVTDMNRLHRFLCFGSEGGTYYIKEQKLGLENAEALIRLIEDGRGCEVIQEIKSFSQEGRTTKQEPMLFALAICSQCSDISTKQAAFKAVSEVCRIPTHLFTFIQFKKDLKESMKCGMWGRALRKAIADWYNEKGGMALALAVTKYKQRNGWSHKDLLRLSHLKPSSEGLAIVTKYITKGWKEVHELYKEKALSVETEKLLKYLEAVEKVKRTRDELEVIHLIEEHRLVREHLLTNHLKSKEVWKALLQEMPLTALLRNLGKMTANSVLEPGNSEVSLVCEKLCNEKLLKKARIHPFHILIALETYKTGHGLRGKLKWRPDEEILKALDAAFYKTFKTVEPTGKRFLLAVDVSASMNQRVLGSILNASTVAAAMCMVVTRTEKDSYVVAFSDEMVPCPVTTDMTLQQVLMAMSQIPAGGTDCSLPMIWAQKTNTPADVFIVFTDNETFAGGVHPAIALREYRKKMDIPAKLIVCGMTSNGFTIADPDDRGMLDMCGFDTGALDPCKIPY

SEQ ID NO: 8405 - protein, 693 aa, Homo sapiens
MAQGSHQIDFQVLHDLRQKFPEVPEVVVSRCMLQNNNNLDACCAVLSQESTRYLYGEGDLNFSDDSGISGLRNHMTSLNLDLQSQNIYHHGREGSRMNGSRTLTHSISDGQLQGGQSNSELFQQEPQTAPAQVPQGFNVFGMSSSSGASNSAPHLGFHLGSKGTSSLSQQTPRFNPIMVTLAPNIQTGRNTPTSLHIHGVPPPVLNSPQGNSIYIRPYITTPGGTTRQTQQHSGWVSQFNPMNPQQVYQPSQPGPWTTCPASNPLSHTSSQQPNQQGHQTSHVYMPISSPTTSQPPTIHSSGSSQSSAHSQYNIQNISTGPRKNQIEIKLEPPQRNNSSKLRSSGPRTSSTSSSVNSQTLNRNQPTVYIAASPPNTDELMSRSQPKVYISANAATGDEQVMRNQPTLFISTNSGASAASRNMSGQVSMGPAFIHHHPPKSRAIGNNSATSPRVVVTQPNTKYTFKITVSPNKPPAVSPGVVSPTFELTNLLNHPDHYVETENIQHLTDPTLAHVDRISETRKLSMGSDDAAYTQALLVHQKARMERLQRELEIQKKKLDKLKSEVNEMENNLTRRRLKRSNSISQIPSLEEMQQLRSCNRQLQIDIDCLTKEIDLFQARGPHFNPSAIHNFYDNIGFVGPVPPKPKDQRSIIKTPKTQDTEDDEGAQWNCTACTFLNHPALIRCEQCEMPRHF

SEQ ID NO: 8406 - protein, 209 aa, Homo sapiens
MRAAAISTPKLDKMPGMFFSANPKELKGTTHSLLDDKMQKRRPKTFGMDMKAYLRSMIPHLESGMKSSKSKDVLSAAEVMQWSQSLEKLLANQTGQNVFGSFLKSEFSEENIEFWLACEDYKKTESDLLPCKAEEIYKAFVHSDAAKQINIDFRTRESTAKKIKAPTPTCFDEAQKVIYTLMEKDSYPRFLKSDIYLNLLNDLQANSLK

SEQ ID NO: 8407 - protein, 766 aa, Homo sapiens
MIWRSRAGAELFSLMALWEWIALSLHCWVLAVAAVSDQHATSPFDWLLSDKGPFHRSQEYTDFVDRSRQGFSTRYKIYREFGRWKVNNLAVERRNFLGSPLPLAPEFFRNIRLLGRRPTLQQITENLIKKYGTHFLLSATLGGEESLTIFVDKRKLSKRAEGSDSTTNSSSVTLETLHQLAASYFIDRDSTLRRLHHIQIASTAIKVTETRTGPLGCSNYDNLDSVSSVLVQSPENKIQLQGLQVLLPDYLQERFVQAALSYIACNSEGEFICKENDCWCHCGPKFPECNCPSMDIQAMEENLLRITETWKAYNSDFEESDEFKLFMKRLPMNYFLNTSTIMHLWTMDSNFQRRYEQLENSMKQLFLKAQKIVHKLFSLSKRCHKQPLISLPRQRTSTYWLTRIQSFLYCNENGLLGSFSEETHSCTCPNDQVVCTAFLPCTVGDASACLTCAPDNRTRCGTCNTGYMLSQGLCKPEVAESTDHYIGFETDLQDLEMKYLLQKTDRRIEVHAIFISNDMRLNSWFDPSWRKRMLLTLKSNKYKSSLVHMILGLSLQICLTKNSTLEPVLAVYVNPFGGSHSESWFMPVNENSFPDWERTKLDLPLQCYNWTLTLGNKWKTFFETVHIYLRSRIKSNGPNGNESIYYEPLEFIDPSRNLGYMKINNIQVFGYSMHFDPEAIRDLILQLDYPYTQGSQDSALLQLLEIRDRVNKLSPPGQRRLDLFSCLLRHRLKLSTSEVVRIQSALQAFNAKLPNTMDYDTTKLCS

SEQ ID NO: 8408 - protein, 749 aa, Homo sapiens
MSFIDPYQHIIVEHQYSHKFTVVVLRATKVTKGAFGDMLDTPDPYVELFISTTPDSRKRTRHFNNDINPVWNETFEFILDPNQENVLEITLMDANYVMDETLGTATFTVSSMKVGEKKEVPFIFNQVTEMVLEMSLEVCSCPDLRFSMALCDQEKTFRQQRKEHIRESMKKLLGPKNSEGLHSARDVPVVAILGSGGGFRAMVGFSGVMKALYESGILDCATYVAGLSGSTWYMSTLYSHPDFPEKGPEEINEELMKNVSHNPLLLLTPQKVKRYVESLWKKKSSGQPVTFTDIFGMLIGETLIHNRMNTTLSSLKEKVNTAQCPLPLFTCLHVKPDVSELMFADWVEFSPYEIGMAKYGTFMAPDLFGSKFFMGTVVKKYEENPLHFLMGVWGSAFSILFNRVLGVSGSQSRGSTMEEELENITTKHIVSNDSSDSDDESHEPKGTENEDAGSDYQSDNQASWIHRMIMALVSDSALFNTREGRAGKVHNFMLGLNLNTSYPLSPLSDFATQDSFDDDELDAAVADPDEFERIYEPLDVKSKKIHVVDSGLTFNLPYPLILRPQRGVDLIISFDFSARPSDSSPPFKELLLAEKWAKMNKLPFPKIDPYVFDREGLKECYVFKPKNPDMEKDCPTIIHFVLANINFRKYRAPGVPRETEEEKEIADFDIFDDPESPFSTFNFQYPNQAFKRLHDLMHFNTLNNIDVIKEAMVESIEYRRQNPSRCSVSLSNVEARRFFNKEFLSKPKA

SEQ ID NO: 8409 - protein, 1247 aa, Homo sapiens
MEDAGAAGPGPEPEPEPEPEPEPAPEPEPEPKPGAGTSEAFSRLWTDVMGILDGSLGNIDDLAQQYADYYNTCFSDVCERMEELRKRRVSQDLEVEKPDASPTSLQLRSQIEESLGFCSAVSTPEVERKNPLHKSNSEDSSVGKGDWKKKNKYFWQNFRKNQKGIMRQTSKGEDVGYVASEITMSDEERIQLMMMVKEKMITIEEALARLKEYEAQHRQSAALDPADWPDGSYPTFDGSSNCNSREQSDDETEESVKFKRLHKLVNSTRRVRKKLIRVEEMKKPSTEGGEEHVFENSPVLDERSALYSGVHKKPLFFDGSPEKPPEDDSDSLTTSPSSSSLDTWGAGRKLVKTFSKGESRGLIKPPKKMGTFFSYPEEEKAQKVSRSLTEGEMKKGLGSLSHGRTCSFGGFDLTNRSLHVGSNNSDPMGKEGDFVYKEVIKSPTASRISLGKKVKSVKETMRKRMSKKYSSSVSEQDSGLDGMPGSPPPSQPDPEHLDKPKLKAGGSVESLRSSLSGQSSMSGQTVSTTDSSTSNRESVKSEDGDDEEPPYRGPFCGRARVHTDFTPSPYDTDSLKLKKGDIIDIISKPPMGTWMGLLNNKVGTFKFIYVDVLSEDEEKPKRPTRRRRKGRPPQPKSVEDLLDRINLKEHMPTFLFNGYEDLDTFKLLEEEDLDELNIRDPEHRAVLLTAVELLQEYDSNSDQSGSQEKLLVDSQGLSGCSPRDSGCYESSENLENGKTRKASLLSAKSSTEPSLKSFSRNQLGNYPTLPLMKSGDALKQGQEEGRLGGGLAPDTSKSCDPPGVTGLNKNRRSLPVSICRSCETLEGPQTVDTWPRSHSLDDLQVEPGAEQDVPTEVTEPPPQIVPEVPQKTTASSTKAQPLEQDSAVDNALLLTQSKRFSEPQKLTTKKLEGSIAASGRGLSPPQCLPRNYDAQPPGAKHGLARTPLEGHRKGHEFEGTHHPLGTKEGVDAEQRMQPKIPSQPPPVPAKKSRERLANGLHPVPMGPSGALPSPDAPCLPVKRGSPASPTSPSDCPPALAPRPLSGQAPGSPPSTRPPPWLSELPENTSLQEHGVKLGPALTRKVSCARGVDLETLTENKLHAEGIDLTEEPYSDKHGRCGIPEALVQRYAEDLDQPERDVAANMDQIRVKQLRKQHRMAIPSGGLTEICRKPVSPGCISSVSDWLISIGLPMYAGTLSTAGFSTLSQVPSLSHTCLQEAGITEERHIRKLLSAARLFKLPPGPEAM

SEQ ID NO: 8410 - protein, 604 aa, Homo sapiens
MLARALLLCAVLALSHTANPCCSHPCQNRGVCMSVGFDQYKCDCTRTGFYGENCSTPEFLTRIKLFLKPTPNTVHYILTHFKGFWNVVNNIPFLRNAIMSYVLTSRSHLIDSPPTYNADYGYKSWEAFSNLSYYTRALPPVPDDCPTPLGVKGKKQLPDSNEIVEKLLLRRKFIPDPQGSNMMFAFFAQHFTHQFFKTDHKRGPAFTNGLGHGVDLNHIYGETLARQRKLRLFKDGKMKYQIIDGEMYPPTVKDTQAEMIYPPQVPEHLRFAVGQEVFGLVPGLMMYATIWLREHNRVCDVLKQEHPEWGDEQLFQTSRLILIGETIKIVIEDYVQHLSGYHFKLKFDPELLFNKQFQYQNRIAAEFNTLYHWHPLLPDTFQIHDQKYNYQQFIYNNSILLEHGITQFVESFTRQIAGRVAGGRNVPPAVQKVSQASIDQSRQMKYQSFNEYRKRFMLKPYESFEELTGEKEMSAELEALYGDIDAVELYPALLVEKPRPDAIFGETMVEVGAPFSLKGLMGNVICSPAYWKPSTFGGEVGFQIINTASIQSLICNNVKGCPFTSFSVPDPELIKTVTINASSSRSGLDDINPTVLLKERSTEL

SEQ ID NO: 8411 - protein, 431 aa, Homo sapiens
MGRTYIVEETVGQYLSNINLQGKAFVSGLLIGQCSSQKDYVILATRTPPKEEQSENLKHPKAKLDNLDEEWATEHACQVSRMLPGGLLVLGVFIITTLELANDFQNALRRLMFAVEKSINRKRLWNFTEEEVSERVTLHICASTKKIFCRTYDIHDPKSSARPADWKYQSGLSSSWLSLECTVHINIHIPLSATSVSYTLEKNTKNGLTRWAKEIENGVYLINGQVKDEDCDLLEGQLLNSDHRSTATVQICSGSVNLKGAVKCRAYIHSSKPKVKDAVQAVKRDILNTVADRCEMLFEDLLLNEIPEKKDSEKEFHVLPYRVFVPLPGSTVMLCDYKFDDESAEEIRDHFMEMLDHTIQIEDLEIAEETNTACMSSSMNSQASLDNTDDEQPKQPIKTTMLLKIQQNIGVIAAFTVAVLAAGISFHYFSD

SEQ ID NO: 8412 - protein, 2363 aa, Homo sapiens
MAAVLQQVLERTELNKLPKSVQNKLEKFLADQQSEIDGLKGRHEKFKVESEQQYFEIEKRLSHSQERLVNETRECQSLRLELEKLNNQLKALTEKNKELEIAQDRNIAIQSQFTRTKEELEAEKRDLIRTNERLSQELEYLTEDVKRLNEKLKESNTTKGELQLKLDELQASDVSVKYREKRLEQEKELLHSQNTWLNTELKTKTDELLALGREKGNEILELKCNLENKKEEVSRLEEQMNGLKTSNEHLQKHVEDLLTKLKEAKEQQASMEEKFHNELNAHIKLSNLYKSAADDSEAKSNELTRAVEELHKLLKEAGEANKAIQDHLLEVEQSKDQMEKEMLEKIGRLEKELENANDLLSATKRKGAILSEEELAAMSPTAAAVAKIVKPGMKLTELYNAYVETQDQLLLEKLENKRINKYLDEIVKEVEAKAPILKRQREEYERAQKAVASLSVKLEQAMKEIQRLQEDTDKANKQSSVLERDNRRMEIQVKDLSQQIRVLLMELEEARGNHVIRDEEVSSADISSSSEVISQHLVSYRNIEELQQQNQRLLVALRELGETREREEQETTSSKITELQLKLESALTELEQLRKSRQHQMQLVDSIVRQRDMYRILLSQTTGVAIPLHASSLDDVSLASTPKRPSTSQTVSTPAPVPVIESTEAIEAKAALKQLQEIFENYKKEKAENEKIQNEQLEKLQEQVTDLRSQNTKISTQLDFASKRYEMLQDNVEGYRREITSLHERNQKLTATTQKQEQIINTMTQDLRGANEKLAVAEVRAENLKKEKEMLKLSEVRLSQQRESLLAEQRGQNLLLTNLQTIQGILERSETETKQRLSSQIEKLEHEISHLKKKLENEVEQRHTLTRNLDVQLLDTKRQLDTETNLHLNTKELLKNAQKEIATLKQHLSNMEVQVASQSSQRTGKGQPSNKEDVDDLVSQLRQTEEQVNDLKERLKTSTSNVEQYQAMVTSLEESLNKEKQVTEEVRKNIEVRLKESAEFQTQLEKKLMEVEKEKQELQDDKRRAIESMEQQLSELKKTLSSVQNEVQEALQRASTALSNEQQARRDCQEQAKIAVEAQNKYERELMLHAADVEALQAAKEQVSKMASVRQHLEETTQKAESQLLECKASWEERERMLKDEVSKCVCRCEDLEKQNRLLHDQIEKLSDKVVASVKEGVQGPLNVSLSEEGKSQEQILEILRFIRREKEIAETRFEVAQVESLRYRQRVELLERELQELQDSLNAEREKVQVTAKTMAQHEELMKKTETMNVVMETNKMLREEKERLEQDLQQMQAKVRKLELDILPLQEANAELSEKSGMLQAEKKLLEEDVKRWKARNQHLVSQQKDPDTEEYRKLLSEKEVHTKRIQQLTEEIGRLKAEIARSNASLTNNQNLIQSLKEDLNKVRTEKETIQKDLDAKIIDIQEKVKTITQVKKIGRRYKTQYEELKAQQDKVMETSAQSSGDHQEQHVSVQEMQELKETLNQAETKSKSLESQVENLQKTLSEKETEARNLQEQTVQLQSELSRLRQDLQDRTTQEEQLRQQITEKEEKTRKAIVAAKSKIAHLAGVKDQLTKENEELKQRNGALDQQKDELDVRITALKSQYEGRISRLERELREHQERHLEQRDEPQEPSNKVPEQQRQITLKTTPASGERGIASTSDPPTANIKPTPVVSTPSKVTAAAMAGNKSTPRASIRPMVTPATVTNPTTTPTATVMPTTQVESQEAMQSEGPVEHVPVFGSTSGSVRSTSPNVQPSISQPILTVQQQTQATAFVQPTQQSHPQIEPANQELSSNIVEVVQSSPVERPSTSTAVFGTVSATPSSSLPKRTREEEEDSTIEASDQVSDDTVEMPLPKKLKSVTPVGTEEEVMAEESTDGEVETQVYNQDSQDSIGEGVTQGDYTPMEDSEETSQSLQIDLGPLQSDQQTTTSSQDGQGKGDDVIVIDSDDEEEDDDENDGEHEDYEEDEEDDDDDEDDTGMGDEGEDSNEGTGSADGNDGYEADDAEGGDGTDPGTETEESMGGGEGNHRAADSQNSGEGNTGAAESSFSQEVSREQQPSSASERQAPRAPQSPRRPPHPLPPRLTIHAPPQELGPPVQRIQMTRRQSVGRGLQLTPGIGGMQQHFFDDEDRTVPSTPTLVVPHRTDGFAEAIHSPQVAGVPRFRFGPPEDMPQTSSSHSDLGQLASQGGLGMYETPLFLAHEEESGGRSVPTTPLQVAAPVTVFTESTTSDASEHASQSVPMVTTSTGTLSTTNETATGDDGDEVFVEAESEGISSEAGLEIDSQQEEEPVQASDESDLPSTSQDPPSSSSVDTSSSQPKPFRRVRLQTTLRQGVRGRQFNRQRGVSHAMGGRGGINRGNIN

SEQ ID NO: 8413 - protein, 1098 aa, Homo sapiens
MRKFNIRKVLDGLTAGSSSASQQQQQQHPPGNREPEIQETLQSEHFQLCKTVRHGFPYQPSALAFDPVQKILAVGTQTGALRLFGRPGVECYCQHDSGAAVIQLQFLINEGALVSALADDTLHLWNLRQKRPAILHSLKFCRERVTFCHLPFQSKWLYVGTERGNIHIVNVESFTLSGYVIMWNKAIELSSKSHPGPVVHISDNPMDEGKLLIGFESGTVVLWDLKSKKADYRYTYDEAIHSVAWHHEGKQFICSHSDGTLTIWNVRSPAKPVQTITPHGKQLKDGKKPEPCKPILKVEFKTTRSGEPFIILSGGLSYDTVGRRPCLTVMHGKSTAVLEMDYSIVDFLTLCETPYPNDFQEPYAVVVLLEKDLVLIDLAQNGYPIFENPYPLSIHESPVTCCEYFADCPVDLIPALYSVGARQKRQGYSKKEWPINGGNWGLGAQSYPEIIITGHADGSVKFWDASAITLQVLYKLKTSKVFEKSRNKDDRPNTDIVDEDPYAIQIISWCPESRMLCIAGVSAHVIIYRFSKQEVITEVIPMLEVRLLYEINDVETPEGEQPPPLPTPVGGSNPQPIPPQSHPSTSSSSSDGLRDNVPCLKVKNSPLKQSPGYQTELVIQLVWVGGEPPQQITSLAVNSSYGLVVFGNCNGIAMVDYLQKAVLLNLGTIELYGSNDPYRREPRSPRKSRQPSGAGLCDISEGTVVPEDRCKSPTSDVKDNSFSRSRSSSVTSIDKESREAISALHFCETFTRKTDSSPSPCLWVGTTLGTVLVIALNLPPGGEQRLLQPVIVSPSGTILRLKGAILRMAFLDTTGCLIPPAYEPWREHNVPEEKDEKEKLKKRRPVSVSPSSSQEISENQYAVICSEKQAKVISLPTQNCAYKQNITETSFVLRGDIVALSNSICLACFCANGHIMTFSLPSLRPLLDVYYLPLTNMRIARTFCFTNNGQALYLVSPTEIQRLTYSQETCENLQEMLGELFTPVETPEAPNRGFFKGLFGGGAQSLDREELFGESSSGKASRSLAQHIPGPGGIEGVKGAASGVVGELARARLALDERGQKLGDLEERTAAMLSSAESFSKHAHEIMLKYKDKKWYQF

SEQ ID NO: 8414 - protein, 1115 aa, Homo sapiens
MRKFNIRKVLDGLTAGSSSASQQQQQQHPPGNREPEIQETLQSEHFQLCKTVRHGFPYQPSALAFDPVQKILAVGTQTGALRLFGRPGVECYCQHDSGAAVIQLQFLINEGALVSALADDTLHLWNLRQKRPAILHSLKFCRERVTFCHLPFQSKWLYVGTERGNIHIVNVESFTLSGYVIMWNKAIELSSKSHPGPVVHISDNPMDEGKLLIGFESGTVVLWDLKSKKADYRYTYDEAIHSVAWHHEGKQFICSHSDGTLTIWNVRSPAKPVQTITPHGKQLKDGKKPEPCKPILKVEFKTTRSGEPFIILSGGLSYDTVGRRPCLTVMHGKSTAVLEMDYSIVDFLTLCETPYPNDFQEPYAVVVLLEKDLVLIDLAQNGYPIFENPYPLSIHESPVTCCEYFADCPVDLIPALYSVGARQKRQGYSKKEWPINGGNWGLGAQSYPEIIITGHADGSVKFWDASAITLQVLYKLKTSKVFEKSRNKDDRPNTDIVDEDPYAIQIISWCPESRMLCIAGVSAHVIIYRFSKQEVITEVIPMLEVRLLYEINDVETPEGEQPPPLPTPVGGSNPQPIPPQSHPSTSSSSSDGLRDNVPCLKVKNSPLKQSPGYQTELVIQLVWVGGEPPQQITSLAVNSSYGLVVFGNCNGIAMVDYLQKAVLLNLGTIELYGSNDPYRREPRSPRKSRQPSGAGLCDISEGTVVPEDRCKSPTSAKMSRKLSLPTDLKPDLDVKDNSFSRSRSSSVTSIDKESREAISALHFCETFTRKTDSSPSPCLWVGTTLGTVLVIALNLPPGGEQRLLQPVIVSPSGTILRLKGAILRMAFLDTTGCLIPPAYEPWREHNVPEEKDEKEKLKKRRPVSVSPSSSQEISENQYAVICSEKQAKVISLPTQNCAYKQNITETSFVLRGDIVALSNSICLACFCANGHIMTFSLPSLRPLLDVYYLPLTNMRIARTFCFTNNGQALYLVSPTEIQRLTYSQETCENLQEMLGELFTPVETPEAPNRGFFKGLFGGGAQSLDREELFGESSSGKASRSLAQHIPGPGGIEGVKGAASGVVGELARARLALDERGQKLGDLEERTAAMLSSAESFSKHAHEIMLKYKDKKWYQF

SEQ ID NO: 8415 - protein, 853 aa, Homo sapiens
MAWKTLPIYLLLLLSVFVIQQVSSQELSCKGRCFESFERGRECDCDAQCKKYDKCCPDYESFCAEVKDNKKNRTKKKPTPKPPVVDEAGSGLDNGDFKVTTPDTSTTQHNKVSTSPKITTAKPINPRPSLPPNSDTSKETSLTVNKETTVETKETTTTNKQTSTDGKEKTTSAKETQSIEKTSAKDLAPTSKVLAKPTPKAETTTKGPALTTPKEPTPTTPKEPASTTPKEPTPTTIKSAPTTPKEPAPTTTKSAPTTPKEPAPTTTKEPAPTTPKEPAPTTTKEPAPTTTKSAPTTPKEPAPTTPKKPAPTTPKEPAPTTPKEPTPTTPKEPAPTTKEPAPTTPKEPAPTAPKKPAPTTPKEPAPTTPKEPAPTTTKEPSPTTPKEPAPTTTKSAPTTTKEPAPTTTKSAPTTPKEPSPTTTKEPAPTTPKEPAPTTPKKPAPTTPKEPAPTTPKEPAPTTTKKPAPTTPKEPAPTTPKETAPTTPKKLTPTTPEKLAPTTPEKPAPTTPEELAPTTPEEPTPTTPEEPAPTTPKAAAPNTPKEPAPTTPKEPAPTTPKEPAPTTPKETAPTTPKGTAPTTLKEPAPTTPKKPAPKELAPTTTKEPTSTTSDKPAPTTPKGTAPTTPKEPAPTTPKEPAPTTPKGTAPTTLKEPAPTTPKKPAPKELAPTTTKGPTSTTSDKPAPTTPKETAPTTPKEPAPTTPKKPAPTTPETPPPTTSEVSTPTTTKEPTTIHKSPDESTPELSAEPTPKALENSPKEPGVPTTKTPAATKPEMTTTAKDKTTERDLRTTPETTTAAPKMTKETATTTEKTTESKITATTTQVTSTTTQDTTPFKITTLKTTTLAPKVTT

SEQ ID NO: 8416 - protein, 1363 aa, Homo sapiens
MAWKTLPIYLLLLLSVFVIQQVSSQELSCKGRCFESFERGRECDCDAQCKKYDKCCPDYESFCAEVHNPTSPPSSKKAPPPSGASQTIKSTTKRSPKPPNKKKTKKVIESEEITEEHSVSENQESSSSSSSSSSSSTIRKIKSSKNSAANRELQKKLKVKDNKKNRTKKKPTPKPPVVDEAGSGLDNGDFKVTTPDTSTTQHNKVSTSPKITTAKPINPRPSLPPNSDTSKETSLTVNKETTVETKETTTTNKQTSTDGKEKTTSAKETQSIEKTSAKDLAPTSKVLAKPTPKAETTTKGPALTTPKEPTPTTPKEPASTTPKEPTPTTIKSAPTTPKEPAPTTTKSAPTTPKEPAPTTTKEPAPTTPKEPAPTTTKEPAPTTTKSAPTTPKEPAPTTPKKPAPTTPKEPAPTTPKEPTPTTPKEPAPTTKEPAPTTPKEPAPTAPKKPAPTTPKEPAPTTPKEPAPTTTKEPSPTTPKEPAPTTTKSAPTTTKEPAPTTTKSAPTTPKEPSPTTTKEPAPTTPKEPAPTTPKKPAPTTPKEPAPTTPKEPAPTTTKKPAPTTPKEPAPTTPKETAPTTPKKLTPTTPEKLAPTTPEKPAPTTPEELAPTTPEEPTPTTPEEPAPTTPKAAAPNTPKEPAPTTPKEPAPTTPKEPAPTTPKETAPTTPKGTAPTTLKEPAPTTPKKPAPKELAPTTTKEPTSTTSDKPAPTTPKGTAPTTPKEPAPTTPKEPAPTTPKGTAPTTLKEPAPTTPKKPAPKELAPTTTKGPTSTTSDKPAPTTPKETAPTTPKEPAPTTPKKPAPTTPETPPPTTSEVSTPTTTKEPTTIHKSPDESTPELSAEPTPKALENSPKEPGVPTTKTPAATKPEMTTTAKDKTTERDLRTTPETTTAAPKMTKETATTTEKTTESKITATTTQVTSTTTQDTTPFKITTLKTTTLAPKVTTTKKTITTTEIMNKPEETAKPKDRATNSKATTPKPQKPTKAPKKPTSTKKPKTMPRVRKPKTTPTPRKMTSTMPELNPTSRIAEAMLQTTTRPNQTPNSKLVEVNPKSEDAGGAEGETPHMLLRPHVFMPEVTPDMDYLPRVPNQGIIINPMLSDETNICNGKPVDGLTTLRNGTLVAFRGHYFWMLSPFSPPSPARRITEVWGIPSPIDTVFTRCNCEGKTFFFKDSQYWRFTNDIKDAGYPKPIFKGFGGLTGQIVAALSTAKYKNWPESVYFFKRGGSIQQYIYKQEPVQKCPGRRPALNYPVYGETTQVRRRRFERAIGPSQTHTIRIQYSPARLAYQDKGVLHNEVKVSILWRGLPNVVTSAISLPNIRKPDGYDYYAFSKDQYYNIDVPSRTARAITTRSGQTLSKVWYNCP

SEQ ID NO: 8417 - protein, 1311 aa, Homo sapiens
MAWKTLPIYLLLLLSVFVIQQVSSQDLSSCAGRCGEGYSRDATCNCDYNCQHYMECCPDFKRVCTAELSCKGRCFESFERGRECDCDAQCKKYDKCCPDYESFCAEVKDNKKNRTKKKPTPKPPVVDEAGSGLDNGDFKVTTPDTSTTQHNKVSTSPKITTAKPINPRPSLPPNSDTSKETSLTVNKETTVETKETTTTNKQTSTDGKEKTTSAKETQSIEKTSAKDLAPTSKVLAKPTPKAETTTKGPALTTPKEPTPTTPKEPASTTPKEPTPTTIKSAPTTPKEPAPTTTKSAPTTPKEPAPTTTKEPAPTTPKEPAPTTTKEPAPTTTKSAPTTPKEPAPTTPKKPAPTTPKEPAPTTPKEPTPTTPKEPAPTTKEPAPTTPKEPAPTAPKKPAPTTPKEPAPTTPKEPAPTTTKEPSPTTPKEPAPTTTKSAPTTTKEPAPTTTKSAPTTPKEPSPTTTKEPAPTTPKEPAPTTPKKPAPTTPKEPAPTTPKEPAPTTTKKPAPTTPKEPAPTTPKETAPTTPKKLTPTTPEKLAPTTPEKPAPTTPEELAPTTPEEPTPTTPEEPAPTTPKAAAPNTPKEPAPTTPKEPAPTTPKEPAPTTPKETAPTTPKGTAPTTLKEPAPTTPKKPAPKELAPTTTKEPTSTTSDKPAPTTPKGTAPTTPKEPAPTTPKEPAPTTPKGTAPTTLKEPAPTTPKKPAPKELAPTTTKGPTSTTSDKPAPTTPKETAPTTPKEPAPTTPKKPAPTTPETPPPTTSEVSTPTTTKEPTTIHKSPDESTPELSAEPTPKALENSPKEPGVPTTKTPAATKPEMTTTAKDKTTERDLRTTPETTTAAPKMTKETATTTEKTTESKITATTTQVTSTTTQDTTPFKITTLKTTTLAPKVTTTKKTITTTEIMNKPEETAKPKDRATNSKATTPKPQKPTKAPKKPTSTKKPKTMPRVRKPKTTPTPRKMTSTMPELNPTSRIAEAMLQTTTRPNQTPNSKLVEVNPKSEDAGGAEGETPHMLLRPHVFMPEVTPDMDYLPRVPNQGIIINPMLSDETNICNGKPVDGLTTLRNGTLVAFRGHYFWMLSPFSPPSPARRITEVWGIPSPIDTVFTRCNCEGKTFFFKDSQYWRFTNDIKDAGYPKPIFKGFGGLTGQIVAALSTAKYKNWPESVYFFKRGGSIQQYIYKQEPVQKCPGRRPALNYPVYGETTQVRRRRFERAIGPSQTHTIRIQYSPARLAYQDKGVLHNEVKVSILWRGLPNVVTSAISLPNIRKPDGYDYYAFSKDQYYNIDVPSRTARAITTRSGQTLSKVWYNCP

SEQ ID NO: 8418 - protein, 625 aa, Homo sapiens
VADTLQKVWAVLEMNLEQYAVSLLRLMFKSKCKSLESYPCYQDEETKIAFADYTVTYQEQPPNSWFIVFRETFLVHQDMILVPKVYTTLPICILHIVNNDTMEQVPKVFQKVVPYLYTKNKKGYTFVAEAFTGDTYVAASRWKLRLIGSSAPLPCLSRDSPCNSFAIKEIRDYYIPNDKKILFRYSVKVLTPQPATIQVRTSKPDAFIKLQVLENEETMVSSTGKGQAIIPAFHFLKSEKGLSSQSYGERHEELINLGSPDSHTISEGQKSSVTSKTTRKGKEKSSEKEKTAKEKQAPRFEPQISTVHPQQEDPNKPYWILRLVTEHNESELFEVKKDTERADEIRAMKQAWETTEPGRAIKASQARLHYLSGFIKKTSDAESPPISESQTKPKEEVETAARGVKEPNSKNSAGSESKEMTQTGSGSAVWKKWQLTKGLRDVAKSTSSESGGVSSPGKEEREQSTRKENIQTGPRTRSPTILETSPRLIRKALEFMDLSQYVRKTDTDPLLQTDELNQQQAMQKAEEIHQFRQHRTRVLSIRNIDQEERLKLKDEVLDMYKEMQDSLDEARQKIFDIREEYRNKLLEAEHLKLETLAAQEAAMKLETEKMTPAPDTQKKKKGKKK

SEQ ID NO: 8419 - protein, 642 aa, Homo sapiens
MIPNGYLMFEDENFIESSVAKLNALRKSGQFCDVRLQVCGHEMLAHRAVLACCSPYLFEIFNSDSDPHGISHVKFDDLNPEAVEVLLNYAYTAQLKADKELVKDVYSAAKKLKMDRVKQVCGDYLLSRMDVTSCISYRNFASCMGDSRLLNKVDAYIQEHLLQISEEEEFLKLPRLKLEVMLEDNVCLPSNGKLYTKVINWVQRSIWENGDSLEELMEEVQTLYYSADHKLLDGNLLDGQAEVFGSDDDHIQFVQKKPPRENGHKQISSSSTGCLSSPNATVQSPKHEWKIVASEKTSNNTYLCLAVLDGIFCVIFLHGRNSPQSSPTSTPKLSKSLSFEMQQDELIEKPMSPMQYARSGLGTAEMNGKLIAAGGYNREECLRTVECYNPHTDHWSFLAPMRTPRARFQMAVLMGQLYVVGGSNGHSDDLSCGEMYDSNIDDWIPVPELRTNRCNAGVCALNGKLYIVGGSDPYGQKGLKNCDVFDPVTKLWTSCAPLNIRRHQSAVCELGGYLYIIGGAESWNCLNTVERYNPENNTWTLIAPMNVARRGAGVAVLNGKLFVCGGFDGSHAISCVEMYDPTRNEWKMMGNMTSPRSNAGIATVGNTIYAVGGFDGNEFLNTVEVYNLESNEWSPYTKIFQF

SEQ ID NO: 8420 - protein, 900 aa, Homo sapiens
MSSKESCGKKETSQRKDTTTSSPNFGEKDKKERKTPASSTSSSSIRSVSSEKRKLKSDHTDVLYYNIKRRQGLKRLSVEIDTLRRRPKIGSSSQRPIKLKEASYSNDNQIILQSPSSNGTKKDIHKCVDFKPKDIKLTNAGSKLDHGIKSLSSPKIASDVKPKAEGQASENKWSHLLVQREKMKELKKGRNSKFRDNSEKCVLEKWKRNQFSQDYNSNKIIKEPLGSRRQKISFKIPIKSRDTLQKLVEENVFNIDSNNSKTKQEEREYLESSQVSLNVTRQKTEHLLSDFTYKRTVHEWKRKHHYDHQESNDSHSRENLTQSFEAPCCSVSSESIQDADQEMQIVEELHAARVGKSVDLPGELMSMEIDLEDDVHSSSANNTSDRKLLIVIDTNILMNHLKFVRILKTTEVPGFDKLVLIIPWVVMQELDRMKEGKLLKRAQHKAIPAVHFINDSLKNQDRKLWGQSIQLASQKHYGLSDENNDDRVLKCCLQHQELFPCSFVILCTDDRNLRNKGLISGVKSLSKEELSAELLHLSLNTDVCHQPCIPKQQLKAETTPLKESYKEESTNSGLSILLESIVSDLEKSLGTGLSSILETEMKIAFGNLWMEILYLKPPWTLLHLLQCFKKHWLAVFGLVMEKNLLLTIESLYKNLRKANKAVDFTTVKFLLQDSRSLLHAFSTRSNYDGILPQTFAQVNNLLQTFAEVKTKLKPNSSENTVTKKQEGTSLKNSHNQEITVFSSSHLPQPSRHQEIWSILESVWITIYQNSTDVFQRLGSNSALTTSNIASFEEAFICLQKLMAAVRDILEGIQRILAPNSNYQDVETLYNFLIKYEVNKNVKFTAQEIYDCVSQTEYREKLTIGCRQLVEMEYTMQQCNASVYMEAKNRGWCEDMLNYRI

SEQ ID NO: 8421 - protein, 660 aa, Homo sapiens
MSSRRKRAPPVRVDEEKRQQLHWNMHEDRRNEPIIISDDDEQPCPGEDVEKQKKEPMSICDKGILVESSFSGEMLEDLGWLQKKRRIKLYQKPEGNHIIKVGIYLLEAGLAKLDFLSDANSRMKKFNQLMKKVMEKLHNSIIPDVLEEDEDDPESEPEGQDIDELYHFVKQTHQQETQSIQVDVQHPALIPVLRPYQREAVNWMLQQECFRSSPATESALHFLWREIVTSEGLKLYYNPYTGCIIREYPNSGPQLLGGILADEMGLGKTVEVLALILTHTRQDVKQDALTLPEGKVVNYFIPSHYFGGKLKKTEIQNIEFEPKEKVQCPPTRVMILTAVKEMNGKKGVSILSIYKYVSSIYRYDVQRNRSLLKRMLKCLIFEGLVKQIKGHGFSGTFTLGKNYKEEDICDKTKKQAVGSPRKIQKETRKSGNKDTDSEYLPSDTSDDDDDPYYYYYKSRRNRSKLRKKLVPSTKKGKSQPFINPDSQGHCPATSDSGITDVAMSKSTCISEFNQEHETEDCAESLNHADSDVPPSNTMSPFNTSDYRFECICGELDQIDRKPRVQCLKCHLWQHAKCVNYDEKNLKIKPFYCPHCLVAMEPVSTRATLIISPSSICHQWVDEINRHVRSSSLRVLVYQGVKKDGFLQPHFGRTGYSYHYL

SEQ ID NO: 8422 - protein, 928 aa, Homo sapiens
MGGSASSQLDEGKCAYIRGKTEAAIKNFSPYYSRQYSVAFCNHVRTEVEQQRDLTSQFLKTKPPLAPGTILYEAELSQFSEDIKKWKERYVVVKNDYAVESYENKEAYQRGAAPKCRILPAGGKVLTSEDEYNLLSDRHFPDPLASSEKENTQPFVVLPKEFPVYLWQPFFRHGYFCFHEAADQKRFSALLSDCVRHLNHDYMKQMTFEAQAFLEAVQFFRQEKGHYGSWEMITGDEIQILSNLVMEELLPTLQTDLLPKMKGKKNDRKRTWLGLLEEAYTLVQHQVSEGLSALKEECRALTKGLEGTIRSDMDQIVNSKNYLIGKIKAMVAQPAEKSCLESVQPFLASILEELMGPVSSGFSEVRVLFEKEVNEVSQNFQTTKDSVQLKEHLDRLMNLPLHSVKMEPCYTKVNLLHERLQDLKSRFRFPHIDLVVQRTQNYMQELMENAVFTFEQLLSPHLQGEASKTAVAIEKVKLRVLKQYDYDSSTIRKKIFQEALVQITLPTVQKALASTCKPELQKYEQFIFADHTNMIHVENVYEEILHQILLDETLKVIKEAAILKKHNLFEDNMALPSESVSSLTDLKPPTGSNQASPARRASAILPGVLGSETLSNEVFQESEEEKQPEVPSSLAKGESLSLPGPSPPPDGTEQVIISRVDDPVVNPVATEDTAGLPGTCSSELEFGGTLEDEEPAQEEPEPITASGSLKALRKLLTASVEVPVDSAPVMEEDTNGESHVPQENEEEEEKEPSQAAAIHPDNCEESEVSEREAQPPCPEAHGEELGGFPEVGSPASPPASGGLTEEPLGPMEGELPGEACTLTAHEGRGGKCTEEGDASQQEGCTLGSDPICLSESQVSEEQEEMGGQSSAAQATASVNAEEIKVARIHECQWVVEDAPNPDVLLSHKDDVKEGEGGQESFPELPSEE

SEQ ID NO: 8423 - protein, 905 aa, Homo sapiens
MSREEKQKLGNQVLEMFDHAYGNYMEHAYPADELMPLTCRGRVRGQEPSRGDVDDALGKFSLTLIDSLDTLVVLNKTKEFEDAVRKVLRDVNLDNDVVVSVFETNIRVLGGLLGGHSLAIMLKEKGEYMQWYNDELLQMAKQLGYKLLPAFNTTSGLPYPRINLKFGIRKPEARTGTETDTCTACAGTLILEFAALSRFTGATIFEEYARKALDFLWEKRQRSSNLVGVTINIHTGDWVRKDSGVGAGIDSYYEYLLKAYVLLGDDSFLERFNTHYDAIMRYISQPPLLLDVHIHKPMLNARTWMDALLAFFPGLQVLKGDIRPAIETHEMLYQVIKKHNFLPEAFTTDFRVHWAQHPLRPEFAESTYFLYKATGDPYYLEVGKTLIENLNKYARVPCGFAAMKDVRTGSHEDRMDSFFLAEMFKYLYLLFADKEDIIFDIEDYIFTTEAHLLPLWLSTTNQSISKKNTTSEYTELDDSNFDWTCPNTQILFPNDPLYAQSIREPLKNVVDKSCPRGIIRVEESFRSGAKPPLRARDFMATNPEHLEILKKMGVSLIHLKDGRVQLVQHAIQAASSIDAEDGLRFMQEMIELSSQQQKEQQLPPRAVQIVSHPFFGRVVLTAGPAQFGLDLSKHKETRGFVASSKPSNGCSELTNPEAVMGKIALIQRGQCMFAEKARNIQNAGAIGGIVIDDNEGSSSDTAPLFQMAGDGKDTDDIKIPMLFLFSKEGSIILDAIREYEEVEVLLSDKAKDRAAILKGKMIPSYIINSNPEMENEEQPSSENDSQNQSGEQISSSSQEVDLVDQESSEENSLNSHPESLSLADMDNAASISPSEQTSNPTENHETTNLNGECTDLDNQLQEQSETEEDSNPNVSWGKKVQPIDSILADWNEDIEAFEMMEKDEL

SEQ ID NO: 8424 - protein, 331 aa, Homo sapiens
MRFRFGVVVPPAVAGARPELLVVGSRPELGRWEPRGAVRLRPAGTAAGDGALALQEPGLWLGEVELAAEEAAQDGAEPGRVDTFWYKFLKREPGGELSWEGNGPHHDRCCTYNENNLVDGVYCLPIGHWIEATGHTNEMKHTTDFYFNIAGHQAMHYSRILPNIWLGSCPRQVEHVTIKLKHELGITAVMNFQTEWDIVQNSSGCNRYPEPMTPDTMIKLYREEGLAYIWMPTPDMSTEGRVQMLPQAVCLLHALLEKGHIVYVHCNAGVGRSTAAVCGWLQYVMGWNLRKVQYFLMAKRPAVYIDEEALARAQEDFFQKFGKVRSSVCSL

SEQ ID NO: 8425 - protein, 988 aa, Homo sapiens
MQILRCLQKCGKLKMMAVVRTSLQKVVVLLHRLQRMAVSSPRYQKLCKDIQAEIDAHNDIFKSIDGNRQKMVKALGNSEEATMLQHRLDDMNQRWNDLKAKSASIRAHLEASAEKWNRLLMSLEELIKWLNMKDEELKKQMPIGGDVPALQLQYDHCKALRRELKEKEYSVLNAVDQARVFLADQPIEAPEEPRRNLQSKTELTPEERAQKIAKAMRKQSSEVKEKWESLNAVTSNWQKQVDKALEKLRDLQGAMDDLDADMKEAESVRNGWKPVGDLLIDSLQDHIEKIMAFREEIAPINFKVKTVNDLSSQLSPLDLHPSLKMSRQLDDLNMRWKLLQVSVDDRLKQLQEAHRDFGPSSQHFLSTSVQLPWQRSISHNKVPYYINHQTQTTCWDHPKMTELFQSLADLNNVRFSAYRTAIKIRRLQKALCLDLLELSTTNEIFKQHKLNQNDQLLSVPDVINCLTTTYDGLEQMHKDLVNVPLCVDMCLNWLLNVYDTGRTGKIRVQSLKIGLMSLSKGLLEEKYRYLFKEVAGPTEMCDQRQLGLLLHDAIQIPRQLGEVAAFGGSNIEPSVRSCFQQNNNKPEISVKEFIDWMHLEPQSMVWLPVLHRVAAAETAKHQAKCNICKECPIVGFRYRSLKHFNYDVCQSCFFSGRTAKGHKLHYPMVEYCIPTTSGEDVRDFTKVLKNKFRSKKYFAKHPRLGYLPVQTVLEGDNLETPITLISMWPEHYDPSQSPQLFHDDTHSRIEQYATRLAQMERTNGSFLTDSSSTTGSVEDEHALIQQYCQTLGGESPVSQPQSPAQILKSVEREERGELERIIADLEEEQRNLQVEYEQLKDQHLRRGLPVGSPPESIISPHHTSEDSELIAEAKLLRQHKGRLEARMQILEDHNKQLESQLHRLRQLLEQPESDSRINGVSPWASPQHSALSYSLDPDASGPQFHQAAGEDLLAPPHDTSTDLTEVMEQIHSTFPSCCPNVPSRPQAM

SEQ ID NO: 8426 - protein, 526 aa, Homo sapiens
MSLVEAISLWNEGVLAADKKDWKGALDAFSAVQDPHSRICFNIGCMYTILKNMTEAEKAFTRSINRDKHLAVAYFQRGMLYYQTEKYDLAIKDLKEALIQLRGNQLIDYKILGLQFKLFACEVLYNIAFMYAKKEEWKKAEEQLALATSMKSEPRHSKIDKAMECVWKQKLYEPVVIPVGKLFRPNERQVAQLAKKDYLGKATVVASVVDQDSFSGFAPLQPQAAEPPPRPKTPEIFRALEGEAHRVLFGFVPETKEELQVMPGNIVFVLKKGNDNWATVMFNGQKGLVPCNYLEPVELRIHPQQQPQEESSPQSDIPAPPSSKAPGRPQLSPGQKQKEEPKEVKLSVPMPYTLKVHYKYTVVMKTQPGLPYSQVRDMVSKKLELRLEHTKLSYRPRDSNELVPLSEDSMKDAWGQVKNYCLTLWCENTVGDQGFPDEPKESEKADANNQTTEPQLKKGSQVEALFSYEATQPEDLEFQEGDIILVLSKVNEEWLEGECKGKVGIFPKVFVEDCATTDLESTRREV

SEQ ID NO: 8427 - protein, 1170 aa, Homo sapiens
MRNWMFLQIVIVGENVSFKSQMRTENLKSEEHLKSSNIRQAEVLKADMTDSKLGPAEVWTSRQALQDLYQKMLVTDLEYALDKKVEQDLWNHAFKNQITTLQGQAKNRANPNRSEVQANLSLFLEAASGFYTQLLQELCTVFNVDLPCRVKSSQLGIISNKQTHTSAIVKPQSSSCSYICQHCLVHLGDIARYRNQTSQAESYYRHAAQLVPSNGQPYNQLAILASSKGDHLTTIFYYCRSIAVKFPFPAASTNLQKALSKALESRDEVKTKWGVSDFIKAFIKFHGHVYLSKSLEKLSPLREKLEEQFKRLLFQKAFNSQQLVHVTVINLFQLHHLRDFSNETEQHTYSQDEQLCWTQLLALFMSFLGILCKCPLQNESQEESYNAYPLPAVKVSMDWLRLRPRVFQEAVVDERQYIWPWLISLLNSFHPHEEDLSSISATPLPEEFELQGFLALRPSFRNLDFSKGHQGITGDKEGQQRRIRQQRLISIGKWIADNQPRLIQCENEVGKLLFITEIPELILEDPSEAKENLILQETSVIESLAADGSPGLKSVLSTSRNLSNNCDTGEKPVVTFKENIKTREVNRDQGRSFPPKEVKSQTELRKTPVSEARKTPVTQTPTQASNSQFIPIHHPGAFPPLPSRPGFPPPTYVIPPPVAFSMGSGYTFPAGVSVPGTFLQPTAHSPAGNQVQAGKQSHIPYSQQRPSGPGPMNQGPQQSQPPSQQPLTSLPAQPTAQSTSQLQVQALTQQQQSPTKAVPALGKSPPHHSGFQQYQQADASKQLWNPPQVQGPLGKIMPVKQPYYLQTQDPIKLFEPSLQPPVMQQQPLEKKMKPFPMEPYNHNPSEVKVPEFYWDSSYSMADNRSVMAQQANIDRRGKRSPGVFRPEQDPVPRMPFEDPKSSPLLPPDLLKSLAALEEEEELIFSNPPDLYPALLGPLASLPGRSLFKSLLEKPSELMSHSSSFLSLTGFSLNQERYPNNSMFNEVYGKNLTSSSKAELSPSMAPQETSLYSLFEGTPWSPSLPASSDHSTPASQSPHSSNPSSLPSSPPTHNHNSVPFSNFGPIGTPDNRDRRTADRWKTDKPAMGGFGIDYLSATSSSESSWHQASTPSGTWTGHGPSMEDSSAVLMESLKSIWSSSMMHPGPSALEQLLMQQKQKQQRGQGTMNPPH

SEQ ID NO: 8428 - protein, 3433 aa, Homo sapiens
MAKYGEHEASPDNGQNEFSDIIKSRSDEHNDVQKKTFTKWINARFSKSGKPPINDMFTDLKDGRKLLDLLEGLTGTSLPKERGSTRVHALNNVNRVLQVLHQNNVELVNIGGTDIVDGNHKLTLGLLWSIILHWQVKDVMKDVMSDLQQTNSEKILLSWVRQTTRPYSQVNVLNFTTSWTDGLAFNAVLHRHKPDLFSWDKVVKMSPIERLEHAFSKAQTYLGIEKLLDPEDVAVQLPDKKSIIMYLTSLFEVLPQQVTIDAIREVETLPRKYKKECEEEAINIQSTAPEEEHESPRAETPSTVTEVDMDLDSYQIALEEVLTWLLSAEDTFQEQDDISDDVEEVKDQFATHEAFMMELTAHQSSVGSVLQAGNQLITQGTLSDEEEFEIQEQMTLLNARWEALRVESMDRQSRLHDVLMELQKKQLQQLSAWLTLTEERIQKMETCPLDDDVKSLQKLLEEHKSLQSDLEAEQVKVNSLTHMVVIVDENSGESATAILEDQLQKLGERWTAVCRWTEERWNRLQEINILWQELLEEQCLLKAWLTEKEEALNKVQTSNFKDQKELSVSVRRLAILKEDMEMKRQTLDQLSEIGQDVGQLLDNSKASKKINSDSEELTQRWDSLVQRLEDSSNQVTQAVAKLGMSQIPQKDLLETVRVREQAITKKSKQELPPPPPPKKRQIHVDIEAKKKFDAISAELLNWILKWKTAIQTTEIKEYMKMQDTSEMKKKLKALEKEQRERIPRADELNQTGQILVEQMGKEGLPTEEIKNVLEKVSSEWKNVSQHLEDLERKIQLQEDINAYFKQLDELEKVIKTKEEWVKHTSISESSRQSLPSLKDSCQRELTNLLGLHPKIEMARASCSALMSQPSAPDFVQRGFDSFLGRYQAVQEAVEDRQQHLENELKGQPGHAYLETLKTLKDVLNDSENKAQVSLNVLNDLAKVEKALQEKKTLDEILENQKPALHKLAEETKALEKNVHPDVEKLYKQEFDDVQGKWNKLKVLVSKDLHLLEEIALTLRAFEADSTVIEKWMDGVKDFLMKQQAAQGDDAGLQRQLDQCSAFVNEIETIESSLKNMKEIETNLRSGPVAGIKTWVQTRLGDYQTQLEKLSKEIATQKSRLSESQEKAANLKKDLAEMQEWMTQAEEEYLERDFEYKSPEELESAVEEMKRAKEDVLQKEVRVKILKDNIKLLAAKVPSGGQELTSELNVVLENYQLLCNRIRGKCHTLEEVWSCWIELLHYLDLETTWLNTLEERMKSTEVLPEKTDAVNEALESLESVLRHPADNRTQIRELGQTLIDGGILDDIISEKLEAFNSRYEDLSHLAESKQISLEKQLQVLRETDQMLQVLQESLGELDKQLTTYLTDRIDAFQVPQEAQKIQAEISAHELTLEELRRNMRSQPLTSPESRTARGGSQMDVLQRKLREVSTKFQLFQKPANFEQRMLDCKRVLDGVKAELHVLDVKDVDPDVIQTHLDKCMKLYKTLSEVKLEVETVIKTGRHIVQKQQTDNPKGMDEQLTSLKVLYNDLGAQVTEGKQDLERASQLARKMKKEAASLSEWLSATETELVQKSTSEGLLGDLDTEISWAKNVLKDLEKRKADLNTITESSAALQNLIEGSEPILEERLCVLNAGWSRVRTWTEDWCNTLMNHQNQLEIFDGNVAHISTWLYQAEALLDEIEKKPTSKQEEIVKRLVSELDDANLQVENVRDQALILMNARGSSSRELVEPKLAELNRNFEKVSQHIKSAKLLIAQEPLYQCLVTTETFETGVPFSDLEKLENDIENMLKFVEKHLESSDEDEKMDEESAQIEEVLQRGEEMLHQPMEDNKKEKIRLQLLLLHTRYNKIKAIPIQQRKMGQLASGIRSSLLPTDYLVEINKILLCMDDVELSLNVPELNTAIYEDFSFQEDSLKNIKDQLDKLGEQIAVIHEKQPDVILEASGPEAIQIRDTLTQLNAKWDRINRMYSDRKGCFDRAMEEWRQFHCDLNDLTQWITEAEELLVDTCAPGGSLDLEKARIHQQELEVGISSHQPSFAALNRTGDGIVQKLSQADGSFLKEKLAGLNQRWDAIVAEVKDRQPRLKGESKQVMKYRHQLDEIICWLTKAEHAMQKRSTTELGENLQELRDLTQEMEVHAEKLKWLNRTELEMLSDKSLSLPERDKISESLRTVNMTWNKICREVPTTLKECIQEPSSVSQTRIAAHPNVQKVVLVSSASDIPVQSHRTSEISIPADLDKTITELADWLVLIDQMLKSNIVTVGDVEEINKTVSRMKITKADLEQRHPQLDYVFTLAQNLKNKASSSDMRTAITEKLERVKNQWDGTQHGVELRQQQLEDMIIDSLQWDDHREETEELMRKYEARLYILQQARRDPLTKQISDNQILLQELGPGDGIVMAFDNVLQKLLEEYGSDDTRNVKETTEYLKTSWINLKQSIADRQNALEAEWRTVQASRRDLENFLKWIQEAETTVNVLVDASHRENALQDSILARELKQQMQDIQAEIDAHNDIFKSIDGNRQKMVKALGNSEEATMLQHRLDDMNQRWNDLKAKSASIRAHLEASAEKWNRLLMSLEELIKWLNMKDEELKKQMPIGGDVPALQLQYDHCKALRRELKEKEYSVLNAVDQARVFLADQPIEAPEEPRRNLQSKTELTPEERAQKIAKAMRKQSSEVKEKWESLNAVTSNWQKQVDKALEKLRDLQGAMDDLDADMKEAESVRNGWKPVGDLLIDSLQDHIEKIMAFREEIAPINFKVKTVNDLSSQLSPLDLHPSLKMSRQLDDLNMRWKLLQVSVDDRLKQLQEAHRDFGPSSQHFLSTSVQLPWQRSISHNKVPYYINHQTQTTCWDHPKMTELFQSLADLNNVRFSAYRTAIKIRRLQKALCLDLLELSTTNEIFKQHKLNQNDQLLSVPDVINCLTTTYDGLEQMHKDLVNVPLCVDMCLNWLLNVYDTGRTGKIRVQSLKIGLMSLSKGLLEEKYRYLFKEVAGPTEMCDQRQLGLLLHDAIQIPRQLGEVAAFGGSNIEPSVRSCFQQNNNKPEISVKEFIDWMHLEPQSMVWLPVLHRVAAAETAKHQAKCNICKECPIVGFRYRSLKHFNYDVCQSCFFSGRTAKGHKLHYPMVEYCIPTTSGEDVRDFTKVLKNKFRSKKYFAKHPRLGYLPVQTVLEGDNLETPITLISMWPEHYDPSQSPQLFHDDTHSRIEQYATRLAQMERTNGSFLTDSSSTTGSVEDEHALIQQYCQTLGGESPVSQPQSPAQILKSVEREERGELERIIADLEEEQRNLQVEYEQLKDQHLRRGLPVGSPPESIISPHHTSEDSELIAEAKLLRQHKGRLEARMQILEDHNKQLESQLHRLRQLLEQPESDSRINGVSPWASPQHSALSYSLDPDASGPQFHQAAGEDLLAPPHDTSTDLTEVMEQIHSTFPSCCPNVPSRPQAM

SEQ ID NO: 8429 - protein, 653 aa, Homo sapiens
MASGSKASVPADSFRTISPDRRGEKSASAVSGDTAAATTLKGTAIPVRSVVASPRPVKGKAGRETARLRLQRLPAAQAEDTGEAAAAAAEEPLLPVPEDEEEAQPLPPVCVSRMRGMWRDEKVSLYCDEVLQDCKAEDADEVMGKYLSEKLKLKDKWLGVWKTNPSVFFVKYEEASIPFVGILVEVTCEPYQDSSSRFKVTVSVAEPFSSNIANIPRDLVDEILEELEHSVPLLEVYPVEGQDTDIHVIALALEVVRFFYDFLWRDWDDEESCENYTALIEERINLWCDIQDGTIPGPIAQRFKKTLEKYKNKRVELIEYQSNIKEDPSAAEAVECWKKYYEIVMLCGLLKMWEDLRLRVHGPFFPRILRRRKGKREFGKTITHIVAKMMTTEMIKDLSSDTLLQQHGDLDLALDNCYSGDTVIIFPGEYQAANLALLTDDIIIKGVGKREEIMITSEPSRDSFVVSKADNVKLMHLSLIQQGTVDGIVVVESGHMTLENCILKCEGTGVCVLTGAALTITDSEITGAQGAGVELYPGSIAILERNEIHHCNNLRTSNSSKSTLGGVNMKVLPAPKLKMTNNHIYSNKGYGVSILQPMEQFFIVAEEALNKRASSGDKKDDKMLFKVMQNLNLEMNNNKIEANVKGDIRIVTS

SEQ ID NO: 8430 - protein, 1270 aa, Homo sapiens
MGDVKNFLYAWCGKRKMTPSYEIRAVGNKNRQKFMCEVQVEGYNYTGMGNSTNKKDAQSNAARDFVNYLVRINEIKSEEVPAFGVASPPPLTDTPDTTANAEGDLPTTMGGPLPPHLALKAENNSEVGASGYGVPGPTWDRGANLKDYYSRKEEQEVQATLESEEVDLNAGLHGNWTLENAKARLNQYFQKEKIQGEYKYTQVGPDHNRSFIAEMTIYIKQLGRRIFAREHGSNKKLAAQSCALSLVRQLYHLGVVEAYSGLTKKKEGETVEPYKVNLSQDLEHQLQNIIQELNLEILPPPEDPSVPVALNIGKLAQFEPSQRQNQVGVVPWSPPQSNWNPWTSSNIDEGPLAFATPEQISMDLKNELMYQLEQDHDLQAILQERELLPVKKFESEILEAISQNSVVIIRGATGCGKTTQVPQFILDDFIQNDRAAECNIVVTQPRRISAVSVAERVAFERGEEPGKSCGYSVRFESILPRPHASIMFCTVGVLLRKLEAGIRGISHVIVDEIHERDINTDFLLVVLRDVVQAYPEVRIVLMSATIDTSMFCEYFFNCPIIEVYGRTYPVQEYFLEDCIQMTHFVPPPKDKKKKDKDDDGGEDDDANCNLICGDEYGPETRLSMSQLNEKETPFELIEALLKYIETLNVPGAVLVFLPGWNLIYTMQKHLEMNPHFGSHRYQILPLHSQIPREEQRKVFDPVPVGVTKVILSTNIAETSITINDVVYVIDSCKQKVKLFTAHNNMTNYATVWASKTNLEQRKGRAGRVRPGFCFHLCSRARFERLETHMTPEMFRTPLHEIALSIKLLRLGGIGQFLAKAIEPPPLDAVIEAEHTLRELDALDANDELTPLGRILAKLPIEPRFGKMMIMGCIFYVGDAICTIAAATCFPEPFINEGKRLGYIHRNFAGNRFSDHVALLSVFQAWDDARMGGEEAEIRFCEHKRLNMATLRMTWEAKVQLKEILINSGFPEDCLLTQVFTNTGPDNNLDVVISLLAFGVYPNVCYHKEKRKILTTEGRNALIHKSSVNCPFSSQDMKYPSPFFVFGEKIRTRAISAKGMTLVTPLQLLLFASKKVQSDGQIVLVDDWIKLQISHEAAACITGLRAAMEALVVEVTKQPAIISQLDPVNERMLNMIRQISRPSAAGINLMIGSTRYGDGPRPPKMARYDNGSGYRRGGSSYSGGGYGGGYSSGGYGSGGYGGSANSFRAGYGAGVGGGYRGVSRGGFRGNSGGDYRGPSGGYRGSGGFQRGGGRGAYGTGYFGQGRGGGGY

SEQ ID NO: 8431 - protein, 2270 aa, Homo sapiens
MARFGEAVVARPGSGDGDSDQSRNRQGTPVPASGQAAAYKQTKAQRARTMALYNPIPVRQNCFTVNRSLFIFGEDNIVRKYAKKLIDWPPFEYMILATIIANCIVLALEQHLPEDDKTPMSRRLEKTEPYFIGIFCFEAGIKIVALGFIFHKGSYLRNGWNVMDFIVVLSGILATAGTHFNTHVDLRTLRAVRVLRPLKLVSGIPSLQIVLKSIMKAMVPLLQIGLLLFFAILMFAIIGLEFYSGKLHRACFMNNSGILEGFDPPHPCGVQGCPAGYECKDWIGPNDGITQFDNILFAVLTVFQCITMEGWTTVLYNTNDALGATWNWLYFIPLIIIGSFFVLNLVLGVLSGEFAKERERVENRRAFMKLRRQQQIERELNGYRAWIDKAEEVMLAEENKNAGTSALEVLRRATIKRSRTEAMTRDSSDEHCVDISSVGTPLARASIKSAKVDGVSYFRHKERLLRISIRHMVKSQVFYWIVLSLVALNTACVAIVHHNQPQWLTHLLYYAEFLFLGLFLLEMSLKMYGMGPRLYFHSSFNCFDFGVTVGSIFEVVWAIFRPGTSFGISVLRALRLLRIFKITKYWASLRNLVVSLMSSMKSIISLLFLLFLFIVVFALLGMQLFGGRFNFNDGTPSANFDTFPAAIMTVFQILTGEDWNEVMYNGIRSQGGVSSGMWSAIYFIVLTLFGNYTLLNVFLAIAVDNLANAQELTKDEQEEEEAFNQKHALQKAKEVSPMSAPNMPSIERDRRRRHHMSMWEPRSSHLRERRRRHHMSVWEQRTSQLRKHMQMSSQEALNREEAPTMNPLNPLNPLSSLNPLNAHPSLYRRPRAIEGLALGLALEKFEEERISRGGSLKGDGGDRSSALDNQRTPLSLGQREPPWLARPCHGNCDPTQQEAGGGEAVVTFEDRARHRQSQRRSRHRRVRTEGKESSSASRSRSASQERSLDEAMPTEGEKDHELRGNHGAKEPTIQEERAQDLRRTNSLMVSRGSGLAGGLDEADTPLVLPHPELEVGKHVVLTEQEPEGSSEQALLGNVQLDMGRVISQSEPDLSCITANTDKATTESTSVTVAIPDVDPLVDSTVVHISNKTDGEASPLKEAEIREDEEEVEKKKQKKEKRETGKAMVPHSSMFIFSTTNPIRRACHYIVNLRYFEMCILLVIAASSIALAAEDPVLTNSERNKVLRYFDYVFTGVFTFEMVIKMIDQGLILQDGSYFRDLWNILDFVVVVGALVAFALANALGTNKGRDIKTIKSLRVLRVLRPLKTIKRLPKLKAVFDCVVTSLKNVFNILIVYKLFMFIFAVIAVQLFKGKFFYCTDSSKDTEKECIGNYVDHEKNKMEVKGREWKRHEFHYDNIIWALLTLFTVSTGEGWPQVLQHSVDVTEEDRGPSRSNRMEMSIFYVVYFVVFPFFFVNIFVALIIITFQEQGDKMMEECSLEKNERACIDFAISAKPLTRYMPQNRHTFQYRVWHFVVSPSFEYTIMAMIALNTVVLMMKYYSAPCTYELALKYLNIAFTMVFSLECVLKVIAFGFLNYFRDTWNIFDFITVIGSITEIILTDSKLVNTSGFNMSFLKLFRAARLIKLLRQGYTIRILLWTFVQSFKALPYVCLLIAMLFFIYAIIGMQVFGNIKLDEESHINRHNNFRSFFGSLMLLFRSATGEAWQEIMLSCLGEKGCEPDTTAPSGQNENERCGTDLAYVYFVSFIFFCSFLMLNLFVAVIMDNFEYLTRDSSILGPHHLDEFVRVWAEYDRAACGRIHYTEMYEMLTLMSPPLGLGKRCPSKVAYKRLVLMNMPVAEDMTVHFTSTLMALIRTALDIKIAKGGADRQQLDSELQKETLAIWPHLSQKMLDLLVPMPKASDLTVGKIYAAMMIMDYYKQSKVKKQRQQLEEQKNAPMFQRMEPSSLPQEIIANAKALPYLQQDPVSGLSGRSGYPSMSPLSPQDIFQLACMDPADDGQFQERQSLVVTDPSSMRRSFSTIRDKRSNSSWLEEFSMERSSENTYKSRRRSYHSSLRLSAHRLNSDSGHKSDTHRSGGRERGRSKERKHLLSPDVSRCNSEERGTQADWESPERRQSRSPSEGRSQTPNRQGTGSLSESSIPSVSDTSTPRRSRRQLPPVPPKPRPLLSYSSLIRHAGSISPPADGSEEGSPLTSQALESNNACLTESSNSPHPQQSQHASPQRYISEPYLALHEDSHASDCGEEETLTFEAAVATSLGRSNTIGSAPPLRHSWQMPNGHYRRRRRGGPGPGMMCGAVNNLLSDTEEDDKC

SEQ ID NO: 8432 - protein, 287 aa, Homo sapiens
MKDRLAELLDLSKQYDQQFPDGDDEFDSPHEDIVFETDHILESLYRDIRDIQDENQLLVADVKRLGKQNARFLTSMRRLSSIKRDTNSIAKAIKARGEVIHCKLRAMKELSEAAEAQHGPHSAVARISRAQYNALTLTFQRAMHDYNQAEMKQRDNCKIRIQRQLEIMGKEVSGDQIEDMFEQGKWDVFSENLLADVKGARAALNEIESRHRELLRLESRIRDVHELFLQMAVLVEKQADTLNVIELNVQKTVDYTGQAKAQVRKAVQYEEKNPCRTLCCFCCPCLK

SEQ ID NO: 8433 - protein, 2270 aa, Homo sapiens; identical to SEQ ID NO: 8431

SEQ ID NO: 8434 - protein, 2313 aa, Homo sapiens
MARFGEAVVARPGSGDGDSDQSRNRQGTPVPASGQAAAYKQTKAQRARTMALYNPIPVRQNCFTVNRSLFIFGEDNIVRKYAKKLIDWPPFEYMILATIIANCIVLALEQHLPEDDKTPMSRRLEKTEPYFIGIFCFEAGIKIVALGFIFHKGSYLRNGWNVMDFIVVLSGILATAGTHFNTHVDLRTLRAVRVLRPLKLVSGIPSLQIVLKSIMKAMVPLLQIGLLLFFAILMFAIIGLEFYSGKLHRACFMNNSGILEGFDPPHPCGVQGCPAGYECKDWIGPNDGITQFDNILFAVLTVFQCITMEGWTTVLYNTNDALGATWNWLYFIPLIIIGSFFVLNLVLGVLSGEFAKERERVENRRAFMKLRRQQQIERELNGYRAWIDKAEEVMLAEENKNAGTSALEVLRRATIKRSRTEAMTRDSSDEHCVDISSVGTPLARASIKSAKVDGVSYFRHKERLLRISIRHMVKSQVFYWIVLSLVALNTACVAIVHHNQPQWLTHLLYYAEFLFLGLFLLEMSLKMYGMGPRLYFHSSFNCFDFGVTVGSIFEVVWAIFRPGTSFGISVLRALRLLRIFKITKYWASLRNLVVSLMSSMKSIISLLFLLFLFIVVFALLGMQLFGGRFNFNDGTPSANFDTFPAAIMTVFQILTGEDWNEVMYNGIRSQGGVSSGMWSAIYFIVLTLFGNYTLLNVFLAIAVDNLANAQELTKDEQEEEEAFNQKHALQKAKEVSPMSAPNMPSIERDRRRRHHMSMWEPRSSHLRERRRRHHMSVWEQRTSQLRKHMQMSSQEALNREEAPTMNPLNPLNPLSSLNPLNAHPSLYRRPRAIEGLALGLALEKFEEERISRGGSLKGDGGDRSSALDNQRTPLSLGQREPPWLARPCHGNCDPTQQEAGGGEAVVTFEDRARHRQSQRRSRHRRVRTEGKESSSASRSRSASQERSLDEAMPTEGEKDHELRGNHGAKEPTIQEERAQDLRRTNSLMVSRGSGLAGGLDEADTPLVLPHPELEVGKHVVLTEQEPEGSSEQALLGNVQLDMGRVISQSEPDLSCITANTDKATTESTSVTVAIPDVDPLVDSTVVHISNKTDGEASPLKEAEIREDEEEVEKKKQKKEKRETGKAMVPHSSMFIFSTTNPIRRACHYIVNLRYFEMCILLVIAASSIALAAEDPVLTNSERNKVLRYFDYVFTGVFTFEMVIKMIDQGLILQDGSYFRDLWNILDFVVVVGALVAFALANALGTNKGRDIKTIKSLRVLRVLRPLKTIKRLPKLKAVFDCVVTSLKNVFNILIVYKLFMFIFAVIAVQLFKGKFFYCTDSSKDTEKECIGNYVDHEKNKMEVKGREWKRHEFHYDNIIWALLTLFTVSTGEGWPQVLQHSVDVTEEDRGPSRSNRMEMSIFYVVYFVVFPFFFVNIFVALIIITFQEQGDKMMEECSLEKNERACIDFAISAKPLTRYMPQNRHTFQYRVWHFVVSPSFEYTIMAMIALNTVVLMMKYYSAPCTYELALKYLNIAFTMVFSLECVLKVIAFGFLNYFRDTWNIFDFITVIGSITEIILTDSKLVNTSGFNMSFLKLFRAARLIKLLRQGYTIRILLWTFVQSFKALPYVCLLIAMLFFIYAIIGMQVFGNIKLDEESHINRHNNFRSFFGSLMLLFRSATGEAWQEIMLSCLGEKGCEPDTTAPSGQNENERCGTDLAYVYFVSFIFFCSFLMLNLFVAVIMDNFEYLTRDSSILGPHHLDEFVRVWAEYDRAACGRIHYTEMYEMLTLMSPPLGLGKRCPSKVAYKRLVLMNMPVAEDMTVHFTSTLMALIRTALDIKIAKGGADRQQLDSELQKETLAIWPHLSQKMLDLLVPMPKASDLTVGKIYAAMMIMDYYKQSKVKKQRQQLEEQKNAPMFQRMEPSSLPQEIIANAKALPYLQQDPVSGLSGRSGYPSMSPLSPQDIFQLACMDPADDGQFQERQSLEPEVSELKSVQPSNHGIYLPSDTQEHAGSGRASSMPRLTVDPQVVTDPSSMRRSFSTIRDKRSNSSWLEEFSMERSSENTYKSRRRSYHSSLRLSAHRLNSDSGHKSDTHRSGGRERGRSKERKHLLSPDVSRCNSEERGTQADWESPERRQSRSPSEGRSQTPNRQGTGSLSESSIPSVSDTSTPRRSRRQLPPVPPKPRPLLSYSSLIRHAGSISPPADGSEEGSPLTSQALESNNACLTESSNSPHPQQSQHASPQRYISEPYLALHEDSHASDCGEEETLTFEAAVATSLGRSNTIGSAPPLRHSWQMPNGHYRRRRRGGPGPGMMCGAVNNLLSDTEEDDKC

SEQ ID NO: 8435 - protein, 475 aa, Homo sapiens
MPHRKKKPFIEKKKAVSFHLVHRSQRDPLAADESAPQRVLLPTQKIDNEERRAEQRKYGVFFDDDYDYLQHLKEPSGPSELIPSSTFSAHNRREEKEETLVIPSTGIKLPSSVFASEFEEDVGLLNKAAPVSGPRLDFDPDIVAALDDDFDFDDPDNLLEDDFILQANKATGEEEGMDIQKSENEDDSEWEDVDDEKGDSNDDYDSAGLLSDEDCMSVPGKTHRAIADHLFWSEETKSRFTEYSMTSSVMRRNEQLTLHDERFEKFYEQYDDDEIGALDNAELEGSIQVDSNRLQEVLNDYYKEKAENCVKLNTLEPLEDQDLPMNELDESEEEEMITVVLEEAKEKWDCESICSTYSNLYNHPQLIKYQPKPKQIRISSKTGIPLNVLPKKGLTAKQTERIQMINGSDLPKVSTQPRSKNESKEDKRARKQAIKEERKERRVEKKANKLAFKLEKRRQEKELLNLKKNVEGLKL

SEQ ID NO: 8436 - protein, 296 aa, Homo sapiens
MGELMAFLLPLIIVLMVKHSDSRTHSLRYFRLGVSDPIHGVPEFISVGYVDSHPITTYDSVTRQKEPRAPWMAENLAPDHWERYTQLLRGWQQMFKVELKRLQRHYNHSDNVAHTIKQAWEANQHELLYQKNWLEEECIAWLKRFLEYGKDTLQRTEPPLVRVNRKETFPGVTALFCKAHGFYPPEIYMTWMKNGEEIVQEIDYGDILPSGDGTYQAWASIELDPQSSNLYSCHVEHCGVHMVLQVPQESETIPLVMKAVSGSIVLVIVLAGVGVLVWRRRPREQNGAIYLPTPDR

SEQ ID NO: 8437 - protein, 341 aa, Homo sapiens
MGELMAFLLPLIIVLMVKHSDSRTHSLRYFRLGVSDPIHGVPEFISVGYVDSHPITTYDSVTRQKEPRAPWMAENLAPDHWERYTQLLRGWQQMFKVELKRLQRHYNHSGSHTYQRMIGCELLEDGSTTGFLQYAYDGQDFLIFNKDTLSWLAVDNVAHTIKQAWEANQHELLYQKNWLEEECIAWLKRFLEYGKDTLQRTEPPLVRVNRKETFPGVTALFCKAHGFYPPEIYMTWMKNGEEIVQEIDYGDILPSGDGTYQAWASIELDPQSSNLYSCHVEHCGVHMVLQVPQESETIPLVMKAVSGSIVLVIVLAGVGVLVWRRRPREQNGAIYLPTPDR

SEQ ID NO: 8438 - protein, 565 aa, Homo sapiens
MGQTSVSTLSPQPGSVDGLDKASIANSDGPTAGSQTPPFKRKGKLSTIGKIFKPWKWRKKKTSDKFRETSAVLERKISTRQSREELIRRGVLKELPDQDGDVTVNFENSNGHMIPIGEESTREENVVKSEEGNGSVSEKTPPLEEQAEDKKAGSSHSKKTTGSKASASPSTSSTSSRPKASKETVSSKAGTVGTTKGKRKTDKQPITSHLSSDTTTSGTSDLKGEPAETRVESFKLEQTVPGAEEQNTGKFKSMVPPPPVAPAPSPLAPPLPLEDQCITASDTPVVLVSVGADLPVSALDPSQLLWAEEPTNRTTLYSGTGLSVNRENAKCFTTKEELGKTVPQLLTPGLMGESSESFSASEDEGHREYQANDSDSDGPILYTDDEDEDEDEDGSGESALASKIRRRDTLAIKLGNRPSKKELEDKNILQRTSEEERQEIRQQIGTKLVRRLSQRPTTEELEQRNILKQKNEEEEQEAKMELKRRLSRKLSLRPTVAELQARRILRFNEYVEVTDSPDYDRRADKPWARLTPADKAAIRKELNEFKSTEMEVHEESRQFTRFHRP

SEQ ID NO: 8439 - protein, 622 aa, Homo sapiens
MAEAGWRPAASPVDPAGQAAAVPVPEPEAPAPPAAPALRWLPGDPSPRGRSQSDLSSSSSRGRPLRVHISGSVDGLDKASIANSDGPTAGSQTPPFKRKGKLSTIGKIFKPWKWRKKKTSDKFRETSAVLERKISTRQSREELIRRGVLKELPDQDGDVTVNFENSNGHMIPIGEESTREENVVKSEEGNGSVSEKTPPLEEQAEDKKAGSSHSKKTTGSKASASPSTSSTSSRPKASKETVSSKAGTVGTTKGKRKTDKQPITSHLSSDTTTSGTSDLKGEPAETRVESFKLEQTVPGAEEQNTGKFKSMVPPPPVAPAPSPLAPPLPLEDQCITASDTPVVLVSVGADLPVSALDPSQLLWAEEPTNRTTLYSGTGLSVNRENAKCFTTKEELGKTVPQLLTPGLMGESSESFSASEDEGHREYQANDSDSDGPILYTDDEDEDEDEDGSGESALASKIRRRDTLAIKLGNRPSKKELEDKNILQRTSEEERQEIRQQIGTKLVRRLSQRPTTEELEQRNILKQKNEEEEQEAKMELKRRLSRKLSLRPTVAELQARRILRFNEYVEVTDSPDYDRRADKPWARLTPADKAAIRKELNEFKSTEMEVHEESRQFTRFHRP

SEQ ID NO: 8440 - protein, 811 aa, Homo sapiens
MKARTRPLRASHDIVPTITQGSRDGHRSPARDPRTTPACRDSLQNGHTSDSSSGESSGGHRPRRGPSPSHVRFEDESAREAEFRHLERLQQRQRQVLSTVLQAADQGPLRSKPDLADYINGAPRLRDAGQGTFHRLVGSLDRRGHPAPPAPGSERRCQACGSCIDDPRPAQGKAPPVPRTLQELQAACGMERVLGGLSSPLRLLPAEPRLHMEWIRETHIGDTVCPAEVDSALDSTDNSDNCRTDSEEAGTSQAGWACGRTQGSSPRLRLRGSRPRGHRWSKKAEAELPWGLQAQQHLPRADDVEVENEVKEGRGHTPEGTLFLREDAKPPDLELKRVSLGPQWQPGPGLGSHQPHPLDSRTPCRTAYATTAPMTPESSGPGGQAQVTESHESLEIVSPSSLQQSHAEPSAPHQAWQPTASLCPEGWAPTPPPSRKTTSPVSHRKAALAGLLRLGDQTEPVGIPRPPSRSAVLRTCELPPSQTQPSRPQVRHPLLALSTNNCNNSAPRGLQEPYGGAVHEGRVERGPCSREPEPPLENSRDGGPQGFLGSADVATINSTGITLSLSSEESESSKESEGSLQRTGSGSGGHVLSRASAGAGTGPGSPSAAPLDQNKKRSSSIASTLGLKKLFSALGQSSRPKLGKSRSYSVEQLQPAPPGLTSQSRAPSLQSLHPVSPSHQRRKAASFQNLHSLLSSKGNRSSLYLVAGPGDHSAAGRPAKTSPRRALSVEDVGAPSLARTVGRLVEVFPDGTSQLQLQRSPGGTFGFCVASGNGRPDSGMPSPLPQPHGWGGLSKQGRAFWLWSEAFLVFG

SEQ ID NO: 8441 - protein, 1190 aa, Homo sapiens
MEGTEAAAAKPAGGSPQGPKTGSGTASPVEGTSAVEWSGPEPQLDNGHPPRPWPCPQENRTSSLMAPQPPRVWGVQLQGPSVLESKVRALKEKMTVAKQGVSPCSASQEWSSPKKPQCRRGKAGRAGTPSEGSFLPGAVVAPRTQNLPDGQLDGSINEEQPARDGGPRLPRPPAPGREYCNRGSPWPPEAEWTLPDHDRGPLLGPSSLQQSPIHGVTPGRPGGPGHCNKIIHIPSPRTGRSYPFPDGVVTEADLDSTSLTSEEVFVPRTALLGERWRAGDLEALGAGSSVLSLSDRVERNRLLLQEMLNVSGQSPRKVGTPAWTPSWDTAAPERPVGDVDWASGTSLQDSGQNRTVGPNPEPVLSPRHEEATHLLQRARMKARTRPLRASHDIVPTITQGSRDGHRSPARDPRTTPACRDSLQNGHTSDSSSGESSGGHRPRRGPSPSHVRFEDESAREAEFRHLERLQQRQRQVLSTVLQAADQGPLRSKPDLADYINGAPRLRDAGQGTFHRLVGSLDRRGHPAPPAPGSERRCQACGSCIDDPRPAQGKAPPVPRTLQELQAACGMERVLGGLSSPLRLLPAEPRLHMEWIRETHIGDTVCPAEVDSALDSTDNSDNCRTDSEEAGTSQAGWACGRTQGSSPRLRLRGSRPRGHRWSKKAEAELPWGLQAQQHLPRADDVEVENEVKEGRGHTPEGTLFLREDAKPPDLELKRVSLGPQWQPGPGLGSHQPHPLDSRTPCRTAYATTAPMTPESSGPGGQAQVTESHESLEIVSPSSLQQSHAEPSAPHQAWQPTASLCPEGWAPTPPPSRKTTSPVSHRKAALAGLLRLGDQTEPVGIPRPPSRSAVLRTCELPPSQTQPSRPQVRHPLLALSTNNCNNSAPRGLQEPYGGAVHEGRVERGPCSREPEPPLENSRDGGPQGFLGSADVATINSTGITLSLSSEESESSKESEGSLQRTGSGSGGHVLSRASAGAGTGPGSPSAAPLDQNKKRSSSIASTLGLKKLFSALGQSSRPKLGKSRSYSVEQLQPAPPGLTSQSRAPSLQSLHPVSPSHQRRKAASFQNLHSLLSSKGNRSSLYLVAGPGDHSAAGRPAKTSPRRALSVEDVGAPSLARTVGRLVEVFPDGTSQLQLQRSPGGTFGFCVASGNGRPDSGMPSPLPQPHGWGGLSKQGRAFWLWSEAFLVFG

SEQ ID NO: 8442 - protein, 696 aa, Homo sapiens
MKFAEHLSAHITPEWRKQYIQYEAFKDMLYSAQDQAPSVEVTDEDTVKRYFAKFEEKFFQTCEKELAKINTFYSEKLAEAQRRFATLQNELQSSLDAQKESTGVTTLRQRRKPVFHLSHEERVQHRNIKDLKLAFSEFYLSLILLQNYQNLNFTGFRKILKKHDKILETSRGADWRVAHVEVAPFYTCKKINQLISETEAVVTNELEDGDRQKAMKRLRVPPLGAAQPAPAWTTFRVGLFCGIFIVLNITLVLAAVFKLETDRSIWPLIRIYRGGFLLIEFLFLLGINTYGWRQAGVNHVLIFELNPRSNLSHQHLFEIAGFLGILWCLSLLACFFAPISVIPTYVYPLALYGFMVFFLINPTKTFYYKSRFWLLKLLFRVFTAPFHKVGFADFWLADQLNSLSVILMDLEYMICFYSLELKWDESKGLLPNNSEESGICHKYTYGVRAIVQCIPAWLRFIQCLRRYRDTKRAFPHLVNAGKYSTTFFMVTFAALYSTHKERGHSDTMVFFYLWIVFYIISSCYTLIWDLKMDWGLFDKNAGENTFLREEIVYPQKAYYYCAIIEDVILRFAWTIQISITSTTLLPHSGDIIATVFAPLEVFRRFVWNFFRLENEHLNNCGEFRAVRDISVAPLNADDQTLLEQMMDQDDGVRNRQKNRSWKYNQSISLRRPRLASQSKARDTKVLIEDTDDEANT

SEQ ID NO: 8443 - protein, 373 aa, Homo sapiens
MLRSVWNFLKRHKKKCIFLGTVLGGVYILGKYGQKKIREIQEREAAEYIAQARRQYHFESNQRTCNMTVLSMLPTLREALMQQLNSESLTALLKNRPSNKLEIWEDLKIISFTRSTVAVYSTCMLVVLLRVQLNIIGGYIYLDNAAVGKNGTTILAPPDVQQQYLSSIQHLLGDGLTELITVIKQAVQKVLGSVSLKHSLSLLDLEQKLKEIRNLVEQHKSSSWINKDGSKPLLCHYMMPDEETPLAVQACGLSPRDITTIKLLNETRDMLESPDFSTVLNTCLNRGFSRLLDNMAEFFRPTEQDLQHGNSMNSLSSVSLPLAKIIPIVNGQIHSVCSETPSHFVQDLLTMEQVKDFAANVYEAFSTPQQLEK

SEQ ID NO: 8444 - protein, 3117 aa, Homo sapiens
MRSSKSKEVPLPNPRNSQSKDTVQADITTSWDALSQTKAALRHIENKLEVAPTSTAVCDSVMDTKKSSTSATRKISRKDGRYLDDSWVNAPISKSTKSRKEKSRSPLRATTLESNVKKNNRVEFREPLVSYREIHGAPSNFSSSHLESKHVYCVDVNEEKTESGNWMIGSREERNIRSCDFESSQSSVINDTVVRFLNDRPAIDALQNSECLIRMGASMRTEEEMPNRTKGSENNLKLSVNNMAHDTDPKALRLTDSSPSSTSTSNSQRLDILKRRQHDVKLEKLKERIRKQWEHSEETNGRGQKLGHIDHPVMVVNVDNSVTAKVRKVATAPPAPAYKGFNPSETKIRTPDGKVWQEAEFQNMSRELYRDLALHFADDISIKEKPAEKSKEKKVVKPVRKVQKVAQLSSTECRTGSSHLISTSSWRDGQKLVKKILGPAPRMEPKEQRTASSDRGGRERTAKSGGHIGRAESDPRLDVLHRHLQRNSERSRSKSRSENNIKKLASSLPDNKQEENTALNKDFLPIEIRGILDDLQLDSTAHTAKQDTVELQNQKSSAPVHAPRSHSPVKRKPDKITANEDPPVISKRRHYDTDEVRQYIVRQQEERKRKQNEEKKAQKEATEQKNKRLQELYRKQKEAFTKVKNVPPSEPSATRRLQETYSKLLLEKTLLEEPSHQHVTQETQAKPGYQPSGESDKENKVQERPPSASSSSDMSLSEPPQPLARKDLMESTWMQPERLSPQVHHSQPQPFAGTAGSLLSHLLSLEHVGILHKDFESILPTRKNHNMASRPLTFTPQPYVTSPAAYTDALLKPSASQYKSKLDRIEALKATAASLSSRIESEAKKLAGASINYGSAWNTEYDVQQAPQEDGPWTKAVTPPVKDDNEDVFSARIQKMLGSCVSHATFDDDLPGVGNLSEFKKLPEMIRPQSAISSFRVRSPGPKPEGLLAQLCKRQTDSSSSDMQACSQDKAKISLGSSIDSVSEGPLLSEGSLSEEEGDQDGQPLLKVAEILKEKEFCPGERNSYEPIKEFQKEAEKFLPLFGHIGGTQSKGPWEELAKGSPHSVINIFTKSYQLYGKGFEDKLDRGTSTSRPLNATATPLSGVSYEDDFVSSPGTGTSTEKKSTLEPHSTLSPQEDHSNRKSAYDPSSVDVTSQHSSGAQSAASSRSSTSSKGKKGKKEKTEWLDSFTGNVQNSLLDEEKAERGSHQGKKSGTSSKLSVKDFEQTLDTDSTLEDLSGHSVSVSSDKGRSQKTPTSPLSPSSQKSLQFDVAGTSSERSKSSVMPPTITGFKPNAPLTDLNPAASRTTTENMAPIPGSKRFSPAGLHHRMAAELSYLNAIEESVRQLSDVERVRGISLAQQESVSLAQIIKAQQQRHERDLALLKLKAEQEALESQRQLEETRNKAAQVHAESLQQVVQSQREVTEVLQEATCKIAAQQSETARLTTDAARQICEMAELTRTHISDAVVASGAPLAILYDHQRQHLPDFVKQLRTRTETDRKSPSVSLSQSKEGTLDSKHQKYSASYDSYSESSGYKNHDRRSSSGSSRQESPSVPSCKENEKKLNGEKIESSIDEQVQTAADDSLRSDSVPSLPDEKDSTSIATEYSLKFDESMTEDEIEEQSFRSLLPSESHRRFNMEKRRGHHDDSDEEASPEKTTLSTAKELNMPFSGGQDSFSKFTMEMVRQYMKEEEMRAAHQSSLLRLREKALKEKTKAELAWLEHQKKHLRDKGEDDKMPPLRKKQRGLLLRLQQEKAEIKRLQEANKAARKERQLILKQQEEIEKIRQTTIKLQEKLKSAGESKLDSHSDDDTKDNKATSPGPTDLETRSPSPISISSSETSSIMQKLKKMRSRMDEKFLTKREQKLMQRRQHAEELLEWKRRLDAEEAEIRQMEKQALAAWDKELIKPKTPKKELEDQRTEQKEIASEEESPVPLYSHLNSESSIPEELGSPAVEYVPSESIGQEQPGSPDHSILTEEMICSQELESSTSPSKHSLPKSCTSVSKQESSKGSHRTGGQCHLPIKSHQHCYSWSDESLSMTQSETTSDQSDIEGRIRALKDELRKRKSVVNQLKKEQKKRQKERLKAQEASLIKQLESYDEFIKKTEAELSQDLETSPTAKPQIKTLSSASEKPKIKPLTPLHRSETAKNWKSLTESERSRGSLESIAEHVDASLSGSERSVSERSLSAYAKRVNEWDSRTEDFQTPSPVLRSSRKIREESGDSLENVPALHLLKELNATSRILDMSDGKVGESSKKSEIKEIEYTKLKKSKIEDAFSKEGKSDVLLKLVLEQGDSSEILSKKDLPLDSENVQKDLVGLAIENLHKSEEMLKERQSDQDMNHSPNIQSGKDIHEQKNTKEKDLSWSEHLFAPKEIPYSEDFEVSSFKKEISAELYKDDFEVSSLLSLRKDSQSCRDKPQPMRSSTSGATSFGSNEEISECLSEKSLSIHSNVHSDRLLELKSPTELMKSKERSDVEHEQQVTESPSLASVPTADELFDFHIGDRVLIGNVQPGILRFKGETSFAKGFWAGVELDKPEGNNNGTYDGIAYFECKEKHGIFAPPQKISHIPENFDDYVDINEDEDCYSDERYQCYNQEQNDTEGPKDREKDVSEYFYEKSLPSVNDIEASVNRSRSLKIETDNVQDISGVLEAHVHQQSSVDSQISSKENKDLISDATEKVSIAAEDDTLDNTFSEELEKQQQFTEEEDNLYAEASEKLCTPLLDLLTREKNQLEAQLKSSLNEEKKSKQQLEKISLLTDSLLKVFVKDTVNQLQQIKKTRDEKIQLSNQELLGDDQKKVTPQDLSQNVEEQSPSISGCFLSSELEDEKEEISSPDMCPRPESPVFGASGQEELAKRLAELELSREFLSALGDDQDWFDEDFGLSSSHKIQKNKAEETIVPLMAEPKRVTQQPCETLLAVPHTAEEVEILVHNAAEELWKWKELGHDLHSISIPTKLLGCASKGLDIESTSKRVYKQAVFDLTKEIFEEIFAEDPNLNQPVWMKPCRINSSYFRRVKNPNNLDEIKSFIASEVLKLFSLKKEPNHKTDWQKMMKFGRKKRDRVDHILVQELHEEEAQWVNYDEDELCVKMQLADGIFETLIKDTIDVLNQISEKQGRMLLV

SEQ ID NO: 8445 - protein, 1222 aa, Homo sapiens
MMFRSDRMWSCHWKWKPSPLLFLFALYIMCVPHSVWGCANCRVVLSNPSGTFTSPCYPNDYPNSQACMWTLRAPTGYIIQITFNDFDIEEAPNCIYDSLSLDNGESQTKFCGATAKGLSFNSSANEMHVSFSSDFSIQKKGFNASYIRVAVSLRNQKVILPQTSDAYQVSVAKSISIPELSAFTLCFEATKVGHEDSDWTAFSYSNASFTQLLSFGKAKSGYFLSISDSKCLLNNALPVKEKEDIFAESFEQLCLVWNNSLGSIGVNFKRNYETVPCDSTISKVIPGNGKLLLGSNQNEIVSLKGDIYNFRLWNFTMNAKILSNLSCNVKGNVVDWQNDFWNIPNLALKAESNLSCGSYLIPLPAAELASCADLGTLCQDGIIYRISVVIQNILRHPEVKVQSKVAEWLNSTFQNWNYTVYVVNISFHLSAGEDKIKVKRSLEDEPRLVLWALLVYNATNNTNLEGKIIQQKLLKNNESLDEGLRLHTVNVRQLGHCLAMEEPKGYYWPSIQPSEYVLPCPDKPGFSASRICFYNATNPLVTYWGPVDISNCLKEANEVANQILNLTADGQNLTSANITNIVEQVKRIVNKEENIDITLGSTLMNIFSNILSSSDSDLLESSSEALKTIDELAFKIDLNSTSHVNITTRNLALSVSSLLPGTNAISNFSIGLPSNNESYFQMDFESGQVDPLASVILPPNLLENLSPEDSVLVRRAQFTFFNKTGLFQDVGPQRKTLVSYVMACSIGNITIQNLKDPVQIKIKHTRTQEVHHPICAFWDLNKNKSFGGWNTSGCVAHRDSDASETVCLCNHFTHFGVLMDLPRSASQLDARNTKVLTFISYIGCGISAIFSAATLLTYVAFEKLRRDYPSKILMNLSTALLFLNLLFLLDGWITSFNVDGLCIAVAVLLHFFLLATFTWMGLEAIHMYIALVKVFNTYIRRYILKFCIIGWGLPALVVSVVLASRNNNEVYGKESYGKEKGDEFCWIQDPVIFYVTCAGYFGVMFFLNIAMFIVVMVQICGRNGKRSNRTLREEVLRNLRSVVSLTFLLGMTWGFAFFAWGPLNIPFMYLFSIFNSLQGLFIFIFHCAMKENVQKQWRQHLCCGRFRLADNSDWSKTATNIIKKSSDNLGKSLSSSSIGSNSTYLTSKSKSSSTTYFKRNSHTDSASMDKSLSKLAHADGDQTSIIPVHQVIDKVKGYCNAHSDNFYKNIIMSDTFSHSTKF

SEQ ID NO: 8446 - protein, 1250 aa, Homo sapiens
MMFRSDRMWSCHWKWKPSPLLFLFALYIMCVPHSVWGCANCRVVLSNPSGTFTSPCYPNDYPNSQACMWTLRAPTGYIIQITFNDFDIEEAPNCIYDSLSLDNGESQTKFCGATAKGLSFNSSANEMHVSFSSDFSIQKKGFNASYIRVAVSLRNQKVILPQTSDAYQVSVAKSISIPELSAFTLCFEATKVGHEDSDWTAFSYSNASFTQLLSFGKAKSGYFLSISDSKCLLNNALPVKEKEDIFAESFEQLCLVWNNSLGSIGVNFKRNYETVPCDSTISKVIPGNGKLLLGSNQNEIVSLKGDIYNFRLWNFTMNAKILSNLSCNVKGNVVDWQNDFWNIPNLALKAESNLSCGSYLIPLPAAELASCADLGTLCQATVNSPSTTPPTVTTNMPVTNRIDKQRNDGIIYRISVVIQNILRHPEVKVQSKVAEWLNSTFQNWNYTVYVVNISFHLSAGEDKIKVKRSLEDEPRLVLWALLVYNATNNTNLEGKIIQQKLLKNNESLDEGLRLHTVNVRQLGHCLAMEEPKGYYWPSIQPSEYVLPCPDKPGFSASRICFYNATNPLVTYWGPVDISNCLKEANEVANQILNLTADGQNLTSANITNIVEQVKRIVNKEENIDITLGSTLMNIFSNILSSSDSDLLESSSEALKTIDELAFKIDLNSTSHVNITTRNLALSVSSLLPGTNAISNFSIGLPSNNESYFQMDFESGQVDPLASVILPPNLLENLSPEDSVLVRRAQFTFFNKTGLFQDVGPQRKTLVSYVMACSIGNITIQNLKDPVQIKIKHTRTQEVHHPICAFWDLNKNKSFGGWNTSGCVAHRDSDASETVCLCNHFTHFGVLMDLPRSASQLDARNTKVLTFISYIGCGISAIFSAATLLTYVAFEKLRRDYPSKILMNLSTALLFLNLLFLLDGWITSFNVDGLCIAVAVLLHFFLLATFTWMGLEAIHMYIALVKVFNTYIRRYILKFCIIGWGLPALVVSVVLASRNNNEVYGKESYGKEKGDEFCWIQDPVIFYVTCAGYFGVMFFLNIAMFIVVMVQICGRNGKRSNRTLREEVLRNLRSVVSLTFLLGMTWGFAFFAWGPLNIPFMYLFSIFNSLQGLFIFIFHCAMKENVQKQWRQHLCCGRFRLADNSDWSKTATNIIKKSSDNLGKSLSSSSIGSNSTYLTSKSKSSSTTYFKRNSHTDSASMDKSLSKLAHADGDQTSIIPVHQVIDKVKGYCNAHSDNFYKNIIMSDTFSHSTKF

SEQ ID NO: 8447 - protein, 383 aa, Homo sapiens
MERRARSSSRESRGRGGRTPHKENKRAKAERSGGGRGRQEAGPEPSGSGRAGTPGEPRAPAATVVDVDEVRGSGEEGTEVVALLESERPEEGTKSSGLGACEWLLVLISLLFIIMTFPFSIWFCVKVVQEYERVIIFRLGHLLPGRAKGPGLFFFLPCLDTYHKVDLRLQTLEIPFHEIVTKDMFIMEIDAICYYRMENASLLLSSLAHVSKAVQFLVQTTMKRLLAHRSLTEILLERKSIAQDAKVALDSVTCIWGIKVERIEIKDVRLPAGLQHSLAVEAEAQRQAKVRMIAAEAEKAASESLRMAAEILSGTPAAVQLRYLHTLQSLSTEKPSTVVLPLPFDLLNCLSSPSNRTQGSLPFPSPSKPVEPLNPKKKDSPML

SEQ ID NO: 8448 - protein, 315 aa, Homo sapiens
MERRARSSSRESRGRGGRTPHKENKRAKAERSGGGRGRQEAGPEPSGSGRAGTPGEPRAPAATVVDVDEVRGSGEEGTEVVALLESERPEEGTKSSGLGACEWLLVLISLLFIIMTFPFSIWFCVKVVQEYERVIIFRLGHLLPGRAKGPGLFFFLPCLDTYHKVDLRLQTLEIPFHEVALDSVTCIWGIKVERIEIKDVRLPAGLQHSLAVEAEAQRQAKVRMIAAEAEKAASESLRMAAEILSGTPAAVQLRYLHTLQSLSTEKPSTVVLPLPFDLLNCLSSPSNRTQGSLPFPSPSKPVEPLNPKKKDSPML

SEQ ID NO: 8449 - protein, 1012 aa, Homo sapiens
MSLPKTPSTPLNSTSTSESKKLKVSVAKEGTRGLPELKEKKNMVDRSKLLPTSLQNEFIPKEVLLSLTYAANAGPCPENLLPPKKIKTPKGTLPRLVDHVWHHPVRRNKFKYLIDHPVSLTGAGRDISFLYDVTYAKGQTREKAVCPPHLARSLQSHDGVIVPHKPKTLTDTLIPEEFHIVSSTGVSGLECYDDKYTTLLTDSENRLLLFPSMKPNKRVEVAQLNDVMDTMLERAGVENQEYTGPTKMHKLLHILKKEQTIYNMIFHELIRQVSVDCADRGELLSKVRERYVQMLDQIARQMIDFYKDLVTQRVMDQRILEELYNFKHVIEELTRELCLVRAHDVKLTKETEKAHKDLAQALLNAEKNAKIVEEYHDLYTLQRERMENDMKKLVAERDIWSSATYELALKVIERNRVILARRLYLNEKGWNKYTKHFIILLSNKDTEDLALLQKLTQKWRNLVNKLKQEVEQMEESTSETLKIVKDGLIKWQEFFNEKDILSPNKGNIFNSVLLDFKQWQKILNEKKEEFTGDVLLSKYDTLKIIKHLQENWADIGLGIFNRHKSLEGEMPSERQYMEEIIKNIQKLYKEYEIRINGDNGYSKILPSLISSLDFCSFKLENLEFPDTPLEEWQEIDEKINEMKSHLDILLNLTGIVPQHIDVDSVSVLQAYIFNMIQQWLLKIGNEINNGNIELQHHMDELHISMIQWMVNLLILMIPNFTDQDCLLKLEEESAEKHDIGVARLELDAIELTRKLYQYSSYLSSCCKGMVTAMALSKSTNSHKNATEDLYEVDKLKKECYEWINTCSCLLSNIKGRKITLLTYEEIERLLEEEAVKEFIEPEIDESFKEDEEESKEDRKLQEENKERAEEQPSTSTEKEKLIRFIGEDENVHSKPLFETDVLSSWRESAKQGTLAQKYLEAMAVIEHMQEKLLEVENRARQAEEKFEDAYEKLHHTLIKNKDLEELVMTSRKESKEEKENQDEREVKEEEEQQEEEEVRSAENSSKSPKKGH

SEQ ID NO: 8450 - protein, 1161 aa, Homo sapiens
MGQQVGRVGEAPGLQQPQPRGIRGSSAARPSGRRRDPAGRTTETGFNIFTQHEALHRPYGCDVEPQALNEAIRWSSKENLLGATESDPNLFVALYDFVASGDNTLSITKGEKLRVLGYNQNGEWSEVRSKNGQGWVPSNYITPVNSLEKHSWYHGPVSRSAAEYLLSSLINGSFLVRESESSPGQLSISLRYEGRVYHYRINTTADGKVYVTAESRFSTLAELVHHHSTVADGLVTTLHYPAPKCNKPTVYGVSPIHDKWEMERTDITMKHKLGGGQYGEVYVGVWKKYSLTVAVKTLKEDTMEVEEFLKEAAVMKEIKHPNLVQLLGVCTLEPPFYIVTEYMPYGNLLDYLRECNREEVTAVVLLYMATQISSAMEYLEKKNFIHRDLAARNCLVGENHVVKVADFGLSRLMTGDTYTAHAGAKFPIKWTAPESLAYNTFSIKSDVWAFGVLLWEIATYGMSPYPGIDLSQVYDLLEKGYRMEQPEGCPPKVYELMRACWKWSPADRPSFAETHQAFETMFHDSSISEEVAEELGRAASSSSVVPYLPRLPILPSKTRTLKKQVENKENIEGAQDATENSASSLAPGFIRGAQASSGSPALPRKQRDKSPSSLLEDAKETCFTRDRKGGFFSSFMKKRNAPTPPKRSSSFREMENQPHKKYELTGNFSSVASLQHADGFSFTPAQQEANLVPPKCYGGSFAQRNLCNDDGGGGGGSGTAGGGWSGITGFFTPRLIKKTLGLRAGKPTASDDTSKPFPRSNSTSSMSSGLPEQDRMAMTLPRNCQRSKLQLERTVSTSSQPEENVDRANDMLPKKSEESAAPSRERPKAKLLPRGATALPLRTPSGDLAITEKDPPGVGVAGVAAAPKGKEKNGGARLGMAGVPEDGEQPGWPSPAKAAPVLPTTHNHKVPVLISPTLKHTPADVQLIGTDSQGNKFKLLSEHQVTSSGDKDRPRRVKPKCAPPPPPVMRLLQHPSICSDPTEEPTALTAGQSTSETQEGGKKAALGAVPISGKAGRPVMPPPQVPLPTSSISPAKMANGTAGTKVALRKTKQAAEKISADKISKEALLECADLLSSALTEPVPNSQLVDTGHQLLDYCSGYVDCIPQTRNKFAFREAVSKLELSLQELQVSSAAAGVPGTNPVLNNLLSCVQEISDVVQR

SEQ ID NO: 8451 - protein, 557 aa, Homo sapiens
MDLMNGQASSVNIAATASEKSSSSESLSDKGSELKKSFDAVVFDVLKVTPEEYAGQITLMDVPVFKAIQPDELSSCGWNKKEKYSSAPNAVAFTRRFNHVSFWVVREILHAQTLKIRAEVLSHYIKTAKKLYELNNLHALMAVVSGLQSAPIFRLTKTWALLSRKDKTTFEKLEYVMSKEDNYKRLRDYISSLKMTPCIPYLGIYLSDLTYIDSAYPSTGSILENEQRSNLMNNILRIISDLQQSCEYDIPMLPHVQKYLNSVQYIEELQKFVEDDNYKLSLKIEPGTSTPRSAASREDLVGPEVGASPQSGRKSVAAEGALLPQTPPSPRNLIPHGHRKCHSLGYNFIHKMNTAEFKSATFPNAGPRHLLDDSVMEPHAPSRGQAESSTLSSGISIGSSDGSELSEETSWPAFESSAESEDLAVHLYPGAVTIQGVLRRKTLLKEGKKPTVASWTKYWAALCGTQLFYYAAKSLKATERKHFKSTSNKNVSVIGWMVMMADDPEHPDLFLLTDSEKGNSYKFQAGNRMNAMLWFKHLSAACQSNKQQVPTNLMTFE

SEQ ID NO: 8452 - protein, 583 aa, Homo sapiens
MDLMNGQASSVNIAATASEKSSSSESLSDKGSELKKSFDAVVFDVLKVTPEEYAGQITLMDVPVFKAIQPDELSSCGWNKKEKYSSAPNAVAFTRRFNHVSFWVVREILHAQTLKIRAEVLSHYIKTAKKLYELNNLHALMAVVSGLQSAPIFRLTKTWALLSRKDKTTFEKLEYVMSKEDNYKRLRDYISSLKMTPCIPYLGIYLSDLTYIDSAYPSTGSILENEQRSNLMNNILRIISDLQQSCEYDIPMLPHVQKYLNSVQYIEELQKFVEDDNYKLSLKIEPGTSTPRSAASREDLVGPEVGASPQSGRKSVAAEGALLPQTPPSPRNLIPHGHRKCHSLGYNFIHKMNTAEFKSATFPNAGPRHLLDDSVMEPHAPSRGQAESSTLSSGISIGSSDGSELSEETSWPAFERNRLYHSLGPVTRVARNGYRSHMKASSSAESEDLAVHLYPGAVTIQGVLRRKTLLKEGKKPTVASWTKYWAALCGTQLFYYAAKSLKATERKHFKSTSNKNVSVIGWMVMMADDPEHPDLFLLTDSEKGNSYKFQAGNRMNAMLWFKHLSAACQSNKQQVPTNLMTFE

SEQ ID NO: 8453 - protein, 1280 aa, Homo sapiens
MELSPSSGGAAEALSWPEMFPALESDSPLPPEDLDAVVPVSGAVAGGMLDRILLESVCQQQSWVRVYDVKGPPTHRLSCGQSPYTETTTWERKYCILTDSQLVLLNKEKEIPVEGGQEQQTDSTKGRCLRRTVSVPSEGQFPEYPPEGATKLEVPAERSPRRRSISGTSTSEKPNSMDTANTSPFKVPGFFSKRLKGSIKRTKSQSKLDRNTSFRLPSLRSTDDRSRGLPKLKESRSHESLLSPCSTVECLDLGRGEPVSVKPLHSSILGQDFCFEVTYLSGSKCFSCNSASERDKWMENLRRTVQPNKDNCRRAENVLRLWIIEAKDLAPKKKYFCELCLDDTLFARTTSKTKADNIFWGEHFEFFSLPPLHSITVHIYKDVEKKKKKDKNNYVGLVNIPTASVTGRQFVEKWYPVSTPTPNKGKTGGPSIRIKSRFQTITILPMEQYKEFAEFVTSNYTMLCSVLEPVISVRNKEELACALVHILQSTGRAKDFLTDLVMSEVDRCGEHDVLIFRENTIATKSIEEYLKLVGQQYLHDALGEFIKALYESDENCEVDPSKCSSSELIDHQSNLKMCCELAFCKIINSYCVFPRELKEVFASWKQQCLNRGKQDISERLISASLFLRFLCPAIMSPSLFNLMQEYPDDRTSRTLTLIAKVIQNLANFAKFGNKEEYMAFMNDFLEHEWGGMKRFLLEISNPDTISNTPGFDGYIDLGRELSVLHSLLWEVVSQLDKATVAKLGPLPRVLADITKSLTNPTPIQQQLRRFTEHNSSPNVSGSLSSGLQKIFEDPTDSDLHKLKSPSQDNTDSYFRGKTLLLVQQASSQSMTYSEKDERESSLPNGRSVSLMDLQDTHAAQVEHASVMLDVPIRLTGSQLSITQVASIKQLRETQSTPQSAPQVRRPLHPALNQPGGLQPLSFQNPVYHLNNPIPAMPKASIDSSLENLSTASSRSQSNSEDFKLSGPSNSSMEDFTKRSTQSEDFSRRHTVPDRHIPLALPRQNSTGQAQIRKVDQGGLGARAKAPPSLPHSASLRSTGSMSVVSAALVAEPVQNGSRSRQQSSSSRESPVPKVRAIQRQQTQQVQSPVDSATMSPVERTAAWVLNNGQYEEDVEETEQNLDEAKHAEKYEQEITKLKERLRVSSRRLEEYERRLLVQEQQMQKLLLEYKARLEDSEERLRRQQEEKDSQMKSIISRLMAVEEELKKDHAEMQAVIDAKQKIIDAQEKRIVSLDSANTRLMSALTQVKERYSMQVRNGISPTNPTKLSITENGEFKNSSC

SEQ ID NO: 8454 - protein, 1228 aa, Homo sapiens
MALAGLCALLACCWGPAAVLATAAGDVDPSKELECKLKSITVSALPFLRENDLSIMHSPSASEPKLLFSVRNDFPGEMVVVDDLENTELPYFVLEISGNTEDIPLVRWRQQWLENGTLLFHIHHQDGAPSLPGQDPTEEPQHESAEEELRILHISVMGGMIALLLSILCLVMILYTRRRWCKRRRVPQPQKSASAEAANEIHYIPSVLIGGHGRESLRNARVQGHNSSGTLSIRETPILDGYEYDITDLRHHLQRECMNGGEDFASQVTRTLDSLQGCNEKSGMDLTPGSDNAKLSLMNKYKDNIIATSPVDSNHQQATLLSHTSSSQRKRINNKARAGSAFLNPEGDSGTEAENDPQLTFYTDPSRSRRRSRVGSPRSPVNKTTLTLISITSCVIGLVCSSHVNCPLVVKITLHVPEHLIADGSRFILLEGSQLDASDWLNPAQVVLFSQQNSSGPWAMDLCARRLLDPCEHQCDPETGECLCYEGYMKDPVHKHLCIRNEWGTNQGPWPYTIFQRGFDLVLGEQPSDKIFRFTYTLGEGMWLPLSKSFVIPPAELAINPSAKCKTDMTVMEDAVEVREELMTSSSFDSLEVLLDSFGPVRDCSKDNGGCSKNFRCISDRKLDSTGCVCPSGLSPMKDSSGCYDRHIGVDCSDGFNGGCEQLCLQQMAPFPDDPTLYNILMFCGCIEDYKLGVDGRSCQLITETCPEGSDCGESRELPMNQTLFGEMFFGYNNHSKEVAAGQVLKGTFRQNNFARGLDQQLPDGLVVATVPLENQCLEEISEPTPDPDFLTGMVNFSEVSGYPVLQHWKVRSVMYHIKLNQVAISQALSNALHSLDGATSRADFVALLDQFGNHYIQEAIYGFEESCSIWYPNKQVQRRLWLEYEDISKGNSPSDESEERERDPKVLTFPEYITSLSDSGTKHMAAGVRMECHSKGRCPSSCPLCHVTSSPDTPAEPVLLEVTKAAPIYELVTNNQTQRLLQEATMSSLWCSGTGDVIEDWCRCDSTAFGADGLPTCAPLPQPVLRLSTVHEPSSTLVVLEWEHSEPPIGVQIVDYLLRQEKVTDRMDHSKVETETVLSFVDDIISGAKSPCAMPSQVPDKQLTTISLIIRCLEPDTIYMFTLWGVDNTGRRSRPSDVIVKTPCPVVDDVKAQEIADKIYNLFNGYTSGKEQQTAYNTLLDLGSPTLHRVLYHYNQHYESFGEFTWRCEDELGPRLPACWDSQRSCR

SEQ ID NO: 8455 - protein, 543 aa, Homo sapiens
MPNPKNSKGGRKNKRANSSGDEQENGAGALAAAGAAGAAAGGALAAAAGCGAAAAGAPGAGGAAGAGGAGTGAANAAAAAGAAAAGDAKNEAPCATPLICSFGRPVDLEKDDYQKVVCNNEHCPCSTWMHLQCFYEWESSILVQFNCIGRARSWNEKQCRQNMWTKKGYDLAFRFCSCRCGQGHLKKDTDWYQVKRMQDEKKKKSGSEKNTGRPPGEAAEEAKKCRPPNKPQKGPSHDLPRRHSMDRQNSQEKAVGAAAYGARSPGGSPGQSPPTGYSILSPAHFSGPRSSRYLGEFLKNAIHLEPHKKAMAGGHVFRNAHFDYSPAGLAVHRGGHFDTPVQFLRRLDLSELLTHIPRHKLNTFHVRMEDDAQVGQGEDLRKFILAALSASHRNVVNCALCHRALPVFEQFPLVDGTLFLSPSRHDEIEYDVPCHLQGRLMHLYAVCVDCLEGVHKIICIKCKSRWDGSWHQLGTMYTYDILAASPCCQARLNCKHCGKPVIDVRIGMQYFSEYSNVQQCPHCGNLDYHFVKPFSSFKVLEAY

SEQ ID NO: 8456 - protein, 827 aa, Homo sapiens
MMCLKILRISLAILAGWALCSANSELGWTRKKSLVEREHLNQVLLEGERCWLGAKVRRPRASPQHHLFGVYPSRAGNYLRPYPVGEQEIHHTGRSKPDTEGNAVSLVPPDLTENPAGLRGAVEEPAAPWVGDSPIGQSELLGDDDAYLGNQRSKESLGEAGIQKGSAMAATTTTAIFTTLNEPKPETQRRGWAKSRQRRQVWKRRAEDGQGDSGISSHFQPWPKHSLKHRVKKSPPEESNQNGGEGSYREAETFNSQVGLPILYFSGRRERLLLRPEVLAEIPREAFTVEAWVKPEGGQNNPAIIAGVFDNCSHTVSDKGWALGIRSGKDKGKRDARFFFSLCTDRVKKATILISHSRYQPGTWTHVAATYDGRHMALYVDGTQVASSLDQSGPLNSPFMASCRSLLLGGDSSEDGHYFRGHLGTLVFWSTALPQSHFQHSSQHSSGEEEATDLVLTASFEPVNTEWVPFRDEKYPRLEVLQGFEPEPEILSPLQPPLCGQTVCDNVELISQYNGYWPLRGEKVIRYQVVNICDDEGLNPIVSEEQIRLQHEALNEAFSRYNISWQLSVHQVHNSTLRHRVVLVNCEPSKIGNDHCDPECEHPLTGYDGGDCRLQGRCYSWNRRDGLCHVECNNMLNDFDDGDCCDPQVADVRKTCFDPDSPKRAYMSVKELKEALQLNSTHFLNIYFASSVREDLAGAATWPWDKDAVTHLGGIVLSPAYYGMPGHTDTMIHEVGHVLGLYHVFKGVSERESCNDPCKETVPSMETGDLCADTAPTPKSELCREPEPTSDTCGFTRFPGAPFTNYMSYTGITTVLFCFLLRIHGGL

SEQ ID NO: 8457 - protein, 1791 aa, Homo sapiens
MMCLKILRISLAILAGWALCSANSELGWTRKKSLVEREHLNQVLLEGERCWLGAKVRRPRASPQHHLFGVYPSRAGNYLRPYPVGEQEIHHTGRSKPDTEGNAVSLVPPDLTENPAGLRGAVEEPAAPWVGDSPIGQSELLGDDDAYLGNQRSKESLGEAGIQKGSAMAATTTTAIFTTLNEPKPETQRRGWAKSRQRRQVWKRRAEDGQGDSGISSHFQPWPKHSLKHRVKKSPPEESNQNGGEGSYREAETFNSQVGLPILYFSGRRERLLLRPEVLAEIPREAFTVEAWVKPEGGQNNPAIIAGVFDNCSHTVSDKGWALGIRSGKDKGKRDARFFFSLCTDRVKKATILISHSRYQPGTWTHVAATYDGRHMALYVDGTQVASSLDQSGPLNSPFMASCRSLLLGGDSSEDGHYFRGHLGTLVFWSTALPQSHFQHSSQHSSGEEEATDLVLTASFEPVNTEWVPFRDEKYPRLEVLQGFEPEPEILSPLQPPLCGQTVCDNVELISQYNGYWPLRGEKVIRYQVVNICDDEGLNPIVSEEQIRLQHEALNEAFSRYNISWQLSVHQVHNSTLRHRVVLVNCEPSKIGNDHCDPECEHPLTGYDGGDCRLQGRCYSWNRRDGLCHVECNNMLNDFDDGDCCDPQVADVRKTCFDPDSPKRAYMSVKELKEALQLNSTHFLNIYFASSVREDLAGAATWPWDKDAVTHLGGIVLSPAYYGMPGHTDTMIHEVGHVLGLYHVFKGVSERESCNDPCKETVPSMETGDLCADTAPTPKSELCREPEPTSDTCGFTRFPGAPFTNYMSYTDDNCTDNFTPNQVARMHCYLDLVYQQWTESRKPTPIPIPPMVIGQTNKSLTIHWLPPISGVVYDRASGSLCGACTEDGTFRQYVHTASSRRVCDSSGYWTPEEAVGPPDVDQPCEPSLQAWSPEVHLYHMNMTVPCPTEGCSLELLFQHPVQADTLTLWVTSFFMESSQVLFDTEILLENKESVHLGPLDTFCDIPLTIKLHVDGKVSGVKVYTFDERIEIDAALLTSQPHSPLCSGCRPVRYQVLRDPPFASGLPVVVTHSHRKFTDVEVTPGQMYQYQVLAEAGGELGEASPPLNHIHGAPYCGDGKVSERLGEECDDGDLVSGDGCSKVCELEEGFNCVGEPSLCYMYEGDGICEPFERKTSIVDCGIYTPKGYLDQWATRAYSSHEDKKKCPVSLVTGEPHSLICTSYHPDLPNHRPLTGWFPCVASENETQDDRSEQPEGSLKKEDEVWLKVCFNRPGEARAIFIFLTTDGLVPGEHQQPTVTLYLTDVRGSNHSLGTYGLSCQHNPLIINVTHHQNVLFHHTTSVLLNFSSPRVGISAVALRTSSRIGLSAPSNCISEDEGQNHQGQSCIHRPCGKQDSCPSLLLDHADVVNCTSIGPGLMKCAITCQRGFALQASSGQYIRPMQKEILLTCSSGHWDQNVSCLPVDCGVPDPSLVNYANFSCSEGTKFLKRCSISCVPPAKLQGLSPWLTCLEDGLWSLPEVYCKLECDAPPIILNANLLLPHCLQDNHDVGTICKYECKPGYYVAESAEGKVRNKLLKIQCLEGGIWEQGSCIPVVCEPPPPVFEGMYECTNGFSLDSQCVLNCNQEREKLPILCTKEGLWTQEFKLCENLQGECPPPPSELNSVEYKCEQGYGIGAVCSPLCVIPPSDPVMLPENITADTLEHWMEPVKVQSIVCTGRRQWHPDPVLVHCIQSCEPFQADGWCDTINNRAYCHYDGGDCCSSTLSSKKVIPFAADCDLDECTCRDPKAEENQ

SEQ ID NO: 8458 - protein, 769 aa, Homo sapiens
MEGLTLSDAEQKYYSDLFSYCDIESTKKVVVNGRVLELFRAAQLPNDVVLQIMELCGATRLGYFGRSQFYIALKLVAVAQSGFPLRVESINTVKDLPLPRFVASKNEQESRHAASYSSDSENQGSYSGVIPPPPGRGQVKKGSVSHDTVQPRTSADAQEPASPVVSPQQSPPTSPHTWRKHSRHPSGGNSERPLAGPGPFWSPFGEAQSGSSAGDAVWSGHSPPPPQENWVSFADTPPTSTLLTMHPASVQDQTTVRTVASATTAIEIRRQSSSYDDPWKITDEQRQYYVNQFKTIQPDLNGFIPGSAAKEFFTKSKLPILELSHIWELSDFDKDGALTLDEFCAAFHLVVARKNGYDLPEKLPESLMPKLIDLEDSADVGDQPGEVGYSGSPAEAPPSKSPSMPSLNQTWPELNQSSEDTAIVHPVPIRMTPSKIHMQEMELKRTGSDHTNPTSPLLVKPSDLLEENKINSSVKFASGNTVADGYSSSDSFTSDPEQIGSNVTRQRSHSGTSPDNTAPPPPPPRPQPSHSRSSSLDMNRTFTVTTGQQQAGVVAHPPAVPPRPQPSQAPGPAVHRPVDADGLITHTSTSPQQIPEQPNFADFSQFEVFAASNVNDEQDDEAEKHPEVLPAEKASDPASSLRVAKTDSKTEEKTAASAPANVSKGTTPLAPPPKPVRRRLKSEDELRPEVDEHTQKTGVLAAVLASQPSIPRSVGKDKKAIQASIRRNKETNTVLARLNSELQQQLKDVLEERISLEVQLEQLRPFSHL

SEQ ID NO: 8459 - protein, 731 aa, Homo sapiens
MSGSRQAGSGSAGTSPGSSAASSVTSASSSLSSSPSPPSVAVSAAALVSGGVAQAAGSGGLGGPVRPVLVAPAVSGSGGGAVSTGLSRHSCAARPSAGVGGSSSSLGSGSRKRPLLAPLCNGLINSYEDKSNDFVCPICFDMIEEAYMTKCGHSFCYKCIHQSLEDNNRCPKCNYVVDNIDHLYPNFLVNELILKQKQRFEEKRFKLDHSVSSTNGHRWQIFQDWLGTDQDNLDLANVNLMLELLVQKKKQLEAESHAAQLQILMEFLKVARRNKREQLEQIQKELSVLEEDIKRVEEMSGLYSPVSEDSTVPQFEAPSPSHSSIIDSTEYSQPPGFSGSSQTKKQPWYNSTLASRRKRLTAHFEDLEQCYFSTRMSRISDDSRTASQLDEFQECLSKFTRYNSVRPLATLSYASDLYNGSSIVSSIEFDRDCDYFAIAGVTKKIKVYEYDTVIQDAVDIHYPENEMTCNSKISCISWSSYHKNLLASSDYEGTVILWDGFTGQRSKVYQEHEKRCWSVDFNLMDPKLLASGSDDAKVKLWSTNLDNSVASIEAKANVCCVKFSPSSRYHLAFGCADHCVHYYDLRNTKQPIMVFKGHRKAVSYAKFVSGEEIVSASTDSQLKLWNVGKPYCLRSFKGHINEKNFVGLASNGDYIACGSENNSLYLYYKGLSKTLLTFKFDTVKSVLDKDRKEDDTNEFVSAVCWRALPDGESNVLIAANSQGTIKVLELV

SEQ ID NO: 8460 - protein, 904 aa, Homo sapiens
MESFHTRFSAWTPFSNKSLNRQLFQERVALISHWFDLWTNKQRQEFLFAIFLRCTKSQLRFVQDWFSERMQVAKVDFSTVLPRFISLYIFSFLSPKDLCAAAQVSWPWKFLTEQDCLWMPKCVKFGWFLPYTPTDNEYGAWKRHYIACVSHLDWLTPREAAATYGTLNEPKTEDEELLERQREKCLRKRIWEKIALRKKELFKVRPPWVSGTCCSSVLKPRCQPRLSQTVRERVGLHEALEKQLVLTSLETLPKRSNISGSHSYPLLSKKNWHGVHKNDDRSSYALRPHFMLISSRIPAYEMVMESVKAGVVSVVYEHSVTLESLLYLIEKALDGQKAQSIGIFSDGDSREINLLQGYKIGVKNLLRPEVRDFWEKLGSYVATEEEGGHVDFFVPLGASEAGIEVLSQLSQLTGTFFTAPTGIATGSYQHILSDWLGSQWGKAPSSIYFCESKLQTWSSFTDFLEETLKTVRKQLYPFFKELQKSISGRMIGQFMFDTMGMTNILNNQDTAQALADGLMELSKEDSERNVVEDNSWDTKSRLSKNDLNFEALINLERILQKDSAEKRARVVRELLQSERKYVQILEIVRDVYVAPLKAALSSNRAILSAANIQIIFCDILQILSLNRQFLDNLRDRLQEWGPAHCVGEIVTKFGSQLNTYTNFFNNYPVILKTIEKCREMIPAFRTFLKRHDKTIVTKMLSLPELLLYPSRRFEEYLNLLYAVRLHTPAEHVDRGDLTTAIDQIKKYKGYIDQMKQNITMKDHLSDIQRIIWGCPTLSEVNRYLIRVQDVAQLHCCDEEISFSLRLYEHIHDLSLFLFNDALLVSSRGTSHTPFERTSKTTYQFIASVALHRLLIENIPDSKYVKNAFILQGPKYKWICATEIEDDKFLWLSVLRNAIKSSMEK

SEQ ID NO: 8461 - protein, 361 aa, Homo sapiens
MNESRWTEWRILNMSSGIVNVSERHSCPLGFGHYSVVDVCIFETVVIVLLTFLIIAGNLTVIFVFHCAPLLHHYTTSYFIQTMAYADLFVGVSCLVPTLSLLHYSTGVHESLTCQVFGYIISVLKSVSMACLACISVDRYLAITKPLSYNQLVTPCRLRICIILIWIYSCLIFLPSFFGWGKPGYHGDIFEWCATSWLTSAYFTGFIVCLLYAPAAFVVCFTYFHIFKICRQHTKEINDRRARFPSHEVDSSRETGHSPDRRYAMVLFRITSVFYMLWLPYIIYFLLESSRVLDNPTLSFLTTWLAISNSFCNCVIYSLSNSVFRLGLRRLSETMCTSCMCVKDQEAQEPKPRKRANSCSI

SEQ ID NO: 8462 - protein, 1125 aa, Homo sapiens
MPVQAPQWTDFLSCPICTQTFDETIRKPISLGCGHTVCKMCLNKLHRKACPFDQTTINTDIELLPVNSALLQLVGAQVPEQQPITLCSGVEDTKHYEEAKKCVEELALYLKPLSSARGVGLNSTTQSVLSRPMQRKLVTLVHCQLVEEEGRIRAMRAARSLGERTVTELILQHQNPQQLSSNLWAAVRARGCQFLGPAMQEEALKLVLLALEDGSALSRKVLVLFVVQRLEPRFPQASKTSIGHVVQLLYRASCFKVTKRDEDSSLMQLKEEFRTYEALRREHDSQIVQIAMEAGLRIAPDQWSSLLYGDQSHKSHMQSIIDKLQTPASFAQSVQELTIALQRTGDPANLNRLRPHLELLANIDPSPDAPPPTWEQLENGLVAVRTVVHGLVDYIQNHSKKGADQQQPPQHSKYKTYMCRDMKQRGGCPRGASCTFAHSQEELEKFRKMNKRLVPRRPLSASLGQLNEVGLPSAAILPDEGAVDLPSRKPPALPNGIVSTGNTVTQLIPRGTDPSYDSSLKPGKIDHLSSSAPGSPPDLLESVPKSISALPVNPHSIPPRGPADLPPMPVTKPLQMVPRGSQLYPAQQTDVYYQDPRGAAPPFEPAPYQQGMYYTPPPQCVSRFVRPPPSAPEPAPPYLDHYPPYLQERVVNSQYGTQPQQYPPIYPSHYDGRRVYPAPSYTREEIFRESPIPIEIPPAAVPSYVPESRERYQQIESYYPVAPHPTQIRPSYLREPPYSRLPPPPQPHPSLDELHRRRKEIMAQLEERKVISPPPFAPSPTLPPTFHPEEFLDEDLKVAGKYKGNDYSQYSPWSCDTIGSYIGTKDAKPKDVVAAGSVEMMNVESKGMRDQRLDLQRRAAETSDDDLIPFGDRPTVSRFGAISRTSKTIYQGAGPMQAMAPQGAPTKSINISDYSPYGTHGGWGASPYSPHQNIPSQGHFSERERISMSEVASHGKPLPSAEREQLRLELQQLNHQISQQTQLRGLEREANTLAGQSQPPPPPPPKWPGMISSEQLSLELHQVEREIGKRTRELSMENQCSLDMKSKLNTSKQAENGQPEPQNKVPAEDLTLTFSSDVPNGSALTQENISLLSNKTSSLNLSEDPEGGGDNNDSQRSGVTPSSAP

SEQ ID NO: 8463 - protein, 503 aa, Homo sapiens
MEKGGNIQLEIPDFSNSVLSHLNQLRMQGRLCDIVVNVQGQAFRAHKVVLAASSPYFRDHMSLNEMSTVSISVIKNPTVFEQLLSFCYTGRICLQLADIISYLTAASFLQMQHIIDKCTQILEGIHFKINVAEVEAELSQTRTKHQERPPESHRVTPNLNRSLSPRHNTPKGNRRGQVSAVLDIRELSPPEESTSPQIIEPSSDVESREPILRINRAGQWYVETGVADRGGRSDDEVRVLGAVHIKTENLEEWLGPENQPSGEDGSSAEEVTAMVIDTTGHGSVGQENYTLGSSGAKVARPTSSEVDRFSPSGSVVPLTERHRARSESPGRMDEPKQPSSQVEESAMMGVSGYVEYLREQEVSERWFRYNPRLTCIYCAKSFNQKGSLDRHMRLHMGITPFVCRMCGKKYTRKDQLEYHIRKHTGNKPFHCHVCGKSFPFQAILNQHFRKNHPGCIPLEGPHSISPETTVTSRGQAEEESPSQEETVAPGEAVQGSVSTTGPD

SEQ ID NO: 8464 - protein, 361 aa, Homo sapiens
MEKGGNIQLEIPDFSNSVLSHLNQLRMQGRLCDIVVNVQGQAFRAHKVVLAASSPYFRDHMSLNEMSTVSISVIKNPTVFEQLLSFCYTGRICLQLADIISYLTAASFLQMQHIIDKCTQILEGIHFKINVAEVEAELSQTRTKHQERPPESHRVTPNLNRSLSPRHNTPKGNRRGQVSAVLDIRELSPPEESTSPQIIEPSSDVESREPILRINRAGQWYVETGVADRGGRSDDEVRVLGAVHIKTENLEEWLGPENQPSGEDGSSAEEVTAMVIDTTGHGSVGQENYTLGSSGAKVARPTSSEVDRFSPSGSVVPLTERHRARSESPGRMDEPKQPSSQVWSCGFRTALVVGGIATVYE

SEQ ID NO: 8465 - protein, 308 aa, Homo sapiens
MEKGGNIQLEIPDFSNSVLSHLNQLRMQGRLCDIVVNVQGQAFRAHKVVLAASSPYFRDHMSLNEMSTVSISVIKNPTVFEQLLSFCYTGRICLQLADIISYLTAASFLQMQHIIDKCTQILEGIHFKINVAEVEAELSQTRTKHQERPPESHRVTPNLNRSLSPRHNTPKGNRRGQVSAVLDIRELSPPEESTSPQIIEPSSDVESREPILRINRAGQWYVETGVADRGGRSDDEVRVLGAVHIKTENLEEWLGPENQPSGEDGSSAEEVTAMVIDTTGHGSVGQENYTLGSSGAKVARPTSSEVDR

SEQ ID NO: 8466 - protein, 1124 aa, Homo sapiens
MSSYFWAQNESNRPDLLCGQPADYLVEEKHFTTLVCFIVVLGGLLKMCLKNCEVIVLTILSLSGFVIGHMAYNSVEVHQIVYPLLRTSSFSLYSYFSPLIIFMVALDVEFYTLKKMFWQVLLTGLISFSTASIIIGYVVIKFNKDSWDLQSCLLFSITLGIIDPLRSVNSLKTIGISKIYIDLIRGESLIICSIASIFFGNFRGNRIHFSIFRDLHVGIELSYDILGSIIFGYWCAKIIQCILADVFSNMLTNIILCFSMVYMTFYIVEFLGMSGTLALAAVGLNLDSLTFKPKIELVITKFLRIFSSVYEHLIYAFFGIVIGCGELSHYEFHTIPFIFILFTTVNLVRLLTILLVSPILMHSNYEYNWRWGVVITWSGIKGVFNLLWAPDVYNLAERKVEVPQMFILYVQVISLLTMGINSYVMTQSARKLDLCVLSLPRQMILQNATQHIQEIVQNTITLFKTEKILTNVNWTLVEDKTRIEYIPFSHVSHNDMKTESTTDEALMEEARLHVAAIQMSSFEKQRNNGILEIEAARILIGAAKCYYSIQGKFMSIYDVSTYMRTRSWLIKFKNVLTFLEYCIEKIHFIPPESNTFLTFIFHIVFSEEFEYTGQIINLIYIYPMIIHLWPMARGLNVSALISINYYFMFLYVLESTLKIIILKRKYFQQCWNTLEFFILVIGIIDIFCVYFVKLRPDNLALIQLTVIMGYLRIIRFLPLFKIIVPILIRIADVQIKKRLSLMYSITKGYIKSQEDAKLLIKQIAVCESIYQKLCEILETNKQDAVKELVLMEHEGRDVVIALKTKQAIRNVIAKALKNLTFLCSRGIIDKHEVIEINKVLLKKLKALNNFPKAIPPPTPDIYLHNIIWLEGKDVLIDFFKERAKLACFDSGDTICKGGEMPQGIYLIISGMAILHSLSPTFGIESNQRCDRGSRDMFTEFCTTGDIIGELSCLLKREIEYTVICETSLQACFISLEDLYEGFDAFWPSLEYKIWLKLALSTAYQYFESSLIDEDLRFQNCVMFNQAYVETLSSYSDMIIDNMTMKFVIIVYGSVIDTKTEEPYFAPCIIPTTCEQVQGTSDLSKLLIIQASELTQRNSNTNVMASVNTVFEQPGKNINGRQKMS

SEQ ID NO: 8467 - protein, 1405 aa, Homo sapiens
MRGFLARPFLSTNQHLAQWGSPLPQGKGLVQLPSQHTRHSRPFHELCSKEENSATVPKLISLVVSSETIDFSNKTMDSRRDWEREKRILEGKLQLPKALARTQRARDEGRAWTSRWLQRRRSPESCEAPLSAPLWGPQRGLPGREPLRSRSASAIALRTIGHILALLLRLLHLGLGSGGCREDVPPSGRGKKEEKMKKHRRALALVSCLFLCSLVWLPSWRVCCKESSSASASSYYSQDDNCALENEDVQFQKKNTESKKLSPPVVETLPTVDLHEESSNAVVDSETVENISSSSTSEITPISKLDEIEKSGTIPIAKPSETEQSETDCDVGEALDASAPIEQPSFVSPPDSLVGQHIENVSSSHGKGKITKSEFESKVSASEQGGGDPKSALNASDNLKNESSDYTKPGDIDPTSVASPKDPEDIPTFDEWKKKVMEVEKEKSQSMHASSNGGSHATKKVQKNRNNYASVECGAKILAANPEAKSTSAILIENMDLYMLNPCSTKIWFVIELCEPIQVKQLDIANYELFSSTPKDFLVSISDRYPTNKWIKLGTFHGRDERNVQSFPLDEQMYAKYVKVELLSHFGSEHFCPLSLIRVFGTSMVEEYEEIADSQYHSERQELFDEDYDYPLDYNTGEDKSSKNLLGSATNAILNMVNIAANILGAKTEDLTEGNKSISENATATAAPKMPESTPVSTPVPSPEYVTTEVHTHDMEPSTPDTPKESPIVQLVQEEEEEASPSTVTLLGSGEQEDESSPWFESETQIFCSELTTICCISSFSEYIYKWCSVRVALYRQRSRTALSKGKDYLVLAQPPLLLPAESVDVSVLQPLSGELENTNIEREAETVVLGDLSSSMHQDDLVNHTVDAVELEPSHSQTLSQSLLLDITPEINPLPKIEVSESVEYEAGHIPSPVIPQESSVEIDNETEQKSESFSSIEKPSITYETNKVNELMDNIIKEDVNSMQIFTKLSETIVPPINTATVPDNEDGEAKMNIADTAKQTLISVVDSSSLPEVKEEEQSPEDALLRGLQRTATDFYAELQNSTDLGYANGNLVHGSNQKESVFMRLNNRIKALEVNMSLSGRYLEELSQRYRKQMEEMQKAFNKTIVKLQNTSRIAEEQDQRQTEAIQLLQAQLTNMTQLVSNLSATVAELKREVSDRQSYLVISLVLCVVLGLMLCMQRCRNTSQFDGDYISKLPKSNQYPSPKRCFSSYDDMNLKRRTSFPLMRSKSLQLTGKEVDPNDLYIVEPLKFSPEKKKKRCKYKIEKIETIKPEEPLHPIANGDIKGRKPFTNQRDFSNMGEVYHSSYKGPPSEGSSETSSQSEESYFCGISACTSLCNGQSQKTKTEKRALKRRRSKVQDQGKLIKTLIQTKSGSLPSLHDIIKGNKEITVGTFGVTAVSGHI

SEQ ID NO: 8468 - protein, 859 aa, Homo sapiens
MGNREMEELIPLVNRLQDAFSALGQSCLLELPQIAVVGGQSAGKSSVLENFVGRDFLPRGSGIVTRRPLVLQLVTSKAEYAEFLHCKGKKFTDFDEVRLEIEAETDRVTGMNKGISSIPINLRVYSPHVLNLTLIDLPGITKVPVGDQPPDIEYQIREMIMQFITRENCLILAVTPANTDLANSDALKLAKEVDPQGLRTIGVITKLDLMDEGTDARDVLENKLLPLRRGYVGVVNRSQKDIDGKKDIKAAMLAERKFFLSHPAYRHIADRMGTPHLQKVLNQQLTNHIRDTLPNFRNKLQGQLLSIEHEVEAYKNFKPEDPTRKTKALLQMVQQFAVDFEKRIEGSGDQVDTLELSGGAKINRIFHERFPFEIVKMEFNEKELRREISYAIKNIHGIRTGLFTPDMAFEAIVKKQIVKLKGPSLKSVDLVIQELINTVKKCTKKLANFPRLCEETERIVANHIREREGKTKDQVLLLIDIQVSYINTNHEDFIGFANAQQRSSQVHKKTTVGNQVIRKGWLTISNIGIMKGGSKGYWFVLTAESLSWYKDDEEKEKKYMLPLDNLKVRDVEKSFMSSKHIFALFNTEQRNVYKDYRFLELACDSQEDVDSWKASLLRAGVYPDKSVAENDENGQAENFSMDPQLERQVETIRNLVDSYMSIINKCIRDLIPKTIMHLMINNVKDFINSELLAQLYSSEDQNTLMEESAEQAQRRDEMLRMYQALKEALGIIGDISTATVSTPAPPPVDDSWIQHSRRSPPPSPTTQRRPTLSAPLARPTSGRGPAPAIPSPGPHSGAPPVPFRPGPLPPFPSSSDSFGAPPQVPSRPTRAPPSVPSRRPPPSPTRPTIIRPLESSLLD

SEQ ID NO: 8469 - protein, 555 aa, Homo sapiens
MGNREMEELIPLVNRLQDAFSALGQSCLLELPQIAVVGGQSAGKSSVLENFVGRDFLPRGSGIVTRRPLVLQLVTSKAEYAEFLHCKGKKFTDFDEVRLEIEAETDRVTGMNKGISSIPINLRVYSPHVLNLTLIDLPGITKVPVGDQPPDIEYQIREMIMQFITRENCLILAVTPANTDLANSDALKLAKEVDPQGLRTIGVITKLDLMDEGTDARDVLENKLLPLRRGYVGVVNRSQKDIDGKKDIKAAMLAERKFFLSHPAYRHIADRMGTPHLQKVLNQQLTNHIRDTLPNFRNKLQGQLLSIEHEVEAYKNFKPEDPTRKTKALLQMVQQFAVDFEKRIEGSGDQVDTLELSGGAKINRIFHERFPFEIVKMEFNEKELRREISYAIKNIHGIRTGLFTPDMAFEAIVKKQIVKLKGPSLKSVDLVIQELINTVKKCTKKLANFPRLCEETERIVANHIREREGKTKDQVLLLIDIQVSYINTNHEDFIGFANAQQRSSQVHKKTTVGNQVIRKGWLTISNIGIMKGGSKGYWFVLTAESLSWYKDDENI

SEQ ID NO: 8470 - protein, 489 aa, Homo sapiens
MALLFLLPLVMQGVSRAEMGTADLGPSSVPTPTNVTIESYNMNPIVYWEYQIMPQVPVFTVEVKNYGVKNSEWIDACINISHHYCNISDHVGDPSNSLWVRVKARVGQKESAYAKSEEFAVCRDGKIGPPKLDIRKEEKQIMIDIFHPSVFVNGDEQEVDYDPETTCYIRVYNVYVRMNGSEIQYKILTQKEDDCDEIQCQLAIPVSSLNSQYCVSAEGVLHVWGVTTEKSKEVCITIFNSSIKGSLWIPVVAALLLFLVLSLVFICFYIKKINPLKEKSIILPKSLISVVRSATLETKPESKYVSLITSYQPFSLEKEVVCEEPLSPATVPGMHTEDNPGKVEHTEELSSITEVVTTEENIPDVVPGSHLTPIERESSSPLSSNQSEPGSIALNSYHSRNCSESDHSRNGFDTDSSCLESHSSLSDSEFPPNNKGEIKTEGQELITVIKAPTSFGYDKPHVLVDLLVDDSGKESLIGYRPTEDSKEFS

SEQ ID NO: 8471 - protein, 2819 aa, Homo sapiens
MSEKSGQSTKAKDGKKYATLSLFNTYKGKSLETQKTTVAARHGLQSLGKVGISRRMPPPANLPSLKAENKGNDPNVNIVPKDGTGWASKQEQHEEEKTPEVPPAQPKPGVAAPPEVAPAPKSWASNKQGGQGDGIQVNSQFQQEFPSLQAAGDQEKKEKETNDDNYGPGPSLRPPNVACWRDGGKAAGSPSSSDQDEKLPGQDESTAGTSEQNDILKVVEKRIACGPPQAKLNGQQAALASQYRAMMPPYMFQQYPRMTYPPLHGPMRFPPSLSETNKGLRGRGPPPSWASEPERPSILSASELKELDKFDNLDAEADEGWAGAQMEVDYTEQLNFSDDDEQGSNSPKENNSEDQGSKASENNENKKETDEVSNTKSSSQIPAQPSVAKVPYGKGPSFNQERGTSSHLPPPPKLLAQQHPPPDRQAVPGRPGPFPSKQQVADEDEIWKQRRRQQSEISAAVERARKRREEEERRMEEQRKAACAEKLKRLDEKLGILEKQPSPEEIREREREKEREREKELEKEQEQEREKEREKDRERQQEKEKELEKEQEKQREMEKERKQEKEKELERQKEKEKELQKMKEQEKECELEKEREKLEEKIEPREPNLEPMVEKQESENSCNKEEEPVFTRQDSNRSEKEATPVVHETEPESGSQPRPAVLSGYFKQFQKSLPPRFQRQQEQMKQQQWQQQQQQGVLPQTVPSQPSSSTVPPPPHRPLYQPMQPHPQHLASMGFDPRWLMMQSYMDPRMMSGRPAMDIPPIHPGMIPPKPLMRRDQMEGSPNSSESFEHIARSARDHAISLSEPRMLWGSDPYPHAEPQQATTPKATEEPEDVRSEAALDQEQITAAYSVEHNQLEAHPKADFIRESSEAQVQKFLSRSVEDVRPHHTDANNQSACFEAPDQKTLSAPQEERISAVESQPSRKRSVSHGSNHTQKPDEQRSEPSAGIPKVTSRCIDSKEPIERPEEKPKKEGFIRSSEGPKPEKVYKSKSETRWGPRPSSNRREEVNDRPVRRSGPIKKPVLRDMKEEREQRKEKEGEKAEKVTEKVVVKPEKTEKKDLPPPPPPPQPPAPIQPQSVPPPIQPEAEKFPSTETATLAQKPSQDTEKPLEPVSTVQVEPAVKTVNQQTMAAPVVKEEKQPEKVISKDLVIERPRPDSRPAVKKESTLPPRTYWKEARERDWFPDQGYRGRGRGEYYSRGRSYRGSYGGRGRGGRGHTRDYPQYRDNKPRAEHIPSGPLRQREESETRSESSDFEVVPKRRRQRGSETDTDSEIHESASDKDSLSKGKLPKREERPENKKPVKPHSSFKPDNHVRIDNRLLEKPYVRDDDKAKPGFLPKGEPTRRGRGGTFRRGGRDPGGRPSRPSTLRRPAYRDNQWNPRQSEVPKPEDGEPPRRHEQFIPIAADKRPPKFERKFDPARERPRRQRPTRPPRQDKPPRFRRLREREAASKSNEVVAVPTNGTVNNVAQEPVNTLGDISGNKTPDLSNQNSSDQANEEWETASESSDFNERRERDEKKNADLNAQTVVKVGENVLPPKREIAKRSFSSQRPVDRQNRRGNNGPPKSGRNFSGPRNERRSGPPSKSGKRGPFDDQPAGTTGVDLINGSSAHHQEGVPNGTGQKNSKDSTGKKREDPKPGPKKPKEKVDALSQFDLNNYASVVIIDDHPEVTVIEDPQSNLNDDGFTEVVSKKQQKRLQDEERRKKEEQVIQVWNKKNANEKGRSQTSKLPPRFAKKQATGIQQAQSSASVPPLASAPLPPSTSASVPASTSAPLPATLTPVPASTSAPVPASTLAPVLASTSAPVPASPLAPVSASASVSASVPASTSAAAITSSSAPASAPAPTPILASVSTPASVTILASASIPILASALASTSAPTPAPAASSPAAPVITAPTIPASAPTASVPLAPASASAPAPAPTPVSAPNPAPPAPAQTQAQTHKPVQNPLQTTSQSSKQPPPSIRLPSAQTPNGTDYVASGKSIQTPQSHGTLTAELWDNKVAPPAVLNDISKKLGPISPPQPPSVSAWNKPLTSFGSAPSSEGAKNGQESGLEIGTDTIQFGAPASNGNENEVVPVLSEKSADKIPEPKEQRQKQPRAGPIKAQKLPDLSPVENKEHKPGPIGKERSLKNRKVKDAQQVEPEGQEKPSPATVRSTDPVTTKETKAVSEMSTEIGTMISVSSAEYGTNAKESVTDYTTPSSSLPNTVATNNTKMEDTLVNNVPLPNTLPLPKRETIQQSSSLTSVPPTTFSLTFKMESARKAWENSPNVREKGSPVTSTAPPIATGVSSSASGPSTANYNSFSSASMPQIPVASVTPTASLSGAGTYTTSSLSTKSTTTSDPPNICKVKPQQLQTSSLPSASHFSQLSCMPSLIAQQQQNPQVYVSQSAAAQIPAFYMDTSHLFNTQHARLAPPSLAQQQGFQPGLSQPTSVQQIPIPIYAPLQGQHQAQLSLGAGPAVSQAQELFSSSLQPYRSQPAFMQSSLSQPSVVLSGTAIHNFPTVQHQELAKAQSGLAFQQTSNTQPIPILYEHQLGQASGLGGSQLIDTHLLQARANLTQASNLYSGQVQQPGQTNFYNTAQSPSALQQVTVPLPASQLSLPNFGSTGQPLIALPQTLQPPLQHTTPQAQAQSLSRPAQVSQPFRGLIPAGTQHSMIATTGKMSEMELKAFGSGIDIKPGTPPIAGRSTTPTSSPFRATSTSPNSQSSKMNSIVYQKQFQSAPATVRMTQPFPTQFAPQAKQRAEVLQSTQRFFSEQQQSKQIGGGKAQKVDSDSSKPPETLTDPPGVCQEKVEEKPPPAPSIATKPVRTGPIKPQAIKTEETKS

SEQ ID NO: 8472 - protein, 442 aa, Homo sapiens
MSYNGLHQRVFKELKLLTLCSISSQIGPPEVALTTDEKSISVVLTAPEKWKRNPEDLPVSMQQIYSNLKYNVSVLNTKSNRTWSQCVTNHTLVLTWLEPNTLYCVHVESFVPGPPRRAQPSEKQCARTLKDQSSEFKAKIIFWYVLPVSITVFLFSVMGYSIYRYIHVGKEKHPANLILIYGNEFDKRFFVPAEKIVINFITLNISDDSKISHQDMSLLGKSSDVSSLNDPQPSGNLRPPQEEEEVKHLGYASHLMEIFCDSEENTEGTSLTQQESLSRTIPPDKTVIEYEYDVRTTDICAGPEEQELSLQEEVSTQGTLLESQAALAVLGPQTLQYSYTPQLQDLDPLAQEHTDSEEGPEEEPSTTLVDWDPQTGRLCIPSLSSFDQDSEGCEPSEGDGLGEEGLLSRLYEEPAPDRPPGENETYLMQFMEEWGLYVQMEN

SEQ ID NO: 8473 - protein, 558 aa, Homo sapiens
MAKKVAVIGAGVSGLSSIKCCVDEDLEPTCFERSDDIGGLWKFTESSKDGMTRVYKSLVTNVCKEMSCYSDFPFHEDYPNFMNHEKFWDYLQEFAEHFDLLKYIQFKTTVCSITKRPDFSETGQWDVVTETEGKQNRAVFDAVMVCTGHFLNPHLPLEAFPGIHKFKGQILHSQEYKIPEGFQGKRVLVIGLGNTGGDIAVELSRTAAQVLLSTRTGTWVLGRSSDWGYPYNMMVTRRCCSFIAQVLPSRFLNWIQERKLNKRFNHEDYGLSITKGKKAKFIVNDELPNCILCGAITMKTSVIEFTETSAVFEDGTVEENIDVVIFTTGYTFSFPFFEEPLKSLCTKKIFLYKQVFPLNLERATLAIIGLIGLKGSILSGTELQARWVTRVFKGLCKIPPSQKLMMEATEKEQLIKRGVFKDTSKDKFDYIAYMDDIAACIGTKPSIPLLFLKDPRLAWEVFFGPCTPYQYRLMGPGKWDGARNAILTQWDRTLKPLKTRIVPDSSKPASMSHYLKAWGAPVLLASLLLICKSSLFLKLVRDKLQDRMSPYLVSLWRG

SEQ ID NO: 8474 - protein, 532 aa, Homo sapiens
MGKKVAIIGAGVSGLASIRSCLEEGLEPTCFEKSNDIGGLWKFSDHAEEGRASIYKSVFSNSSKEMMCFPDFPFPDDFPNFMHNSKIQEYIIAFAKEKNLLKYIQFKTFVSSVNKHPDFATTGQWDVTTERDGKKESAVFDAVMVCSGHHVYPNLPKESFPGLNHFKGKCFHSRDYKEPGVFNGKRVLVVGLGNSGCDIATELSRTAEQVMISSRSGSWVMSRVWDNGYPWDMLLVTRFGTFLKNNLPTAISDWLYVKQMNARFKHENYGLMPLNGVLRKEPVFNDELPASILCGIVSVKPNVKEFTETSAIFEDGTIFEGIDCVIFATGYSFAYPFLDESIIKSRNNEIILFKGVFPPLLEKSTIAVIGFVQSLGAAIPTVDLQSRWAAQVIKGTCTLPSMEDMMNDINEKMEKKRKWFGKSETIQTDYIVYMDELSSFIGAKPNIPWLFLTDPKLAMEVYFGPCSPYQFRLVGPGQWPGARNAILTQWDRSLKPMQTRVVGRLQKPCFFFHWLKLFAIPILLIAVFLVLT

SEQ ID NO: 8475 - protein, 573 aa, Homo sapiens
MLTRNPKTKSSLQILQDSVKWHHMAHKVNSLLDAYSGLLSNESMILAVNSSFVDPLLQFESQLKIIESSFGMLVVMPSLDKVKEMGSSYEYIEDMENLYHNILNIYENILTSLVSKDLYKLQILKEMLVWMSKDSSYLQERIMVIINKVLRFTVTKVRKYISVDAPCLGLLAAELSLLCSHEDPSIVKQASLGMCHLLYIARCQNDIGTNKPTNGKSHSLQFPSSDVEFLPKEFQQDESKIAQRVGQTLLPPLLTDFVQSLLMKLSSPDDKIASDAASILIFTLEFHAEKVTMVSKIVDAIYRQLCDNNCMKDVMLQVITLLTCTSPKKVIFQLMDYPVPADDTLIQMWKAACSQASVAPHVLKTILLILKGKPGEMEDTVTEGKRFSLDITNLMPLAACQALCTFLPLGSYRKAVAQYFPQLLTTLMFQVFYNSELKPILKDRALYAQDALRVLLNCSGLQQVDITLMKENFWDQLSEDLCYYHGVCFIAKTLSEYNFPQFPETLSYLYKLSVEGPRRSEDTVIVLIFLTEVSFVDCEQLCSHFLFLPKFKSKFQFLVSLPLNVGSYQDLRS

SEQ ID NO: 8476 - protein, 861 aa, Homo sapiens
MLTRNPKTKSSLQILQDSVKWHHMAHKVNSLLDAYSGLLSNESMILAVNSSFVDPLLQFESQLKIIESSFGMLVVMPSLDKVKEMGSSYEYIEDMENLYHNILNIYENILTSLVSKDLYKLQILKEMLVWMSKDSSYLQERIMVIINKVLRFTVTKVRKYISVDAPCLGLLAAELSLLCSHEDPSIVKQASLGMCHLLYIARCQNDIGTNKPTNGKSHSLQFPSSDVEFLPKEFQQDESKIAQRVGQTLLPPLLTDFVQSLLMKLSSPDDKIASDAASILIFTLEFHAEKVTMVSKIVDAIYRQLCDNNCMKDVMLQVITLLTCTSPKKVIFQLMDYPVPADDTLIQMWKAACSQASVAPHVLKTILLILKGKPGEMEDTVTEGKRFSLDITNLMPLAACQALCTFLPLGSYRKAVAQYFPQLLTTLMFQVFYNSELKPILKDRALYAQDALRVLLNCSGLQQVDITLMKENFWDQLSEDLCYYHGVCFIAKTLSEYNFPQFPETLSYLYKLSVEGPRRSEDTVIVLIFLTELLNNFFKDPLPEEFLVLFINWINDSNPVVSRLILHRIVHMSPIINKTENVSSILIAILDAFLSKDDNVVLQALLTLRRLLNELDKVTYSLGTRIGSSYCTLMDHINGGIRSMAIRHFGQLVRDMRQYTWMVNDVVLEGLVPLILFLEDDDKRVAEACKYTLKICTSQLKWSTSRLLKDENYSFEMVVLNICNNLIISHRNYITDLTSDTLRFLWSPRTYLKRASVILIGYLAKSGGHLLLRDEIEVMLDVIERLLRDEDPMIKQLAEITYDIFKKKAHKLTSAPLKQNFQKLLKLFYIKKLKPLYNYNSPNGQIDSPTDSKDVKNDKAL

SEQ ID NO: 8477 - protein, 752 aa, Homo sapiens
MGDPMLGERKECQKIIRLKSLNANTDITSLARKVVEECKLIHPSKLNEVEQLLYYLQNRRDSLSGKEKKEKSSKPKDPPPFEGMEIDEVANINDMDEYIELLYEDIPDKVRGSALILQLARNPDNLEELLLNETALGALARVLREDWKQSVELATNIIYIFFCFSSFSQFHGLITHYKIGALCMNIIDHELKRHELWQEELSKKKKAVDEDPENQTLRKDYEKTFKKYQGLVVKQEQLLRVALYLLLNLAEDTRTELKMRNKNIVHMLVKALDRDNFELLILVVSFLKKLSIFMENKNDMVEMDIVEKLVKMIPCEHEDLLNITLRLLLNLSFDTGLRNKMVQVGLLPKLTALLGNDNYKQIAMCVLYHISMDDRFKSMFAYTDCIPQLMKMLFECSDERIDLELISFCINLAANKRNVQLICEGNGLKMLMKRALKFKDPLLMKMIRNISQHDGPTKNLFIDYVGDLAAQISNDEEEEFVIECLGTLANLTIPDLDWELVLKEYKLVPYLKDKLKPGAAEDDLVLEVVIMIGTVSMDDSCAALLAKSGIIPALIELLNAQQEDDEFVCQIIYVFYQMVFHQATRDVIIKETQAPAYLIDLMHDKNNEIRKVCDNTLDIIAEYDEEWAKKIQSEKFRWHNSQWLEMVESRQMDESEQYLYGDDRIEPYIHEGDILERPDLFYNSDGLIASEGAISPDFFNDYHLQNGDVVGQHSFPGSLGMDGFGQPVGILGRPATAYGFRPDEPYYYGYGS

SEQ ID NO: 8478 - protein, 748 aa, Homo sapiens
MQGEDARYLKSIRLKSLNANTDITSLARKVVEECKLIHPSKLNEVEQLLYYLQNRRDSLSGKEKKEKSSKPKDPPPFEGMEIDEVANINDMDEYIELLYEDIPDKVRGSALILQLARNPDNLEELLLNETALGALARVLREDWKQSVELATNIIYIFFCFSSFSQFHGLITHYKIGALCMNIIDHELKRHELWQEELSKKKKAVDEDPENQTLRKDYEKTFKKYQGLVVKQEQLLRVALYLLLNLAEDTRTELKMRNKNIVHMLVKALDRDNFELLILVVSFLKKLSIFMENKNDMVEMDIVEKLVKMIPCEHEDLLNITLRLLLNLSFDTGLRNKMVQVGLLPKLTALLGNDNYKQIAMCVLYHISMDDRFKSMFAYTDCIPQLMKMLFECSDERIDLELISFCINLAANKRNVQLICEGNGLKMLMKRALKFKDPLLMKMIRNISQHDGPTKNLFIDYVGDLAAQISNDEEEEFVIECLGTLANLTIPDLDWELVLKEYKLVPYLKDKLKPGAAEDDLVLEVVIMIGTVSMDDSCAALLAKSGIIPALIELLNAQQEDDEFVCQIIYVFYQMVFHQATRDVIIKETQAPAYLIDLMHDKNNEIRKVCDNTLDIIAEYDEEWAKKIQSEKFRWHNSQWLEMVESRQMDESEQYLYGDDRIEPYIHEGDILERPDLFYNSDGLIASEGAISPDFFNDYHLQNGDVVGQHSFPGSLGMDGFGQPVGILGRPATAYGFRPDEPYYYGYGS

SEQ ID NO: 8479 - protein, 742 aa, Homo sapiens
MGSENSALKSYTLREPPFTLPSGLAVYPAVLQDGKFASVFVYKRENEDKVNKAAKHLKTLRHPCLLRFLSCTVEADGIHLVTERVQPLEVALETLSSAEVCAGIYDILLALIFLHDRGHLTHNNVCLSSVFVSEDGHWKLGGMETVCKVSQATPEFLRSIQSIRDPASIPPEEMSPEFTTLPECHGHARDAFSFGTLVESLLTILNEQVSADVLSSFQQTLHSTLLNPIPKCRPALCTLLSHDFFRNDFLEVVNFLKSLTLKSEEEKTEFFKFLLDRVSCLSEELIASRLVPLLLNQLVFAEPVAVKSFLPYLLGPKKDHAQGETPCLLSPALFQSRVIPVLLQLFEVHEEHVRMVLLSHIEAYVEHFTQEQLKKVILPQVLLGLRDTSDSIVAITLHSLAVLVSLLGPEVVVGGERTKIFKRTAPSFTKNTDLSLEDSPMCVVCSHHSQISPILENPFSSIFPKCFFSGSTPINSKKHIQRDYYNTLLQTGDPFSQPIKFPINGLSDVKNTSEDSENFPSSSKKSEEWPDWSEPEEPENQTVNIQIWPREPCDDVKSQCTTLDVEESSWDDCEPSSLDTKVNPGGGITATKPVTSGEQKPIPALLSLTEESMPWKSSLPQKISLVQRGDDADQIEPPKVSSQERPLKVPSELGLGEEFTIQVKKKPVKDPEMDWFADMIPEIKPSAAFLILPELRTEMVPKKDDVSPVMQFSSKFAAAEITEGEAEGWEEEGELNWEDNNW

SEQ ID NO: 8480 - protein, 484 aa, Homo sapiens
MIASQFLSALTLVLLIKESGAWSYNTSTEAMTYDEASAYCQQRYTHLVAIQNKEEIEYLNSILSYSPSYYWIGIRKVNNVWVWVGTQKPLTEEAKNWAPGEPNNRQKDEDCVEIYIKREKDVGMWNDERCSKKKLALCYTAACTNTSCSGHGECVETINNYTCKCDPGFSGLKCEQIVNCTALESPEHGSLVCSHPLGNFSYNSSCSISCDRGYLPSSMETMQCMSSGEWSAPIPACNVVECDAVTNPANGFVECFQNPGSFPWNTTCTFDCEEGFELMGAQSLQCTSSGNWDNEKPTCKAVTCRAVRQPQNGSVRCSHSPAGEFTFKSSCNFTCEEGFMLQGPAQVECTTQGQWTQQIPVCEVVKCSSLAVPGKINMSCSGEPVFGTVCKFACPEGWTLNGSAARTCGATGHWSGLLPTCEAPTESNIPLVAGLSAAGLSLLTLAPFLLWLRKCLRKAKKFVPASSCQSLESDGSYQKPSYIL

SEQ ID NO: 8481 - protein, 485 aa, Homo sapiens
MIASQFLSALTLVLLIKESGAWSYNTSTEAMTYDEASAYCQQRYTHLVAIQNKEEIEYLNSILSYSPSYYWIGIRKVNNVWVWVGTQKPLTEEAKNWAPGEPNNRQKDEDCVEIYIKREKDVGMWNDERCSKKKLALCYTAACTNTSCSGHGECVETINNYTCKCDPGFSGLKCEQMVECDAVTNPANGFVECFQNPGSFPWNTTCTFDCEEGFELMGAQSLQCTSSGNWDNEKPTCKAVTCRAVRQPQNGSVRCSHSPAGEFTFKSSCNFTCEEGFMLQGPAQVECTTQGQWTQQIPVCEAVRCDAVHQPPKGLVRCAHSPIGEFTYKSSCAFSCEEGFELHGSTQLECTSQGQWTEEVPSCQVVKCSSLAVPGKINMSCSGEPVFGTVCKFACPEGWTLNGSAARTCGATGHWSGLLPTCEAPTESNIPLVAGLSAAGLSLLTLAPFLLWLRKCLRKAKKFVPASSCQSLESDGSYQKPSYIL

SEQ ID NO: 8482 - protein, 547 aa, Homo sapiens
MIASQFLSALTLVLLIKESGAWSYNTSTEAMTYDEASAYCQQRYTHLVAIQNKEEIEYLNSILSYSPSYYWIGIRKVNNVWVWVGTQKPLTEEAKNWAPGEPNNRQKDEDCVEIYIKREKDVGMWNDERCSKKKLALCYTAACTNTSCSGHGECVETINNYTCKCDPGFSGLKCEQIVNCTALESPEHGSLVCSHPLGNFSYNSSCSISCDRGYLPSSMETMQCMSSGEWSAPIPACNVVECDAVTNPANGFVECFQNPGSFPWNTTCTFDCEEGFELMGAQSLQCTSSGNWDNEKPTCKAVTCRAVRQPQNGSVRCSHSPAGEFTFKSSCNFTCEEGFMLQGPAQVECTTQGQWTQQIPVCEAVRCDAVHQPPKGLVRCAHSPIGEFTYKSSCAFSCEEGFELHGSTQLECTSQGQWTEEVPSCQVVKCSSLAVPGKINMSCSGEPVFGTVCKFACPEGWTLNGSAARTCGATGHWSGLLPTCEAPTESNIPLVAGLSAAGLSLLTLAPFLLWLRKCLRKAKKFVPASSCQSLESDGSYQKPSYIL

SEQ ID NO: 8483 - protein, 547 aa, Homo sapiens
MIASQFLSALTLVLLIKESGAWSYNTSTEAMTYDEASAYCQQRYTHLVAIQNKEEIEYLNSILSYSPSYYWIGIRKVNNVWVWVGTQKPLTEEAKNWAPGEPNNRQKDEDCVEIYIKREKDVGMWNDERCSKKKLALCYTAACTNTSCSGHGECVETINNYTCKCDPGFSGLKCEQIVNCTALESPEHGSLVCSHPLGNFSYNSSCSISCDRGYLPSSMETMQCMSSGEWSAPIPACNVVECDAVTNPANGFVECFQNPGSFPWNTTCTFDCEEGFELMGAQSLQCTSSGNWDNEKPTCKAVTCRAVRQPQNGSVRCSHSPAGEFTFKSSCNFTCEEGFMLQGPAQVECTTQGQWTQQIPVCEAFQCTALSNPERGYMNCLPSASGSFRYGSSCEFSCEQGFVLKGSKRLQCGPTGEWDNEKPTCEVVKCSSLAVPGKINMSCSGEPVFGTVCKFACPEGWTLNGSAARTCGATGHWSGLLPTCEAPTESNIPLVAGLSAAGLSLLTLAPFLLWLRKCLRKAKKFVPASSCQSLESDGSYQKPSYIL

SEQ ID NO: 8484 - protein, 768 aa, Homo sapiens
MANCQIAILYQRFQRVVFGISQLLCFSALISELTNQKEVAAWTYHYSTKAYSWNISRKYCQNRYTDLVAIQNKNEIDYLNKVLPYYSSYYWIGIRKNNKTWTWVGTKKALTNEAENWADNEPNNKRNNEDCVEIYIKSPSAPGKWNDEHCLKKKHALCYTASCQDMSCSKQGECLETIGNYTCSCYPGFYGPECEYVRECGELELPQHVLMNCSHPLGNFSFNSQCSFHCTDGYQVNGPSKLECLASGIWTNKPPQCLAAQCPPLKIPERGNMTCLHSAKAFQHQSSCSFSCEEGFALVGPEVVQCTASGVWTAPAPVCKAISCEPLESPVHGSMDCSPSLRAFQYDTNCSFRCAEGFMLRGADIVRCDNLGQWTAPAPVCQALQCQDLPVPNEARVNCSHPFGAFRYQSVCSFTCNEGLLLVGASVLQCLATGNWNSVPPECQAIPCTPLLSPQNGTMTCVQPLGSSSYKSTCQFICDEGYSLSGPERLDCTRSGRWTDSPPMCEAIKCPELFAPEQGSLDCSDTRGEFNVGSTCHFSCDNGFKLEGPNNVECTTSGRWSATPPTCKGIASLPTPGVQCPALTTPGQGTMYCRHHPGTFGFNTTCYFGCNAGFTLIGDSTLSCRPSGQWTAVTPACRAVKCSELHVNKPIAMNCSNLWGNFSYGSICSFHCLEGQLLNGSAQTACQENGHWSTTVPTCQAGPLTIQEALTYFGGAVASTIGLIMGGTLLALLRKRFRQKDDGKCPLNPHSHLGTYGVFTNAAFDPSP

SEQ ID NO: 8485 - protein, 768 aa, Homo sapiens
MANCQIAILYQRFQRVVFGISQLLCFSALISELTNQKEVAAWTYHYSTKAYSWNISRKYCQNRYTDLVAIQNKNEIDYLNKVLPYYSSYYWIGIRKNNKTWTWVGTKKALTNEAENWADNEPNNKRNNEDCVEIYIKSPSAPGKWNDEHCLKKKHALCYTASCQDMSCSKQGECLETIGNYTCSCYPGFYGPECEYVRECGELELPQHVLMNCSHPLGNFSFNSQCSFHCTDGYQVNGPSKLECLASGIWTNKPPQCLAVQCQHLEAPSEGTMDCVHPLTAFAYGSSCKFECQPGYRVRGLDMLRCIDSGHWSAPLPTCEAISCEPLESPVHGSMDCSPSLRAFQYDTNCSFRCAEGFMLRGADIVRCDNLGQWTAPAPVCQALQCQDLPVPNEARVNCSHPFGAFRYQSVCSFTCNEGLLLVGASVLQCLATGNWNSVPPECQAIPCTPLLSPQNGTMTCVQPLGSSSYKSTCQFICDEGYSLSGPERLDCTRSGRWTDSPPMCEAIKCPELFAPEQGSLDCSDTRGEFNVGSTCHFSCDNGFKLEGPNNVECTTSGRWSATPPTCKGIASLPTPGVQCPALTTPGQGTMYCRHHPGTFGFNTTCYFGCNAGFTLIGDSTLSCRPSGQWTAVTPACRAVKCSELHVNKPIAMNCSNLWGNFSYGSICSFHCLEGQLLNGSAQTACQENGHWSTTVPTCQAGPLTIQEALTYFGGAVASTIGLIMGGTLLALLRKRFRQKDDGKCPLNPHSHLGTYGVFTNAAFDPSP

SEQ ID NO: 8486 - protein, 444 aa, Homo sapiens
MANCQIAILYQRFQRVVFGISQLLCFSALISELTNQKEVAAWTYHYSTKAYSWNISRKYCQNRYTDLVAIQNKNEIDYLNKVLPYYSSYYWIGIRKNNKTWTWVGTKKALTNEAENWADNEPNNKRNNEDCVEIYIKSPSAPGKWNDEHCLKKKHALCYTASCQDMSCSKQGECLETIGNYTCSCYPGFYGPECEYVRECGELELPQHVLMNCSHPLGNFSFNSQCSFHCTDGYQVNGPSKLECLASGIWTNKPPQCLAAQCPPLKIPERGNMTCLHSAKAFQHQSSCSFSCEEGFALVGPEVVQCTASGVWTAPAPVCKALQCQDLPVPNEARVNCSHPFGAFRYQSVCSFTCNEGLLLVGASVLQCLATGNWNSVPPECQAIPCTPLLSPQNGTMTCVQPLGSSSYKSTCQFICDEGYSLSGPERLDCTRSGRWTDSPPMCE

SEQ ID NO: 8487 - protein, 2229 aa, Homo sapiens
MFPGCPRLWVLVVLGTSWVGWGSQGTEAAQLRQFYVAAQGISWSYRPEPTNSSLNLSVTSFKKIVYREYEPYFKKEKPQSTISGLLGPTLYAEVGDIIKVHFKNKADKPLSIHPQGIRYSKLSEGASYLDHTFPAEKMDDAVAPGREYTYEWSISEDSGPTHDDPPCLTHIYYSHENLIEDFNSGLIGPLLICKKGTLTEGGTQKTFDKQIVLLFAVFDESKSWSQSSSLMYTVNGYVNGTMPDITVCAHDHISWHLLGMSSGPELFSIHFNGQVLEQNHHKVSAITLVSATSTTANMTVGPEGKWIISSLTPKHLQAGMQAYIDIKNCPKKTRNLKKITREQRRHMKRWEYFIAAEEVIWDYAPVIPANMDKKYRSQHLDNFSNQIGKHYKKVMYTQYEDESFTKHTVNPNMKEDGILGPIIRAQVRDTLKIVFKNMASRPYSIYPHGVTFSPYEDEVNSSFTSGRNNTMIRAVQPGETYTYKWNILEFDEPTENDAQCLTRPYYSDVDIMRDIASGLIGLLLICKSRSLDRRGIQRAADIEQQAVFAVFDENKSWYLEDNINKFCENPDEVKRDDPKFYESNIMSNFTLSAINGYVPESITTLGFCFDDTVQWHFCSVGTQNEILTIHFTGHSFIYGKRHEDTLTLFPMRGESVTVTMDNVGTWMLTSMNSSPRSKKLRLKFRDVKCIPDDDEDSYEIFEPPESTVMATRKMHDRLEPEDEESDADYDYQNRLAAALGIRSFRNSSLNQEEEEFNLTALALENGTEFVSSNTDIIVGSNYSSPSNISKFTVNNLAEPQKAPSHQQATTAGSPLRHLIGKNSVLNSSTAEHSSPYSEDPIEDPLQPDVTGIRLLSLGAGEFKSQEHAKHKGPKVERDQAAKHRFSWMKLLAHKVGRHLSQDTGSPSGMRPWEDLPSQDTGSPSRMRPWKDPPSDLLLLKQSNSSKILVGRWHLASEKGSYEIIQDTDEDTAVNNWLISPQNASRAWGESTPLANKPGKQSGHPKFPRVRHKSLQVRQDGGKSRLKKSQFLIKTRKKKKEKHTHHAPLSPRTFHPLRSEAYNTFSERRLKHSLVLHKSNETSLPTDLNQTLPSMDFGWIASLPDHNQNSSNDTGQASCPPGLYQTVPPEEHYQTFPIQDPDQMHSTSDPSHRSSSPELSEMLEYDRSHKSFPTDISQMSPSSEHEVWQTVISPDLSQVTLSPELSQTNLSPDLSHTTLSPELIQRNLSPALGQMPISPDLSHTTLSPDLSHTTLSLDLSQTNLSPELSQTNLSPALGQMPLSPDLSHTTLSLDFSQTNLSPELSHMTLSPELSQTNLSPALGQMPISPDLSHTTLSLDFSQTNLSPELSQTNLSPALGQMPLSPDPSHTTLSLDLSQTNLSPELSQTNLSPDLSEMPLFADLSQIPLTPDLDQMTLSPDLGETDLSPNFGQMSLSPDLSQVTLSPDISDTTLLPDLSQISPPPDLDQIFYPSESSQSLLLQEFNESFPYPDLGQMPSPSSPTLNDTFLSKEFNPLVIVGLSKDGTDYIEIIPKEEVQSSEDDYAEIDYVPYDDPYKTDVRTNINSSRDPDNIAAWYLRSNNGNRRNYYIAAEEISWDYSEFVQRETDIEDSDDIPEDTTYKKVVFRKYLDSTFTKRDPRGEYEEHLGILGPIIRAEVDDVIQVRFKNLASRPYSLHAHGLSYEKSSEGKTYEDDSPEWFKEDNAVQPNSSYTYVWHATERSGPESPGSACRAWAYYSAVNPEKDIHSGLIGPLLICQKGILHKDSNMPMDMREFVLLFMTFDEKKSWYYEKKSRSSWRLTSSEMKKSHEFHAINGMIYSLPGLKMYEQEWVRLHLLNIGGSQDIHVVHFHGQTLLENGNKQHQLGVWPLLPGSFKTLEMKASKPGWWLLNTEVGENQRAGMQTPFLIMDRDCRMPMGLSTGIISDSQIKASEFLGYWEPRLARLNNGGSYNAWSVEKLAAEFASKPWIQVDMQKEVIITGIQTQGAKHYLKSCYTTEFYVAYSSNQINWQIFKGNSTRNVMYFNGNSDASTIKENQFDPPIVARYIRISPTRAYNRPTLRLELQGCEVNGCSTPLGMENGKIENKQITASSFKKSWWGDYWEPFRARLNAQGRVNAWQAKANNNKQWLEIDLLKIKKITAIITQGCKSLSSEMYVKSYTIHYSEQGVEWKPYRLKSSMVDKIFEGNTNTKGHVKNFFNPPIISRFIRVIPKTWNQSIALRLELFGCDIY

SEQ ID NO: 8488 - protein, 2224 aa, Homo sapiens
MFPGCPRLWVLVVLGTSWVGWGSQGTEAAQLRQFYVAAQGISWSYRPEPTNSSLNLSVTSFKKIVYREYEPYFKKEKPQSTISGLLGPTLYAEVGDIIKVHFKNKADKPLSIHPQGIRYSKLSEGASYLDHTFPAEKMDDAVAPGREYTYEWSISEDSGPTHDDPPCLTHIYYSHENLIEDFNSGLIGPLLICKKGTLTEGGTQKTFDKQIVLLFAVFDESKSWSQSSSLMYTVNGYVNGTMPDITVCAHDHISWHLLGMSSGPELFSIHFNGQVLEQNHHKVSAITLVSATSTTANMTVGPEGKWIISSLTPKHLQAGMQAYIDIKNCPKKTRNLKKITREQRRHMKRWEYFIAAEEVIWDYAPVIPANMDKKYRSQHLDNFSNQIGKHYKKVMYTQYEDESFTKHTVNPNMKEDGILGPIIRAQVRDTLKIVFKNMASRPYSIYPHGVTFSPYEDEVNSSFTSGRNNTMIRAVQPGETYTYKWNILEFDEPTENDAQCLTRPYYSDVDIMRDIASGLIGLLLICKSRSLDRRGIQRAADIEQQAVFAVFDENKSWYLEDNINKFCENPDEVKRDDPKFYESNIMSTINGYVPESITTLGFCFDDTVQWHFCSVGTQNEILTIHFTGHSFIYGKRHEDTLTLFPMRGESVTVTMDNVGTWMLTSMNSSPRSKKLRLKFRDVKCIPDDDEDSYEIFEPPESTVMATRKMHDRLEPEDEESDADYDYQNRLAAALGIRSFRNSSLNQEEEEFNLTALALENGTEFVSSNTDIIVGSNYSSPSNISKFTVNNLAEPQKAPSHQQATTAGSPLRHLIGKNSVLNSSTAEHSSPYSEDPIEDPLQPDVTGIRLLSLGAGEFKSQEHAKHKGPKVERDQAAKHRFSWMKLLAHKVGRHLSQDTGSPSGMRPWEDLPSQDTGSPSRMRPWKDPPSDLLLLKQSNSSKILVGRWHLASEKGSYEIIQDTDEDTAVNNWLISPQNASRAWGESTPLANKPGKQSGHPKFPRVRHKSLQVRQDGGKSRLKKSQFLIKTRKKKKEKHTHHAPLSPRTFHPLRSEAYNTFSERRLKHSLVLHKSNETSLPTDLNQTLPSMDFGWIASLPDHNQNSSNDTGQASCPPGLYQTVPPEEHYQTFPIQDPDQMHSTSDPSHRSSSPELSEMLEYDRSHKSFPTDISQMSPSSEHEVWQTVISPDLSQVTLSPELSQTNLSPDLSHTTLSPELIQRNLSPALGQMPISPDLSHTTLSPDLSHTTLSLDLSQTNLSPELSQTNLSPALGQMPLSPDLSHTTLSLDFSQTNLSPELSHMTLSPELSQTNLSPALGQMPISPDLSHTTLSLDFSQTNLSPELSQTNLSPALGQMPLSPDPSHTTLSLDLSQTNLSPELSQTNLSPDLSEMPLFADLSQIPLTPDLDQMTLSPDLGETDLSPNFGQMSLSPDLSQVTLSPDISDTTLLPDLSQISPPPDLDQIFYPSESSQSLLLQEFNESFPYPDLGQMPSPSSPTLNDTFLSKEFNPLVIVGLSKDGTDYIEIIPKEEVQSSEDDYAEIDYVPYDDPYKTDVRTNINSSRDPDNIAAWYLRSNNGNRRNYYIAAEEISWDYSEFVQRETDIEDSDDIPEDTTYKKVVFRKYLDSTFTKRDPRGEYEEHLGILGPIIRAEVDDVIQVRFKNLASRPYSLHAHGLSYEKSSEGKTYEDDSPEWFKEDNAVQPNSSYTYVWHATERSGPESPGSACRAWAYYSAVNPEKDIHSGLIGPLLICQKGILHKDSNMPMDMREFVLLFMTFDEKKSWYYEKKSRSSWRLTSSEMKKSHEFHAINGMIYSLPGLKMYEQEWVRLHLLNIGGSQDIHVVHFHGQTLLENGNKQHQLGVWPLLPGSFKTLEMKASKPGWWLLNTEVGENQRAGMQTPFLIMDRDCRMPMGLSTGIISDSQIKASEFLGYWEPRLARLNNGGSYNAWSVEKLAAEFASKPWIQVDMQKEVIITGIQTQGAKHYLKSCYTTEFYVAYSSNQINWQIFKGNSTRNVMYFNGNSDASTIKENQFDPPIVARYIRISPTRAYNRPTLRLELQGCEVNGCSTPLGMENGKIENKQITASSFKKSWWGDYWEPFRARLNAQGRVNAWQAKANNNKQWLEIDLLKIKKITAIITQGCKSLSSEMYVKSYTIHYSEQGVEWKPYRLKSSMVDKIFEGNTNTKGHVKNFFNPPIISRFIRVIPKTWNQSIALRLELFGCDIY

SEQ ID NO: 8489 - protein, 508 aa, Homo sapiens
MNENKDTDSKKSEEYEDDFEKDLEWLINENEKSDASIIEMACEKEENINQDLKENETVMEHTKRHSDPDKSLQDEVSPRRNDIISVPGIQPLDPISDSDSENSFQESKLESQKDLEEEEDEEVRRYIMEKIVQANKLLQNQEPVNDKRERKLKFKDQLVDLEVPPLEDTTTFKNYFENERNMFGKLSQLCISNDFGQEDVLLSLTNGSCEENKDRTILVERDGKFELLNLQDIASQGFLPPINNANSTENDPQQLLPRSSNSSVSGTKKEDSTAKIHAVTHSSTGEPLAYIAQPPLNRKTCPSSAVNSDRSKGNGKSNHRTQSAHISPVTSTYCLSPRQKELQKQLEEKREKLKREEERRKIEEEKEKKRENDIVFKAWLQKKREQVLEMRRIQRAKEIEDMNSRENRDPQQAFRLWLKKKHEEQMKERQTEELRKQEECLFFLKGTEGRERAFKQWLRRKRMEKMAEQQAVRERTRQLRLEAKRSKQLQHHLYMSEAKPFRFTDHYN

SEQ ID NO: 8490 - protein, 509 aa, Homo sapiens
MNENKDTDSKKSEEYEDDFEKDLEWLINENEKSDASIIEMACEKEENINQDLKENETVMEHTKRHSDPDKSLQDEVSPRRNDIISVPGIQPLDPISDSDSENSFQESKLESQKDLEEEEDEEVRRYIMEKIVQANKLLQNQEPVNDKRERKLKFKDQLVDLEVPPLEDTTTFKNYFENERNMFGKLSQLCISNDFGQEDVLLSLTNGSCEENKDRTILVERDGKFELLNLQDIASQGFLPPINNANSTENDPQQLLPRSSNSSVSGTKKEDSTAKIHAVTHSSTGEPLAYIAQPPLNRKTCPSSAVNSDRSKGNGKSNHRTQSAHISPVTSTYCLSPRQKELQKQLEEKREKLKREEERRKIEEEKEKKRENDIVFKAWLQKKREQVLEMRRIQRAKEIEDMNSRQENRDPQQAFRLWLKKKHEEQMKERQTEELRKQEECLFFLKGTEGRERAFKQWLRRKRMEKMAEQQAVRERTRQLRLEAKRSKQLQHHLYMSEAKPFRFTDHYN

SEQ ID NO: 8491 - protein, 376 aa, Homo sapiens
MNHSERFVFIAEWYDPNASLLRRYELLFYPGDGSVEMHDVKNHRTFLKRTKYDNLHLEDLFIGNKVNVFSRQLVLIDYGDQYTARQLGSRKEKTLALIKPDAISKAGEIIEIINKAGFTITKLKMMMLSRKEALDFHVDHQSRPFFNELIQFITTGPIIAMEILRDDAICEWKRLLGPANSGVARTDASESIRALFGTDGIRNAAHGPDSFASAAREMELFFPSSGGCGPANTAKFTNCTCCIVKPHAVSEGLLGKILMAIRDAGFEISAMQMFNMDRVNVEEFYEVYKGVVTEYHDMVTEMYSGPCVAMEIQQNNATKTFREFCGPADPEIARHLRPGTLRAIFGKTKIQNAVHCTDLPEDGLLEVQYFFKILDN

SEQ ID NO: 8492 - protein, 448 aa, Homo sapiens
MAMSELGTRKPSDGTVSHLLNVVESELQAGREKGDPTEKQLQIILEDAPLWQRFKEVTNEMIVTKNGRRMFPVLKISVTGLDPNAMYSLLLDFVPTDSHRWKYVNGEWVPAGKPEVSSHSCVYIHPDSPNFGAHWMKAPISFSKVKLTNKLNGGGQIMLNSLHKYEPQVHIVRVGSAHRMVTNCSFPETQFIAVTAYQNEEITALKIKYNPFAKAFLDAKERNHLRDVPEAISESQHVTYSHLGGWIFSNPDGVCTAGNSNYQYAAPLPLPAPHTHHGCEHYSGLRGHRQAPYPSAYMHRNHSPSVNLIESSSNNLQVFSGPDSWTSLSSTPHASILSVPHTNGPINPGPSPYPCLWTISNGAGGPSGPGPEVHASTPGAFLLGNPAVTSPPSVLSTQAPTSAGVEVLGEPSLTSIAVSTWTAVASHPFAGWGGPGAGGHHSPSSLDG

SEQ ID NO: 8493 - protein, 632 aa, Homo sapiens
MARHRNVRGYNYDEDFEDDDLYGQSVEDDYCISPSTAAQFIYSRRDKPSVEPVEEYDYEDLKESSNSVSNHQLSGFDQARLYSCLDHMREVLGDAVPDEILIEAVLKNKFDVQKALSGVLEQDRVQSLKDKNEATVSTGKIAKGVLFSSSEVSADNVQSSYPQSANHLDYSSKPFDFASSVGKYGLSHNSSVPTHCLLHRKKKLDTRKSEKKLESCKLTKELSLANLIHDMSRDSCESQPSVRLSSTDSLESLLSKNLDADLLRPHASECISKDDSAFKEIPDLKTIIIKGTTPNNSLYIQNNSLSDFQNIPVQDSLGSSNNPLYLTSSLENMTVDNLNASKETEVGNVSLVEQSAKNHTFKNDNLQFSQCESPSLTELFQEHKENNISQCFTLSDLCNQSSASFTDLSLGSFPLSQLANRCQSSPGISELTGSLSSLAFHKASPTRDLENLSLSELIAETIDVDNSQIKKESFEVSLSEVRSPGIDSNIDLSVLIKNPDFVPKPVVDPSIAPSSRTKVLSSKLGKNSNFAKDNKKNNKGSLTRKPPFSLSWTKALAARPSAFASTLCLRYPLKSCKRRTLDLYKTFLYSRQVQDVKDKEISPLVAITPFDFKSASPDDIVKANQKKAFTRE

SEQ ID NO: 8494 - protein, 178 aa, Homo sapiens
MMIHGFQSSHRDFCFGPWKLTASKTHIMKSADVEKLADELHMPSLPEMMFGDNVLRIQHGSGFGIEFNATDALRCVNNYQGMLKVACAEEWQESRTEGEHSKEVIKPYDWTYTTDYKGTLLGESLKLKVVPTTDHIDTEKLKAREQIKFFEEVLLFEDELHDHGVSSLSVKIPGGGHL

SEQ ID NO: 8495 - protein, 272 aa, Homo sapiens
MMIHGFQSSHRDFCFGPWKLTASKTHIMKSADVEKLADELHMPSLPEMMFGDNVLRIQHGSGFGIEFNATDALRCVNNYQGMLKVACAEEWQESRTEGEHSKEVIKPYDWTYTTDYKGTLLGESLKLKVVPTTDHIDTEKLKAREQIKFFEEVLLFEDELHDHGVSSLSVKIRVMPSSFFLLLRFFLRIDGVLIRMNDTRLYHEADKTYMLREYTSRESKISSLMHVPPSLFTEPNEISQYLPIKEAVCEKLIFPERIDPNPADSQKSTQVE

SEQ ID NO: 8496 - protein, 529 aa, Homo sapiens
MSLNSSLSCRKELSNLTEEEGGEGGVIITQFIAIIVITIFVCLGNLVIVVTLYKKSYLLTLSNKFVFSLTLSNFLLSVLVLPFVVTSSIRREWIFGVVWCNFSALLYLLISSASMLTLGVIAIDRYYAVLYPMVYPMKITGNRAVMALVYIWLHSLIGCLPPLFGWSSVEFDEFKWMCVAAWHREPGYTAFWQIWCALFPFLVMLVCYGFIFRVARVKARKVHCGTVVIVEEDAQRTGRKNSSTSTSSSGSRRNAFQGVVYSANQCKALITILVVLGAFMVTWGPYMVVIASEALWGKSSVSPSLETWATWLSFASAVCHPLIYGLWNKTVRKELLGMCFGDRYYREPFVQRQRTSRLFSISNRITDLGLSPHLTALMAGGQPLGHSSSTGDTGFSCSQDSGTDMMLLEDYTSDDNPPSHCTCPPKRRSSVTFEDEVEQIKEAAKNSILHVKAEVHKSLDSYAASLAKAIEAEAKINLFGEEALPGVLVTARTVPGGGFGGRRGSRTLVSQRLQLQSIEEGDVLAAEQR

SEQ ID NO: 8497 - protein, 951 aa, Homo sapiens
MSRGGSYPHLLWDVRKRSLGLEDPSRLRSRYLGRREFIQRLKLEATLNVHDGCVNTICWNDTGEYILSGSDDTKLVISNPYSRKVLTTIRSGHRANIFSAKFLPCTNDKQIVSCSGDGVIFYTNVEQDAETNRQCQFTCHYGTTYEIMTVPNDPYTFLSCGEDGTVRWFDTRIKTSCTKEDCKDDILINCRRAATSVAICPPIPYYLAVGCSDSSVRIYDRRMLGTRATGNYAGRGTTGMVARFIPSHLNNKSCRVTSLCYSEDGQEILVSYSSDYIYLFDPKDDTARELKTPSAEERREELRQPPVKRLRLRGDWSDTGPRARPESERERDGEQSPNVSLMQRMSDMLSRWFEEASEVAQSNRGRGRSRPRGGTSQSDISTLPTVPSSPDLEVSETAMEVDTPAEQFLQPSTSSTMSAQAHSTSSPTESPHSTPLLSSPDSEQRQSVEASGHHTHHQSEFLRGPEIALLRKRLQQLRLKKAEQQRQQELAAHTQQQPSTSDQSSHEGSSQDPHASDSPSSVVNKQLGSMSLDEQQDNNNEKLSPKPGTGEPVLSLHYSTEGTTTSTIKLNFTDEWSSIASSSRGIGSHCKSEGQEESFVPQSSVQPPEGDSETKAPEESSEDVTKYQEGVSAENPVENHINITQSDKFTAKPLDSNSGERNDLNLDRSCGVPEESASSEKAKEPETSDQTSTESATNENNTNPEPQFQTEATGPSAHEETSTRDSALQDTDDSDDDPVLIPGARYRAGPGDRFNIRGTTIGDRIMRRSAVARIQEFFRRRKERKEMEELDTLNIRRPLVKMVYKGHRNSRTMIKEANFWGANFVMSGSDCGHIFIWDRHTAEHLMLLEADNHVVNCLQPHPFDPILASSGIDYDIKIWSPLEESRIFNRKLADEVITRNELMLEETRNTITVPASFMLRMLASLNHIRADRLEGDRSEGSGQENENEDEE

SEQ ID NO: 8498 - protein, 880 aa, Homo sapiens
MSRGGSYPHLLWDVRKRSLGLEDPSRLRSRYLGRREFIQRLKLEATLNVHDGCVNTICWNDTGEYILSGSDDTKLVISNPYSRKVLTTIRSGHRANIFSAKFLPCTNDKQIVSCSGDGVIFYTNVEQDAETNRQCQFTCHYGTTYEIMTVPNDPYTFLSCGEDGTVRWFDTRIKTSCTKEDCKDDILINCRRAATSVAICPPIPYYLAVGCSDSSVRIYDRRMLGTRATGNYAGRGTTGMVARFIPSHLNNKSCRVTSLCYSEDGQEILVSYSSDYIYLFDPKDDTARELKTPSAEERREELRQPPVKRLRLRGDWSDTGPRARPESERERDGEQSPNVSLMQRMSDMLSRWFEEASEVAQSNRGRGRSRPRGGTSQSDISTLPTVPSSPDLEVSETAMEVDTPAEQFLQPSTSSTMSAQAHSTSSPTESPHSTPLLSSPDSEQRQSVEASGHHTHHQSDSPSSVVNKQLGSMSLDEQQDNNNEKLSPKPGTGEPVLSLHYSTEGTTTSTIKLNFTDEWSSIASSSRGIGSHCKSEGQEESFVPQSSVQPPEGDSETKAPEESSEDVTKYQEGVSAENPVENHINITQSDKFTAKPLDSNSGERNDLNLDRSCGVPEESASSEKAKEPETSDQTSTESATNENNTNPEPQFQTEATGPSAHEETSTRDSALQDTDDSDDDPVLIPGARYRAGPGDRRSAVARIQEFFRRRKERKEMEELDTLNIRRPLVKMVYKGHRNSRTMIKEANFWGANFVMSGSDCGHIFIWDRHTAEHLMLLEADNHVVNCLQPHPFDPILASSGIDYDIKIWSPLEESRIFNRKLADEVITRNELMLEETRNTITVPASFMLRMLASLNHIRADRLEGDRSEGSGQENENEDEE

SEQ ID NO: 8499 - protein, 1518 aa, Homo sapiens
MSLSEGDALLALWRVERKQLKNIITVVIKCSLEIHGLFETQEWEEGLDIRVKIGLAAGHISMLVFGDETHSHFLVIGQAVDDVRLAQNMAQMNDVILSPNCWQLCDRSMIEIESVPDQRAVKVNFLKPPPNFNFDEFFTKCTTFMHYYPSGEHKNLLRLACTLKPDPELEMSLQKYVMESILKQIDNKQLQGYLSELRPVTIVFVNLMFEDQDKAEEIGPAIQDAYMHITSVLKIFQGQINKVFMFDKGCSFLCVFGFPGEKVPDELTHALECAMDIFDFCSQVHKIQTVSIGVASGIVFCGIVGHTVRHEYTVIGQKVNLAARMMMYYPGIVTCDSVTYNGSNLPAYFFKELPKKVMKGVADSGPLYQYWGRTEKVMFGMACLICNRKEDYPLLGRNKEINYFMYTMKKFLISNSSQVLMYEGLPGYGKSQILMKIEYLAQGKNHRIIAISLNKISFHQTFYTIQMFMANVLGLDTCKHYKERQTNLRNKVMTLLDEKFYCLLNDIFHVQFPISREISRMSTLKKQKQLEILFMKILKLIVKEERIIFIIDEAQFVDSTSWRFMEKLIRTLPIFIIMSLCPFVNIPCAAARAVIKNRNTTYIVIGAVQPNDISNKICLDLNVSCISKELDSYLGEGSCGIPFYCEELLKNLEHHEVLVFQQTESEEKTNRTWNNLFKYSIKLTEKLNMVTLHSDKESEEVCHLTSGVRLKNLSPPTSLKEISLIQLDSMRLSHQMLVRCAAIIGLTFTTELLFEILPCWNMKMMIKTLATLVESNIFYCFRNGKELQKALKQNDPSFEVHYRSLSLKPSEGMDHGEEEQLRELENEVIECHRIRFCNPMMQKTAYELWLKDQRKAMHLKCARFLEEDAHRCDHCRGRDFIPYHHFTVNIRLNALDMDAIKKMAMSHGFKTEEKLILSNSEIPETSAFFPENRSPEEIREKILNFFDHVLTKMKTSDEDIIPLESCQCEEILEIVILPLAHHFLALGENDKALYYFLEIASAYLIFCDNYMAYMYLNEGQKLLKTLKKDKSWSQTFESATFYSLKGEVCFNMGQIVLAKKMLRKALKLLNRIFPYNLISLFLHIHVEKNRHFHYVNRQAQESPPPGKKRLAQLYRQTVCLSLLWRIYSYSYLFHCKYYAHLAVMMQMNTALETQNCFQIIKAYLDYSLYHHLAGYKGVWFKYEVMAMEHIFNLPLKGEGIEIVAYVAETLVFNKLIMGHLDLAIELGSRALQMWALLQNPNRHYQSLCRLSRCLLLNSRYPQLIQVLGRLWELSVTQEHIFSKAFFYFVCLDILLYSGFVYRTFEECLEFIHQYENNRILKFHSGLLLGLYSSVAIWYARLQEWDNFYKFSNRAKNLLPRRTMTLTYYDGISRYMEGQVLHLQKQIKEQSENAQASGEELLKNLENLVAQNTTGPVFCPRLYHLMAYVCILMGDGQKCGLFLNTALRLSETQGNILEKCWLNMNKESWYSTSELKEDQWLQTILSLPSWEKIVAGRVNIQDLQKNKFLMRANTVDNHF

SEQ ID NO: 8500 - protein, 1610 aa, Homo sapiens
MNTPKEEFQDWPIVRIAAHLPDLIVYGHFSPERPFMDYFDGVLMFVDISGFTAMTEKFSSAMYMDRGAEQLVEILNYHISAIVEKVLIFGGDILKFAGDALLALWRVERKQLKNIITVVIKCSLEIHGLFETQEWEEGLDIRVKIGLAAGHISMLVFGDETHSHFLVIGQAVDDVRLAQNMAQMNDVILSPNCWQLCDRSMIEIESVPDQRAVKVNFLKPPPNFNFDEFFTKCTTFMHYYPSGEHKNLLRLACTLKPDPELEMSLQKYVMESILKQIDNKQLQGYLSELRPVTIVFVNLMFEDQDKAEEIGPAIQDAYMHITSVLKIFQGQINKVFMFDKGCSFLCVFGFPGEKVPDELTHALECAMDIFDFCSQVHKIQTVSIGVASGIVFCGIVGHTVRHEYTVIGQKVNLAARMMMYYPGIVTCDSVTYNGSNLPAYFFKELPKKVMKGVADSGPLYQYWGRTEKVMFGMACLICNRKEDYPLLGRNKEINYFMYTMKKFLISNSSQVLMYEGLPGYGKSQILMKIEYLAQGKNHRIIAISLNKISFHQTFYTIQMFMANVLGLDTCKHYKERQTNLRNKVMTLLDEKFYCLLNDIFHVQFPISREISRMSTLKKQKQLEILFMKILKLIVKEERIIFIIDEAQFVDSTSWRFMEKLIRTLPIFIIMSLCPFVNIPCAAARAVIKNRNTTYIVIGAVQPNDISNKICLDLNVSCISKELDSYLGEGSCGIPFYCEELLKNLEHHEVLVFQQTESEEKTNRTWNNLFKYSIKLTEKLNMVTLHSDKESEEVCHLTSGVRLKNLSPPTSLKEISLIQLDSMRLSHQMLVRCAAIIGLTFTTELLFEILPCWNMKMMIKTLATLVESNIFYCFRNGKELQKALKQNDPSFEVHYRSLSLKPSEGMDHGEEEQLRELENEVIECHRIRFCNPMMQKTAYELWLKDQRKAMHLKCARFLEEDAHRCDHCRGRDFIPYHHFTVNIRLNALDMDAIKKMAMSHGFKTEEKLILSNSEIPETSAFFPENRSPEEIREKILNFFDHVLTKMKTSDEDIIPLESCQCEEILEIVILPLAHHFLALGENDKALYYFLEIASAYLIFCDNYMAYMYLNEGQKLLKTLKKDKSWSQTFESATFYSLKGEVCFNMGQIVLAKKMLRKALKLLNRIFPYNLISLFLHIHVEKNRHFHYVNRQAQESPPPGKKRLAQLYRQTVCLSLLWRIYSYSYLFHCKYYAHLAVMMQMNTALETQNCFQIIKAYLDYSLYHHLAGYKGVWFKYEVMAMEHIFNLPLKGEGIEIVAYVAETLVFNKLIMGHLDLAIELGSRALQMWALLQNPNRHYQSLCRLSRCLLLNSRYPQLIQVLGRLWELSVTQEHIFSKAFFYFVCLDILLYSGFVYRTFEECLEFIHQYENNRILKFHSGLLLGLYSSVAIWYARLQEWDNFYKFSNRAKNLLPRRTMTLTYYDGISRYMEGQVLHLQKQIKEQSENAQASGEELLKNLENLVAQNTTGPVFCPRLYHLMAYVCILMGDGQKCGLFLNTALRLSETQGNILEKCWLNMNKESWYSTSELKEDQWLQTILSLPSWEKIVAGRVNIQDLQKNKFLMRANTVDNHF

SEQ ID NO: 8501 - protein, 416 aa, Homo sapiens
MEERPAETNANVDNSASPSVAQLAGRFREQAAAAKETPASKPTRRKPPCSLPLFPPKVDLGQNGEEKSPPNASHPPKFKVKSSPLIEKLQANLTFDPAALLPGASPKSPGLKAMVSPFHSPPSTPSSPGVRSRPSEAEEVPVSFDQPPEGSHLPCYNKVRTRGSIKRRPPSRRFRRSQSDCGELGDFRAVESSQQNGAKEEDGDEVLPSKSKAPGSPLSSEGAAGEGVRTLGPAEKPPLRRSPSRTEKQEEDRATEEAKNGEKARRSSEEVDGQHPAQEEVPESPQTSGPEAENRCGSPREEKPAGEEAEMEKATEVKGERVQNEEVGPEHDSQETKKLEEGAAVKETPHSPPGGVKGGDVPKQEKGKEKQQEGAVLEPGCSPQTGPAQLETSSEVQSEPAVPKPEDDTPVQDTKM

SEQ ID NO: 8502 - protein, 421 aa, Homo sapiens
MKPSKRFFISPPSSTAFMKQRRMGLNDFIQKIANNSYACKHPEVQSILKISQPQEPELMNANPSPPPSPSQQINLGPSSNPHAKPSDFHFLKVIGKGSFGKVLLARHKAEEVFYAVKVLQKKAILKKKEEKHIMSERNVLLKNVKHPFLVGLHFSFQTADKLYFVLDYINGGELFYHLQRERCFLEPRARFYAAEIASALGYLHSLNIVYRDLKPENILLDSQGHIVLTDFGLCKENIEHNSTTSTFCGTPEYLAPEVLHKQPYDRTVDWWCLGAVLYEMLYGLPPFYSRNTAEMYDNILNKPLQLKPNITNSARHLLEGLLQKDRTKRLGAKDDFMEIKSHVFFSLINWDDLINKKITPPFNPNVSGPNDLRHFDPEFTEEPVPNSIGKSPDSVLVTASVKEAAEAFLGFSYAPPTDSFL

SEQ ID NO: 8503 - protein, 526 aa, Homo sapiens
MVNKDMNGFPVKKCSAFQFFKKRVRRWIKSPMVSVDKHQSPSLKYTGSSMVHIPPGEPDFESSLCQTCLGEHAFQRGVLPQENESCSWETQSGCEVREPCNHANILTKPDPRTFWTNDDPAFMKQRRMGLNDFIQKIANNSYACKHPEVQSILKISQPQEPELMNANPSPPPSPSQQINLGPSSNPHAKPSDFHFLKVIGKGSFGKVLLARHKAEEVFYAVKVLQKKAILKKKEEKHIMSERNVLLKNVKHPFLVGLHFSFQTADKLYFVLDYINGGELFYHLQRERCFLEPRARFYAAEIASALGYLHSLNIVYRDLKPENILLDSQGHIVLTDFGLCKENIEHNSTTSTFCGTPEYLAPEVLHKQPYDRTVDWWCLGAVLYEMLYGLPPFYSRNTAEMYDNILNKPLQLKPNITNSARHLLEGLLQKDRTKRLGAKDDFMEIKSHVFFSLINWDDLINKKITPPFNPNVSGPNDLRHFDPEFTEEPVPNSIGKSPDSVLVTASVKEAAEAFLGFSYAPPTDSFL

SEQ ID NO: 8504 - protein, 755 aa, Homo sapiens
MLDCSDYVLDSRMNNPSETSKPSMESGDGNTGTQTNGLDFQKQPVPVGGAISTAQAQAFLGHLHQVQLAGTSLQAAAQSLNVQSKSNEESGDSQQPSQPSQQPSVQAAIPQTQLMLAGGQITGLTLTPAQQQLLLQQAQAQAQLLAAAVQQHSASQQHSAAGATISASAATPMTQIPLSQPIQIAQDLQQLQQLQQQNLNLQQFVLVHPTTNLQPAQFIISQTPQGQQGLLQAQNLLTQLPQQSQANLLQSQPSITLTSQPATPTRTIAATPIQTLPQSQSTPKRIDTPSLEEPSDLEELEQFAKTFKQRRIKLGFTQGDVGLAMGKLYGNDFSQTTISRFEALNLSFKNMCKLKPLLEKWLNDAENLSSDSSLSSPSALNSPGIEGLSRRRKKRTSIETNIRVALEKSFLENQKPTSEEITMIADQLNMEKEVIRVWFCNRRQKEKRINPPSSGGTSSSPIKAIFPSPTSLVATTPSLVTSSAATTLTVSPVLPLTSAAVTNLSVTGTSDTTSNNTATVISTAPPASSAVTSPSLSPSPSASASTSEASSASETSTTQTTSTPLSSPLGTSQVMVTASGLQTAAAAALQGAAQLPANASLAAMAAAAGLNPSLMAPSQFAAGGALLSLNPGTLSGALSPALMSNSTLATIQALASGGSLPITSLDATGNLVFANAGGAPNIVTAPLFLNPQNLSLLTSNPVSLVSAAAASAGNSAPVASLHATSTSAESIQNSLFTVASASGAASTTTTASKAQ

SEQ ID NO: 8505 - protein, 766 aa, Homo sapiens
MADGGAASQDESSAAAAAAADSRMNNPSETSKPSMESGDGNTGTQTNGLDFQKQPVPVGGAISTAQAQAFLGHLHQVQLAGTSLQAAAQSLNVQSKSNEESGDSQQPSQPSQQPSVQAAIPQTQLMLAGGQITGLTLTPAQQQLLLQQAQAQAQLLAAAVQQHSASQQHSAAGATISASAATPMTQIPLSQPIQIAQDLQQLQQLQQQNLNLQQFVLVHPTTNLQPAQFIISQTPQGQQGLLQAQNLLTQLPQQSQANLLQSQPSITLTSQPATPTRTIAATPIQTLPQSQSTPKRIDTPSLEEPSDLEELEQFAKTFKQRRIKLGFTQGDVGLAMGKLYGNDFSQTTISRFEALNLSFKNMCKLKPLLEKWLNDAENLSSDSSLSSPSALNSPGIEGLSRRRKKRTSIETNIRVALEKSFLENQKPTSEEITMIADQLNMEKEVIRVWFCNRRQKEKRINPPSSGGTSSSPIKAIFPSPTSLVATTPSLVTSSAATTLTVSPVLPLTSAAVTNLSVTGTSDTTSNNTATVISTAPPASSAVTSPSLSPSPSASASTSEASSASETSTTQTTSTPLSSPLGTSQVMVTASGLQTAAAAALQGAAQLPANASLAAMAAAAGLNPSLMAPSQFAAGGALLSLNPGTLSGALSPALMSNSTLATIQALASGGSLPITSLDATGNLVFANAGGAPNIVTAPLFLNPQNLSLLTSNPVSLVSAAAASAGNSAPVASLHATSTSAESIQNSLFTVASASGAASTTTTASKAQ

SEQ ID NO: 8506 - protein, 319 aa, Homo sapiens
MVGKMWPVLWTLCAVRVTVDAISVETPQDVLRASQGKSVTLPCTYHTSTSSREGLIQWDKLLLTHTERVVIWPFSNKNYIHGELYKNRVSISNNAEQSDASITIDQLTMADNGTYECSVSLMSDLEGNTKSRVRLLVLVPPSKPECGIEGETIIGNNIQLTCQSKEGSPTPQYSWKRYNILNQEQPLAQPASGQPVSLKNISTDTSGYYICTSSNEEGTQFCNITVAVRSPSMNVALYVGIAVGVVAALIIIGIIIYCCCCRGKDDNTEDKEDARPNREAYEEPPEQLRELSREREEEDDYRQEEQRSTGRESPDHLDQ

SEQ ID NO: 8507 - protein, 403 aa, Homo sapiens
MPNRKASRNAYYFFVQEKIPELRRRGLPVARVADAIPYCSSDWAKPVFTPLRRPGMLVPKQNVSPPDMSALSLKGDQALLGGIFYFLNIFSHGELPPHCEQRFLPCEIGCVKYSLQEGIMADFHSFINPGEIPRGFRFHCQAASDSSHKIPISNFERGHNQATVLQNLYRFIHPNPGNWPPIYCKSDDRTRVNWCLKHMAKASEIRQDLQLLTVEDLVVGIYQQKFLKEPSKTWIRSLLDVAMWDYSSNTRCKWHEENDILFCALAVCKKIAYCISNSLATLFGIQLTEAHVPLQDYEASNSVTPKMVVLDAGRYQKLRVGSSGFSHFNSSNEEQRSNTPIGDYPSRAKISGQNSSVRGRGITRLLESISNSSSNIHKFSNCDTSLSPYMSQKDGYKSFSSLS

SEQ ID NO: 8508 - protein, 434 aa, Homo sapiens
MPNRKASRNAYYFFVQEKIPELRRRGLPVARVADAIPYCSSDWALLREEEKEKYAEMAREWRAAQGKDPGPSEKQKPVFTPLRRPGMLVPKQNVSPPDMSALSLKGDQALLGGIFYFLNIFSHGELPPHCEQRFLPCEIGCVKYSLQEGIMADFHSFINPGEIPRGFRFHCQAASDSSHKIPISNFERGHNQATVLQNLYRFIHPNPGNWPPIYCKSDDRTRVNWCLKHMAKASEIRQDLQLLTVEDLVVGIYQQKFLKEPSKTWIRSLLDVAMWDYSSNTRCKWHEENDILFCALAVCKKIAYCISNSLATLFGIQLTEAHVPLQDYEASNSVTPKMVVLDAGRYQKLRVGSSGFSHFNSSNEEQRSNTPIGDYPSRAKISGQNSSVRGRGITRLLESISNSSSNIHKFSNCDTSLSPYMSQKDGYKSFSSLS

SEQ ID NO: 8509 - protein, 609 aa, Homo sapiens
MESTAYPLNLSLKEEEEEEEIQSRELEDGPADMQKVRICSEGGWVPALFDEVAIYFSDEEWEVLTEQQKALYREVMRMNYETVLSLEFPFPKPDMITRLEGEEESQNSDEWQLQGGTSAENEESDVKPPDWPNPMNATSQFPQPQHFDSFGLRLPRDITELPEWSEGYPFYMAMGFPGYDLSADDIAGKFQFSRGMRRSYDAGFKLMVVEYAESTNNCQAAKQFGVLEKNVRDWRKVKPQLQNAHAMRRAFRGPKNGRFALVDQRVAEYVRYMQAKGDPITREAMQLKALEIAQEMNIPEKGFKASLGWCRRMMRRYDLSLRHKVPVPQHLPEDLTEKLVTYQRSVLALRRAHDYEVAQMGNADETPICLEVPSRVTVDNQGEKPVLVKTPGREKLKITAMLGVLADGRKLPPYIILRGTYIPPGKFPSGMEIRCHRYGWMTEDLMQDWLEVVWRRRTGAVPKQRGMLILNGFRGHATDSVKNSMESMNTDMVIIPGGLTSQLQVLDVVVYKPLNDSVRAQYSNWLLAGNLALSPTGNAKKPPLGLFLEWVMVAWNSISSESIVQGFKKCHISSNLEEEDDVLWEIESELPGGGEPPKDCDTESMAESN

SEQ ID NO: 8510 - protein, 347 aa, Homo sapiens
MDEQPRLMHSHAGVGMAGHPGLSQHLQDGAGGTEGEGGRKQDIGDILQQIMTITDQSLDEAQARKHALNCHRMKPALFNVLCEIKEKTVLSIRGAQEEEPTDPQLMRLDNMLLAEGVAGPEKGGGSAAAAAAAAASGGAGSDNSVEHSDYRAKLSQIRQIYHTELEKYEQACNEFTTHVMNLLREQSRTRPISPKEIERMVSIIHRKFSSIQMQLKQSTCEAVMILRSRFLDARRKRRNFNKQATEILNEYFYSHLSNPYPSEEAKEELAKKCGITVSQVSNWFGNKRIRYKKNIGKFQEEANIYAAKTAVTATNVSAHGSQANSPSTPNSAGGYPSPCYQPDRRIQ

SEQ ID NO: 8511 - protein, 187 aa, Homo sapiens
MKHRLGFLLQKSDSCEHNSSHNKKDKVVICQRVSQEEVKKWAESLENLISHECGLAAFKAFLKSEYSEENIDFWISCEEYKKIKSPSKLSPKAKKIYNEFISVQATKEVNLDSCTREETSRNMLEPTITCFDEAQKKIFNLMEKDSYRRFLKSRFYLDLVNPSSCGAEKQKGAKSSADCASLVPQCA

SEQ ID NO: 8512 - protein, 93 aa, Homo sapiens
MCKGLAGLPASCLRSAKDMKHRLGFLLQKSDSCEHNSSHNKKDKVVICQRVSQEEVKKWAESLENLISHECEPGFLHQGRDKPEHARAYNNLL

SEQ ID NO: 8513 - protein, 205 aa, Homo sapiens
MCKGLAGLPASCLRSAKDMKHRLGFLLQKSDSCEHNSSHNKKDKVVICQRVSQEEVKKWAESLENLISHECGLAAFKAFLKSEYSEENIDFWISCEEYKKIKSPSKLSPKAKKIYNEFISVQATKEVNLDSCTREETSRNMLEPTITCFDEAQKKIFNLMEKDSYRRFLKSRFYLDLVNPSSCGAEKQKGAKSSADCASLVPQCA

SEQ ID NO: 8514 - protein, 855 aa, Homo sapiens
MILIPRMLLVLFLLLPILSSAKAQVNPAICRYPLGMSGGQIPDEDITASSQWSESTAAKYGRLDSEEGDGAWCPEIPVEPDDLKEFLQIDLHTLHFITLVGTQGRHAGGHGIEFAPMYKINYSRDGTRWISWRNRHGKQVLDGNSNPYDIFLKDLEPPIVARFVRFIPVTDHSMNVCMRVELYGCVWLDGLVSYNAPAGQQFVLPGGSIIYLNDSVYDGAVGYSMTEGLGQLTDGVSGLDDFTQTHEYHVWPGYDYVGWRNESATNGYIEIMFEFDRIRNFTTMKVHCNNMFAKGVKIFKEVQCYFRSEASEWEPNAISFPLVLDDVNPSARFVTVPLHHRMASAIKCQYHFADTWMMFSEITFQSDAAMYNNSEALPTSPMAPTTYDPMLKVDDSNTRILIGCLVAIIFILLAIIVIILWRQFWQKMLEKASRRMLDDEMTVSLSLPSDSSMFNNNRSSSPSEQGSNSTYDRIFPLRPDYQEPSRLIRKLPEFAPGEEESGCSGVVKPVQPSGPEGVPHYAEADIVNLQGVTGGNTYSVPAVTMDLLSGKDVAVEEFPRKLLTFKEKLGEGQFGEVHLCEVEGMEKFKDKDFALDVSANQPVLVAVKMLRADANKNARNDFLKEIKIMSRLKDPNIIHLLAVCITDDPLCMITEYMENGDLNQFLSRHEPPNSSSSDVRTVSYTNLKFMATQIASGMKYLSSLNFVHRDLATRNCLVGKNYTIKIADFGMSRNLYSGDYYRIQGRAVLPIRWMSWESILLGKFTTASDVWAFGVTLWETFTFCQEQPYSQLSDEQVIENTGEFFRDQGRQTYLPQPAICPDSVYKLMLSCWRRDTKNRPSFQEIHLLLLQQGDE

SEQ ID NO: 8515 - protein, 513 aa, Homo sapiens
MTTQLPAYVAILLFYVSRASCQDTFTAAVYEHAAILPNATLTPVSREEALALMNRNLDILEGAITSAADQGAHIIVTPEDAIYGWNFNRDSLYPYLEDIPDPEVNWIPCNNRNRFGQTPVQERLSCLAKNNSIYVVANIGDKKPCDTSDPQCPPDGRYQYNTDVVFDSQGKLVARYHKQNLFMGENQFNVPKEPEIVTFNTTFGSFGIFTCFDILFHDPAVTLVKDFHVDTIVFPTAWMNVLPHLSAVEFHSAWAMGMRVNFLASNIHYPSKKMTGSGIYAPNSSRAFHYDMKTEEGKLLLSQLDSHPSHSAVVNWTSYASSIEALSSGNKEFKGTVFFDEFTFVKLTGVAGNYTVCQKDLCCHLSYKMSENIPNEVYALGAFDGLHTVEGRYYLQICTLLKCKTTNLNTCGDSAETASTRFEMFSLSGTFGTQYVFPEVLLSENQLAPGEFQVSTDGRLFSLKPTSGPVLTVTLFGRLYEKDWASNASSGLTAQARIIMLIVIAPIVCSLSW

SEQ ID NO: 8516 - protein, 351 aa, Homo sapiens
MAVSSEQHELSHFKRTQTKKEKFNCSEYGNRSCPENERSLGVRVAMYSFMAGSIFITIFGNLAMIISISYFKQLHTPTNFLILSMAITDFLLGFTIMPYSMIRSVENCWYFGLTFCKIYYSFDLMLSITSIFHLCSVAIDRFYAICYPLLYSTKITIPVIKRLLLLCWSVPGAFAFGVVFSEAYADGIEGYDILVACSSSCPVMFNKLWGTTLFMAGFFTPGSMMVGIYGKIFAVSRKHAHAINNLRENQNNQVKKDKKAAKTLGIVIGVFLLCWFPCFFTILLDPFLNFSTPVVLFDALTWFGYFNSTCNPLIYGFFYPWFRRALKYILLGKIFSSCFHNTILCMQKESE

SEQ ID NO: 8517 - protein, 751 aa, Homo sapiens
MAKPRLLVLYFALIVVPAWVSSIVLTGTSEPPDAQTVAPAEDETLQNEADNQENVLSQLLGDYDKVKAMSEGSDCQCKCVVRPLGRDACQRINAGASRKEDFYTVETITSGSSCKCACVAPPSALNPCEGDFRLQKLREADSQDLKLSTIIDMLEGAFYGLDLLKLHSVTTKLVGRVDKLEEEVSKNLTKENEQIKEDMEEIRTEMNKRGKENCSENILDSMPDIRSALQRDAAAAYAHPEQYEERFLQEETVSQQINSIELLQTRPLALPEVVKSQRPLQRQVHLRGRPASQPTVIRGITYYKAKVSEEENDIEEQQDEFFSGDNGVDLLIEDQLLRHNGLMTSVTRRPAATRQGHSTAVTSDLNARTAPWSSALPQPSTSDPSIANHASVGPTLQTTSVSPDPTRESVLQPSPQVPATTVAHTATQQPAAPAPPAVSPREALMEAMHTVPVPPTTVRTDSLGKDAPAGWGTTPASPTLSPEEEDDIRNVIGRCKDTLSTITGPTTQNTYGRNEGAWMKDPLAKDERIYVTNYYYGNTLVEFRNLENFKQGRWSNSYKLPYSWIGTGHVVYNGAFYYNRAFTRNIIKYDLKQRYVAAWAMLHDVAYEEATPWRWQGHSDVDFAVDENGLWLIYPALDDEGFSQEVIVLSKLNAADLSTQKETTWRTGLRRNFYGNCFVICGVLYAVDSYNQRNANISYAFDTHTNTQIVPRLLFENEYSYTTQIDYNPKDRLLYAWDNGHQVTYHVIFAY

SEQ ID NO: 8518 - protein, 670 aa, Homo sapiens
MGEPAGVAGTMESPFSPGLFHRLDEDWDSALFAELGYFTDTDELQLEAANETYENNFDNLDFDLDLMPWESDIWDINNQICTVKDIKAEPQPLSPASSSYSVSSPRSVDSYSSTQHVPEELDLSSSSQMSPLSLYGENSNSLSSAEPLKEDKPVTGPRNKTENGLTPKKKIQVNSKPSIQPKPLLLPAAPKTQTNSSVPAKTIIIQTVPTLMPLAKQQPIISLQPAPTKGQTVLLSQPTVVQLQAPGVLPSAQPVLAVAGGVTQLPNHVVNVVPAPSANSPVNGKLSVTKPVLQSTMRNVGSDIAVLRRQQRMIKNRESACQSRKKKKEYMLGLEARLKAALSENEQLKKENGTLKRQLDEVVSENQRLKVPSPKRRVVCVMIVLAFIILNYGPMSMLEQDSRRMNPSVSPANQRRHLLGFSAKEAQDTSDGIIQKNSYRYDHSVSNDKALMVLTEEPLLYIPPPPCQPLINTTESLRLNHELRGWVHRHEVERTKSRRMTNNQQKTRILQGALEQGSNSQLMAVQYTETTSSISRNSGSELQVYYASPRSYQDFFEAIRRRGDTFYVVSFRRDHLLLPATTHNKTTRPKMSIVLPAININENVINGQDYEVMMQIDCQVMDTRILHIKSSSVPPYLRDQQRNQTNTFFGSPPAATEATHVVSTIPESLQ

SEQ ID NO: 8519 - protein, 340 aa, Homo sapiens
MLEAPGPSDGCELSNPSASRVSCAGQMLEVQPGLYFGGAAAVAEPDHLREAGITAVLTVDSEEPSFKAGPGVEDLWRLFVPALDKPETDLLSHLDRCVAFIGQARAEGRAVLVHCHAGVSRSVAIITAFLMKTDQLPFEKAYEKLQILKPEAKMNEGFEWQLKLYQAMGYEVDTSSAIYKQYRLQKVTEKYPELQNLPQELFAVDPTTVSQGLKDEVLYKCRKCRRSLFRSSSILDHREGSGPIAFAHKRMTPSSMLTTGRQAQCTSYFIEPVQWMESALLGVMDGQLLCPKCSAKLGSFNWYGEQCSCGRWITPAFQIHKNRVDEMKILPVLGSQTGKI

SEQ ID NO: 8520 - protein, 268 aa, Homo sapiens
MWPLTALLLLATLEKPILSLHPPWTTIFKGERVTLKCDGYHPLLLELQPISTLWYLGHLLLPSHKKSIEVQTPGVYRCQTRGAPVSDPIHLSVSNDWLILQVPYAPVFEGEPLVLRCRGWYDKVVYKLHYYHDGQAVRYFHSSANYTVLQARASDSGRYQCSGTMRIPVESAPMFSAKVAVTVQEARHAAAVRVLQVQPRGAPLRLGRRVHSPGARGRGARIVLVRGGYRHPQCPETQSVAAAPGAGFSPGPGLHHRPSSMGRSLGSW

SEQ ID NO: 8521 - protein, 426 aa, Homo sapiens
MWPLTALLLLVPSSGQAATLEKPILSLHPPWTTIFKGERVTLKCDGYHPLLLELQPISTLWYLGHLLLPSHKKSIEVQTPGVYRCQTRGAPVSDPIHLSVSNDWLILQVPYAPVFEGEPLVLRCRGWYDKVVYKLHYYHDGQAVRYFHSSANYTVLQARASDSGRYQCSGTMRIPVESAPMFSAKVAVTVQELFRAPVLRVMGPREARGAALGGVVLRCDTRLHPQKRDTPLQFAFYKYSRAVRRFDWGAEYTVPEPEVEELESYWCEAATATRSVRKRSPWLQLPGPGSPLDPASTTAPAPWAAALAPGNRPLSFRKPPVSRSVPLVTSVRNTTSTGLQFPASGAPTAGPPACAPPTPLEQSAGALKPDVDLLLREMQLLKGLLSRVVLELKEPQALRELRGTPETPTSHFAVSPGTPETTPVES

SEQ ID NO: 8522 - protein, 365 aa, Homo sapiens
MKLGCVLMAWALYLSLGVLWVAQMLLAAGCHAAASFETLQCEGPVCTEESSCHTEDDLTDAREAGFQVKAYTFSEPFHLIVSYDWLILQGPAKPVFEGDLLVLRCQAWQDWPLTQVTFYRDGSALGPPGPNREFSITVVQKADSGHYHCSGIFQSPGPGIPETASVVAITVQELFPAPILRAVPSAEPQAGSPMTLSCQTKLPLQRSAARLLFSFYKDGRIVQSRGLSSEFQIPTASEDHSGSYWCEAATEDNQVWKQSPQLEIRVQGASSSAAPPTLNPAPQKSAAPGTAPEEAPGPLPPPPTPSSEDPGFSSPLGMPDPHLYHQMGLLLKHMQDVRVLLGHLLMELRELSGHRKPGTTKATAE

SEQ ID NO: 8523 - protein, 219 aa, Homo sapiens
MKLGCVLMAWALYLSLGVLWVAQMLLELFPAPILRAVPSAEPQAGSPMTLSCQTKLPLQRSAARLLFSFYKDGRIVQSRGLSSEFQIPTASEDHSGSYWCEAATEDNQVWKQSPQLEIRVQGASSSAAPPTLNPAPQKSAAPGTAPEEAPGPLPPPPTPSSEDPGFSSPLGMPDPHLYHQMGLLLKHMQDVRVLLGHLLMELRELSGHRKPGTTKATAE

SEQ ID NO: 8524 - protein, 382 aa, Homo sapiens
MLKKISVGVAGDLNTVTMKLGCVLMAWALYLSLGVLWVAQMLLAAGCHAAASFETLQCEGPVCTEESSCHTEDDLTDAREAGFQVKAYTFSEPFHLIVSYDWLILQGPAKPVFEGDLLVLRCQAWQDWPLTQVTFYRDGSALGPPGPNREFSITVVQKADSGHYHCSGIFQSPGPGIPETASVVAITVQELFPAPILRAVPSAEPQAGSPMTLSCQTKLPLQRSAARLLFSFYKDGRIVQSRGLSSEFQIPTASEDHSGSYWCEAATEDNQVWKQSPQLEIRVQGASSSAAPPTLNPAPQKSAAPGTAPEEAPGPLPPPPTPSSEDPGFSSPLGMPDPHLYHQMGLLLKHMQDVRVLLGHLLMELRELSGHRKPGTTKATAE

SEQ ID NO: 8525 - protein, 613 aa, Homo sapiens
MCCWPLLLLWGLLPGTAAGGSGRTYPHRTLLDSEGKYWLGWSQRGSQIAFRLQVRTAGYVGFGFSPTGAMASADIVVGGVAHGRPYLQDYFTNANRELKKDAQQDYHLEYAMENSTHTIIEFTRELHTCDINDKSITDSTVRVIWAYHHEDAGEAGPKYHDSNRGTKSLRLLNPEKTSVLSTALPYFDLVNQDVPIPNKDTTYWCQMFKIPVFQEKHHVIKVEPVIQRGHESLVHHILLYQCSNNFNDSVLESGHECYHPNMPDAFLTCETVIFAWAIGGEGFSYPPHVGLSLGTPLDPHYVLLEVHYDNPTYEEGLIDNSGLRLFYTMDIRKYDAGVIEAGLWVSLFHTIPPGMPEFQSEGHCTLECLEEALEAEKPSGIHVFAVLLHAHLAGRGIRLRHFRKGKEMKLLAYDDDFDFNFQEFQYLKEEQTILPGDNLITECRYNTKDRAEMTWGGLSTRSEMCLSYLLYYPRINLTRCASIPDIMEQLQFIGVKEIYRPVTTWPFIIKSPKQYKNLSFMDAMNKFKWTKKEGLSFNKLVLSLPVNVRCSKTDNAEWSIQGMTALPPDIERPYKAEPLVCGTSSSSSLHRDFSINLLVCLLLLSCTLSTKSL

SEQ ID NO: 8526 - protein, 359 aa, Homo sapiens
MAEGTLWQILCVSSDAQPQTFEGVKGADPPTLPPGSFLPGPVLWWGSLARLQTEKSDEVSRKGNWWVTEMGGGAGERLFTSSCLVGLVPLGLRISLVTCPLQCGIMWQLLLPTALLLLVSAGMRTEDLPKAVVFLEPQWYRVLEKDSVTLKCQGAYSPEDNSTQWFHNESLISSQASSYFIDAATVDDSGEYRCQTNLSTLSDPVQLEVHIGWLLLQAPRWVFKEEDPIHLRCHSWKNTALHKVTYLQNGKGRKYFHHNSDFYIPKATLKDSGSYFCRGLFGSKNVSSETVNITITQGLAVSTISSFFPPGYQVSFCLVMVLLFAVDTGLYFSVKTNIRSSTRDWKDHKFKWRKDPQDK

SEQ ID NO: 8527 - protein, 316 aa, Homo sapiens
MTMETQMSQNVCPRNLWLLQPLTVLLLLASADSQAAPPKAVLKLEPPWINVLQEDSVTLTCQGARSPESDSIQWFHNGNLIPTHTQPSYRFKANNNDSGEYTCQTGQTSLSDPVHLTVLSEWLVLQTPHLEFQEGETIMLRCHSWKDKPLVKVTFFQNGKSQKFSHLDPTFSIPQANHSHSGDYHCTGNIGYTLFSSKPVTITVQVPSMGSSSPMGIIVAVVIATAVAAIVAAVVALIYCRKKRISANSTDPVKAAQFEPPGRQMIAIRKRQLEETNNDYETADGGYMTLNPRAPTDDDKNIYLTLPPNDHVNSNN

SEQ ID NO: 8528 - protein, 349 aa, Homo sapiens
MTAASMGPVRVAFVVLLALCSRPAVGQNCSGPCRCPDEPAPRCPAGVSLVLDGCGCCRVCAKQLGELCTERDPCDPHKGLFCHFGSPANRKIGVCTAKDGAPCIFGGTVYRSGESFQSSCKYQCTCLDGAVGCMPLCSMDVRLPSPDCPFPRRVKLPGKCCEEWVCDEPKDQTVVGPALAAYRLEDTFGPDPTMIRANCLVQTTEWSACSKTCGMGISTRVTNDNASCRLEKQSRLCMVRPCEADLEENIKKGKKCIRTPKISKPIKFELSGCTSMKTYRAKFCGVCTDGRCCTPHRTTTLPVEFKCPDGEVMKKNMMFIKTCACHYNCPGDNDIFESLYYRKMYGDMA

SEQ ID NO: 8529 - protein, 837 aa, Homo sapiens
MSQTGSHPGRGLAGRWLWGAQPCLLLPIVPLSWLVWLLLLLLASLLPSARLASPLPREEEIVFPEKLNGSVLPGSGAPARLLCRLQAFGETLLLELEQDSGVQVEGLTVQYLGQAPELLGGAEPGTYLTGTINGDPESVASLHWDGGALLGVLQYRGAELHLQPLEGGTPNSAGGPGAHILRRKSPASGQGPMCNVKAPLGSPSPRPRRAKRFASLSRFVETLVVADDKMAAFHGAGLKRYLLTVMAAAAKAFKHPSIRNPVSLVVTRLVILGSGEEGPQVGPSAAQTLRSFCAWQRGLNTPEDSDPDHFDTAILFTRQDLCGVSTCDTLGMADVGTVCDPARSCAIVEDDGLQSAFTAAHELGHVFNMLHDNSKPCISLNGPLSTSRHVMAPVMAHVDPEEPWSPCSARFITDFLDNGYGHCLLDKPEAPLHLPVTFPGKDYDADRQCQLTFGPDSRHCPQLPPPCAALWCSGHLNGHAMCQTKHSPWADGTPCGPAQACMGGRCLHMDQLQDFNIPQAGGWGPWGPWGDCSRTCGGGVQFSSRDCTRPVPRNGGKYCEGRRTRFRSCNTEDCPTGSALTFREEQCAAYNHRTDLFKSFPGPMDWVPRYTGVAPQDQCKLTCQAQALGYYYVLEPRVVDGTPCSPDSSSVCVQGRCIHAGCDRIIGSKKKFDKCMVCGGDGSGCSKQSGSFRKFRYGYNNVVTIPAGATHILVRQQGNPGHRSIYLALKLPDGSYALNGEYTLMPSPTDVVLPGAVSLRYSGATAASETLSGHGPLAQPLTLQVLVAGNPQDTRLRYSFFVPRPTPSTPRPTPQDWLHRRAQILEILRRRPWAGRK

SEQ ID NO: 8530 - protein, 551 aa, Homo sapiens
MPQASEHRLGRTREPPVNIQPRVGSKLPFAPRARSKERRNPASGPNPMLRPLPPRPGLPDERLKKLELGRGRTSGPRPRGPLRADHGVPLPGSPPPTVALPLPSRTNLARSKSVSSGDLRPMGIALGGHRGTGELGAALSRLALRPEPPTLRRSTSLRRLGGFPGPPTLFSIRTEPPASHGSFHMISARSSEPFYSDDKMAHHTLLLGSGHVGLRNLGNTCFLNAVLQCLSSTRPLRDFCLRRDFRQEVPGGGRAQELTEAFADVIGALWHPDSCEAVNPTRFRAVFQKYVPSFSGYSQQDAQEFLKLLMERLHLEINRRGRRAPPILANGPVPSPPRRGGALLEEPELSDDDRANLMWKRYLEREDSKIVDLFVGQLKSCLKCQACGYRSTTFEVFCDLSLPIPKKGFAGGKVSLRDCFNLFTKEEELESENAPVCDRCRQKTRSTKKLTVQRFPRILVLHLNRFSASRGSIKKSSVGVDFPLQRLSLGDFASDKAGSVHYGHYTALCRCQTGWHVYNDSRVSPVSENQVASSEGYVLFYQLMQEPPRCL

SEQ ID NO: 8531 - protein, 510 aa, Homo sapiens
MPLSLGAEMWGPEAWLLLLLLLASFTGRCPAGELETSDVVTVVLGQDAKLPCFYRGDSGEQVGQVAWARVDAGEGAQELALLHSKYGLHVSPAYEGRVEQPPPPRNPLDGSVLLRNAVQADEGEYECRVSTFPAGSFQARLRLRVLVPPLPSLNPGPALEEGQGLTLAASCTAEGSPAPSVTWDTEVKGTTSSRSFKHSRSAAVTSEFHLVPSRSMNGQPLTCVVSHPGLLQDQRITHILHVSFLAEASVRGLEDQNLWHIGREGAMLKCLSEGQPPPSYNWTRLDGPLPSGVRVDGDTLGFPPLTTEHSGIYVCHVSNEFSSRDSQVTVDVLDPQEDSGKQVDLVSASVVVVGVIAALLFCLLVVVVVLMSRYHRRKAQQMTQKYEEELTLTRENSIRRLHSHHTDPRSQPEESVGLRAEGHPDSLKDNSSCSVMSEEPEGRSYSTLTTVREIETQTELLSPGSGRAEEEEDQDEGIKQAMNHFVQENGTLRAKPTGNGIYINGRGHLV

SEQ ID NO: 8532 - protein, 1101 aa, Homo sapiens
MKSRQKGKKKGSAKERVFGCDLQEHLQHSGQEVPQVLKSCAEFVEEYGVVDGIYRLSGVSSNIQKLRQEFESERKPDLRRDVYLQDIHCVSSLCKAYFRELPDPLLTYRLYDKFAEAVGVQLEPERLVKILEVLRELPVPNYRTLEFLMRHLVHMASFSAQTNMHARNLAIVWAPNLLRSKDIEASGFNGTAAFMEVRVQSIVVEFILTHVDQLFGGAALSGGEVESGWRSLPGTRASGSPEDLMPRPLPYHLPSILQAGDGPPQMRPYHTIIEIAEHKRKGSLKVRKWRSIFNLGRSGHETKRKLPRGAEDREDKSNKGTLRPAKSMDSLSAAAGASDEPEGLVGPSSPRPSPLLPESLENDSIEAAEGEQEPEAEALGGTNSEPGTPRAGRSAIRAGGSSRAERCAGVHISDPYNVNLPLHITSILSVPPNIISNVSLARLTRGLECPALQHRPSPASGPGPGPGLGPGPPDEKLEASPASSPLADSGPDDLAPALEDSLSQEVQDSFSFLEDSSSSEPEWVGAEDGEVAQAEAAGAAFSPGEDDPGMGYLEELLGVGPQVEEFSVEPPLDDLSLDEAQFVLAPSCCSLDSAGPRPEVEEENGEEVFLSAYDDLSPLLGPKPPIWKGSGSLEGEAAGCGRQALGQGGEEQACWEVGEDKQAEPGGRLDIREEAEGSPETKVEAGKASEDRGEAGGSQETKVRLREGSREETEAKEEKSKGQKKADSMEAKGVEEPGGDEYTDEKEKEIEREEDEQREEAQVEAGRDLEQGAQEDQVAEEKWEVVQKQEAEGVREDEDKGQREKGYHEARKDQGDGEDSRSPEAATEGGAGEVSKERESGDGEAEGDQRAGGYYLEEDTLSEGSGVASLEVDCAKEGNPHSSEMEEVAPQPPQPEEMEPEGQPSPDGCLCPCSLGLGGVGMRLASTLVQVQQVRSVPVVPPKPQFAKMPSAMCSKIHVAPANPCPRPGRLDGTPGERAWGSRASRSSWRNGGSLSFDAAVALARDRQRTEAQGVRRTQTCTEGGDYCLIPRTSPCSMISAHSPRPLSCLELPSEGAEGSGSRSRLSLPPREPQVPDPLLSSQRRSYAFETQANPGKGEGL

SEQ ID NO: 8533 - protein, 924 aa, Homo sapiens
MKSKDIEASGFNGTAAFMEVRVQSIVVEFILTHVDQLFGGAALSGGEVESGWRSLPGTRASGSPEDLMPRPLPYHLPSILQAGDGPPQMRPYHTIIEIAEHKRKGSLKVRKWRSIFNLGRSGHETKRKLPRGAEDREDKSNKGTLRPAKSMDSLSAAAGASDEPEGLVGPSSPRPSPLLPESLENDSIEAAEGEQEPEAEALGGTNSEPGTPRAGRSAIRAGGSSRAERCAGVHISDPYNVNLPLHITSILSVPPNIISNVSLARLTRGLECPALQHRPSPASGPGPGPGLGPGPPDEKLEASPASSPLADSGPDDLAPALEDSLSQEVQDSFSFLEDSSSSEPEWVGAEDGEVAQAEAAGAAFSPGEDDPGMGYLEELLGVGPQVEEFSVEPPLDDLSLDEAQFVLAPSCCSLDSAGPRPEVEEENGEEVFLSAYDDLSPLLGPKPPIWKGSGSLEGEAAGCGRQALGQGGEEQACWEVGEDKQAEPGGRLDIREEAEGSPETKVEAGKASEDRGEAGGSQETKVRLREGSREETEAKEEKSKGQKKADSMEAKGVEEPGGDEYTDEKEKEIEREEDEQREEAQVEAGRDLEQGAQEDQVAEEKWEVVQKQEAEGVREDEDKGQREKGYHEARKDQGDGEDSRSPEAATEGGAGEVSKERESGDGEAEGDQRAGGYYLEEDTLSEGSGVASLEVDCAKEGNPHSSEMEEVAPQPPQPEEMEPEGQPSPDGCLCPCSLGLGGVGMRLASTLVQVQQVRSVPVVPPKPQFAKMPSAMCSKIHVAPANPCPRPGRLDGTPGERAWGSRASRSSWRNGGSLSFDAAVALARDRQRTEAQGVRRTQTCTEGGDYCLIPRTSPCSMISAHSPRPLSCLELPSEGAEGSGSRSRLSLPPREPQVPDPLLSSQRRSYAFETQANPGKGEGL

SEQ ID NO: 8534 - protein, 340 aa, Homo sapiens
KVVWLFNTSIISKEREEAATADPLIKSRDPYKNRVWVSSQDCSLKISQLKIEDAGPYHAYVCSEASSVTSMTHVTLLIYRRLRKPKITWSLRHSEDGICRISLTCSVEDGGNTVMYTWTPLQKEAVVSQGESHLNVSWRSSENHPNLTCTASNPVSRSSHQFLSENICSGPERNTKLWIGLFLMVCLLCVGIFSWCIWKRKGRCSVPAFCSSQAEAPADTPGYEKLDTPLRPARQQPTPTSDSSSDSNLTTEEDEDRPEVHKPISGRYEVFDQVTQEGAGHDPAPEGQADYDPVTPYVTEVESVVGENTMYAQVFNLQVVPPPQQNDLEIPESPTYENFT

SEQ ID NO: 8535 - protein, 641 aa, Homo sapiens
MVAPKSHTDDWAPGPFSSKPQRSQLQIFSSVLQTSLLFLLMGLRASGKDSAPTVVSGILGGSVTLPLNISVDTEIENVIWIGPKNALAFARPKENVTIMVKSYLGRLDITKWSYSLCISNLTLNDAGSYKAQINQRNFEVTTEEEFTLFVYEQLQEPQVTMKSVKVSENFSCNITLMCSVKGAEKSVLYSWTPREPHASESNGGSILTVSRTPCDPDLPYICTAQNPVSQRSSLPVHVGQFCTDPGASRGGTTGETVVGVLGEPVTLPLALPACRDTEKVVWLFNTSIISKEREEAATADPLIKSRDPYKNRVWVSSQDCSLKISQLKIEDAGPYHAYVCSEASSVTSMTHVTLLIYRRLRKPKITWSLRHSEDGICRISLTCSVEDGGNTVMYTWTPLQKEAVVSQGESHLNVSWRSSENHPNLTCTASNPVSRSSHQFLSENICSGPERNTKLWIGLFLMVCLLCVGIFSWCIWKRKGRCSVPAFCSSQAEAPADTPGYEKLDTPLRPARQQPTPTSDSSSDSNLTTEEDEDRPEVHKPISGRYEVFDQVTQEGAGHDPAPEGQADYDPVTPYVTEVESVVGENTMYAQVFNLQGKTPVSQKEESSATIYCSIRKPQVVPPPQQNDLEIPESPTYENFT

SEQ ID NO: 8536 - protein, 243 aa, Homo sapiens
MCSRGWDSCLALELLLLPLSLLVTSIQGHLVHMTVVSGSNVTLNISESLPENYKQLTWFYTFDQKIVEWDSRKSKYFESKFKGRVRLDPQSGALYISKVQKEDNSTYIMRVLKKTGNEQEWKIKLQVLDPVPKPVIKIEKIEDMDDNCYLKLSCVIPGESVNYTWYGDKRPFPKELQNSVLETTLMPHNYSRCYTCQVSNSVSSKNGTVCLSPPCTLARSFGVEWIASWLVVTVPTILGLLLT

SEQ ID NO: 8537 - protein, 886 aa, Homo sapiens
METQLQSIFEEVVKTEVIEEAFPGMFMDTPEDEKTKLISCLGAFRQFWGGLSQESHEQCIQWIVKFIHGQHSPKRISFLYDCLAMAVETGLLPPRLVCESLINSDTLEWERTQLWALTFKLVRKIIGGVDYKGVRDLLKVILEKILTIPNTVSSAVVQQLLAAREVIAYILERNACLLPAYFAVTEIRKLYPEGKLPHWLLGNLVSDFVDTFRPTARINSICGRCSLLPVVNNSGAICNSWKLDPATLRFPLKGLLPYDKDLFEPQTALLRYVLEQPYSRDMVCNMLGLNKQTLNIAQHKQRCPVLEDQLVDLVVYAMERSETEEKFDDGGTSQLLWQHLSSQLIFFVLFQFASFPHMVLSLHQKLAGRGLIKGRDHLMWVLLQFISGSIQKNALADFLPVMKLFDLLYPEKEYIPVPDINKPQSTHAFAMTCIWIHLNRKAQNDNSKLQIPIPHSLRLHHEFLQQSLRNKSLQMNDYKIALLCNAYSTNSECFTLPMGALVETIYGNGIMRIPLPGTNCMASGSITPLPMNLLDSLTVHAKMSLIHSIATRVIKLAHAKSSVALAPALVETYSRLLVYMEIESLGIKGFISQLLPTVFKSHAWGILHTLLEMFSYRMHHIQPHYRVQLLSHLHTLAAVAQTNQNQLHLCVESTALRLITALGSSEVQPQFTRFLSDPKTVLSAESEELNRALILTLARATHVTDFFTGSDSIQGTWCKDILQTIMSFTPHNWASHTLSCFPGPLQAFFKQNNVPQESRFNLKKNVEEEYRKWKSMSNENDIITHFSMQGSPPLFLCLLWKMLLETDHINQIGYRVLERIGARALVAHVRTFADFLVYEFSTSAGGQQLNKCIEILNDMVWKYNIVTLDRLILCLVRINTFLSLFS

SEQ ID NO: 8538 - protein, 1374 aa, Homo sapiens
METQLQSIFEEVVKTEVIEEAFPGMFMDTPEDEKTKLISCLGAFRQFWGGLSQESHEQCIQWIVKFIHGQHSPKRISFLYDCLAMAVETGLLPPRLVCESLINSDTLEWERTQLWALTFKLVRKIIGGVDYKGVRDLLKVILEKILTIPNTVSSAVVQQLLAAREVIAYILERNACLLPAYFAVTEIRKLYPEGKLPHWLLGNLVSDFVDTFRPTARINSICGRCSLLPVVNNSGAICNSWKLDPATLRFPLKGLLPYDKDLFEPQTALLRYVLEQPYSRDMVCNMLGLNKQTLNIAQHKQRCPVLEDQLVDLVVYAMERSETEEKFDDGGTSQLLWQHLSSQLIFFVLFQFASFPHMVLSLHQKLAGRGLIKGRDHLMWVLLQFISGSIQKNALADFLPVMKLFDLLYPEKEYIPVPDINKPQSTHAFAMTCIWIHLNRKAQNDNSKLQIPIPHSLRLHHEFLQQSLRNKSLQMNDYKIALLCNAYSTNSECFTLPMGALVETIYGNGIMRIPLPGTNCMASGSITPLPMNLLDSLTVHAKMSLIHSIATRVIKLAHAKSSVALAPALVETYSRLLVYMEIESLGIKGFISQLLPTVFKSHAWGILHTLLEMFSYRMHHIQPHYRVQLLSHLHTLAAVAQTNQNQLHLCVESTALRLITALGSSEVQPQFTRFLSDPKTVLSAESEELNRALILTLARATHVTDFFTGSDSIQGTWCKDILQTIMSFTPHNWASHTLSCFPGPLQAFFKQNNVPQESRFNLKKNVEEEYRKWKSMSNENDIITHFSMQGSPPLFLCLLWKMLLETDHINQIGYRVLERIGARALVAHVRTFADFLVYEFSTSAGGQQLNKCIEILNDMVWKYNIVTLDRLILCLAMRSHEGNEAQVCYFIIQLLLLKPNDFRNRVSDFVKENSPEHWLQNDWHTKHMNYHKKYPEKLYFEGLAEQVDPPVQIQSPYLPIYFGNVCLRFLPVFDIVIHRFLELLPVSKSLETLLDHLGGLYKFHDRPVTYLYNTLHYYEMHLRDRAFLKRKLVHAIIGSLKDNRPQGWCLSDTYLKCAMNAREENPWVPDDTYYCRLIGRLVDTMAGKSPGPFPNCDWRFNEFPNPAAHALHVTCVELMALAVSGKEVGNALLNVVLKSQPLVPRENITAWMNAIGLIITALPEPYWIVLHDRIVSVISSPSLTSETEWVGYPFRLFDFTACHQSYSEMSCSYTLALAHAVWHHSSIGQLSLIPKFLTEVLLPIVKTEFQLLYVYHLVGPFLQRFQQERTRCMIEIGVAFYDMLLNVDQCSTHLNYMDPICDFLYHMKYMFTGDSVKEQVKKIICNLKPALKLRLRFITHISKMEPAAVPPQAMNSGSPAPQSNQVPVSLPVTQ

SEQ ID NO: 8539 - protein, 1364 aa, Homo sapiens
METQLQSIFEEVVKTEVIEEAFPGMFMDTPEDEKTKLISCLGAFRQFWGGLSQESHEQCIQWIVKFIHGQHSPKRISFLYDCLAMAVETGLLPPRLVCESLINSDTLEWERTQLWALTFKLVRKIIGGVDYKGVRDLLKVILEKILTIPNTVSSAVVQQLLAAREVIAYILERNACLLPAYFAVTEIRKLYPEGKLPHWLLGNLVSDFVDTFRPTARINSICGRCSLLPVVNNSGAICNSWKLDPATLRFPLKGLLPYDKDLFEPQTALLRYVLEQPYSRDMVCNMLGLNKQHKQRCPVLEDQLVDLVVYAMERSETEEKFDDGGTSQLLWQHLSSQLIFFVLFQFASFPHMVLSLHQKLAGRGLIKGRDHLMWVLLQFISGSIQKNALADFLPVMKLFDLLYPEKEYIPVPDINKPQSTHAFAMTCIWIHLNRKAQNDNSKLQIPIPHSLRLHHEFLQQSLRNKSLQMNDYKIALLCNAYSTNSECFTLPMGALVETIYGNGIMRIPLPGTNCMASGSITPLPMNLLDSLTVHAKMSLIHSIATRVIKLAHAKSSVALAPALVETYSRLLVYMEIESLGIKGFISQLLPTVFKSHAWGILHTLLEMFSYRMHHIQPHYRVQLLSHLHTLAAVAQTNQNQLHLCVESTALRLITALGSSEVQPQFTRFLSDPKTVLSAESEELNRALILTLARATHVTDFFTGSDSIQGTWCKDILQTIMSFTPHNWASHTLSCFPGPLQAFFKQNNVPQESRFNLKKNVEEEYRKWKSMSNENDIITHFSMQGSPPLFLCLLWKMLLETDHINQIGYRVLERIGARALVAHVRTFADFLVYEFSTSAGGQQLNKCIEILNDMVWKYNIVTLDRLILCLAMRSHEGNEAQVCYFIIQLLLLKPNDFRNRVSDFVKENSPEHWLQNDWHTKHMNYHKKYPEKLYFEGLAEQVDPPVQIQSPYLPIYFGNVCLRFLPVFDIVIHRFLELLPVSKSLETLLDHLGGLYKFHDRPVTYLYNTLHYYEMHLRDRAFLKRKLVHAIIGSLKDNRPQGWCLSDTYLKCAMNAREENPWVPDDTYYCRLIGRLVDTMAGKSPGPFPNCDWRFNEFPNPAAHALHVTCVELMALAVSGKEVGNALLNVVLKSQPLVPRENITAWMNAIGLIITALPEPYWIVLHDRIVSVISSPSLTSETEWVGYPFRLFDFTACHQSYSEMSCSYTLALAHAVWHHSSIGQLSLIPKFLTEVLLPIVKTEFQLLYVYHLVGPFLQRFQQERTRCMIEIGVAFYDMLLNVDQCSTHLNYMDPICDFLYHMKYMFTGDSVKEQVEKIICNLKPALKLRLRFITHISKMEPAAVPPQAMNSGSPAPQSNQVDTLT

SEQ ID NO: 8540 - protein, 1368 aa, Homo sapiens
METQLQSIFEEVVKTEVIEEAFPGMFMDTPEDEKTKLISCLGAFRQFWGGLSQESHEQCIQWIVKFIHGQHSPKRISFLYDCLAMAVETGLLPPRLVCESLINSDTLEWERTQLWALTFKLVRKIIGGVDYKGVRDLLKVILEKILTIPNTVSSAVVQQLLAAREVIAYILERNACLLPAYFAVTEIRKLYPEGKLPHWLLGNLVSDFVDTFRPTARINSICGRCSLLPVVNNSGAICNSWKLDPATLRFPLKGLLPYDKDLFEPQTALLRYVLEQPYSRDMVCNMLGLNKQHKQRCPVLEDQLVDLVVYAMERSETEEKFDDGGTSQLLWQHLSSQLIFFVLFQFASFPHMVLSLHQKLAGRGLIKGRDHLMWVLLQFISGSIQKNALADFLPVMKLFDLLYPEKEYIPVPDINKPQSTHAFAMTCIWIHLNRKAQNDNSKLQIPIPHSLRLHHEFLQQSLRNKSLQMNDYKIALLCNAYSTNSECFTLPMGALVETIYGNGIMRIPLPGTNCMASGSITPLPMNLLDSLTVHAKMSLIHSIATRVIKLAHAKSSVALAPALVETYSRLLVYMEIESLGIKGFISQLLPTVFKSHAWGILHTLLEMFSYRMHHIQPHYRVQLLSHLHTLAAVAQTNQNQLHLCVESTALRLITALGSSEVQPQFTRFLSDPKTVLSAESEELNRALILTLARATHVTDFFTGSDSIQGTWCKDILQTIMSFTPHNWASHTLSCFPGPLQAFFKQNNVPQESRFNLKKNVEEEYRKWKSMSNENDIITHFSMQGSPPLFLCLLWKMLLETDHINQIGYRVLERIGARALVAHVRTFADFLVYEFSTSAGGQQLNKCIEILNDMVWKYNIVTLDRLILCLAMRSHEGNEAQVCYFIIQLLLLKPNDFRNRVSDFVKENSPEHWLQNDWHTKHMNYHKKYPEKLYFEGLAEQVDPPVQIQSPYLPIYFGNVCLRFLPVFDIVIHRFLELLPVSKSLETLLDHLGGLYKFHDRPVTYLYNTLHYYEMHLRDRAFLKRKLVHAIIGSLKDNRPQGWCLSDTYLKCAMNAREENPWVPDDTYYCRLIGRLVDTMAGKSPGPFPNCDWRFNEFPNPAAHALHVTCVELMALAVSGKEVGNALLNVVLKSQPLVPRENITAWMNAIGLIITALPEPYWIVLHDRIVSVISSPSLTSETEWVGYPFRLFDFTACHQSYSEMSCSYTLALAHAVWHHSSIGQLSLIPKFLTEVLLPIVKTEFQLLYVYHLVGPFLQRFQQERTRCMIEIGVAFYDMLLNVDQCSTHLNYMDPICDFLYHMKYMFTGDSVKEQVEKIICNLKPALKLRLRFITHISKMEPAAVPPQAMNSGSPAPQSNQVPVSLPVTQ

SEQ ID NO: 8541 - protein, 1233 aa, Homo sapiens
MLTKFETKSARVKGLSFHPKRPWILTSLHNGVIQLWDYRMCTLIDKFDEHDGPVRGIDFHKQQPLFVSGGDDYKIKVWNYKLRRCLFTLLGHLDYIRTTFFHHEYPWILSASDDQTIRVWNWQSRTCVCVLTGHNHYVMCAQFHPTEDLVVSASLDQTVRVWDISGLRKKNLSPGAVESDVRGITGVDLFGTTDAVVKHVLEGHDRGVNWAAFHPTMPLIVSGADDRQVKIWRMNESKAWEVDTCRGHYNNVSCAVFHPRQELILSNSEDKSIRVWDMSKRTGVQTFRRDHDRFWVLAAHPNLNLFAAGHDGGMIVFKLERERPAYAVHGNMLHYVKDRFLRQLDFNSSKDVAVMQLRSGSKFPVFNMSYNPAENAVLLCTRASNLENSTYDLYTIPKDADSQNPDAPEGKRSSGLTAVWVARNRFAVLDRMHSLLIKNLKNEITKKVQVPNCDEIFYAGTGNLLLRDADSITLFDVQQKRTLASVKISKVKYVIWSADMSHVALLAKHEHSCPLPLTAIVICNRKLDALCNIHENIRVKSGAWDESGVFIYTTSNHIKYAVTTGDHGIIRTLDLPIYVTRVKGNNVYCLDRECRPRVLTIDPTEFKFKLALINRKYDEVLHMVRNAKLVGQSIIAYLQKKGYPEVALHFVKDEKTRFSLALECGNIEIALEAAKALDDKNCWEKLGEVALLQGNHQIVEMCYQRTKNFDKLSFLYLITGNLEKLRKMMKIAEIRKDMSGHYQNALYLGDVSERVRILKNCGQKSLAYLTAATHGLDEEAESLKETFDPEKETIPDIDPNAKLLQPPAPIMPLDTNWPLLTVSKGFFEGTIASKGKGGALAADIDIDTVGTEGWGEDAELQLDEDGFVEATEGLGDDALGKGQEEGGGWDVEEDLELPPELDISPGAAGGAEDGFFVPPTKGTSPTQIWCNNSQLPVDHILAGSFETAMRLLHDQVGVIQFGPYKQLFLQTYARGRTTYQALPCLPSMYGYPNRNWKDAGLKNGVPAVGLKLNDLIQRLQLCYQLTTVGKFEEAVEKFRSILLSVPLLVVDNKQEIAEAQQLITICREYIVGLSVETERKKLPKETLEQQKRICEMAAYFTHSNLQPVHMILVLRTALNLFFKLKNFKTAATFARRLLELGPKPEVAQQTRKILSACEKNPTDAYQLNYDMHNPFDICAASYRPIYRGKPVEKCPLSGACYSPEFKGQICRVTTVTEIGKDVIGLRISPLQFR

SEQ ID NO: 8542 - protein, 1029 aa, Homo sapiens
MGLWGKKGTVAPHDQSPRRRPKKGLIKKKMVKREKQKRNMEELKKEVVMDDHKLTLEELSTKYSVDLTKGHSHQRAKEILTRGGPNTVTPPPTTPEWVKFCKQLFGGFSLLLWTGAILCFVAYSIQIYFNEEPTKDNLYLSIVLSVVVIVTGCFSYYQEAKSSKIMESFKNMVPQQALVIRGGEKMQINVQEVVLGDLVEIKGGDRVPADLRLISAQGCKVDNSSLTGESEPQSRSPDFTHENPLETRNICFFSTNCVEGTARGIVIATGDSTVMGRIASLTSGLAVGQTPIAAEIEHFIHLITVVAVFLGVTFFALSLLLGYGWLEAIIFLIGIIVANVPEGLLATVTVCLTLTAKRMARKNCLVKNLEAVETLGSTSTICSDKTGTLTQNRMTVAHMWFDMTVYEADTTEEQTGKTFTKSSDTWFMLARIAGLCNRADFKANQEILPIAKRATTGDASESALLKFIEQSYSSVAEMREKNPKVAEIPFNSTNKYQMSIHLREDSSQTHVLMMKGAPERILEFCSTFLLNGQEYSMNDEMKEAFQNAYLELGGLGERVLGFCFLNLPSSFSKGFPFNTDEINFPMDNLCFVGLISMIDPPRAAVPDAVSKCRSAGIKVIMVTGDHPITAKAIAKGVGIISEGTETAEEVAARLKIPISKVDASAAKAIVVHGAELKDIQSKQLDQILQNHPEIVFARTSPQQKLIIVEGCQRLGAVVAVTGDGVNDSPALKKADIGIAMGISGSDVSKQAADMILLDDNFASIVTGVEEGRLIFDNLKKSIMYTLTSNIPEITPFLMFIILGIPLPLGTITILCIDLGTDMVPAISLAYESAESDIMKRLPRNPKTDNLVNHRLIGMAYGQIGMIQALAGFFTYFVILAENGFRPVDLLGIRLHWEDKYLNDLEDSYGQQWTYEQRKVVEFTCQTAFFVTIVVVQWADLIISKTRRNSLFQQGMRNKVLIFGILEETLLAAFLSYTPGMDVALRMYPLKITWWLCAIPYSILIFVYDEIRKLLIRQHPDGWVERETYY

SEQ ID NO: 8543 - protein, 1179 aa, Homo sapiens
MVWCLGLAVLSLVISQGADGRGKPEVVSVVGRAGESVVLGCDLLPPAGRPPLHVIEWLRFGFLLPIFIQFGLYSPRIDPDYVGRVRLQKGASLQIEGLRVEDQGWYECRVFFLDQHIPEDDFANGSWVHLTVNSPPQFQETPPAVLEVQELEPVTLRCVARGSPLPHVTWKLRGKDLGQGQGQVQVQNGTLRIRRVERGSSGVYTCQASSTEGSATHATQLLVLGPPVIVVPPKNSTVNASQDVSLACHAEAYPANLTYSWFQDNINVFHISRLQPRVRILVDGSLRLLATQPDDAGCYTCVPSNGLLHPPSASAYLTVLYPAQVTAMPPETPLPIGMPGVIRCPVRANPPLLFVSWTKDGKALQLDKFPGWSQGTEGSLIIALGNEDALGEYSCTPYNSLGTAGPSPVTRVLLKAPPAFIERPKEEYFQEVGRELLIPCSAQGDPPPVVSWTKVGRGLQGQAQVDSNSSLILRPLTKEAHGHWECSASNAVARVATSTNVYVLGTSPHVVTNVSVVALPKGANVSWEPGFDGGYLQRFSVWYTPLAKRPDRMHHDWVSLAVPVGAAHLLVPGLQPHTQYQFSVLAQNKLGSGPFSEIVLSAPEGLPTTPAAPGLPPTEIPPPLSPPRGLVAVRTPRGVLLHWDPPELVPKRLDGYVLEGRQGSQGWEVLDPAVAGTETELLVPGLIKDVLYEFRLVAFAGSFVSDPSNTANVSTSGLEVYPSRTQLPGLLPQPVLAGVVGGVCFLGVAVLVSILAGCLLNRRRAARRRRKRLRQDPPLIFSPTGKSAAPSALGSGSPDSVAKLKLQGSPVPSLRQSLLWGDPAGTPSPHPDPPSSRGPLPLEPICRGPDGRFVMGPTVAAPQERSGREQAEPRTPAQRLARSFDCSSSSPSGAPQPLCIEDISPVAPPPAAPPSPLPGPGPLLQYLSLPFFREMNVDGDWPPLEEPSPAAPPDYMDTRRCPTSSFLRSPETPPVSPRESLPGAVVGAGATAEPPYTALADWTLRERLLPGLLPAAPRGSLTSQSSGRGSASFLRPPSTAPSAGGSYLSPAPGDTSSWASGPERWPRREHVVTVSKRRNTSVDENYEWDSEFPGDMELLETLHLGLASSRLRPEAEPELGVKTPEEGCLLNTAHVTGPEARCAALREEFLAFRRRRDATRARLPAYRQPVPHPEQATLL

SEQ ID NO: 8544 - protein, 551 aa, Homo sapiens
MPLSTAGILSSSSAASNRSRNKARYRTKAVSSEVDESLFGDIKSPAQGQSDSPIVLLRDKHTLQKTLTALGLDRKPETIQLITRDMVRELIVPTEDPSGESLIISPEEFERIKWASHVLTREELEARDQAFKKEKEATMDAVMTRKKIMKQKEMVWNNNKKLSDLEEVAKERAQNLLQRANKLRMEQEEELKDMSKIILNAKCHAIRDAQILEKQQIQKELDTEEKRLDQMMEVERQKSIQRQEELERKRREERIRGRRQIVEQMEKNQEERSLLAEQREQEKEQMLEYMEQLQEEDLKDMERRQQQKLKMQAEIKRINDENQKQKAELLAQEKLADQMVMEFTKKKMAREAEFEAEQERIRREKEKEIARLRAMQEKAQDYQAEQDALRAKRNQEVADREWRRKEKENARKKMETEAELRKSRLEQVAFKEHALAVQVQRDRDEFERILRAQREQIEKERLEEEKKATGRLQHANELRRQVRENQQKEVQNRIATFEEGRRLKEEAQKRRERIDEIKRKKLEELRATGLPEKYCIEAERKANILPATSVN

SEQ ID NO: 8545 - protein, 434 aa, Homo sapiens
MLLWTAVLLFVPCVGKTVWLYLQAWPNPVFEGDALTLRCQGWKNTPLSQVKFYRDGKFLHFSKENQTLSMGAATVQSRGQYSCSGQVMYIPQTFTQTSETAMVQVQELFPPPVLSAIPSPEPREGSLVTLRCQTKLHPLRSALRLLFSFHKDGHTLQDRGPHPELCIPGAKEGDSGLYWCEVAPEGGQVQKQSPQLEVRVQAPVSRPVLTLHHGPADPAVGDMVQLLCEAQRGSPPILYSFYLDEKIVGNHSAPCGGTTSLLFPVKSEQDAGNYSCEAENSVSRERSEPKKLSLKGSQVLFTPASNWLVPWLPASLLGLMVIAAALLVYVRSWRKAGPLPSQIPPTAPGGEQCPLYANVHHQKGKDEGVVYSVVHRTSKRSEARSAEFTVGRKDSSIICAEVRCLQPSEVSSTEVNMRSRTLQEPLSDCEEVLC

SEQ ID NO: 8546 - protein, 257 aa, Homo sapiens
MAPAMESPTLLCVALLFFAPDGVLAVPQKPKVSLNPPWNRIFKGENVTLTCNGNNFFEVSSTKWFHNGSLSEETNSSLNIVNAKFEDSGEYKCQHQQVNESEPVYLEVFSDWLLLQASAEVVMEGQPLFLRCHGWRNWDVYKVIYYKDGEALKYWYENHNISITNATVEDSGTYYCTGKVWQLDYESEPLNITVIKAPREKYWLQFFIPLLVVILFAVDTGLFISTQQQVTFLLKIKRTRKGFRLLNPHPKPNPKNN

SEQ ID NO: 8547 - protein, 343 aa, Homo sapiens
MESKYKEILLLTGLDNITDEELDRFKFFLSDEFNIATGKLHTANRIQVATLMIQNAGAVSAVMKTIRIFQKLNYMLLAKRLQEEKEKVDKQYKSVTKPKPLSQAEMSPAASAAIRNDVAKQRAAPKVSPHVKPEQKQMVAQQESIREGFQKRCLPVMVLKAKKPFTFETQEGKQEMFHATVATEKEFFFVKVFNTLLKDKFIPKRIIIIARYYRHSGFLEVNSASRVLDAESDQKVNVPLNIIRKAGETPKINTLQTQPLGTIVNGLFVVQKVTEKKKNILFDLSDNTGKMEVLGVRNEDTMKCKEGDKVRLTFFTLSKNGEKLQLTSGVHSTIKVIKAKKKT

SEQ ID NO: 8548 - protein, 729 aa, Homo sapiens
MGKKYKNIVLLKGLEVINDYHFRMVKSLLSNDLKLNLKMREEYDKIQIADLMEEKFRGDAGLGKLIKIFEDIPTLEDLAETLKKEKLKVKGPALSRKRKKEVDATSPAPSTSSTVKTEGAEATPGAQKRKKSTKEKAGPKGSKVSEEQTQPPSPAGAGMSTAMGRSPSPKTSLSAPPNSSSTENPKTVAKCQVTPRRNVLQKRPVIVKVLSTTKPFEYETPEMEKKIMFHATVATQTQFFHVKVLNTSLKEKFNGKKIIIISDYLEYDSLLEVNEESTVSEAGPNQTFEVPNKIINRAKETLKIDILHKQASGNIVYGVFMLHKKTVNQKTTIYEIQDDRGKMDVVGTGQCHNIPCEEGDKLQLFCFRLRKKNQMSKLISEMHSFIQIKKKTNPRNNDPKSMKLPQEQRQLPYPSEASTTFPESHLRTPQMPPTTPSSSFFTKKSEDTISKMNDFMRMQILKEGSHFPGPFMTSIGPAESHPHTPQMPPSTPSSSFLTTLKPRLKTEPEEVSIEDSAQSDLKEVMVLNATESFVYEPKEQKKMFHATVATENEVFRVKVFNIDLKEKFTPKKIIAIANYVCRNGFLEVYPFTLVADVNADRNMEIPKGLIRSASVTPKINQLCSQTKGSFVNGVFEVHKKNVRGEFTYYEIQDNTGKMEVVVHGRLTTINCEEGDKLKLTCFELAPKSGNTGELRSVIHSHIKVIKTRKNKKDILNPDSSMETSPDFFF

SEQ ID NO: 8549 - protein, 729 aa, Homo sapiens; identical to SEQ ID NO: 8548

SEQ ID NO: 8550 - protein, 520 aa, Homo sapiens
METWSVEQVCSWLVEKNLGELVHRFQEEEVSGAALLALNDRMVQQLVKKIGHQAVLMDLIKKYKQNTQGLKSPENPKKAALVMQTEAARDYRDEESSSPARHGEQMPSFYPAENLDNGLIDQRVLKQRRNVKQILARSKALQWTKSYVLPEFPYDVKCMLAEQKCPDHSMRIRIIEFLQADMTKYLEGSLYPSTQQYNDVVNALLQAHPFLDEDGCGFFLWKRALKDRFKYVRRPIEDDEQVIRNKCKFGHRRGQTRKSLADIRFDEIKLVQIKEEAVCFDSELDEHIKWFQQEYVKTEKDWREIDKRMSQTLEIRRKMIGSRTPLKDILKLFPFLKCPYQMFREFQLLTRTDIYKKTRHILESYSENILTSFSVVDNPINIVLQEKMKHYTDEDMLKYMKMTATCLLLPDVFGDDPSLFVIMNEQVQVSTPVLEVKNPFNMEVCEFSLYLERERLTKVDDCVTALAALVAAFHVFRIECPRRLSQTFNFLETLIFDMHSPYFPSLKEKENEVGFQHPLT

SEQ ID NO: 8551 - protein, 483 aa, Homo sapiens
MANNYKKIVLLKGLEVINDYHFRIVKSLLSNDLKLNPKMKEEYDKIQIADLMEEKFPGDAGLGKLIEFFKEIPTLGDLAETLKREKLKVKGIIPSKKTKQKEVYPATPACTPSNRLTAKGAEETLGPQKRKKPSEEETGTKRSKMSKEQTRPSCSAGASTSTAMGRSPPPQTSSSAPPNTSSTESLKPLANRHATASKNIFREDPIIAMVLNATKVFKYESSENEQRRMFHATVATQTQFFHVKVLNINLKRKFIKKRIIIISNYSKRNSLLEVNEASSVSEAGPDQTFEVPKDIIRRAKKIPKINILHKQTSGYIVYGLFMLHTKIVNRKTTIYEIQDKTGSMAVVGKGECHNIPCEKGDKLRLFCFRLRKRENMSKLMSEMHSFIQIQKNTNQRSHDSRSMALPQEQSQHPKPSEASTTLPESHLKTPQMPPTTPSSSSFTKKDETHPGAQSSPANFRITSPTVAPPLSSDTSTNRHPAVP

SEQ ID NO: 8552 - protein, 492 aa, Homo sapiens
MANNYKKIVLLKGLEVINDYHFRIVKSLLSNDLKLNPKMKEEYDKIQIADLMEEKFPGDAGLGKLIEFFKEIPTLGDLAETLKREKLKVANKIESIPVKGIIPSKKTKQKEVYPATPACTPSNRLTAKGAEETLGPQKRKKPSEEETGTKRSKMSKEQTRPSCSAGASTSTAMGRSPPPQTSSSAPPNTSSTESLKPLANRHATASKNIFREDPIIAMVLNATKVFKYESSENEQRRMFHATVATQTQFFHVKVLNINLKRKFIKKRIIIISNYSKRNSLLEVNEASSVSEAGPDQTFEVPKDIIRRAKKIPKINILHKQTSGYIVYGLFMLHTKIVNRKTTIYEIQDKTGSMAVVGKGECHNIPCEKGDKLRLFCFRLRKRENMSKLMSEMHSFIQIQKNTNQRSHDSRSMALPQEQSQHPKPSEASTTLPESHLKTPQMPPTTPSSSSFTKKDETHPGAQSSPANFRITSPTVAPPLSSDTSTNRHPAVP

SEQ ID NO: 8553 - protein, 407 aa, Homo sapiens
MVNEYKKILLLKGFELMDDYHFTSIKSLLAYDLGLTTKMQEEYNRIKITDLMEKKFQGVACLDKLIELAKDMPSLKNLVNNLRKEKSKVAKKIKTQEKAPVKKINQEEVGLAAPAPTARNKLTSEARGRIPVAQKRKTPNKEKTEAKRNKVSQEQSKPPGPSGASTSAAVDHPPLPQTSSSTPSNTSFTPNQETQAQRQVDARRNVPQNDPVTVVVLKATAPFKYESPENGKSTMFHATVASKTQYFHVKVFDINLKEKFVRKKVITISDYSECKGVMEIKEASSVSDFNQNFEVPNRIIEIANKTPKISQLYKQASGTMVYGLFMLQKKSVHKKNTIYEIQDNTGSMDVVGSGKWHNIKCEKGDKLRLFCLQLRTVDRKLKLVCGSHSFIKVIKAKKNKEGPMNVN

SEQ ID NO: 8554 - protein, 343 aa, Homo sapiens
MKQYSVGNQHSNYRSLLFPFLCSQMTQLTASGNQTMVTEFLFSMFPHAHRGGLLFFIPLLLIYGFILTGNLIMFIVIQVGMALHTPLYFFISVLSFLEICYTTTTIPKMLSCLISEQKSISVAGCLLQMYFFHSLGITESCVLTAMAIDRYIAICNPLRYPTIMIPKLCIQLTVGSCFCGFLLVLPEIAWISTLPFCGSNQIHQIFCDFTPVLSLACTDTFLVVIVDAIHAAEIVASFLVIALSYIRIIIVILGMHSAEGHHKAFSTCAAHLAVFLLFFGSVAVMYLRFSATYSVFWDTAIAVTFVILAPFFNPIIYSLKNKDMKEAIGRLFHYQKRAGWAGK

SEQ ID NO: 8555 - protein, 315 aa, Homo sapiens
MESGNQSTVTEFIFTGFPQLQDGSLLYFFPLLFIYTFIIIDNLLIFSAVRLDTHLHNPMYNFISIFSFLEIWYTTATIPKMLSNLISEKKAISMTGCILQMYFFHSLENSEGILLTTMAIDRYVAICNPLRYQMIMTPRLCAQLSAGSCLFGFLILLPEIVMISTLPFCGPNQIHQIFCDLVPVLSLACTDTSMILIEDVIHAVTIIITFLIIALSYVRIVTVILRIPSSEGRQKAFSTCAGHLMVFPIFFGSVSLMYLRFSDTYPPVLDTAIALMFTVLAPFFNPIIYSLRNKDMNNAIKKLFCLQKVLNKPGG

SEQ ID NO: 8556 - protein, 331 aa, Homo sapiens
MCWTMPSPFTGSSTRNMESGNQSTVTEFIFTGFPQLQDGSLLYFFPLLFIYTFIIIDNLLIFSAVRLDTHLHNPMYNFISIFSFLEIWYTTATIPKMLSNLISEKKAISMTGCILQMYFFHSLENSEGILLTTMAIDRYVAICNPLRYQMIMTPRLCAQLSAGSCLFGFLILLPEIVMISTLPFCGPNQIHQIFCDLVPVLSLACTDTSMILIEDVIHAVTIIITFLIIALSYVRIVTVILRIPSSEGRQKAFSTCAGHLMVFPIFFGSVSLMYLRFSDTYPPVLDTAIALMFTVLAPFFNPIIYSLRNKDMNNAIKKLFCLQKVLNKPGG

SEQ ID NO: 8557 - protein, 663 aa, Homo sapiens
MSWLSSSQGVVLTAYHPSGKDQTVGNSHAKAGEEATSSRRYGQYTMNQESTTIKVMEKPPFDRSISQDSLDELSMEDYWIELENIKKSSENSQEDQEVVVVKEPDEGELEEEWLKEAGLSNLFGESAGDPQESIVFLSTLTRTQAAAVQKRVETVSQTLRKKNKQYQIPDVRDIFAQQRESKETAPGGTESQSLRTNENKYQGRDDEASNLVGEEKLIPPEETPAPETDINLEVSFAEQALNQKESSKEKIQKSKGDDATLPSFRLPKDKTGTTRIGDLAPQDMKKVCHLALIELTALYDVLGIELKQQKAVKIKTKDSGLFCVPLTALLEQDQRKVPGMRIPLIFQKLISRIEERGLETEGLLRIPGAAIRIKNLCQELEAKFYEGTFNWESVKQHDAASLLKLFIRELPQPLLSVEYLKAFQAVQNLPTKKQQLQALNLLVILLPDANRDTLKALLEFLQRVIDNKEKNKMTVMNVAMVMAPNLFMCHALGLKSSEQREFVMAAGTANTMHLLIKYQKLLWTIPKFIVNQVRKQNTENHKKDKRAMKKLLKKMAYDREKYEKQDKSTNDADVPQGVIRVQAPHLSKVSMAIQLTEELKASDVLARFLSQESGVAQTLKKGEVFLYEIGGNIGERCLDDDTYMKDLYQLNPNAEWVIKSKPL

SEQ ID NO: 8558 - protein, 335 aa, Homo sapiens
MPQILIFTYLNMFYFFPPLQILAENLTMVTEFLLLGFSSLGEIQLALFVVFLFLYLVILSGNVTIISVIHLDKSLHTPMYFFLGILSTSETFYTFVILPKMLINLLSVARTISFNCCALQMFFFLGFAITNCLLLGVMGYDRYAAICHPLHYPTLMSWQVCGKLAAACAIGGFLASLTVVNLVFSLPFCSANKVNHYFCDISAVILLACTNTDVNEFVIFICGVLVLVVPFLFICVSYLCILRTILKIPSAEGRRKAFSTCASHLSVVIVHYGCASFIYLRPTANYVSNKDRLVTVTYTIVTPLLNPMVYSLRNKDVQLAIRKVLGKKGSLKLYN

SEQ ID NO: 8559 - protein, 376 aa, Homo sapiens
MLLLFLLFEGLCCPGENTAAPQALQSYHLAAEEQLSFRMLQTSSFANHSWAHSEGSGWLGDLQTHGWDTVLGTIRFLKPWSHGNFSKQELKNLQSLFQLYFHSFIQIVQASAGQFQLEYPFEIQILAGCRMNAPQIFLNMAYQGSDFLSFQGISWEPSPGAGIRAQNICKVLNRYLDIKEILQSLLGHTCPRFLAGLMEAGESELKRKVKPEAWLSCGPSPGPGRLQLVCHVSGFYPKPVWVMWMRGEQEQRGTQRGDVLPNADETWYLRATLDVAAGEAAGLSCRVKHSSLGGHDLIIHWGGYSIFLILICLTVIVTLVILVVVDSRLKKQSPVFLMGANTQDTKNSRHQFCLAQVSWIKNRVLKKWKTRLNQLW

SEQ ID NO: 8560 - protein, 290 aa, Homo sapiens
MLLLFLLFEGLCCPGENTAAPQALQSYHLAAEEQLSFRMLQTSSFANHSWAHSEGSGWLGDLQTHGWDTVLGTIRFLKPWSHGNFSKQELKNLQSLFQLYFHSFIQIVQASAGQFQLEYPFEIQILAGCRMNAPQIFLNMAYQGSDFLSFQGISWEPSPGAGIRAQNICKVLNRYLDIKEILQSLLGHTCPRFLAGLMEAGESELKRKVKPEAWLSCGPSPGPGRLQLVCHVSGFYPKPVWVMWMRGEQEQRGTQRGDVLPNADETWWIFHLSHPDLFDCDSYPGHIGCS

SEQ ID NO: 8561 - protein, 321 aa, Homo sapiens
MLLLFLLFEGLCCPGENTAAPQALQSYHLAAEEQLSFRMLQTSSFANHSWAHSEGSGWLGDLQTHGWDTVLGTIRFLKPWSHGNFSKQELKNLQSLFQLYFHSFIQIVQASAGQFQLEYPFEIQILAGCRMNAPQIFLNMAYQGSDFLSFQGISWEPSPGAGIRAQNICKVLNRYLDIKEILQSLLGHTCPRFLAGLMEAGESELKRKVKPEAWLSCGPSPGPGRLQLVCHVSGFYPKPVWVMWMRGGYSIFLILICLTVIVTLVILVVVDSRLKKQSPVFLMGANTQDTKNSRHQFCLAQVSWIKNRVLKKWKTRLNQLW

SEQ ID NO: 8562 - protein, 298 aa, Homo sapiens
MLLLFLLFEGLCCPGENTAAPQALQSYHLAAEEQLSFRMLQTSSFANHSWAHSEGSGWLGDLQTHGWDTVLGTIRFLKPWSHGNFSKQELKNLQSLFQLYFHSFIQIVQASAGQFQLELKPEAWLSCGPSPGPGRLQLVCHVSGFYPKPVWVMWMRGEQEQRGTQRGDVLPNADETWYLRATLDVAAGEAAGLSCRVKHSSLGGHDLIIHWGGYSIFLILICLTVIVTLVILVVVDSRLKKQSSNKNILSPHTPSPVFLMGANTQDTKNSRHQFCLAQVSWIKNRVLKKWKTRLNQLW

SEQ ID NO: 8563 - protein, 388 aa, Homo sapiens
MLLLFLLFEGLCCPGENTAAPQALQSYHLAAEEQLSFRMLQTSSFANHSWAHSEGSGWLGDLQTHGWDTVLGTIRFLKPWSHGNFSKQELKNLQSLFQLYFHSFIQIVQASAGQFQLEYPFEIQILAGCRMNAPQIFLNMAYQGSDFLSFQGISWEPSPGAGIRAQNICKVLNRYLDIKEILQSLLGHTCPRFLAGLMEAGESELKRKVKPEAWLSCGPSPGPGRLQLVCHVSGFYPKPVWVMWMRGEQEQRGTQRGDVLPNADETWYLRATLDVAAGEAAGLSCRVKHSSLGGHDLIIHWGGYSIFLILICLTVIVTLVILVVVDSRLKKQSSNKNILSPHTPSPVFLMGANTQDTKNSRHQFCLAQVSWIKNRVLKKWKTRLNQLW

SEQ ID NO: 8564 - protein, 333 aa, Homo sapiens
MLFLQFLLLALLLPGGDNADASQEHVSFHVIQIFSFVNQSWARGQGSGWLDELQTHGWDSESGTIIFLHNWSKGNFSNEELSDLELLFRFYLFGLTREIQDHASQDYSKYPFEVQVKAGCELHSGKSPEGFFQVAFNGLDLLSFQNTTWVPSPGCGSLAQSVCHLLNHQYEGVTETVYNLIRSTCPRFLLGLLDAGKMYVHRQVRPEAWLSSRPSLGSGQLLLVCHASGFYPKPVWVTWMRNEQEQLGTKHGDILPNADGTWYLQVILEVASEEPAGLSCRVRHSSLGGQDIILYWGHHFSMNWIALVVIVPLVILIVLVLWFKKHCSYQDIL

SEQ ID NO: 8565 - protein, 335 aa, Homo sapiens
MGCLLFLLLWALLQAWGSAEVPQRLFPLRCLQISSFANSSWTRTDGLAWLGELQTHSWSNDSDTVRSLKPWSQGTFSDQQWETLQHIFRVYRSSFTRDVKEFAKMLRLSYPLELQVSAGCEVHPGNASNNFFHVAFQGKDILSFQGTSWEPTQEAPLWVNLAIQVLNQDKWTRETVQWLLNGTCPQFVSGLLESGKSELKKQVKPKAWLSRGPSPGPGRLLLVCHVSGFYPKPVWVKWMRGEQEQQGTQPGDILPNADETWYLRATLDVVAGEAAGLSCRVKHSSLEGQDIVLYWGGSYTSMGLIALAVLACLLFLLIVGFTSRFKRQTSYQGVL

SEQ ID NO: 8566 - protein, 571 aa, Homo sapiens
MNEAIPSGKETSIELDVHHPPTVTLSIEPQTVQEGERVVFTCQATANPEILGYRWAKGGFLIEDAHESRYETNVDYSFFTEPVSCEVHNKVGSTNVSTLVNVHFAPRIVVDPKPTTTDIGSDVTLTCVWVGNPPLTLTWTKKDSNMGPRPPGSPPEAALSAQVLSNSNQLLLKSVTQADAGTYTCRAIVPRIGVAEREVPLYVNGPPIISSEAVQYAVRGDGGKVECFIGSTPPPDRIAWAWKENFLEVGTLERYTVERTNSGSGVLSTLTINNVMEADFQTHYNCTAWNSFGPGTAIIQLEEREVLPVGIIAGATIGASILLIFFFIALVFFLYRRRKGSRKDVTLRKLDIKVETVNREPLTMHSDREDDTASVSTATRVMKAIYSSFKDDVDLKQDLRCDTIDTREEYEMKDPTNGYYNVRAHEDRPSSRAVLYADYRAPGPARFDGRPSSRLSHSSGYAQLNTYSRGPASDYGPEPTPPGPAAPAGTDTTSQLSYENYEKFNSHPFPGAAGYPTYRLGYPQAPPSGLERTPYEAYDPIGKYATATRFSYTSQHSDYGQRFQQRMQTHV

SEQ ID NO: 8567 - protein, 657 aa, Homo sapiens
MLSLLVWILTLSDTFSQVPPEDTRIDGGPVILLQAGTPHNLTCRAFNAKPAATIIWFRDGTQQEGAVASTELLKDGKRETTVSQLLINPTDLDIGRVFTCRSMNEAIPSGKETSIELDVHHPPTVTLSIEPQTVQEGERVVFTCQATANPEILGYRWAKGGFLIEDAHESRYETNVDYSFFTEPVSCEVHNKVGSTNVSTLVNVHFAPRIVVDPKPTTTDIGSDVTLTCVWVGNPPLTLTWTKKDSNMVLSNSNQLLLKSVTQADAGTYTCRAIVPRIGVAEREVPLYVNGPPIISSEAVQYAVRGDGGKVECFIGSTPPPDRIAWAWKENFLEVGTLERYTVERTNSGSGVLSTLTINNVMEADFQTHYNCTAWNSFGPGTAIIQLEEREVLPVGIIAGATIGASILLIFFFIALVFFLYRRRKGSRKDVTLRKLDIKVETVNREPLTMHSDREDDTASVSTATRVMKAIYSSFKDDVDLKQDLRCDTIDTREEYEMKDPTNGYYNVRAHEDRPSSRAVLYADYRAPGPARFDGRPSSRLSHSSGYAQLNTYSRGPASDYGPEPTPPGPAAPAGTDTTSQLSYENYEKFNSHPFPGAAGYPTYRLGYPQAPPSGLERTPYEAYDPIGKYATATRFSYTSQHSDYGQRFQQRMQTHV

SEQ ID NO: 8568 - protein, 347 aa, Homo sapiens
MALLFSLILAICTRPGFLASPSGVRLVGGLHRCEGRVEVEQKGQWGTVCDDGWDIKDVAVLCRELGCGAASGTPSGILYEPPAEKEQKVLIQSVSCTGTEDTLAQCEQEEVYDCSHDEDAGASCENPESSFSPVPEGVRLADGPGHCKGRVEVKHQNQWYTVCQTGWSLRAAKVVCRQLGCGRAVLTQKRCNKHAYGRKPIWLSQMSCSGREATLQDCPSGPWGKNTCNHDEDTWVECEDPFDLRLVGGDNLCSGRLEVLHKGVWGSVCDDNWGEKEDQVVCKQLGCGKSLSPSFRDRKCYGPGVGRIWLDNVRCSGEEQSLEQCQHRFWGFHDCTHQEDVAVICSG

SEQ ID NO: 8569 - protein, 429 aa, Homo sapiens
MLPRLLLLICAPLCEPAELFLIASPSHPTEGSPVTLTCKMPFLQSSDAQFQFCFFRDTRALGPGWSSSPKLQIAAMWKEDTGSYWCEAQTMASKVLRSRRSQINVHRVPVADVSLETQPPGGQVMEGDRLVLICSVAMGTGDITFLWYKGAVGLNLQSKTQRSLTAEYEIPSVRESDAEQYYCVAENGYGPSPSGLVSITVRIPVSRPILMLRAPRAQAAVEDVLELHCEALRGSPPILYWFYHEDITLGSRSAPSGGGASFNLSLTEEHSGNYSCEANNGLGAQRSEAVTLNFTVPTGARSNHLTSGVIEGLLSTLGPATVALLFCYGLKRKIGRRSARDPLRSLPSPLPQEFTYLNSPTPGQLQPIYENVNVVSGDEVYSLAYYNQPEQESVAAETLGTHMEDKVSLDIYSRLRKANITDVDYEDAM

SEQ ID NO: 8570 - protein, 734 aa, Homo sapiens
MLLWLLLLILTPGREQSGVAPKAVLLLNPPWSTAFKGEKVALICSSISHSLAQGDTYWYHDEKLLKIKHDKIQITEPGNYQCKTRGSSLSDAVHVEFSPDWLILQALHPVFEGDNVILRCQGKDNKNTHQKVYYKDGKQLPNSYNLEKITVNSVSRDNSKYHCTAYRKFYILDIEVTSKPLNIQVQELFLHPVLRASSSTPIEGSPMTLTCETQLSPQRPDVQLQFSLFRDSQTLGLGWSRSPRLQIPAMWTEDSGSYWCEVETVTHSIKKRSLRSQIRVQRVPVSNVNLEIRPTGGQLIEGENMVLICSVAQGSGTVTFSWHKEGRVRSLGRKTQRSLLAELHVLTVKESDAGRYYCAADNVHSPILSTWIRVTVRIPVSHPVLTFRAPRAHTVVGDLLELHCESLRGSPPILYRFYHEDVTLGNSSAPSGGGASFNLSLTAEHSGNYSCDADNGLGAQHSHGVSLRVTVPVSRPVLTLRAPGAQAVVGDLLELHCESLRGSFPILYWFYHEDDTLGNISAHSGGGASFNLSLTTEHSGNYSCEADNGLGAQHSKVVTLNVTGTSRNRTGLTAAGITGLVLSILVLAAAAALLHYARARRKPGGLSATGTSSHSPSECQEPSSSRPSRIDPQEPTHSKPLAPMELEPMYSNVNPGDSNPIYSQIWSIQHTKENSANCPMMHQEHEELTVLYSELKKTHPDDSAGEASSRGRAHEEDDEENYENVPRVLLASDH

SEQ ID NO: 8571 - protein, 742 aa, Homo sapiens
MLLWLLLLILTPGREQSGVAPKAVLLLNPPWSTAFKGEKVALICSSISHSLAQGDTYWYHDEKLLKIKHDKIQITEPGNYQCKTRGSSLSDAVHVEFSPDWLILQALHPVFEGDNVILRCQGKDNKNTHQKVYYKDGKQLPNSYNLEKITVNSVSRDNSKYHCTAYRKFYILDIEVTSKPLNIQVQELFLHPVLRASSSTPIEGSPMTLTCETQLSPQRPDVQLQFSLFRDSQTLGLGWSRSPRLQIPAMWTEDSGSYWCEVETVTHSIKKRSLRSQIRVQRVPVSNVNLEIRPTGGQLIEGENMVLICSVAQGSGTVTFSWHKEGRVRSLGRKTQRSLLAELHVLTVKESDAGRYYCAADNVHSPILSTWIRVTVRIPVSHPVLTFRAPRAHTVVGDLLELHCESLRGSPPILYRFYHEDVTLGNSSAPSGGGASFNLSLTAEHSGNYSCDADNGLGAQHSHGVSLRVTVPVSRPVLTLRAPGAQAVVGDLLELHCESLRGSFPILYWFYHEDDTLGNISAHSGGGASFNLSLTTEHSGNYSCEADNGLGAQHSKVVTLNVTGTSRNRTGLTAAGITGLVLSILVLAAAAALLHYARARRKPGGLSATGTSSHSPSECQEPSSSRPSRIDPQEPTHSKPLAPMELEPMYSNVNPGDSNPIYSQIWSIQHTKENSANCPMMHQEHEELTVLYSELKKTHPDDSAGEASSRGRAHEEDDEENYENILNPRKNKVQDFPCLCNT

SEQ ID NO: 8572 - protein, 592 aa, Homo sapiens
MLLWVILLVLAPVSGQFARTPRPIIFLQPPWTTVFQGERVTLTCKGFRFYSPQKTKWYHRYLGKEILRETPDNILEVQESGEYRCQAQGSPLSSPVHLDFSSASLILQAPLSVFEGDSVVLRCRAKAEVTLNNTIYKNDNVLAFLNKRTDFHIPHACLKDNGAYRCTGYKESCCPVSSNTVKIQVQEPFTRPVLRASSFQPISGNPVTLTCETQLSLERSDVPLRFRFFRDDQTLGLGWSLSPNFQITAMWSKDSGFYWCKAATMPYSVISDSPRSWIQVQIPASHPVLTLSPEKALNFEGTKVTLHCETQEDSLRTLYRFYHEGVPLRHKSVRCERGASISFSLTTENSGNYYCTADNGLGAKPSKAVSLSVTVPVSHPVLNLSSPEDLIFEGAKVTLHCEAQRGSLPILYQFHHEGAALERRSANSAGGVAISFSLTAEHSGNYYCTADNGFGPQRSKAVSLSVTVPVSHPVLTLSSAEALTFEGATVTLHCEVQRGSPQILYQFYHEDMPLWSSSTPSVGRVSFSFSLTEGHSGNYYCTADNGFGPQRSEVVSLFVTGKCWVLASHPPLAEFSLTHSFKNLFALSSFLP

SEQ ID NO: 8573 - protein, 759 aa, Homo sapiens
MLLWVILLVLAPVSGQFARTPRPIIFLQPPWTTVFQGERVTLTCKGFRFYSPQKTKWYHRYLGKEILRETPDNILEVQESGEYRCQAQGSPLSSPVHLDFSSASLILQAPLSVFEGDSVVLRCRAKAEVTLNNTIYKNDNVLAFLNKRTDFHIPHACLKDNGAYRCTGYKESCCPVSSNTVKIQVQEPFTRPVLRASSFQPISGNPVTLTCETQLSLERSDVPLRFRFFRDDQTLGLGWSLSPNFQITAMWSKDSGFYWCKAATMPYSVISDSPRSWIQVQIPASHPVLTLSPEKALNFEGTKVTLHCETQEDSLRTLYRFYHEGVPLRHKSVRCERGASISFSLTTENSGNYYCTADNGLGAKPSKAVSLSVTVPVSHPVLNLSSPEDLIFEGAKVTLHCEAQRGSLPILYQFHHEGAALERRSANSAGGVAISFSLTAEHSGNYYCTADNGFGPQRSKAVSLSVTVPVSHPVLTLSSAEALTFEGATVTLHCEVQRGSPQILYQFYHEDMPLWSSSTPSVGRVSFSFSLTEGHSGNYYCTADNGFGPQRSEVVSLFVTVPVSRPILTLRVPRAQAVVGDLLELHCEAPRGSPPILYWFYHEDVTLGSSSAPSGGEASFNLSLTAEHSGNYSCEANNGLVAQHSDTISLSVIVPVSRPILTFRAPRAQAVVGDLLELHCEALRGSSPILYWFYHEDVTLGKISAPSGGGASFNLSLTTEHSGIYSCEADNGLEAQRSEMVTLKVAGEWALPTSSTSEN

SEQ ID NO: 8574 - protein, 512 aa, Homo sapiens
MKAGCSIVEKPEGGGGYQFPDWAYKTESSPGSRQIQLWHFILELLQKEEFRHVIAWQQGEYGEFVIKDPDEVARLWGRRKCKPQMNYDKLSRALRYYYNKRILHKTKGKRFTYKFNFNKLVMPNYPFINIRSSGVVPQSAPPVPTASSRFHFPPLDTHSPTNDVQPGRFSASSLTASGQESSNGTDRKTELSELEDGSAADWRRGVDPVSSRNAIGGGGIGHQKRKPDIMLPLFARPGMYPDPHSPFAVSPIPGRGGVLNVPISPALSLTPTIFSYSPSPGLSPFTSSSCFSFNPEEMKHYLHSQACSVFNYHLSPRTFPRYPGLMVPPLQCQMHPEESTQFSIKLQPPPVGRKNRERVESSEESAPVTTPTMASIPPRIKVEPASEKDPESLRQSAREKEEHTQEEGTVPSRTIEEEKGTIFARPAAPPIWPSVPISTPSGEPLEVTEDSEDRPGKEPSAPEKKEDALMPPKLRLKRRWNDDPEARELSKSGKFLWNGSGPQGLATAAADA

SEQ ID NO: 8575 - protein, 1562 aa, Homo sapiens
MSVRLPQSIDRLSSLSSLGDSAPERKSPSHHRQPSDASETTGLVQRCVIIQKDQHGFGFTVSGDRIVLVQSVRPGGAAMKAGVKEGDRIIKVNGTMVTNSSHLEVVKLIKSGAYVALTLLGSSPSSMGISGLQQDPSPAGAPRITSVIPSPPPPPPLPPPQRITGPKPLQDPEVQKHATQILRNMLRQEEKELQRICEVYSRNPASLLEEQIEGARRRVTQLQLKIQQETGGSVDILPLYGDTSQRPSEGRLSLDSQEGDSGLDSGTERFPSLSESLMNRNSVLSDPGLDSPRTSPVIMARVAQHHRRQGSDAAVPSTGDQGVDQSPKPLIIGPEEDYDPGYFNNESDIIFQDLEKLKSRPAHLGVFLRYIFSQADPSPLLFYLCAEVYQQASPKDSRSLGKDIWNIFLEKNAPLRVKIPEMLQAEIDSRLRNSEDARGVLCEAQEAAMPEIQEQIHDYRTKRTLGLGSLYGENDLLDLDGDPLRERQVAEKQLAALGDILSKYEEDRSAPMDFALNTYMSHAGIRLREARPSNTAEKAQSAPDKDKWLPFFPKTKKSSNSKKEKDALEDKKRNPILKYIGKPKSSSQSTFHIPLSPVEVKPGNVRNIIQHFENNQQYDAPEPGTQRLSTGSFPEDLLESDSSRSEIRLGRSESLKGREEMKRSRKAENVPRSRSDVDMDAAAEATRLHQSASSSTSSLSTRSLENPTPPFTPKMGRRSIESPSLGFCTDTLLPHLLEDDLGQLSDLEPEPDAQNWQHTVGKDVVAGLTQREIDRQEVINELFVTEASHLRTLRVLDLIFYQRMKKENLMPREELARLFPNLPELIEIHNSWCEAMKKLREEGPIIKEISDLMLARFDGPAREELQQVAAQFCSYQSIALELIKTKQRKESRFQLFMQEAESHPQCRRLQLRDLIISEMQRLTKYPLLLESIIKHTEGGTSEHEKLCRARDQCREILKYVNEAVKQTENRHRLEGYQKRLDATALERASNPLAAEFKSLDLTTRKMIHEGPLTWRISKDKTLDLHVLLLEDLLVLLQKQDEKLLLKCHSKTAVGSSDSKQTFSPVLKLNAVLIRSVATDKRAFFIICTSKLGPPQIYELVALTSSDKNTWMELLEEAVRNATRHPGAAPMPVHPPPPGPREPAQQGPTPSRVELDDSDVFHGEPEPEELPGGTGSQQRVQGKHQVLLEDPEQEGSAEEEELGVLPCPSTSLDGENRGIRTRNPIHLAFPGPLFMEGLADSALEDVENLRHLILWSLLPGHTMETQAAQEPEDDLTPTPSVISVTSHPWDPGSPGQAPPGGEGDNTQLAGLEGERPEQEDMGLCSLEHLPPRTRNSGIWESPELDRNLAEDASSTEAAGGYKVVRKAEVAGSKVVPALPESGQSEPGPPEVEGGTKATGNCFYVSMPSGPPDSSTDHSEAPMSPPQPDSLPAGQTEPQPQLQGGNDDPRRPSRSPPSLALRDVGMIFHTIEQLTLKLNRLKDMELAHRELLKSLGGESSGGTTPVGSFHTEAARWTDGSLSPPAKEPLASDSRNSHELGPCPEDGSDAPLEDSTADAAASPGP

SEQ ID NO: 8576 - protein, 1297 aa, Homo sapiens
MAVPSLWPWGACLPVIFLSLGFGLDTVEVCPSLDIRSEVAELRQLENCSVVEGHLQILLMFTATGEDFRGLSFPRLTQVTDYLLLFRVYGLESLRDLFPNLAVIRGTRLFLGYALVIFEMPHLRDVALPALGAVLRGAVRVEKNQELCHLSTIDWGLLQPAPGANHIVGNKLGEECADVCPGVLGAAGEPCAKTTFSGHTDYRCWTSSHCQRVCPCPHGMACTARGECCHTECLGGCSQPEDPRACVACRHLYFQGACLWACPPGTYQYESWRCVTAERCASLHSVPGRASTFGIHQGSCLAQCPSGFTRNSSSIFCHKCEGLCPKECKVGTKTIDSIQAAQDLVGCTHVEGSLILNLRQGYNLEPQLQHSLGLVETITGFLKIKHSFALVSLGFFKNLKLIRGDAMVDGNYTLYVLDNQNLQQLGSWVAAGLTIPVGKIYFAFNPRLCLEHIYRLEEVTGTRGRQNKAEINPRTNGDRAACQTRTLRFVSNVTEADRILLRWERYEPLEARDLLSFIVYYKESPFQNATEHVGPDACGTQSWNLLDVELPLSRTQEPGVTLASLKPWTQYAVFVRAITLTTEEDSPHQGAQSPIVYLRTLPAAPTVPQDVISTSNSSSHLLVRWKPPTQRNGNLTYYLVLWQRLAEDGDLYLNDYCHRGLRLPTSNNDPRFDGEDGDPEAEMESDCCPCQHPPPGQVLPPLEAQEASFQKKFENFLHNAITIPISPWKVTSINKSPQRDSGRHRRAAGPLRLGGNSSDFEIQEDKVPRERAVLSGLRHFTEYRIDIHACNHAAHTVGCSAATFVFARTMPHREADGIPGKVAWEASSKNSVLLRWLEPPDPNGLILKYEIKYRRLGEEATVLCVSRLRYAKFGGVHLALLPPGNYSARVRATSLAGNGSWTDSVAFYILGPEEEDAGGLHVLLTATPVGLTLLIVLAALGFFYGKKRNRTLYASVNPEYFSASDMYVPDEWEVPREQISIIRELGQGSFGMVYEGLARGLEAGEESTPVALKTVNELASPRECIEFLKEASVMKAFKCHHVVRLLGVVSQGQPTLVIMELMTRGDLKSHLRSLRPEAENNPGLPQPALGEMIQMAGEIADGMAYLAANKFVHRDLAARNCMVSQDFTVKIGDFGMTRDVYETDYYRKGGKGLLPVRWMAPESLKDGIFTTHSDVWSFGVVLWEIVTLAEQPYQGLSNEQVLKFVMDGGVLEELEGCPLQLQELMSRCWQPNPRLRPSFTHILDSIQEELRPSFRLLSFYYSPECRGARGSLPTTDAEPDSSPTPRDCSPQNGGPGH

SEQ ID NO: 8577 - protein, 790 aa, Homo sapiens
MLRGGRRGQLGWHSWAAGPGSLLAWLILASAGAAPCPDACCPHGSSGLRCTRDGALDSLHHLPGAENLTELYIENQQHLQHLELRDLRGLGELRNLTIVKSGLRFVAPDAFHFTPRLSRLNLSFNALESLSWKTVQGLSLQELVLSGNPLHCSCALRWLQRWEEEGLGGVPEQKLQCHGQGPLAHMPNASCGVPTLKVQVPNASVDVGDDVLLRCQVEGRGLEQAGWILTELEQSATVMKSGGLPSLGLTLANVTSDLNRKNVTCWAENDVGRAEVSVQVNVSFPASVQLHTAVEMHHWCIPFSVDGQPAPSLRWLFNGSVLNETSFIFTEFLEPAANETVRHGCLRLNQPTHVNNGNYTLLAANPFGQASASIMAAFMDNPFEFNPEDPIPDTNSTSGDPVEKKDETPFGVSVAVGLAVFACLFLSTLLLVLNKCGRRNKFGINRPAVLAPEDGLAMSLHFMTLGGSSLSPTEGKGSGLQGHIIENPQYFSDACVHHIKRRDIVLKWELGEGAFGKVFLAECHNLLPEQDKMLVAVKALKEASESARQDFQREAELLTMLQHQHIVRFFGVCTEGRPLLMVFEYMRHGDLNRFLRSHGPDAKLLAGGEDVAPGPLGLGQLLAVASQVAAGMVYLAGLHFVHRDLATRNCLVGQGLVVKIGDFGMSRDIYSTDYYRVGGRTMLPIRWMPPESILYRKFTTESDVWSFGVVLWEIFTYGKQPWYQLSNTEAIDCITQGRELERPRACPPEVYAIMRGCWQREPQQRHSIKDVHARLQALAQAPPVYLDVLG

SEQ ID NO: 8578 - protein, 371 aa, Homo sapiens
MSPSTFQITDMTRRSCQNLGYTAASPQAPEAASNTGNAERAEEVPGEGSLFLQAETRAWFQKTQAHWLLQHGAAPAWFHGFITRREAERLLEPKPQGCYLVRFSESAVTFVLTYRSRTCCRHFLLAQLRDGRHVVLGEDSAHARLQDLLLHYTAHPLSPYGETLTEPLARQTPEPAGLSLRTEESNFGSKSQDPNPQYSPIIKQGQAPVPMQKEGAGEKEPSQLLRPKPPIPAKPQLPPEVYTIPVPRHRPAPRPKPSNPIYNEPDEPIAFYAMGRGSPGEAPSNIYVEVEDEGLPATLGHPVLRKSWSRPVPGGQNTGGSQLHSENSVIGQGPPLPHQPPPAWRHTLPHNLSRQVLQDRGQAWLPLGPPQ

SEQ ID NO: 8579 - protein, 389 aa, Homo sapiens
MEFPLAQICPQGSHEAPIPTFSTFQITDMTRRSCQNLGYTAASPQAPEAASNTGNAERAEEVPGEGSLFLQAETRAWFQKTQAHWLLQHGAAPAWFHGFITRREAERLLEPKPQGCYLVRFSESAVTFVLTYRSRTCCRHFLLAQLRDGRHVVLGEDSAHARLQDLLLHYTAHPLSPYGETLTEPLARQTPEPAGLSLRTEESNFGSKSQDPNPQYSPIIKQGQAPVPMQKEGAGEKEPSQLLRPKPPIPAKPQLPPEVYTIPVPRHRPAPRPKPSNPIYNEPDEPIAFYAMGRGSPGEAPSNIYVEVEDEGLPATLGHPVLRKSWSRPVPGGQNTGGSQLHSENSVIGQGPPLPHQPPPAWRHTLPHNLSRQVLQDRGQAWLPLGPPQ

SEQ ID NO: 8580 - protein, 256 aa, Homo sapiens
MHPEGGQFVPQLLGHLLATKLKRFLLSKGGRRAQIPDVSRATPHTIDEMPEAAVKSTANKYQVFFFGTHETAFLGPKDLFPYEESKEKFGKPNKRKGFSEGLWEIENNPTVKASGYQSSQKKSCVEEPEPEPEAAEGDGDKKGNAEGSSDEEGKLVIDEPAKEKNEKGALKRRAGDLLEDSPKRPKEAENPEGEEKEAATLEVERPLPMEVEKNSTPSEPGSGRGPPQEEEEEEDEEEEATKEDAEAPGIRDHESL

SEQ ID NO: 8581 - protein, 1472 aa, Homo sapiens
MDTTAAAALPAFVALLLLSPWPLLGSAQGQFSAGGCTFDDGPGACDYHQDLYDDFEWVHVSAQEPHYLPPEMPQGSYMIVDSSDHDPGEKARLQLPTMKENDTHCIDFSYLLYSQKGLNPGTLNILVRVNKGPLANPIWNVTGFTGRDWLRAELAVSTFWPNEYQVIFEAEVSGGRSGYIAIDDIQVLSYPCDKSPHFLRLGDVEVNAGQNATFQCIATGRDAVHNKLWLQRRNGEDIPVAQTKNINHRRFAASFRLQEVTKTDQDLYRCVTQSERGSGVSNFAQLIVREPPRPIAPPQLLGVGPTYLLIQLNANSIIGDGPIILKEVEYRMTSGSWTETHAVNAPTYKLWHLDPDTEYEIRVLLTRPGEGGTGLPGPPLITRTKCAEPMRTPKTLKIAEIQARRIAVDWESLGYNITRCHTFNVTICYHYFRGHNESKADCLDMDPKAPQHVVNHLPPYTNVSLKMILTNPEGRKESEETIIQTDEDVPGPVPVKSLQGTSFENKIFLNWKEPLDPNGIITQYEISYSSIRSFDPAVPVAGPPQTVSNLWNSTHHVFMHLHPGTTYQFFIRASTVKGFGPATAINVTTNISAPTLPDYEGVDASLNETATTITVLLRPAQAKGAPISAYQIVVEELHPHRTKREAGAMECYQVPVTYQNAMSGGAPYYFAAELPPGNLPEPAPFTVGDNRTYQGFWNPPLAPRKGYNIYFQAMSSVEKETKTQCVRIATKAAATEEPEVIPDPAKQTDRVVKIAGISAGILVFILLLLVVILIVKKRRSYYSYSYYLKLAKKRKDAMGNTRQEMTHMVNAMDRSYADQSTLHAEDPLSITFMDQHNFSPRLPNDPLVPTAVLVPITDENHSATAESSRLLDVPRYLCEGTESPYQTGQLHPAIRVADLLQHINLMKTSDSYGFKEEYESFFEGQSASWDVAKKDQNRAKNRYGNIIAYDHSRVILQPVEDDPSSDYINANYIDIWLYRDGYQRPSHYIATQGPVHETVYDFWRMIWQEQSACIVMVTNLVEVGRVKCYKYWPDDTEVYGDFKVTCVEMEPLAEYVVRTFTLERRGYNEIREVKQFHFTGWPDHGVPYHATGLLSFIRRVKLSNPPSAGPIVVHCSAGAGRTGCYIVIDIMLDMAEREGVVDIYNCVKALRSRRINMVQTEEQYIFIHDAILEACLCGETAIPVCEFKAAYFDMIRIDSQTNSSHLKDEFQTLNSVTPRLQAEDCSIACLPRNHDKNRFMDMLPPDRCLPFLITIDGESSNYINAALMDSYRQPAAFIVTQYPLPNTVKDFWRLVYDYGCTSIVMLNEVDLSQGCPQYWPEEGMLRYGPIQVECMSCSMDCDVINRIFRICNLTRPQEGYLMVQQFQYLGWASHREVPGSKRSFLKLILQVEKWQEECEEGEGRTIIHCLNGGGRSGMFCAIGIVVEMVKRQNVVDVFHAVKTLRNSKPNMVEAPEQYRFCYDVALEYLESS

SEQ ID NO: 8582 - protein, 233 aa, Homo sapiens
MEQRAGGNRVQTSTLNCAGAAVIDEMPEAAVKSTANKYQVFFFGTHETAFLGPKDLFPYEESKEKFGKPNKRKGFSEGLWEIENNPTVKASGYQSSQKKSCVEEPEPEPEAAEGDGDKKGNAEGSSDEEGKLVIDEPAKEKNEKGALKRRAGDLLEDSPKRPKEAENPEGEEKEAATLEVERPLPMEVEKNSTPSEPGSGRGPPQEEEEEEDEEEEATKEDAEAPGIRDHESL

SEQ ID NO: 8583 - protein, 1458 aa, Homo sapiens
MDTTAAAALPAFVALLLLSPWPLLGSAQGQFSAGGCTFDDGPGACDYHQDLYDDFEWVHVSAQEPHYLPPEMPQGSYMIVDSSDHDPGEKARLQLPTMKENDTHCIDFSYLLYSQKGLNPGTLNILVRVNKGPLANPIWNVTGFTGRDWLRAELAVSTFWPNEYQVIFEAEVSGGRSGYIAIDDIQVLSYPCDKSPHFLRLGDVEVNAGQNATFQCIATGRDAVHNKLWLQRRNGEDIPVAQTKNINHRRFAASFRLQEVTKTDQDLYRCVTQSERGSGVSNFAQLIVREPPRPIAPPQLLGVGPTYLLIQLNANSIIGDGPIILKEVEYRMTSGSWTETHAVNAPTYKLWHLDPDTEYEIRVLLTRPGEGGTGLPGPPLITRTKCAEPMRTPKTLKIAEIQARRIAVDWESLGYNITRCHTFNVTICYHYFRGHNESKADCLDMDPKAPQHVVNHLPPYTNVSLKMILTNPEGRKESEETIIQTDEDVPGPVPVKSLQGTSFENKIFLNWKEPLDPNGIITQYEISYSSIRSFDPAVPVAGPPQTVSNLWNSTHHVFMHLHPGTTYQFFIRASTVKGFGPATAINVTTNISAPTLPDYEGVDASLNETATTITVLLRPAQAKGAPISAYQIVVEELHPHRTKREAGAMECYQVPVTYQNAMSGGAPYYFAAELPPGNLPEPAPFTVGDNRTYQGFWNPPLAPRKGYNIYFQAMSSVEKETKTQCVRIATKAAATEEPEVIPDPAKQTDRVVKIAGISAGILVFILLLLVVILIVKKSKLAKKRKDAMGNTRQEMTHMVNAMDRSYADQSTLHAEDPLSITFMDQHNFSPRLPNDPLVPTAVLDENHSATAESSRLLDVPRYLCEGTESPYQTGQLHPAIRVADLLQHINLMKTSDSYGFKEEYESFFEGQSASWDVAKKDQNRAKNRYGNIIAYDHSRVILQPVEDDPSSDYINANYIDIWLYRDGYQRPSHYIATQGPVHETVYDFWRMIWQEQSACIVMVTNLVEVGRVKCYKYWPDDTEVYGDFKVTCVEMEPLAEYVVRTFTLERRGYNEIREVKQFHFTGWPDHGVPYHATGLLSFIRRVKLSNPPSAGPIVVHCSAGAGRTGCYIVIDIMLDMAEREGVVDIYNCVKALRSRRINMVQTEEQYIFIHDAILEACLCGETAIPVCEFKAAYFDMIRIDSQTNSSHLKDEFQTLNSVTPRLQAEDCSIACLPRNHDKNRFMDMLPPDRCLPFLITIDGESSNYINAALMDSYRQPAAFIVTQYPLPNTVKDFWRLVYDYGCTSIVMLNEVDLSQGCPQYWPEEGMLRYGPIQVECMSCSMDCDVINRIFRICNLTRPQEGYLMVQQFQYLGWASHREVPGSKRSFLKLILQVEKWQEECEEGEGRTIIHCLNGGGRSGMFCAIGIVVEMVKRQNVVDVFHAVKTLRNSKPNMVEAPEQYRFCYDVALEYLESS

SEQ ID NO: 8584 - protein, 1446 aa, Homo sapiens
MDTTAAAALPAFVALLLLSPWPLLGSAQGQFSAGGCTFDDGPGACDYHQDLYDDFEWVHVSAQEPHYLPPEMPQGSYMIVDSSDHDPGEKARLQLPTMKENDTHCIDFSYLLYSQKGLNPGTLNILVRVNKGPLANPIWNVTGFTGRDWLRAELAVSTFWPNEYQVIFEAEVSGGRSGYIAIDDIQVLSYPCDKSPHFLRLGDVEVNAGQNATFQCIATGRDAVHNKLWLQRRNGEDIPVAQTKNINHRRFAASFRLQEVTKTDQDLYRCVTQSERGSGVSNFAQLIVREPPRPIAPPQLLGVGPTYLLIQLNANSIIGDGPIILKEVEYRMTSGSWTETHAVNAPTYKLWHLDPDTEYEIRVLLTRPGEGGTGLPGPPLITRTKCAEPMRTPKTLKIAEIQARRIAVDWESLGYNITRCHTFNVTICYHYFRGHNESKADCLDMDPKAPQHVVNHLPPYTNVSLKMILTNPEGRKESEETIIQTDEDVPGPVPVKSLQGTSFENKIFLNWKEPLDPNGIITQYEISYSSIRSFDPAVPVAGPPQTVSNLWNSTHHVFMHLHPGTTYQFFIRASTVKGFGPATAINVTTNISAPTLPDYEGVDASLNETATTITVLLRPAQAKGAPISAYQIVVEELHPHRTKREAGAMECYQVPVTYQNAMSGGAPYYFAAELPPGNLPEPAPFTVGDNRTYQGFWNPPLAPRKGYNIYFQAMSSVEKETKTQCVRIATKAAATEEPEVIPDPAKQTDRVVKIAGISAGILVFILLLLVVILIVKKSKLAKKRKDAMGNTRQEMTHMVNAMDRSYADQSTLHAEDPLSITFMDQHNFSPRYENHSATAESSRLLDVPRYLCEGTESPYQTGQLHPAIRVADLLQHINLMKTSDSYGFKEEYESFFEGQSASWDVAKKDQNRAKNRYGNIIAYDHSRVILQPVEDDPSSDYINANYIDIWLYRDGYQRPSHYIATQGPVHETVYDFWRMIWQEQSACIVMVTNLVEVGRVKCYKYWPDDTEVYGDFKVTCVEMEPLAEYVVRTFTLERRGYNEIREVKQFHFTGWPDHGVPYHATGLLSFIRRVKLSNPPSAGPIVVHCSAGAGRTGCYIVIDIMLDMAEREGVVDIYNCVKALRSRRINMVQTEEQYIFIHDAILEACLCGETAIPVCEFKAAYFDMIRIDSQTNSSHLKDEFQTLNSVTPRLQAEDCSIACLPRNHDKNRFMDMLPPDRCLPFLITIDGESSNYINAALMDSYRQPAAFIVTQYPLPNTVKDFWRLVYDYGCTSIVMLNEVDLSQGCPQYWPEEGMLRYGPIQVECMSCSMDCDVINRIFRICNLTRPQEGYLMVQQFQYLGWASHREVPGSKRSFLKLILQVEKWQEECEEGEGRTIIHCLNGGGRSGMFCAIGIVVEMVKRQNVVDVFHAVKTLRNSKPNMVEAPEQYRFCYDVALEYLESS

SEQ ID NO: 8585 - protein, 1439 aa, Homo sapiens
MDTTAAAALPAFVALLLLSPWPLLGSAQGQFSAGGCTFDDGPGACDYHQDLYDDFEWVHVSAQEPHYLPPEMPQGSYMIVDSSDHDPGEKARLQLPTMKENDTHCIDFSYLLYSQKGLNPGTLNILVRVNKGPLANPIWNVTGFTGRDWLRAELAVSTFWPNEYQVIFEAEVSGGRSGYIAIDDIQVLSYPCDKSPHFLRLGDVEVNAGQNATFQCIATGRDAVHNKLWLQRRNGEDIPVAQTKNINHRRFAASFRLQEVTKTDQDLYRCVTQSERGSGVSNFAQLIVREPPRPIAPPQLLGVGPTYLLIQLNANSIIGDGPIILKEVEYRMTSGSWTETHAVNAPTYKLWHLDPDTEYEIRVLLTRPGEGGTGLPGPPLITRTKCAEPMRTPKTLKIAEIQARRIAVDWESLGYNITRCHTFNVTICYHYFRGHNESKADCLDMDPKAPQHVVNHLPPYTNVSLKMILTNPEGRKESEETIIQTDEDVPGPVPVKSLQGTSFENKIFLNWKEPLDPNGIITQYEISYSSIRSFDPAVPVAGPPQTVSNLWNSTHHVFMHLHPGTTYQFFIRASTVKGFGPATAINVTTNISAPTLPDYEGVDASLNETATTITVLLRPAQAKGAPISAYQIVVEELHPHRTKREAGAMECYQVPVTYQNAMSGGAPYYFAAELPPGNLPEPAPFTVGDNRTYQGFWNPPLAPRKGYNIYFQAMSSVEKETKTQCVRIATKAATEEPEVIPDPAKQTDRVVKIAGISAGILVFILLLLVVILIVKKSKLAKKRKDAMGNTRQEMTHMVNAMDRSYADQSTLHAEDPLSITFMDQHNFSPRYENHSATAESSRLLDVPRYLCEGTESPYQTGQLHPAIRVADLLQHINLMKTSDSYGFKEEYESFFEGQSASWDVAKKDQNRAKNRYGNIIAYDHSRVILQPVEDDPSSDYINANYIDGYQRPSHYIATQGPVHETVYDFWRMIWQEQSACIVMVTNLVEVGRVKCYKYWPDDTEVYGDFKVTCVEMEPLAEYVVRTFTLERRGYNEIREVKQFHFTGWPDHGVPYHATGLLSFIRRVKLSNPPSAGPIVVHCSAGAGRTGCYIVIDIMLDMAEREGVVDIYNCVKALRSRRINMVQTEEQYIFIHDAILEACLCGETAIPVCEFKAAYFDMIRIDSQTNSSHLKDEFQTLNSVTPRLQAEDCSIACLPRNHDKNRFMDMLPPDRCLPFLITIDGESSNYINAALMDSYRQPAAFIVTQYPLPNTVKDFWRLVYDYGCTSIVMLNEVDLSQGCPQYWPEEGMLRYGPIQVECMSCSMDCDVINRIFRICNLTRPQEGYLMVQQFQYLGWASHREVPGSKRSFLKLILQVEKWQEECEEGEGRTIIHCLNGGGRSGMFCAIGIVVEMVKRQNVVDVFHAVKTLRNSKPNMVEAPEQYRFCYDVALEYLESS

SEQ ID NO: 8586 - protein, 1621 aa, Homo sapiens
MEGCMGEESFQMWELNRRLEAYLARVKALEEQNELLSAELGGLRAQSADTSWRAHADDELAALRALVDQRWREKHAAEVARDNLAEELEGVAGRCQQLRLARERTTEEVARNRRAVEAEKCARAWLSSQVAELERELEALRVAHEEERVGLNAQAACAPRCPAPPRGPPAPAPEVEELARRLGEAWRGAVRGYQERVAHMETSLGQARERLGRAVQGAREGRLELQQLQAERGGLLERRAALEQRLEGRWQERLRATEKFQLAVEALEQEKQGLQSQIAQVLEGRQQLAHLKMSLSLEVATYRTLLEAENSRLQTPGGGSKTSLSFQDPKLELQFPRTPEGRRLGSLLPVLSPTSLPSPLPATLETPVPAFLKNQEFLQARTPTLASTPIPPTPQAPSPAVDAEIRAQDAPLSLLQTQGGRKQAPEPLRAEARVAIPASVLPGPEEPGGQRQEASTGQSPEDHASLAPPLSPDHSSLEAKDGESGGSRVFSICRGEGEGQIWGLVEKETAIEGKVVSSLQQEIWEEEDLNRKEIQDSQVPLEKETLKSLGEEIQESLKTLENQSHETLERENQECPRSLEEDLETLKSLEKENKELLKDVEVVRPLEKEAVGQLKPTGKEDTQTLQSLQKENQELMKSLEGNLETFLFPGTENQELVSSLQENLESLTALEKENQEPLRSPEVGDEEALRPLTKENQEPLRSLEDENKEAFRSLEKENQEPLKTLEEEDQSIVRPLETENHKSLRSLEEQDQETLRTLEKETQQRRRSLGEQDQMTLRPPEKVDLEPLKSLDQEIARPLENENQEFLKSLKEESVEAVKSLETEILESLKSAGQENLETLKSPETQAPLWTPEEINQGAMNPLEKEIQEPLESVEVNQETFRLLEEENQESLRSLGAWNLENLRSPEEVDKESQRNLEEEENLGKGEYQESLRSLEEEGQELPQSADVQRWEDTVEKDQELAQESPPGMAGVENEDEAELNLREQDGFTGKEEVVEQGELNATEEVWIPGEGHPESPEPKEQRGLVEGASVKGGAEGLQDPEGQSQQVGAPGLQAPQGLPEAIEPLVEDDVAPGGDQASPEVMLGSEPAMGESAAGAEPGPGQGVGGLGDPGHLTREEVMEPPLEEESLEAKRVQGLEGPRKDLEEAGGLGTEFSELPGKSRDPWEPPREGREESEAEAPRGAEEAFPAETLGHTGSDAPSPWPLGSEEAEEDVPPVLVSPSPTYTPILEDAPGPQPQAEGSQEASWGVQGRAEALGKVESEQEELGSGEIPEGPQEEGEESREESEEDELGETLPDSTPLGFYLRSPTSPRWDPTGEQRPPPQGETGKEGWDPAVLASEGLEAPPSEKEEGEEGEEECGRDSDLSEEFEDLGTEAPFLPGVPGEVAEPLGQVPQLLLDPAAWDRDGESDGFADEEESGEEGEEDQEEGREPGAGRWGPGSSVGSLQALSSSQRGEFLESDSVSVSVPWDDSLRGAVAGAPKTALETESQDSAEPSGSEEESDPVSLEREDKVPGPLEIPSGMEDAGPGADIIGVNGQGPNLEGKSQHVNGGVMNGLEQSEEVGQGMPLVSEGDRGSPFQEEEGSALKTSWAGAPVHLGQGQFLKFTQREGDRESWSSGED

SEQ ID NO: 8587 - protein, 1440 aa, Homo sapiens
MDTTAAAALPAFVALLLLSPWPLLGSAQGQFSAGGCTFDDGPGACDYHQDLYDDFEWVHVSAQEPHYLPPEMPQGSYMIVDSSDHDPGEKARLQLPTMKENDTHCIDFSYLLYSQKGLNPGTLNILVRVNKGPLANPIWNVTGFTGRDWLRAELAVSTFWPNEYQVIFEAEVSGGRSGYIAIDDIQVLSYPCDKSPHFLRLGDVEVNAGQNATFQCIATGRDAVHNKLWLQRRNGEDIPVAQTKNINHRRFAASFRLQEVTKTDQDLYRCVTQSERGSGVSNFAQLIVREPPRPIAPPQLLGVGPTYLLIQLNANSIIGDGPIILKEVEYRMTSGSWTETHAVNAPTYKLWHLDPDTEYEIRVLLTRPGEGGTGLPGPPLITRTKCAEPMRTPKTLKIAEIQARRIAVDWESLGYNITRCHTFNVTICYHYFRGHNESKADCLDMDPKAPQHVVNHLPPYTNVSLKMILTNPEGRKESEETIIQTDEDVPGPVPVKSLQGTSFENKIFLNWKEPLDPNGIITQYEISYSSIRSFDPAVPVAGPPQTVSNLWNSTHHVFMHLHPGTTYQFFIRASTVKGFGPATAINVTTNISAPTLPDYEGVDASLNETATTITVLLRPAQAKGAPISAYQIVVEELHPHRTKREAGAMECYQVPVTYQNAMSGGAPYYFAAELPPGNLPEPAPFTVGDNRTYQGFWNPPLAPRKGYNIYFQAMSSVEKETKTQCVRIATKAAATEEPEVIPDPAKQTDRVVKIAGISAGILVFILLLLVVILIVKKSKLAKKRKDAMGNTRQEMTHMVNAMDRSYADQSTLHAEDPLSITFMDQHNFSPRYENHSATAESSRLLDVPRYLCEGTESPYQTGQLHPAIRVADLLQHINLMKTSDSYGFKEEYESFFEGQSASWDVAKKDQNRAKNRYGNIIAYDHSRVILQPVEDDPSSDYINANYIDGYQRPSHYIATQGPVHETVYDFWRMIWQEQSACIVMVTNLVEVGRVKCYKYWPDDTEVYGDFKVTCVEMEPLAEYVVRTFTLERRGYNEIREVKQFHFTGWPDHGVPYHATGLLSFIRRVKLSNPPSAGPIVVHCSAGAGRTGCYIVIDIMLDMAEREGVVDIYNCVKALRSRRINMVQTEEQYIFIHDAILEACLCGETAIPVCEFKAAYFDMIRIDSQTNSSHLKDEFQTLNSVTPRLQAEDCSIACLPRNHDKNRFMDMLPPDRCLPFLITIDGESSNYINAALMDSYRQPAAFIVTQYPLPNTVKDFWRLVYDYGCTSIVMLNEVDLSQGCPQYWPEEGMLRYGPIQVECMSCSMDCDVINRIFRICNLTRPQEGYLMVQQFQYLGWASHREVPGSKRSFLKLILQVEKWQEECEEGEGRTIIHCLNGGGRSGMFCAIGIVVEMVKRQNVVDVFHAVKTLRNSKPNMVEAPEQYRFCYDVALEYLESS

SEQ ID NO: 8588 - protein, 582 aa, Homo sapiens
MSSPNPEDVPRRPEPEPSSSNKKKKKRKWLRQEASIQALTRAGHGALQAGQNHEALNNFQRAFLLASKAPQTRDTPVLQACAFNLGAAYVETGDPARGLELLLRAHPEEKAQGRRHGDQCFNVALAYHALGELPQALAWYHRALGHYQPQGDQGEAWAKMGACYQALGQPELAAHCLQEASQAYAQERQLRAAALALGAAAGCMLKSGRHRVGEVVQVLEKSRRLAERSTERRLLGHLYNDLGLGYSQLQLFPLAVEAFLQALPLCWVPGEQATVLRNLGMAHNALGNYQEAREFHQKAADLHGSVGQRWEQGRSFGSLAFALSQLGDHKAARDNYLHALQAARDSGDMKGQWQACEGLGAAAARLGQYDQALKYYKEALAQCQKEPDSVRERLVAKLADTVRTRLAQVGLVQTHTLTSAPGRLQAPGGASQAEGTPAKAGSSTAGVQHRSSSGWEDEEFEEGHQKKKEERSANVPVRAGPGRPELCFLPGTVNHSHHLASSCPTFTKHTPCRGTVLGKASIYSPGPRAHLPFVGPGPPRAEYPSILVPNGPQANRSSRWPRESLSRSRQRRPMESGICTIV

SEQ ID NO: 8589 - protein, 139 aa, Homo sapiens
MGRKKIQIQRITDERNRQVTFTKRKFGLMKKAYELSVLCDCEIALIIFNHSNKLFQYASTDMDKVLLKYTEYNEPHESRTNADIIETLRKKGFNGCDSPEPDGEDSLEQSPLLEDKYRRASEELDGLFRRYGGPCWGVT

SEQ ID NO: 8590 - protein, 641 aa, Homo sapiens
MALSLEEFVHSLDLRTLPRVLEIQAGIYLEGSIYEMFGNECCFSTGEVIKITGLKVKKIIAEICEQIEGCESLQPFELPMNFPGLFKIVADKTPYLTMEEITRTIHIGPSRLGHPCFYHQKDIKLENLIIKQGEQIMLNSVEEIDGEIMVSCAVARNHQTHSFNLPLSQEGEFYECEDERIYTLKEIVEWKIPKNRTRTVNLTDFSNKWDSTNPFPKDFYGTLILKPVYEIQGVMKFRKDIIRILPSLDVEVKDITDSYDANWFLQLLSTEDLFEMTSKEFPIVTEVIEAPEGNHLPQSILQPGKTIVIHKKYQASRILASEIRSNFPKRHFLIPTSYKGKFKRRPREFPTAYDLEIAKSEKEPLHVVATKAFHSPHDKLSSVSVGDQFLVHQSETTEVLCEGIKKVVNVLACEKILKKSYEAALLPLYMEGGFVEVIHDKKQYPISELCKQFRLPFNVKVSVRDLSIEEDVLAATPGLQLEEDITDSYLLISDFANPTECWEIPVGRLNMTVQLVSNFSRDAEPFLVRTLVEEITEEQYYMMRRYESSASHPPPRPPKHPSVEETKLTLLTLAEERTVDLPKSPKRHHVDITKKLHPNQAGLDSKVLIGSQNDLVDEEKERSNRGATAIAETFKNEKHQK

SEQ ID NO: 8591 - protein, 507 aa, Homo sapiens
MMGHRPVLVLSQNTKRESGRKVQSGNINAAKIQVQHPAAKSMIEISRTQDEEVGDGTTSVIILAGEMLSVAEHFLEQQMHPTVVISAYRKALDDMISTLKKISIPVDISDSDMMLNIINSSITTKAISRWSSLACNIALDAVKMVQFEENGRKEIDIKKYARVEKIPGGIIEDSCVLRGVMINKDVTHPRMRRYIKNPRIVLLDSSLEYKKGESQTDIEITREEDFTRILQMEEEYIQQLCEDIIQLKPDVVITEKGISDLAQHYLMRANITAIRRVRKTDNNRIARACGARIVSRPEELREDDVGTGAGLLEIKKIGDEYFTFITDCKDPKACTILLRGASKEILSEVERNLQDAMQVCRNVLLDPQLVPGGGASEMAVAHALTEKSKAMTGVEQWPYRAVAQALEVIPRTLIQNCGASTIRLLTSLRAKHTQENCETWGVNGETGTLVDMKELGIWEPLAVKLQTYKTAVETAVLLLRIDDIVSGHKKKGDDQSRQGGAPDAGQE

SEQ ID NO: 8592 - protein, 220 aa, Homo sapiens
MAEASSANLGSGCEEKRHEGSSSESVPPGTTISRVKLLDTMVDTFLQKLVAAGSYQRFTDCYKCFYQLQPAMTQQIYDKFIAQLQTSIREEISDIKEEGNLEAVLNALDKIVEEGKVRKEPACNGTPCGAMCRNRRPRTSSWQMPSWQGGGRWRSCSYRSRPSSRPGRCEAQRCRVQQRCSLCVQAGGQRGSEETQALPVSMAGSPSPLPGSPGAQEGGV

SEQ ID NO: 8593 - protein, 205 aa, Homo sapiens
MAEASSANLGSGCEEKRHEGSSSESVPPGTTISRVKLLDTMVDTFLQKLVAAGSYQRFTDCYKCFYQLQPAMTQQIYDKFIAQLQTSIREEISDIKEEGNLEAVLNALDKIVEEGKVRKEPAWRPSGIPEKDLHSVMAPYFLQQRDTLRRHVQKQEAENQQLADAVLAGRRQVEELQLQVQAQQQAWQALHREQRELVAVLREPE

SEQ ID NO: 8594 - protein, 180 aa, Homo sapiens
MAEASSANLGSGCEEKRHEGSSSESVPPGTTISRVKLLDTMVDTFLQKLVAAGSYQRFTDCYKCFYQLQPAMTQQIYDKFIAQLQTSIREEISDIKEEGNLEAVLNALDKIVEEGKVRKEPACNGTPCGAMCRNRRPRTSSWQMPSWQGGGRWRSCSYRSRPSSRPGRLYTENRGSWLLC

SEQ ID NO: 8595 - protein, 629 aa, Homo sapiens
MIPWPASDRKKSECAFKKKSNEELQDSYLLPISEDKVMEGKGQSPFDPAHKHTAVLVDGMLYSGTMNNFLGSEPILMRTLGSQPVLKTDNFLRWLHHDASFVAAIPSTQVVYFFFEETASEFDFFERLHTSRVARVCKNDVGGEKLLQKKWTTFLKAQLLCTQPGQLPFNVIRHAVLLPADSPTAPHIYAVFTSQWQVGGTRSSAVCAFSLLDIERVFKGKYKELNKETSRWTTYRGPETNPRPGSCSVGPSSDKALTFMKDHFLMDEQVVGTPLLVKSGVEYTRLAVETAQGLDGHSHLVMYLGTTTGSLHKAVVSGDSSAHLVEEIQLFPDPEPVRNLQLAPTQGAVFVGFSGGVWRVPRANCSVYESCVDCVLARDPHCAWDPESRTCCLLSAPNLNSWKQDMERGNPEWACASGPMSRSLRPQSRPQIIKEVLAVPNSILELPCPHLSALASYYWSHGPAAVPEASSTVYNGSLLLIVQDGVGGLYQCWATENGFSYPVISYWVDSQDQTLALDPELAGIPREHVKVPLTRVSGGAALAAQQSYWPHFVTVTVLFALVLSGALIILVASPLRALRARGKVQGCETLRPGEKAPLSREQHLQSPKECRTSASDVDADNNCLGTEVA

SEQ ID NO: 8596 - protein, 723 aa, Homo sapiens
MPRVRYYAGDERRALSFFHQKGLQDFDTLLLSGDGNTLYVGAREAILALDIQDPGVPRLKNMIPWPASDRKKSECAFKKKSNETQCFNFIRVLVSYNVTHLYTCGTFAFSPACTFIELQDSYLLPISEDKVMEGKGQSPFDPAHKHTAVLVDGMLYSGTMNNFLGSEPILMRTLGSQPVLKTDNFLRWLHHDASFVAAIPSTQVVYFFFEETASEFDFFERLHTSRVARVCKNDVGGEKLLQKKWTTFLKAQLLCTQPGQLPFNVIRHAVLLPADSPTAPHIYAVFTSQWQVGGTRSSAVCAFSLLDIERVFKGKYKELNKETSRWTTYRGPETNPRPGSCSVGPSSDKALTFMKDHFLMDEQVVGTPLLVKSGVEYTRLAVETAQGLDGHSHLVMYLGTTTGSLHKAVVSGDSSAHLVEEIQLFPDPEPVRNLQLAPTQGAVFVGFSGGVWRVPRANCSVYESCVDCVLARDPHCAWDPESRTCCLLSAPNLNSWKQDMERGNPEWACASGPMSRSLRPQSRPQIIKEVLAVPNSILELPCPHLSALASYYWSHGPAAVPEASSTVYNGSLLLIVQDGVGGLYQCWATENGFSYPVISYWVDSQDQTLALDPELAGIPREHVKVPLTRVSGGAALAAQQSYWPHFVTVTVLFALVLSGALIILVASPLRALRARGKVQGCETLRPGEKAPLSREQHLQSPKECRTSASDVDADNNCLGTEVA

SEQ ID NO: 8597 - protein, 601 aa, Homo sapiens
MAEPSGAETRPPIRVTVKTPKDKEEIVICDRASVKEFKEEISRRFKAQQDQLVLIFAGKILKDGDTLNQHGIKDGLTVHLVIKTPQKAQDPAAATASSPSTPDPASAPSTTPASPATPAQPSTSGSASSDAGSGSRRSSGGGPSPGAGEGSPSATASILSGFGGILGLGSLGLGSANFMELQQQMQRQLMSNPEMLSQIMENPLVQDMMSNPDLMRHMIMANPQMQQLMERNPEISHMLNNPELMRQTMELARNPAMMQEMMRNQDRALSNLESIPGGYNALRRMYTDIQEPMFSAAREQFGNNPFSSLAGNSDSSSSQPLRTENREPLPNPWSPSPPTSQAPGSGGEGTGGSGTSQVHPTVSNPFGINAASLGSGMFNSPEMQALLQQISENPQLMQNVISAPYMRSMMQTLAQNPDFAAQMMVNVPLFAGNPQLQEQLRLQLPVFLQQMQNPESLSILTNPRAMQALLQIQQGLQTLQTEAPGLVPSLGSFGISRTPAPSAGSNAGSTPEAPTSSPATPATSSPTGASSAQQQLMQQMIQLLAGSGNSQVQTPEVRFQQQLEQLNSMGFINREANLQALIATGGDINAAIERLLGSQLS

SEQ ID NO: 8598 - protein, 359 aa, Homo sapiens
MMAGCGEIDHSINMLPTNRKANESCSNTAPSLTVPECAICLQTCVHPVSLPCKHVFCYLCVKGASWLGKRCALCRQEIPEDFLDKPTLLSPEELKAASRGNGEYAWYYEGRNGWWQYDERTSRELEDAFSKGKKNTEMLIAGFLYVADLENMVQYRRNEHGRRRKIKRDIIDIPKKGVAGLRLDCDANTVNLARESSADGADSVSAQSGASVQPLVSSVRPLTSVDGQLTSPATPSPDASTSLEDSFAHLQLSGDNTAERSHRGEGEEDHESPSSGRVPAPDTSIEETESDASSDSEDVSAVVAQHSLTQQRLLVSNANQTVPDRSDRSGTDRSVAGGGTVSVSVRSRRPDGQCTVTEV

SEQ ID NO: 8599 - protein, 264 aa, Homo sapiens [sequence omitted]

SEQ ID NO: 8600 - protein, 292 aa, Homo sapiens
MHLRLISWLFIILNFMEYIGSQNASRGRRQRRMHPNVSQGCQGGCATCSDYNGCLSCKPRLFFALERIGMKQIGVCLSSCPSGYYGTRYPDINKCTKCKADCDTCFNKNFCTKCKSGFYLHLGKCLDNCPEGLEANNHTMECVSIVHCEVSEWNPWSPCTKKGKTCGFKRGTETRVREIIQHPSAKGNLCPPTNETRKCTVQRKKCQKGERGKKGRERKRKKPNKGESKEAIPDSKSLESSKEIPEQRENKQQQKKRKVQDKQKSGIEVTLAEGLTSVSQRTQPTPCRRRYL

SEQ ID NO: 8601 - protein, 564 aa, Homo sapiens
MSAGSATHPGAGGRRSKWDQPAPAPLLFLPPAAPGGEVTSSGGSPGGTTAAPSGALDAAAAVAAKINAMLMAKGKLKPTQNASEKLQAPGKGLTSNKSKDDLVVAEVEINDVPLTCRNLLTRGQTQDEISRLSGAAVSTRGRFMTTEEKAKVGPGDRPLYLHVQGQTRELVDRAVNRIKEIITNGVVKAATGTSPTFNGATVTVYHQPAPIAQLSPAVSQKPPFQSGMHYVQDKLFVGLEHAVPTFNVKEKVEGPGCSYLQHIQIETGAKVFLRGKGSGCIEPASGREAFEPMYIYISHPKPEGLAAAKKLCENLLQTVHAEYSRFVNQINTAVPLPGYTQPSAISSVPPQPPYYPSNGYQSGYPVVPPPQQPVQPPYGVPSIVPPAVSLAPGVLPALPTGVPPVPTQYPITQVQPPASTGQSPMGGPFIPAAPVKTALPAGPQPQPQPQPPLPSQPQAQKRRFTEELPDERESGLLGYQHGPIHMTNLGTGFSSQNEIEGAGSKPASSSGKERERDRQLMPPPAFPVTGIKTESDERNGSGTLTGSHGECDIAGGTGEWLRLV

SEQ ID NO: 8602 - protein, 614 aa, Homo sapiens [sequence omitted]

SEQ ID NO: 8603 - protein, 431 aa, Homo sapiens
MAEITNIRPSFDVSPVVAGLIGASVLVVCVSVTVFVWSCCHQQAEKKQKNPPYKFIHMLKGISIYPETLSNKKKIIKVRRDKDGPGREGGRRNLLVDAAEAGLLSRDKDPRGPSSGSCIDQLPIKMDYGEELRSPITSLTPGESKTTSPSSPEEDVMLGSLTFSVDYNFPKKALVVTIQEAHGLPVMDDQTQGSDPYIKMTILPDKRHRVKTRVLRKTLDPVFDETFTFYGIPYSQLQDLVLHFLVLSFDRFSRDDVIGEVMVPLAGVDPSTGKVQLTRDIIKRNIQKCISRGELQVSLSYQPVAQRMTVVVLKARHLPKMDITGLSGNPYVKVNVYYGRKRIAKKKTHVKKCTLNPIFNESFIYDIPTDLLPDISIEFLVIDFDRTTKNEVVGRLILGAHSVTASGAEHWREVCESPRKPVAKWHSLSEY

SEQ ID NO: 8604 - protein, 2241 aa, Homo sapiens
MLPCKKRRTTVTESLQHKGNQEENNVDLESAVKPESDQVKDLSSVSLSWDPSHGRVAGFEVQSLQDAGNQLGMEDTSLSSGMLTQNTNVPILEGVDVAISQGITLPSLESFHPLNIHIGKGKLHATGSKRGKKMTLRPGPVTQEDRCDHLTLKEPFSGEPSEEVKEEGGKPQMNSEGEIPSLPSGSQSAKPVSQPRKSTQPDVCASPQEKPLRTLFHQPEEEIEDGGLFIPMEEQDNEESEKRRKKKKGTKRKRDGRGQEGTLAYDLKLDDMLDRTLEDGAKQHNLTAVNVRNILHEVITNEHVVAMMKAAISETEDMPMFEPKMTRSKLKEVVEKGVVIPTWNISPIKKANEIKPPQFVDIHLEEDDSSDEEYQPDDEEEDETAEESLLESDVESTASSPRGAKKSRLRQSSEMTETDEESGILSEAEKVTTPAIRHISAEVVPMGPPPPPKPKQTRDSTFMEKLHAVDEELASSPVCMDSFQPMDDSLIAFRTRSKMPLKDVPLGQLEAELQAPDITPDMYDPNTADDEDWKMWLGGLMNDDVGNEDEADDDDDPEYNFLEDLDEPDTEDFRTDRAVRITKKEVNELMEELFETFQDEMGFSNMEDDGPEEEECVAEPRPNFNTPQALRFEEPLANLLNEQHRTVKELFEQLKMKKSSAKQLQEVEKVKPQSEKVHQTLILDPAQRKRLQQQMQQHVQLLTQIHLLATCNPNLNPEATTTRIFLKELGTFAQSSIALHHQYNPKFQTLFQPCNLMGAMQLIEDFSTHVSIDCSPHKTVKKTANEFPCLPKQVAWILATSKVFMYPELLPVCSLKAKNPQDKIVFTKAEDNLLALGLKHFEGTEFPNPLISKYLLTCKTAHQLTVRIKNLNMNRAPDNIIKFYKKTKQLPVLGKCCEEIQPHQWKPPIEREEHRLPFWLKASLPSIQEELRHMADGAREVGNMTGTTEINSDRSLEKDNLELGSESRYPLLLPKGVVLKLKPVATRFPRKAWRQKRSSVLKPLLIQPSPSLQPSFNPGKTPARSTHSEAPPSKMVLRIPHPIQPATVLQTVPGVPPLGVSGGESFESPAALPAVPPEARTSFPLSESQTLLSSAPVPKVMLPSLAPSKFRKPYVRRRPSKRRGVKASPCMKPAPVIHHPASVIFTVPATTVKIVSLGGGCNMIQPVNAAVAQSPQTIPITTLLVNPTSFPCPLNQSLVASSVSPLIVSGNSVNLPIPSTPEDKAHVNVDIACAVADGENAFQGLEPKLEPQELSPLSATVFPKVEHSPGPPLADAECQEGLSENSACRWTVVKTEEGRQALEPLPQGIQESLNNPTPGDLEEIVKMEPEEAREEISGSPERDICDDIKVEHAVELDTGAPSEELSSAGEVTKQTVLQKEEERSQPTKTPSSSQEPPDEGTSGTDVNKGSSKNALSSMDPEVRLSSPPGKPEDSSSVDGQSVGTPVGPETGGEKNGPEEEEEEDFDDLTQDEEDEMSSASEESVLSVPELQETMEKLTWLASERRMSQEGESEEENSQEENSEPEEEEEEEAEGMESLQKEDEMTDEAVGDSAEKPPTFASPETAPEVETSRTPPGESIKAAGKGRNNHRARNKRGSRARASKDTSKLLLLYDEDILERDPLREQKDLAFAQAYLTRVREALQHIPGKYEDFLQVIYEFESSTQRRTAVDLYKSLQILLQDWPQLLKDFAAFLLPEQALACGLFEEQQAFEKSRKFLRQLEICFAENPSHHQKIIKVLQGCADCLPQEITELKTQMWQLLKGHDHLQDEFSIFFDHLRPAASRMGDFEEINWTEEKEYEFDGFEEVALPDVEEEEEPPKIPTASKNKRKKEIGVQNHDKETEWPDGAKDCACSCHEGGPDSKLKKSKRRSCSHCSSKVCDSKSYKSKEPHELVGSSPHREASPMPGAKEAGQGKDMMEEEAPEERESTEATQSRTVRTTRKGEMPVSAGLAVGSTLPSPREVTVTERLLLDGPPPHSPETPQFPPTTGAVLYTVKRNQVGPEVRSCPKASPRLQKEREGQKAVSESEALMLVWDASETEKLPGTVEPPASFLSPVSSKTRDAGRRHVSGKPDTQERWLPSSRARVKTRDRTCPVHESPSGIDTSETSPKAPRGGLAKDSGTQAKGPEGEQQPKAAEATVCANNSKVSSTGEKVVLWTREADRVILTMCQEQGAQPQTFNIISQQLGNKTPAEVSHRFRELMQLFHTACEASSEDEDDATSTSNADQLSDHGDLLSEEELDE

SEQ ID NO: 8605 - protein, 888 aa, Homo sapiens
MAGVGRSGGPWGRTRGGRSGRLGVSLGALSSLPLEELPRPLCCRRCRRHFGFALRGETIPVSVAGSASSQFAPLALHLSLLLSRISASRLTRWPPPDKREGSAVDPGKRRSLAATPSSSLPCTLIALGLRHEKEANELMEDLFETFQDEMGFSNMEDDGPEEEERVAEPQANFNTPQALRFEELLANLLNEQHQIAKELFEQLKMKKPSAKQQKEVEKVKPQCKEVHQTLILDPAQRKRLQQQMQQHVQLLTQIHLLATCNPNLNPEASSTRICLKELGTFAQSSIALHHQYNPKFQTLFQPCNLMGAMQLIEDFSTHVSIDCSPHKTVKKTANEFPCLPKQVAWILATSKVFMYPELLPVCSLKAKNPQDKILFTKAEDNLLALGLKHFEGTEFLNPLISKYLLTCKTARQLTVRIKNLNMNRAPDNIIKFYKKTKQLPVLGKCCEEIQPHQWKPPIEREEHRLPFWLKASLPSIQEELRHMADGAREVGNMTGTTEINSDQGLEKDNSELGSETRYPLLLPKGVVLKLKPVADRFPKKAWRQKRSSVLKPLLIQPSPSLQPSFNPGKTPAQSTHSEAPPSKMVLRIPHPIQPATVLQTVPGVPPLGVSGGESFESPAALPAMPPEARTSFPLSESQTLLSSAPVPKVMMPSPASSMFRKPYVRRRPSKRRGARAFRCIKPAPVIHPASVIFTVPATTVKIVSLGGGCNMIQPVNAAVAQSPQTIPIATLLVNPTSFPCPLNQPLVASSVSPLIVSGNSVNLPIPSTPEDKAHMNVDIACAVADGENAFQGLEPKLEPQELSPLSATVFPKVEHSPGPPPVDKQCQEGLSENSAYRWTVVKTEEGRQALEPLPQGIQESLNNSSPGDLEEVVKMEPEDATEEISGFL

SEQ ID NO: 8606 - protein, 868 aa, Homo sapiens
MAGVGRSGGPWGRTRGGRSGRLGVSLGALSSLPLEELPRPLCCRRCRRHFGFALRGETIPVSVAGSASSQFAPLALHLSLLLSRISASRLTRWPPPDKREGSAVDPGKRRSLAATPSSSLPCTLIALGLRHEKEANELMEDLFETFQDEMGFSNMEDDGPEEEERVAEPQANFNTPQALRFEELLANLLNEQHQIAKELFEQLKMKKPSAKQQKEVEKVKPQCKEVHQTLILDPAQRKRLQQQMQQHVQLLTQIHLLATCNPNLNPEASSTRICLKELGTFAQSSIALHHQYNPKFQTLFQPCNLMGAMQLIEDFSTHVSIDCSPHKTVKKTANEFPCLPKQVAWILATSKVFMYPELLPVCSLKAKNPQDKILFTKAEDNKYLLTCKTARQLTVRIKNLNMNRAPDNIIKFYKKTKQLPVLGKCCEEIQPHQWKPPIEREEHRLPFWLKASLPSIQEELRHMADGAREVGNMTGTTEINSDQGLEKDNSELGSETRYPLLLPKGVVLKLKPVADRFPKKAWRQKRSSVLKPLLIQPSPSLQPSFNPGKTPAQSTHSEAPPSKMVLRIPHPIQPATVLQTVPGVPPLGVSGGESFESPAALPAMPPEARTSFPLSESQTLLSSAPVPKVMMPSPASSMFRKPYVRRRPSKRRGARAFRCIKPAPVIHPASVIFTVPATTVKIVSLGGGCNMIQPVNAAVAQSPQTIPIATLLVNPTSFPCPLNQPLVASSVSPLIVSGNSVNLPIPSTPEDKAHMNVDIACAVADGENAFQGLEPKLEPQELSPLSATVFPKVEHSPGPPPVDKQCQEGLSENSAYRWTVVKTEEGRQALEPLPQGIQESLNNSSPGDLEEVVKMEPEDATEEISGFL

SEQ ID NO: 8607 - protein, 2969 aa, Homo sapiens
MDPRNTAMLGLGSDSEGFSRKSPSAISTGTLVSKREVELEKNTKEEEDLRKRNRERNIEAGKDDGLTDAQQQFSVKETNFSEGNLKLKIGLQAKRTKKPPKNLENYVCRPAIKTTIKHPRKALKSGKMTDEKNEHCPSKRDPSKLYKKADDVAAIECQSEEVIRLHSQGENNPLSKKLSPVHSEMADYINATPSTLLGSRDPDLKDRALLNGGTSVTEKLAQLIATCPPSKSSKTKPKKLGTGTTAGLVSKDLIRKAGVGSVAGIIHKDLIKKPTISTAVGLVTKDPGKKPVFNAAVGLVNKDSVKKLGTGTTAVFINKNLGKKPGTITTVGLLSKDSGKKLGIGIVPGLVHKESGKKLGLGTVVGLVNKDLGKKLGSTVGLVAKDCAKKIVASSAMGLVNKDIGKKLMSCPLAGLISKDAINLKAEALLPTQEPLKASCSTNINNQESQELSESLKDSATSKTFEKNVVRQNKESILEKFSVRKEIINLEKEMFNEGTCIQQDSFSSSEKGSYETSKHEKQPPVYCTSPDFKMGGASDVSTAKSPFSAVGESNLPSPSPTVSVNPLTRSPPETSSQLAPNPLLLSSTTELIEEISESVGKNQFTSESTHLNVGHRSVGHSISIECKGIDKEVNDSKTTHIDIPRISSSLGKKPSLTSESSIHTITPSVVNFTSLFSNKPFLKLGAVSASDKHCQVAESLSTSLQSKPLKKRKGRKPRWTKVVARSTCRSPKGLELERSELFKNVSCSSLSNSNSEPAKFMKNIGPPSFVDHDFLKRRLPKLSKSTAPSLALLADSEKPSHKSFATHKLSSSMCVSSDLLSDIYKPKRGRPKSKEMPQLEGPPKRTLKIPASKVFSLQSKEEQEPPILQPEIEIPSFKQGLSVSPFPKKRGRPKRQMRSPVKMKPPVLSVAPFVATESPSKLESESDNHRSSSDFFESEDQLQDPDDLDDSHRPSVCSMSDLEMEPDKKITKRNNGQLMKTIIRKINKMKTLKRKKLLNQILSSSVESSNKGKVQSKLHNTVSSLAATFGSKLGQQINVSKKGTIYIGKRRGRKPKTVLNGILSGSPTSLAVLEQTAQQAAGSALGQILPPLLPSSASSSEILPSPICSQSSGTSGGQSPVSSDAGFVEPSSVPYLHLHSRQGSMIQTLAMKKASKGRRRLSPPTLLPNSPSHLSELTSLKEATPSPISESHSDETIPSDSGIGTDNNSTSDRAEKFCGQKKRRHSFEHVSLIPPETSTVLSSLKEKHKHKCKRRNHDYLSYDKMKRQKRKRKKKYPQLRNRQDPDFIAELEELISRLSEIRITHRSHHFIPRDLLPTIFRINFNSFYTHPSFPLDPLHYIRKPDLKKKRGRPPKMREAMAEMPFMHSLSFPLSSTGFYPSYGMPYSPSPLTAAPIGLGYYGRYPPTLYPPPPSPSFTTPLPPPSYMHAGHLLLNPAKYHKKKHKLLRQEAFLTTSRTPLLSMSTYPSVPPEMAYGWMVEHKHRHRHKHREHRSSEQPQVSMDTGSSRSVLESLKRYRFGKDAVGERYKHKEKHRCHMSCPHLSPSKSLINREEQWVHREPSESSPLALGLQTPLQIDCSESSPSLSLGGFTPNSEPASSDEHTNLFTSAIGSCRVSNPNSSGRKKLTDSPGLFSAQDTSLNRLHRKESLPSNERAVQTLAGSQPTSDKPSQRPSESTNCSPTRKRSSSESTSSTVNGVPSRSPRLVASGDDSVDSLLQRMVQNEDQEPMEKSIDAVIATASAPPSSSPGRSHSKDRTLGKPDSLLVPAVTSDSCNNSISLLSEKLTSSCSPHHIKRSVVEAMQRQARKMCNYDKILATKKNLDHVNKILKAKKLQRQARTGNNFVKRRPGRPRKCPLQAVVSMQAFQAAQFVNPELNRDEEGAALHLSPDTVTDVIEAVVQSVNLNPEHKKGLKRKGWLLEEQTRKKQKPLPEEEEQENNKSFNEAPVEIPSPSETPAKPSEPESTLQPVLSLIPREKKPPRPPKKKYQKAGLYSDVYKTTDPKSRLIQLKKEKLEYTPGEHEYGLFPAPIHVVFFVSGKYLRQKRIDFQLPYDILWQWKHNQLYKKPDVPLYKKIRSNVYVDVKPLSGYEATTCNCKKPDDDTRKGCVDDCLNRMIFAECSPNTCPCGEQCCNQRIQRHEWVQCLERFRAEEKGWGIRTKEPLKAGQFIIEYLGEVVSEQEFRNRMIEQYHNHSDHYCLNLDSGMVIDSYRMGNEARFINHSCDPNCEMQKWSVNGVYRIGLYALKDMPAGTELTYDYNFHSFNVEKQQLCKCGFEKCRGIIGGKSQRVNGLTSSKNSQPMATHKKSGRSKEKRKSKHKLKKRRGHLSEEPSENINTPTRLTPQLQMKPMSNRERNFVLKHHVFLVRNWEKIRQKQEEVKHTSDNIHSASLYTRWNGICRDDGNIKSDVFMTQFSALQTARSVRTRRLAAAEENIEVARAARLAQIFKEICDGIISYKDSSRQALAAPLLNLPPKKKNADYYEKISDPLDLITIEKQILTGYYKTVEAFDADMLKVFRNAEKYYGRKSPVGRDVCRLRKAYYNARHEASAQIDEIVGETASEADSSETSVSEKENGHEKDDDVIRCICGLYKDEGLMIQCDKCMVWQHCDCMGVNSDVEHYLCEQCDPRPVDREVPMIPRPHYAQPGCVYFICLLRDDLLLRQGDCVYLMRDSRRTPDGHPVRQSYRLLSHINRDKLDIFRIEKLWKNEKEERFAFGHHYFRPHETHHSPSRRFYHNELFRVPLYEIIPLEAVVGTCCVLDLYTYCKGRPKGVKEQDVYICDYRLDKSAHLFYKIHRNRYPVCTKPYAFDHFPKKLTPKKDFSPHYVPDNYKRNGGRSSWKSERSKPPLKDLGQEDDALPLIEEVLASQEQAANEIPSLEEPEREGATANVSEGEKKTEESSQEPQSTCTPEERRHNQRERLNQILLNLLEKIPGKNAIDVTYLLEEGSGRKLRRRTLFIPENSFRK

SEQ ID NO: 8608 - protein, 942 aa, Homo sapiens
MDTKEEKKERKQSYFARLKKKKQAKQNAETASAVATRTHTGKEDNNTVVLEPDKCNIAVEEEYMTDEKKKRKSNQLKEIRRTELKRYYSIDDNQNKTHDKKEKKMVVQKPHGTMEYTAGNQDTLNSIALKFNITPNKLVELNKLFTHTIVPGQVLFVPDANSPSSTLRLSSSSPGATVSPSSSDAEYDKLPDADLARKALKPIERVLSSTSEEDEPGVVKFLKMNCRYFTDGKGVVGGVMIVTPNNIMFDPHKSDPLVIENGCEEYGLICPMEEVVSIALYNDISHMKIKDALPSDLPQDLCPLYRPGEWEDLASEKDINPFSKFKSINKEKRQQNGEKIMTSDSRPIVPLEKSTGHTPTKPSGSSVSEKLKKLDSSRETSHGSPTVTKLSKEPSDTSSAFESTAKENFLGEDDDFVDLEELSSQTGGGMHKKDTLKECLSLDPEERKKAESQINNSAVEMQVQSALAFLGTENDVELKGALDLETCEKQDIMPEVDKQSGSPESRVENTLNIHEDLDKVKLIEYYLTKNKEGPQVSENLQKTELSDGKSIEPGGIDITLSSSLSQAGDPITEGNKEPDKTWVKKGEPLPVKLNSSTEANVIKEALDSSLESTLDNSCQGAQMDNKSEVQLWLLKRIQVPIEDILPSKEEKSKTPPMFLCIKVGKPMRKSFATHTAAMVQQYGKRRKQPEYWFAVPRERVDHLYTFFVQWSPDVYGKDAKEQGFVVVEKEELNMIDNFFSEPTTKSWEIITVEEAKRRKSTCSYYEDEDEEVLPVLRPHSALLENMHIEQLARRLPARVQGYPWRLAYSTLEHGTSLKTLYRKSASLDSPVLLVIKDMDNQIFGAYATHPFKFSDHYYGTGETFLYTFSPHFKVFKWSGENSYFINGDISSLELGGGGGRFGLWLDADLYHGRSNSCSTFNNDILSKKEDFIVQDLEVWAFD

SEQ ID NO: 8609 - protein, 774 aa, Homo sapiens
MEAEQRPAAGASEGATPGLEAVPPVAPPPATAASGPIPKSGPEPKRRHLGTLLQPTVNKFSLRVFGSHKAVEIEQERVKSAGAWIIHPYSDFRFYWDLIMLLLMVGNLIVLPVGITFFKEENSPPWIVFNVLSDTFFLLDLVLNFRTGIVVEEGAEILLAPRAIRTRYLRTWFLVDLISSIPVDYIFLVVELEPRLDAEVYKTARALRIVRFTKILSLLRLLRLSRLIRYIHQWEEIFHMTYDLASAVVRIFNLIGMMLLLCHWDGCLQFLVPMLQDFPPDCWVSINHMVNHSWGRQYSHALFKAMSHMLCIGYGQQAPVGMPDVWLTMLSMIVGATCYAMFIGHATALIQSLDSSRRQYQEKYKQVEQYMSFHKLPADTRQRIHEYYEHRYQGKMFDEESILGELSEPLREEIINFTCRGLVAHMPLFAHADPSFVTAVLTKLRFEVFQPGDLVVREGSVGRKMYFIQHGLLSVLARGARDTRLTDGSYFGEICLLTRGRRTASVRADTYCRLYSLSVDHFNAVLEEFPMMRRAFETVAMDRLLRIGKKNSILQRKRSEPSPGSSGGIMEQHLVQHDRDMARGVRGRAPSTGAQLSGKPVLWEPLVHAPLQAAAVTSNVAIALTHQRGPLPLSPDSPATLLARSAWRSAGSPASPLVPVRAGPWASTSRLPAPPARTLHASLSRAGRSQVSLLGPPPGGGGRRLGPRGRPLSASQPSLPQRATGDGSPGRKGSGSERLPPSGLLAKPPRTAQPPRPPVPEPATPRGLQLSANM

SEQ ID NO: 8610 - protein, 499 aa, Homo sapiens
MPHPRRYHSSERGSRGSYREHYRSRKHKRRRSRSWSSSSDRTRRRRREDSYHVRSRSSYDDRSSDRRVYDRRYCGSYRRNDYSRDRGDAYYDTDYRHSYEYQRENSSYRSQRSSRRKHRRRRRRSRTFSRSSSQHSSRRAKSVEDDAEGHLIYHVGDWLQERYEIVSTLGEGTFGRVVQCVDHRRGGARVALKIIKNVEKYKEAARLEINVLEKINEKDPDNKNLCVQMFDWFDYHGHMCISFELLGLSTFDFLKDNNYLPYPIHQVRHMAFQLCQAVKFLHDNKLTHTDLKPENILFVNSDYELTYNLEKKRDERSVKSTAVRVVDFGSATFDHEHHSTIVSTRHYRAPEVILELGWSQPCDVWSIGCIIFEYYVGFTLFQTHDNREHLAMMERILGPIPSRMIRKTRKQKYFYRGRLDWDENTSAGRYVRENCKPLRRYLTSEAEEHHQLFDLIESMLEYEPAKRLTLGEALQHPFFARLRAEPPNKLWDSSRDISR

SEQ ID NO: 8611 - protein, 650 aa, Homo sapiens
MMPSPSDSSRSLTSRPSTRGLTHLRLHRPWLQALLTLGLVQVLLGILVVTFSMVASSVTTTESIKRSCPSWAGFSISFFSLLSVLCVMLSMAGSVLSCKNAQLARDFQQCSLEGKVCVCCPSVPLLRPCPESGQELKVAPNSTCDEARGALKNLLFSVCGLTICAAIICTLSAIVCCIQIFSLDLVHTQLAPERSVSGPLGPLGCTSPPPAPLLHTMLDLEEFVPPVPPPPYYPPEYTCSSETDAQSITYNGSMDSPVPLYPTDCPPSYEAVMGLRGDSQATLFDPQLHDGSCICERVASIVDVSMDSGSLVLSAIGDLPGGSSPSEDSCLLELQGSVRSVDYVLFRSIQRSRAGYCLSLDCGLRGPFEESPLPRRPPRAARSYSCSAPEAPPPLGAPTAARSCHRLEGWPPWVGPCFPELRRRVPRGGGRPAAAPPTRAPTRRFSDSSGSLTPPGHRPPHPASPPPLLLPRSHSDPGITTSSDTADFRDLYTKVLEEEAASVSSADTGLCSEACLFRLARCPSPKLLRARSAEKRRPVPTFQKVPLPSGPAPAHSLGDLKGSWPGRGLVTRFLQISRKAPDPSGTGAHGHKQVPRSLWGRPGRESLHLRSCGDLSSSSSLRRLLSGRRLERGTRPHSLSLNGGSRETGL

SEQ ID NO: 8612 - protein, 466 aa, Homo sapiens
MLLGGPPRSPRSGTSPKGPWSSTGHVQFGKSPQTWPRRTRPRSPEPAAPSGVRGSTWTRRRDSPRRAGPTALSRYVGHLWMGRRPPSPEARGPVPRSSAASRARRSLASPGISPGPLTATIGGAVAGGGPRQGRAEAHKEVFPGQRVGKMAAPMELFCWSGGWGLPSVDLDSLAVLTYARFTGAPLKVHKISNPWQSPSGTLPALRTSHGEVISVPHKIITHLRKEKYNADYDLSARQGADTLAFMSLLEEKLLPVLVHTFWIDTKNYVEVTRKWYAEAMPFPLNFFLPGRMQRQYMERLQLLTGEHRPEDEEELEKELYREARECLTLLSQRLGSQKFFFGDAPASLDAFVFSYLALLLQAKLPSGKLQVHLRGLHNLCAYCTHILSLYFPWDGAEVPPQRQTPAGPETEEEPYRRRNQILSVLAGLAAMVGYALLSGIVSIQRATPARAPGTRTLGMAEEDEEE

SEQ ID NO: 8613 - protein, 956 aa, Homo sapiens
METQELRGALALLLLCFFTSASQDLQVIDLLTVGESRQMVAVAEKIRTALLTAGDIYLLSTFRLPPKQGGVLFGLYSRQDNTRWLEASVVGKINKVLVRYQREDGKVHAVNLQQAGLADGRTHTVLLRLRGPSRPSPALHLYVDCKLGDQHAGLPALAPIPPAEVDGLEIRTGQKAYLRMQGFVESMKIILGGSMARVGALSECPFQGDESIHSAVTNALHSILGEQTKALVTQLTLFNQILVELRDDIRDQVKEMSLIRNTIMECQVCGFHEQRSHCSPNPCFRGVDCMEVYEYPGYRCGPCPPGLQGNGTHCSDINECAHADPCFPGSSCINTMPGFHCEACPRGYKGTQVSGVGIDYARASKQVCNDIDECNDGNNGGCDPNSICTNTVGSFKCGPCRLGFLGNQSQGCLPARTCHSPAHSPCHIHAHCLFERNGAVSCQCNVGWAGNGNVCGTDTDIDGYPDQALPCMDNNKHCKQDNCLLTPNSGQEDADNDGVGDQCDDDADGDGIKNVEDNCRLFPNKDQQNSDTDSFGDACDNCPNVPNNDQKDTDGNGEGDACDNDVDGDGIPNGLDNCPKVPNPLQTDRDEDGVGDACDSCPEMSNPTQTDADSDLVGDVCDTNEDSDGDGHQDTKDNCPQLPNSSQLDSDNDGLGDECDGDDDNDGIPDYVPPGPDNCRLVPNPNQKDSDGNGVGDVCEDDFDNDAVVDPLDVCPESAEVTLTDFRAYQTVVLDPEGDAQIDPNWVVLNQGMEIVQTMNSDPGLAVGYTAFNGVDFEGTFHVNTVTDDDYAGFLFSYQDSGRFYVVMWKQTEQTYWQATPFRAVAQPGLQLKAVTSVSGPGEHLRNALWHTGHTPDQVRLLWTDPRNVGWRDKTSYRWQLLHRPQVGYIRVKLYEGPQLVADSGVIIDTSMRGGRLGVFCFSQENIIWSNLQYRCNDTVPEDFEPFRRQLLQGRV

SEQ ID NO: 8614 - protein, 736 aa, Homo sapiens
MKNMEKELLCPVCQEMYKQPLVLPCTHNVCQACAREVLGQQGYIGHGGDPSSEPTSPASTPSTRSPRLSRRTLPKPDRLDRLLKSGFGTYPGRKRGALHPQVIMFPCPACQGDVELGERGLAGLFRNLTLERVVERYRQSVSVGGAILCQLCKPPPLEATKGCTECRATFCNECFKLFHPWGTQKAQHEPTLPTLSFRPKGLMCPDHKEEVTHYCKTCQRLVCQLCRVRRTHSGHKITPVLSAYQALKDKLTKSLTYILGNQDTVQTQICELEEAVRHTEVSGQQAKEEVSQLVRGLGAVLEEKRASLLQAIEECQQERLARLSAQIQEHRSLLDGSGLVGYAQEVLKETDQPCFVQAAKQLHNRIARATEALQTFRPAASSSFRHCQLDVGREMKLLTELNFLRVPEAPVIDTQRTFAYDQIFLCWRLPPHSPPAWHYTVEFRRTDVPAQPGPTRWQRREEVRGTSALLENPDTGSVYVLRVRGCNKAGYGEYSEDVHLHTPPAPVLHFFLDSRWGASRERLAISKDQRAVRSVPGLPLLLAADRLLTGCHLSVDVVLGDVAVTQGRSYWACAVDPASYLVKVGVGLESKLQESFQGAPDVISPRYDPDSGHDSGAEDATVEASPPFAFLTIGMGKILLGSGASSNAGLTGRDGPTAGCTVPLPPRLGICLDYERGRVSFLDAVSFRGLLECPLDCSGPVCPAFCFIGGGAVQLQEPVGTKPERKVTIGGFAKLD

SEQ ID NO: 8615 - protein, 644 aa, Homo sapiens
MAEGEDMQTFTSIMDALVRISTSMKNMEKELLCPVCQEMYKQPLVLPCTHNVCQACAREVLGQQGYIGHGGDPSSEPTSPASTPSTRSPRLSRRTLPKPDRLDRLLKSGFGTYPGRKRGALHPQVIMFPCPACQGDVELGERGLAGLFRNLTLERVVERYRQSVSVGGAILCQLCKPPPLEATKGCTECRATFCNECFKLFHPWGTQKAQHEPTLPTLSFRPKGLMCPDHKEEVTHYCKTCQRLVCQLCRVRRTHSGHKITPVLSAYQALKDKLTKSLTYILGNQDTVQTQICELEEAVRHTEVSGQQAKEEVSQLVRGLGAVLEEKRASLLQAIEECQQERLARLSAQIQEHRSLLDGSGLVGYAQEVLKETDQPCFVQAAKQLHNRIARATEALQTFRPAASSSFRHCQLDVGREMKLLTELNFLRVPEAPVIDTQRTFAYDQIFLCWRLPPHSPPAWHYTVEFRRTDVPAQPGPTRWQRREEVRGTSALLENPDTGSVYVLRVRGCNKAGYGEYSEDVHLHTPPAPVLHFFLDSRWGASRERLAISKDQRAVRSVPGLPLLLAADRLLTGCHLSVDVVLGDVAVTQGRSYWACAVDPASYLVKVGVGLESKLQESFQGAPDVISPRSDPSGRDGVWGSWWE

SEQ ID NO: 8616 - protein, 551 aa, Homo sapiens
MAEGEDMQTFTSIMDALVRISTSMKNMEKELLCPVCQEMYKQPLVLPCTHNVCQACAREVLGQQGYIGHGGDPSSEPTSPASTPSTRSPRLSRRTLPKPDRLDRLLKSGFGTYPGRKRGALHPQVIMFPCPACQGDVELGERGLAGLFRNLTLERVVERYRQSVSVGGAILCQLCKPPPLEATKGCTECRATFCNECFKLFHPWGTQKAQHEPTLPTLSFRPKGLMCPDHKEEVTHYCKTCQRLVCQLCRVRRTHSGHKITPVLSAYQALKDKLTKSLTYILGNQDTVQTQICELEEAVRHTEVSGQQAKEEVSQLVRGLGAVLEEKRASLLQAIEECQQERLARLSAQIQEHRSLLDGSGLVGYAQEVLKETDQPCFVQAAKQLHNRIARATEALQTFRPAASSSFRHCQLDVGREMKLLTELNFLRVPEAPVIDTQRTFAYDQIFLCWRLPPHSPPAWHYTVEFRRTDVPAQPGPTRWQRREEVRGTSALLENPDTGSVYVLRVRGCNKAGYGEYSEDVHLHTPPAPGIQNLARRGGACLQFQLLGRLR

SEQ ID NO: 8617 - protein, 183 aa, Homo sapiens
MEFLWAPLLGLCCSLAAADRHTVFWNSSNPKFRNEDYTIHVQLNDYVDIICPHYEDHSVADAAMEQYILYLVEHEEYQLCQPQSKDQVRWQCNRPSAKHGPEKLSEKFQRFTPFTLGKEFKEGHSYYYISHSPQAHDNPQEKRLAADDPEVRVLHSIGHSAAPRLFPLAWTVLLLPLLLLQTP

SEQ ID NO: 8618 - protein, 205 aa, Homo sapiens
MEFLWAPLLGLCCSLAAADRHTVFWNSSNPKFRNEDYTIHVQLNDYVDIICPHYEDHSVADAAMEQYILYLVEHEEYQLCQPQSKDQVRWQCNRPSAKHGPEKLSEKFQRFTPFTLGKEFKEGHSYYYISKPIHQHEDRCLRLKVTVSGKITHSPQAHDNPQEKRLAADDPEVRVLHSIGHSAAPRLFPLAWTVLLLPLLLLQTP

SEQ ID NO: 8619 - protein, 238 aa, Homo sapiens
MAAAPLLLLLLLVPVPLLPLLAQGPGGALGNRHAVYWNSSNQHLRREGYTVQVNVNDYLDIYCPHYNSSGVGPGAGPGPGGGAEQYVLYMVSRNGYRTCNASQGFKRWECNRPHAPHSPIKFSEKFQRYSAFSLGYEFHAGHEYYYISTPTHNLHWKCLRMKVFVCCASTSHSGEKPVPTLPQFTMGPNVKINVLEDFEGENPQVPKLEKSISGTSPKREHLPLAVGIAFFLMTFLAS

SEQ ID NO: 8620 - protein, 796 aa, Homo sapiens
MRLALLWALGLLGAGSPLPSWPLPNIGGTEEQQAESEKAPREPLEPQVLQDDLPISLKKVLQTSLPEPLRIKLELDGDSHILELLQNRELVPGRPTLVWYQPDGTRVVSEGHTLENCCYQGRVRGYAGSWVSICTCSGLRGLVVLTPERSYTLEQGPGDLQGPPIISRIQDLHLPGHTCALSWRESVHTQKPPEHPLGQRHIRRRRDVVTETKTVELVIVADHSEAQKYRDFQHLLNRTLEVALLLDTFFRPLNVRVALVGLEAWTQRDLVEISPNPAVTLENFLHWRRAHLLPRLPHDSAQLVTGTSFSGPTVGMAIQNSICSPDFSGGVNMDHSTSILGVASSIAHELGHSLGLDHDLPGNSCPCPGPAPAKTCIMEASTDFLPGLNFSNCSRRALEKALLDGMGSCLFERLPSLPPMAAFCGNMFVEPGEQCDCGFLDDCVDPCCDSLTCQLRPGAQCASDGPCCQNCQLRPSGWQCRPTRGDCDLPEFCPGDSSQCPPDVSLGDGEPCAGGQAVCMHGRCASYAQQCQSLWGPGAQPAAPLCLQTANTRGNAFGSCGRNPSGSYVSCTPRDAICGQLQCQTGRTQPLLGSIRDLLWETIDVNGTELNCSWVHLDLGSDVAQPLLTLPGTACGPGLVCIDHRCQRVDLLGAQECRSKCHGHGVCDSNRHCYCEEGWAPPDCTTQLKATSSLTTGLLLSLLVLLVLVMLGASYWYRARLHQRLCQLKGPTCQYRLVLSASRPPLPGRCRLTLCPRDSSLRGQPSPHPQGSHCLPTPRAGAHRVTCPAQGLESRP

SEQ ID NO: 8621 - protein, 664 aa, Homo sapiens
MDIKHHQNGTRGQRRKQPHTTVQRLLTWGLPVSCSWFLWRQPGEFPVTALLLGAGAGGLLAIGLFQLLVNPMNIYEEQKIMFLYSLVGLGAMGWGTSPHIRCASLLLVPKMLGKEGRLFVLGYALAAIYVGPVANLRHNLNNVIASLGCTVELQINNTRAAWRISTAPLRAMFKDLLSSKELLRAETRNISATFEDLDAQVNSETGYTPEDTMDSGETAQGREARQAPASRLHLSTQKMYELKTKLRCSYVVNQAILSCRRWFDRKHEQCMKHIWVPLLTHLLCLPMKFKFFCGIAKVMEVWCRNRIPVEGNFGQTYDSLNQSIRGLDGEFSANIDFKEEKQAGVLGLNTSWERVSTEVRDYVYRQEARLEWALGLLHVLLSCTFLLVLHASFSYMDSYNHDIRFDNIYISTYFCQIDDRRKKLGKRTLLPLRKAEEKTVIFPCKPTIQASEMSNVVRELLETLPILLLLVVLCGLDWALYSIFDTIRHHSFLQYSFRSSHKLEVKVGGDSMLARLLRKTIGALNTSSETVMESNNMPCLPQPVGLDARAYWRAAVPIGLLVCLCLLQAFGYRLRRVIAAFYFPKREKKRILFLYNDLLKKRAAFTKLRRAAILRRERQQKAPVFTEPQFLPLKNGKTGEICKACSLEISLEWWSGVGLRCQRA

SEQ ID NO: 8622 - protein, 583 aa, Homo sapiens
MDLLPPKPKYNPLRNESLSSLEEGASGSTPPEELPSPSASSLGPILPPLPGDDSPTTLCSFFPRMSNLRLANPAGGRPGSKGEPGRAADDGEGIVGAAMPDSGPLPLLQDMNKLSGGGGRRTRVEGGQLGGEEWTRHGSFVNKPTRGWLHPNDKVMGPGVSYLVRYMGCVEVLQSMRALDFNTRTQVTREAISLVCEAVPGAKGATRRRKPCSRPLSSILGRSNLKFAGMPITLTVSTSSLNLMAADCKQIIANHHMQSISFASGGDPDTAEYVAYVAKDPVNQRACHILECPEGLAQDVISTIGQAFELRFKQYLRNPPKLVTPHDRMAGFDGSAWDEEEEEPPDHQYYNDFPGKEPPLGGVVDMRLREGAAPGAARPTAPNAQTPSHLGATLPVGQPVGGDPEVRKQMPPPPPCPGRELFDDPSYVNVQNLDKARQAVGGAGPPNPAINGSAPRDLFDMKPFEDALRVPPPPQSVSMAEQLRGEPWFHGKLSRREAEALLQLNGDFLVRESTTTPGQYVLTGLQSGQPKHLLLVDPEGVVRTKDHRFESVSHLISYHMDNHLPIISAGSELCLQQPVERKL

SEQ ID NO: 8623 - protein, 369 aa, Homo sapiens
MKSPEKKRRKSNTQGPAYSHLTEFAPPPTPMVDHLVASNPFEDDFGAPKVGVAAPPFLGSPVPFGGFRVQGGMAGQVPPGYSTGGGGGPQPLRRQPPPFPPNPMGPAFNMPPQGPGYPPPGNMNFPSQPFNQPLGQNFSPPSGQMMPGPVGGFGPMISPTMGQPPRAELGPPSLSQRFAQPGAPFGPSPLQRPGQGLPSLPPNTSPFPGPDPGFPGPGGEDGGKPLNPPASTAFPQEPHSGSPAAAVNGNQPSFPPNSSGRGGGTPDANSLAPPGKAGGGSGPQPPPGLVYPCGACRSEVNDDQDAILCEASCQKWFHRECTGMTESAYGLLTTEASAVWACDLCLKTKEIQSVYIREGMGQLVAANDG

SEQ ID NO: 8624 - protein, 406 aa, Homo sapiens
MAASAPPPPDKLEGGGGPAPPPAPPSTGRKQGKAGLQMKSPEKKRRKSNTQGPAYSHLTEFAPPPTPMVDHLVASNPFEDDFGAPKVGVAAPPFLGSPVPFGGFRVQGGMAGQVPPGYSTGGGGGPQPLRRQPPPFPPNPMGPAFNMPPQGPGYPPPGNMNFPSQPFNQPLGQNFSPPSGQMMPGPVGGFGPMISPTMGQPPRAELGPPSLSQRFAQPGAPFGPSPLQRPGQGLPSLPPNTSPFPGPDPGFPGPGGEDGGKPLNPPASTAFPQEPHSGSPAAAVNGNQPSFPPNSSGRGGGTPDANSLAPPGKAGGGSGPQPPPGLVYPCGACRSEVNDDQDAILCEASCQKWFHRECTGMTESAYGLLTTEASAVWACDLCLKTKEIQSVYIREGMGQLVAANDG

SEQ ID NO: 8625 - protein, 653 aa, Homo sapiens
MPVGGLLPLFSSPAGGVLGGGLGGGGGRKGSGPAALRLTEKFVLLLVFSAFITLCFGAIFFLPDSSKLLSGVLFHSSPALQPAADHKPGPGARAEDAAEGRARRREEGAPGDPEAALEDNLARIRENHERALREAKETLQKLPEEIQRDILLEKKKVAQDQLRDKAPFRGLPPVDFVPPIGVESREPADAAIREKRAKIKEMMKHAWNNYKGYAWGLNELKPISKGGHSSSLFGNIKGATIVDALDTLFIMEMKHEFEEAKSWVEENLDFNVNAEISVFEVNIRFVGGLLSAYYLSGEEIFRKKAVELGVKLLPAFHTPSGIPWALLNMKSGIGRNWPWASGGSSILAEFGTLHLEFMHLSHLSGNPIFAEKVMNIRTVLNKLEKPQGLYPNYLNPSSGQWGQHHVSVGGLGDSFYEYLLKAWLMSDKTDLEAKKMYFDAVQAIETHLIRKSSSGLTYIAEWKGGLLEHKMGHLTCFAGGMFALGADAAPEGMAQHYLELGAEIARTCHESYNRTFMKLGPEAFRFDGGVEAIATRQNEKYYILRPEVMETYMYMWRLTHDPKYRKWAWEAVEALENHCRVNGGYSGLRDVYLLHESYDDVQQSFFLAETLKYLYLIFSDDDLLPLEHWIFNSEAHLLPILPKDKKEVEIREE

SEQ ID NO: 8626 - protein, 1226 aa, Homo sapiens
MNPRQGYSLSGYYTHPFQGYEHRQLRYQQPGPGSSPSSFLLKQIEFLKGQLPEAPVIGKQTPSLPPSLPGLRPRFPVLLASSTRGRQVDIRGVPRGVHLRSQGLQRGFQHPSPRGRSLPQRGVDCLSSHFQELSIYQDQEQRILKFLEELGEGKATTAHDLSGKLGTPKKEINRVLYSLAKKGKLQKEAGTPPLWKIAVSTQAWNQHSGVVRPDGHSQGAPNSDPSLEPEDRNSTSVSEDLLEPFIAVSAQAWNQHSGVVRPDSHSQGSPNSDPGLEPEDSNSTSALEDPLEFLDMAEIKEKICDYLFNVSDSSALNLAKNIGLTKARDINAVLIDMERQGDVYRQGTTPPIWHLTDKKRERMQIKRNTNSVPETAPAAIPETKRNAEFLTCNIPTSNASNNMVTTEKVENGQEPVIKLENRQEARPEPARLKPPVHYNGPSKAGYVDFENGQWATDDIPDDLNSIRAAPGEFRAIMEMPSFYSHGLPRCSPYKKLTECQLKNPISGLLEYAQFASQTCEFNMIEQSGPPHEPRFKFQVVINGREFPPAEAGSKKVAKQDAAMKAMTILLEEAKAKDSGKSEESSHYSTEKESEKTAESQTPTPSATSFFSGKSPVTTLLECMHKLGNSCEFRLLSKEGPAHEPKFQYCVAVGAQTFPSVSAPSKKVAKQMAAEEAMKALHGEATNSMASDNQPEGMISESLDNLESMMPNKVRKIGELVRYLNTNPVGGLLEYARSHGFAAEFKLVDQSGPPHEPKFVYQAKVGGRWFPAVCAHSKKQGKQEAADAALRVLIGENEKAERMGFTEVTPVTGASLRRTMLLLSRSPEAQPKTLPLTGSTFHDQIAMLSHRCFNTLTNSFQPSLLGRKILAAIIMKKDSEDMGVVVSLGTGNRCVKGDSLSLKGETVNDCHAEIISRRGFIRFLYSELMKYNSQTAKDSIFEPAKGGEKLQIKKTVSFHLYISTAPCGDGALFDKSCSDRAMESTESRHYPVFENPKQGKLRTKVENGEGTIPVESSDIVPTWDGIRLGERLRTMSCSDKILRWNVLGLQGALLTHFLQPIYLKSVTLGYLFSQGHLTRAICCRVTRDGSAFEDGLRHPFIVNHPKVGRVSIYDSKRQSGKTKETSVNWCLADGYDLEILDGTRGTVDGPRNELSRVSKKNIFLLFKKLCSFRYRRDLLRLSYGEAKKAARDYETAKNYFKKGLKDMGYGNWISKPQEEKNFYLCPV

SEQ ID NO: 8627 - protein, 936 aa, Homo sapiens
MKQQALTEFEAYKHRVEDMQLCAEAQHVQRIVTMSREVEEIRRKFEEKLRSFGQLQVQFEKDKRLALEDLQAAHRREIQELLKSQQDHSASVNKGQEKAEELHRMEVESLNKMLEELRLERKKLIEDYEGKLNKAQSFYERELDTLKRSQLFTAESLQASKEKEADLRKEFQGQEAILRKTIGKLKTELQMVQDEAGSLLDKCQKLQTALAIAENNVQVLQKQLDDAKEGEMALLSKHKEVESELAAARERLQQQASDLVLKASHIGMLQATQMTQEVTIKDLESEKSRVNERLSQLEEERAFLRSKTQSLDEEQKQQILELEKKVNEAKRTQQEYYERELKNLQSRLEEEVTQLNEAHSKTLEELAWKHHMAIEAVHSNAIRDKKKLQMDLEEQHNKDKLNLEEDKNQLQQELENLKEVLEDKLNTANQEIGHLQDMVRKSEQGLGSAEGLIASLQDSQERLQNELDLTKDSLKETKDALLNVEGELEQERQQHEETIAAMKEEEKLKVDKMAHDLEIKWTENLRQECSKLREELRLQHEEDKKSAMSQLLQLKDREKNAARDSWQKKVEDLLNQISLLKQNLEIQLSQSQTSLQQLQAQFTQERQRLTQELEELEEQHQQRHKSLKEAHVLAFQTMEEEKEKEQRALENHLQQKHSAELQSLKDAHRESMEGFRIEMEQELQTLRFELEDEGKAMLASLRSELNHQHAAAIDLLRHNHHQELAAAKMELERSIDISRRQSKEHICRITDLQEELRHREHHISELDKEVQHLHENISALTKELEFKGKEILRIRSESNQQIRLEEMEEKYLMRESKPEDIQMITELKAMLTERDQIIKKLIQKKKNDKSPTNRFVSVPNLSALESGGVGNGHPNRLDPIPNSPVHDIEFNSSKPLPQPVPPKGPKTFLSPAQSEASPVASPDPQRQEWFARYFTF

SEQ ID NO: 8628 - protein, 502 aa, Homo sapiens
MARRCGPVALLLGFGLLRLCSGVWGTDTEERLVEHLLDPSRYNKLIRPATNGSELVTVQLMVSLAQLISVHEREQIMTTNVWLTQEWEDYRLTWKPEEFDNMKKVRLPSKHIWLPDVVLYNNADGMYEVSFYSNAVVSYDGSIFWLPPAIYKSACKIEVKHFPFDQQNCTMKFRSWTYDRTEIDLVLKSEVASLDDFTPSGEWDIVALPGRRNENPDDSTYVDITYDFIIRRKPLFYTINLIIPCVLITSLAILVFYLPSDCGEKMTLCISVLLALTVFLLLISKIVPPTSLDVPLVGKYLMFTMVLVTFSIVTSVCVLNVHHRSPTTHTMAPWVKVVFLEKLPALLFMQQPRHHCARQRLRLRRRQREREGAGALFFREAPGADSCTCFVNRASVQGLAGAFGAEPAPVAGPGRSGEPCGCGLREAVDGVRFIADHMRSEDDDQSVSEDWKYVAMVIDRLFLWIFVFVCVFGTIGMFLQPLFQNYTTTTFLHSDHSAPSSK

SEQ ID NO: 8629 - protein, 366 aa, Homo sapiens
MSWNISHPQLSDKLFGKNGVLEEQKSPGFKKRETEVYVGNLPLDISKEEILYLLKDFNPLDVHKIQNGCKCFAFVDLGSMQKVTLAIQELNGKLFHKRKLFVNTSKRPPKRTPDMIQQPRAPLVLEKASGEGFGKTAAIIQLAPKAPVDLCETEKLRAAFFAVPLEMRGSFLVLLLRECFRDLSWLALIHSVRGEAGLLVTSIVPKTPFFWAMHVTEALHQNMQALFSTLAQAEEQQPYLEGSTVMRGTRCLAEYHLGDYGHAWNRCWVLDRVDTWAVVMFIDFGQLATIPVQSLRSLDSDDFWTIPPLTQPFMLEKDILSSYEVVHRILKGKITGALNSAVTAPASNLAVVPPLLPLGCLQQAAA

SEQ ID NO: 8630 - protein, 351 aa, Homo sapiens
MSWNISHPQLSDKLFGKNGVLEEQKSPGFKKRETEVYVGNLPLDISKEEILYLLKDFNPLDVHKIQNGCKCFAFVDLGSMQKVTLAIQELNGKLFHKRKLFVNTSKRPPKRTPDMIQQPRAPLVLEKASGEGFGKTAAIIQLAPKAPVDLCETEKLRAAFFAVPLEMRGSFLVLLLRECFRDLSWLALIHSVRGEAGLLVTSIVPKTPFFWAMHVTEALHQNMQALFSTLAQAEEQQPYLEGSTVMRGTRCLAEYHLGDYGHAWNRCWVLDRVDTWAVVMFIDFGQLATIPVQSLRSLDSDDFWTIPPLTQPFMLEKDILSSYEVVHRILKGKITGALNSALHILKFEESK

SEQ ID NO: 8631 - protein, 468 aa, Homo sapiens
MLAVGCALLAALLAAPGAALAPRRCPAQEVARGVLTSLPGDSVTLTCPGVEPEDNATVHWVLRKPAAGSHPSRWAGMGRRLLLRSVQLHDSGNYSCYRAGRPAGTVHLLVDVPPEEPQLSCFRKSPLSNVVCEWGPRSTPSLTTKAVLLVRKFQNSPAEDFQEPCQYSQESQKFSCQLAVPEGDSSFYIVSMCVASSVGSKFSKTQTFQGCGILQPDPPANITVTAVARNPRWLSVTWQDPHSWNSSFYRLRFELRYRAERSKTFTTWMVKDLQHHCVIHDAWSGLRHVVQLRAQEEFGQGEWSEWSPEAMGTPWTESRSPPAENEVSTPMQALTTNKDDDNILFRDSANATSLPVQDSSSVPLPTFLVAGGSLAFGTLLCIAIVLRFKKTWKLRALKEGKTSMHPPYSLGQLVPERPRPTPVLVPLISPPVSPSSLGSDNTSSHNRPDARDPRSPYDISNTDYFFPR

SEQ ID NO: 8632 - protein, 808 aa, Homo sapiens
MIWRNNWKSTTGRLNVKLQSDKLQHGCGPDYSSAWLPANESLWQATTVPSNHRNNHIRRHSIASDSGDTGIGTSCSDSVEDHSTSSGTLSFKPSQSLITLPTAHVMPSNSSASISKLRESLTPDGSKWSTSLMQTLGNHSRGEQDSSLDMKDFRPLRKWSSLSKLTAPDNCGQGGTVCREESRNGLEKIGKAKALTSQLRTIGPSCLHDSMEMLRLEDKEINKKRSSTLDCKYKFESCSKEDFRASSSTLRRQPVDMTYSALPESKPIMTSSEAFEPPKYLMLGQQAVGGVPIQPSVRTQMWLTEQLRTNPLEGRNTEDSYSLAPWQQQQIEDFRQGSETPMQVLTGSSRQSYSPGYQDFSKWESMLKIKEGLLRQKEIVIDRQKQQITHLHERIRDNELRAQHAMLGHYVNCEDSYVASLQPQYENTSLQTPFSEESVSHSQQGEFEQKLASTEKEVLQLNEFLKQRLSLFSEEKKKLEEKLKTRDRYISSLKKKCQKESEQNKEKQRRIETLEKYLADLPTLDDVQSQSLQLQILEEKNKNLQEALIDTEKKLEEIKKQCQDKETQLICQKKKEKELVTTVQSLQQKVERCLEDGIRLPMLDAKQLQNENDNLRQQNETASKIIDSQQDEIDRMILEIQSMQGKLSKEKLTTQKMMEELEKKERNVQRLTKALLENQRQTDETCSLLDQGQEPDQSRQQTVLSKRPLFDLTVIDQLFKEMSCCLFDLKALCSILNQRAQGKEPNLSLLLGIRSMNCSAEETENDHSTETLTKKLSDVCQLRRDIDELRTTISDRYAQDMGDNCITQ

SEQ ID NO: 8633 - protein, 1190 aa, Homo sapiens
MAVCAKKRPPEEERRARANDREYNEKFQYASNCIKTSKYNILTFLPVNLFEQFQEVANTYFLFLLILQLIPQISSLSWFTTIVPLVLVLTITAVKDATDDYFRHKSDNQVNNRQSQVLINGILQQEQWMNVCVGDIIKLENNQFVAADLLLLSSSEPHGLCYIETAELDGETNMKVRQAIPVTSELGDISKLAKFDGEVICEPPNNKLDKFSGTLYWKENKFPLSNQNMLLRGCVLRNTEWCFGLVIFAGPDTKLMQNSGRTKFKRTSIDRLMNTLVLWIFGFLVCMGVILAIGNAIWEHEVGMRFQVYLPWDEAVDSAFFSGFLSFWSYIIILNTVVPISLYVSVEVIRLGHSYFINWDKKMFCMKKRTPAEARTTTLNEELGQVEYIFSDKTGTLTQNIMVFNKCSINGHSYGDVFDVLGHKAELGERPEPVDFSFNPLADKKFLFWDPSLLEAVKIGDPHTHEFFRLLSLCHTVMSEEKNEGELYYKAQSPDEGALVTAARNFGFVFRSRTPKTITVHEMGTAITYQLLAILDFNNIRKRMSVIVRNPEGKIRLYCKGADTILLDRLHHSTQELLNTTMDHLNEYAGEGLRTLVLAYKDLDEEYYEEWAERRLQASLAQDSREDRLASIYEEVENNMMLLGATAIEDKLQQGVPETIALLTLANIKIWVLTGDKQETAVNIGYSCKMLTDDMTEVFIVTGHTVLEVREELRKAREKMMDSSRSVGNGFTYQDKLSSSKLTSVLEAVAGEYALVINGHSLAHALEADMELEFLETACACKAVICCRVTPLQKAQVVELVKKYKKAVTLAIGDGANDVSMIKTAHIGVGISGQEGIQAVLASDYSFSQFKFLQRLLLVHGRWSYLRMCKFLCYFFYKNFAFTMVHFWFGFFCGFSAQTVYDQYFITLYNIVYTSLPVLAMGVFDQDVPEQRSMEYPKLYEPGQLNLLFNKREFFICIAQGIYTSVLMFFIPYGVFADATRDDGTQLADYQSFAVTVATSLVIVVSVQIGLDTGYWTAINHFFIWGSLAVYFAILFAMHSNGLFDMFPNQFRFVGNAQNTLAQPTVWLTIVLTTVVCIMPVVAFRFLRLNLKPDLSDTVRYTQLVRKKQKAQHRCMRRVGRTGSRRSGYAFSHQEGFGELIMSGKNMRLSSLALSSFTTRSSSSWIESLRRKKSDSASSPSGGADKPLKG

SEQ ID NO: 8634 - protein, 805 aa, Homo sapiens
MWGRFLAPEASGRDSPGGARSFPAGPDYSSAWLPANESLWQATTVPSNHRNNHIRRHSIASDSGDTGIGTSCSDSVEDHSTSSGTLSFKPSQSLITLPTAHVMPSNSSASISKLRESLTPDGSKWSTSLMQTLGNHSRGEQDSSLDMKDFRPLRKWSSLSKLTAPDNCGQGGTVCREESRNGLEKIGKAKALTSQLRTIGPSCLHDSMEMLRLEDKEINKKRSSTLDCKYKFESCSKEDFRASSSTLRRQPVDMTYSALPESKPIMTSSEAFEPPKYLMLGQQAVGGVPIQPSVRTQMWLTEQLRTNPLEGRNTEDSYSLAPWQQQQIEDFRQGSETPMQVLTGSSRQSYSPGYQDFSKWESMLKIKEGLLRQKEIVIDRQKQQITHLHERIRDNELRAQHAMLGHYVNCEDSYVASLQPQYENTSLQTPFSEESVSHSQQGEFEQKLASTEKEVLQLNEFLKQRLSLFSEEKKKLEEKLKTRDRYISSLKKKCQKESEQNKEKQRRIETLEKYLADLPTLDDVQSQSLQLQILEEKNKNLQEALIDTEKKLEEIKKQCQDKETQLICQKKKEKELVTTVQSLQQKVERCLEDGIRLPMLDAKQLQNENDNLRQQNETASKIIDSQQDEIDRMILEIQSMQGKLSKEKLTTQKMMEELEKKERNVQRLTKALLENQRQTDETCSLLDQGQEPDQSRQQTVLSKRPLFDLTVIDQLFKEMSCCLFDLKALCSILNQRAQGKEPNLSLLLGIRSMNCSAEETENDHSTETLTKKLSDVCQLRRDIDELRTTISDRYAQDMGDNCITQ

SEQ ID NO: 8635 - protein, 293 aa, Homo sapiens
MTGLYELVWRVLHALLCLHRTLTSWLRVRFGTWNWIWRRCCRAASAAVLAPLGFTLRKPPAVGRNRRHHRHPRGGSCLAAAHHRMRWRADGRSLEKLPVHMGLVITEVEQEPSFSDIASLVVWCMAVGISYISVYDHQGIFKRNNSRLMDEILKQQQELLGLDCSKYSPEFANSNDKDDQVLNCHLAVKVLSPEDGKADIVRAAQDFCQLVAQKQKRPTDLDVDTLASLLSSNGCPDPDLVLKFGPVDSTLGFLPWHIRLTEIVSLPSHLNISYEDFFSALRQYAACEQRLGK

SEQ ID NO: 8636 - protein, 462 aa, Homo sapiens
MSAGGPCPAAAGGGPGGASCSVGAPGGVSMFRWLEVLEKEFDKAFVDVDLLLGEIDPDQADITYEGRQKMTSLSSCFAQLCHKAQSVSQINHKLEAQLVDLKSELTETQAEKVVLEKEVHDQLLQLHSIQLQLHAKTGQSADSGTIKAKLSGPSVEELERELEANKKEKMKEAQLEAEVKLLRKENEALRRHIAVLQAEVYGARLAAKYLDKELAGRVQQIQLLGRDMKGPAHDKLWNQLEAEIHLHRHKTVIRACRGRNDLKRPMQAPPGHDQDSLKKSQGVGPIRKVLLLKEDHEGLGISITGGKEHGVPILISEIHPGQPADRCGGLHVGDAILAVNGVNLRDTKHKEAVTILSQQRGEIEFEVVYVAPEVDSDDENVEYEDESGHRYRLYLDELEGGGNPGASCKDTSGEIKVLQGFNKKAVTDTHENGDLGTASETPLDDGASKLDDLHTLYHKKSY

SEQ ID NO: 8637 - protein, 2341 aa, Homo sapiens
MKNIYCLIPKLVNFATLGCLWISVVQCTVLNSCLKSCVTNLGQQLDLGTPHNLSEPCIQGCHFWNSVDQKNCALKCNDTYATVCERESCEVGCSSAEGAYEEEVLENADLPTAPFASSIGSHNMTLRWKSANFSGVKYIIQWKYAQLLGSWTYTKTVSRPSYVVKPLHPFTEYIFRVVWIFTAQLQLYSPPSPSYRTHPHGVPETAPLIRNIESSSPDTVEVSWDPPQFPGGPILGYNLRLISKNQKLDAGTQRTSFQFYSTLPNTIYRFSIAAVNEVGEGPEAESSITTSSSAVQQEEQWLFLSRKTSLRKRSLKHLVDEAHCLRLDAIYHNITGISVDVHQQIVYFSEGTLIWAKKAANMSDVSDLRIFYRGSGLISSISIDWLYQRMYFIMDELVCVCDLENCSNIEEITPPSISAPQKIVADSYNGYVFYLLRDGIYRADLPVPSGRCAEAVRIVESCTLKDFAIKPQAKRIIYFNDTAQVFMSTFLDGSASHLILPRIPFADVKSFACENNDFLVTDGKVIFQQDALSFNEFIVGCDLSHIEEFGFGNLVIFGSSSQLHPLPGRPQELSVLFGSHQALVQWKPPALAIGASPSAWQNWTYEVKVSTQDPPEVTHIFLNISGTMLNVPELQSAMKYKVSVRASSPKRPGPWSEPSVGTTLVPASEPPFIMAVKEDGLWSKPLNSFGPGEFLSSDIGNVSDMDWYNNSLYYSDTKGDVFVWLLNGTDISENYHLPSIAGAGALAFEWLGHFLYWAGKTYVIQRQSVLTGHTDIVTHVKLLVNDMVVDSVGGYLYWTTLYSVESTRLNGESSLVLQTQPWFSGKKVIALTLDLSDGLLYWLVQDSQCIHLYTAVLRGQSTGDTTITEFAAWSTSEISQNALMYYSGRLFWINGFRIITTQEIGQKTSVSVLEPARFNQFTIIQTSLKPLPGNFSFTPKVIPDSVQESSFRIEGNASSFQILWNGPPAVDWGVVFYSVEFSAHSKFLASEQHSLPVFTVEGLEPYALFNLSVTPYTYWGKGPKTSLSLRAPETVPSAPENPRIFILPSGKCCNKNEVVVEFRWNKPKHENGVLTKFEIFYNISNQSITNKTCEDWIAVNVTPSVMSFQLEGMSPRCFIAFQVRAFTSKGPGPYADVVKSTTSEINPFPHLITLLGNKIVFLDMDQNQVVWTFSAERVISAVCYTADNEMGYYAEGDSLFLLHLHNRSSSELFQDSLVFDITVITIDWISRHLYFALKESQNGMQVFDVDLEHKVKYPREVKIHNRNSTIISFSVYPLLSRLYWTEVSNFGYQMFYYSIISHTLHRILQPTATNQQNKRNQCSCNVTEFELSGAMAIDTSNLEKPLIYFAKAQEIWAMDLEGCQCWRVITVPAMLGKTLVSLTVDGDLIYWIITAKDSTQIYQAKKGNGAIVSQVKALRSRHILAYSSVMQPFPDKAFLSLASDTVEPTILNATNTSLTIRLPLAKTNLTWYGITSPTPTYLVYYAEVNDRKNSSDLKYRILEFQDSIALIEDLQPFSTYMIQIAVKNYYSDPLEHLPPGKEIWGKTKNGVPEAVQLINTTVRSDTSLIISWRESHKPNGPKESVRYQLAISHLALIPETPLRQSEFPNGRLTLLVTRLSGGNIYVLKVLACHSEEMWCTESHPVTVEMFNTPEKPYSLVPENTSLQFNWKAPLNVNLIRFWVELQKWKYNEFYHVKTSCSQGPAYVCNITNLQPYTSYNVRVVVVYKTGENSTSLPESFKTKAGVPNKPGIPKLLEGSKNSIQWEKAEDNGCRITYYILEIRKSTSNNLQNQNLRWKMTFNGSCSSVCTWKSKNLKGIFQFRVVAANNLGFGEYSGISENIILVGDDFWIPETSFILTIIVGIFLVVTIPLTFVWHRRLKNQKSAKEGVTVLINEDKELAELRGLAAGVGLANACYAIHTLPTQEEIENLPAFPREKLTLRLLLGSGAFGEVYEGTAVDILGVGSGEIKVAVKTLKKGSTDQEKIEFLKEAHLMSKFNHPNILKQLGVCLLNEPQYIILELMEGGDLLTYLRKARMATFYGPLLTLVDLVDLCVDISKGCVYLERMHFIHRDLAARNCLVSVKDYTSPRIVKIGDFGLARDIYKNDYYRKRGEGLLPVRWMAPESLMDGIFTTQSDVWSFGILIWEILTLGHQPYPAHSNLDVLNYVQTGGRLEPPRNCPDDLWNLMTQCWAQEPDQRPTFHRIQDQLQLFRNFFLNSIYKSRDEANNSGVINESFEGEDGDVICLNSDDIMPVALMETKNREGLNYMVLATECGQGEEKSEGPLGSQESESCGLRKEEKEPHADKDFCQEKQVAYCPSGKPEGLNYACLTHSGYGDGSD

SEQ ID NO: 8638 - protein, 2347 aa, Homo sapiens
MKNIYCLIPKLVNFATLGCLWISVVQCTVLNSCLKSCVTNLGQQLDLGTPHNLSEPCIQGCHFWNSVDQKNCALKCRESCEVGCSSAEGAYEEEVLENADLPTAPFASSIGSHNMTLRWKSANFSGVKYIIQWKYAQLLGSWTYTKTVSRPSYVVKPLHPFTEYIFRVVWIFTAQLQLYSPPSPSYRTHPHGVPETAPLIRNIESSSPDTVEVSWDPPQFPGGPILGYNLRLISKNQKLDAGTQRTSFQFYSTLPNTIYRFSIAAVNEVGEGPEAESSITTSSSAVQQEEQWLFLSRKTSLRKRSLKHLVDEAHCLRLDAIYHNITGISVDVHQQIVYFSEGTLIWAKKAANMSDVSDLRIFYRGSGLISSISIDWLYQRMYFIMDELVCVCDLENCSNIEEITPPSISAPQKIVADSYNGYVFYLLRDGIYRADLPVPSGRCAEAVRIVESCTLKDFAIKPQAKRIIYFNDTAQVFMSTFLDGSASHLILPRIPFADVKSFACENNDFLVTDGKVIFQQDALSFNEFIVGCDLSHIEEFGFGNLVIFGSSSQLHPLPGRPQELSVLFGSHQALVQWKPPALAIGANVILISDIIELFELGPSAWQNWTYEVKVSTQDPPEVTHIFLNISGTMLNVPELQSAMKYKVSVRASSPKRPGPWSEPSVGTTLVPASEPPFIMAVKEDGLWSKPLNSFGPGEFLSSDIGNVSDMDWYNNSLYYSDTKGDVFVWLLNGTDISENYHLPSIAGAGALAFEWLGHFLYWAGKTYVIQRQSVLTGHTDIVTHVKLLVNDMVVDSVGGYLYWTTLYSVESTRLNGESSLVLQTQPWFSGKKVIALTLDLSDGLLYWLVQDSQCIHLYTAVLRGQSTGDTTITEFAAWSTSEISQNALMYYSGRLFWINGFRIITTQEIGQKTSVSVLEPARFNQFTIIQTSLKPLPGNFSFTPKVIPDSVQESSFRIEGNASSFQILWNGPPAVDWGVVFYSVEFSAHSKFLASEQHSLPVFTVEGLEPYALFNLSVTPYTYWGKGPKTSLSLRAPETVPSAPENPRIFILPSGKCCNKNEVVVEFRWNKPKHENGVLTKFEIFYNISNQSITNKTCEDWIAVNVTPSVMSFQLEGMSPRCFIAFQVRAFTSKGPGPYADVVKSTTSEINPFPHLITLLGNKIVFLDMDQNQVVWTFSAERVISAVCYTADNEMGYYAEGDSLFLLHLHNRSSSELFQDSLVFDITVITIDWISRHLYFALKESQNGMQVFDVDLEHKVKYPREVKIHNRNSTIISFSVYPLLSRLYWTEVSNFGYQMFYYSIISHTLHRILQPTATNQQNKRNQCSCNVTEFELSGAMAIDTSNLEKPLIYFAKAQEIWAMDLEGCQCWRVITVPAMLAGKTLVSLTVDGDLIYWIITAKDSTQIYQAKKGNGAIVSQVKALRSRHILAYSSVMQPFPDKAFLSLASDTVEPTILNATNTSLTIRLPLAKTNLTWYGITSPTPTYLVYYAEVNDRKNSSDLKYRILEFQDSIALIEDLQPFSTYMIQIAVKNYYSDPLEHLPPGKEIWGKTKNGVPEAVQLINTTVRSDTSLIISWRESHKPNGPKESVRYQLAISHLALIPETPLRQSEFPNGRLTLLVTRLSGGNIYVLKVLACHSEEMWCTESHPVTVEMFNTPEKPYSLVPENTSLQFNWKAPLNVNLIRFWVELQKWKYNEFYHVKTSCSQGPAYVCNITNLQPYTSYNVRVVVVYKTGENSTSLPESFKTKAGVPNKPGIPKLLEGSKNSIQWEKAEDNGCRITYYILEIRKSTSNNLQNQNLRWKMTFNGSCSSVCTWKSKNLKGIFQFRVVAANNLGFGEYSGISENIILVGDDFWIPETSFILTIIVGIFLVVTIPLTFVWHRRLKNQKSAKEGVTVLINEDKELAELRGLAAGVGLANACYAIHTLPTQEEIENLPAFPREKLTLRLLLGSGAFGEVYEGTAVDILGVGSGEIKVAVKTLKKGSTDQEKIEFLKEAHLMSKFNHPNILKQLGVCLLNEPQYIILELMEGGDLLTYLRKARMATFYGPLLTLVDLVDLCVDISKGCVYLERMHFIHRDLAARNCLVSVKDYTSPRIVKIGDFGLARDIYKNDYYRKRGEGLLPVRWMAPESLMDGIFTTQSDVWSFGILIWEILTLGHQPYPAHSNLDVLNYVQTGGRLEPPRNCPDDLWNLMTQCWAQEPDQRPTFHRIQDQLQLFRNFFLNSIYKSRDEANNSGVINESFEGEDGDVICLNSDDIMPVALMETKNREGLNYMVLATECGQGEEKSEGPLGSQESESCGLRKEEKEPHADKDFCQEKQVAYCPSGKPEGLNYACLTHSGYGDGSD

SEQ ID NO: 8639 - protein, 855 aa, Homo sapiens
MAFLIILITCFVIILATSQPCQTPDDFVAATSPGHIIIGGLFAIHEKMLSSEDSPRRPQIQECVGFEISVFLQTLAMIHSIEMINNSTLLPGVKLGYEIYDTCTEVTVAMAATLRFLSKFNCSRETVEFKCDYSSYMPRVKAVIGSGYSEITMAVSRMLNLQLMPQVGYESTAEILSDKIRFPSFLRTVPSDFHQIKAMAHLIQKSGWNWIGIITTDDDYGRLALNTFIIQAEANNVCIAFKEVLPAFLSDNTIEVRINRTLKKIILEAQVNVIVVFLRQFHVFDLFNKAIEMNINKMWIASDNWSTATKITTIPNVKKIGKVVGFAFRRGNISSFHSFLQNLHLLPSDSHKLLHEYAMHLSACAYVKDTDLSQCIFNHSQRTLAYKANKAIERNFVMRNDFLWDYAEPGLIHSIQLAVFALGYAIRDLCQARDCQNPNAFQPWEQIQSKCSKECSPGQMKKTTRSQHICCYECQNCPENHYTNQTDMPHCLLCNNKTHWAPVRSTMCFEKEVEYLNWNDSLAILLLILSLLGIIFVLVVGIIFTRNLNTPVVKSSGGLRVCYVILLCHFLNFASTSFFIGEPQDFTCKTRQTMFGVSFTLCISCILTKSLKILLAFSFDPKLQKFLKCLYRPILIIFTCTGIQVVICTLWLIFAAPTVEVNVSLPRVIILECEEGSILAFGTMLGYIAILAFICFIFAFKGKYENYNEAKFITFGMLIYFIAWITFIPIYATTFGKYVPAVEIIVILISNYGILYCTFIPKCYVIICKQEINTKSAFLKMIYSYSSHSVSSIALSPASLDSMSGNVTMTNPSSSGKSATWQKSKDLQAQAFAHICRENATSVSKTLPRKRMSSI

SEQ ID NO: 8640 - protein, 1888 aa, Homo sapiens
MTGCPASSRRRGFGLFFFLRLHRLLLLFLVLRGTLANKLNVPQVLLPFGREPGRVPFLLEAQRGCYTWHSTHHDAVTVEPLYENGTLCSQKAVLIAESTQPIRLSSIILAREIVTDHELRCDVKVDVINSIEIVSRARELYVDDSPLELMVRALDAEGNTFSSLAGMMFEWSIAQDNESAREELSSKIRILKYSEAEYAPPIYIAEMEKEEKQGDVILVSGIRTGAAVVKVRIHEPFYKKVAAALIRLLVLENIFLIPSHDIYLLVGTYIKYQVAKMVQGRVTEVKFPLEHYILELQDHRVALNGSHSEKVAILDDKTAMVTASQLGQTNLVFVHKNVHMRSVSGLPNCTIYVVEPGFLGFTVQPGNRWSLEVGQVYVITVDVFDKSSTKVYISDNLRITYDFPKEYFEEQLTTVNGSYHIVKALKDGVVVINASLTSIIYQNKDIQPIKFLIKHQQEVKIYFPIMLTPKFLAFPHHPMGMLYRYKVQVEGGSGNFTWTSSNETVVIVTTKGVVTAGQVRGNSTVLARDVQNPFRYGEIKIHVLKLNKMELLPFHADVEIGQIIEIPIAMYHINKETKEAMAFTDCSHLSLDLNMDKQGVFTLLKEGIQRPGPMHCSSTHIAAKSLGHTLVTVSVNECDKYLESSATFAAYEPLKALNPVEVALVTWQSVKEMVFEGGPRPWILEPSRFFLELNAEKTEKIGIAQVWLPSKRKQNQYIYRIQCLDLGEQVLTFRIGNHPGVLNPSPAVEVLQVRFICAHPASMSVTPVYKVPAGAQPCPLPQHNKWLIPVSRLRDTVLELAVFDQHRRKFDNFSSLMLEWKSSNETLAHFEDYKSVEMVAKDDGSGQTRLHGHQILKVHQIKGTVLIGVNFVGYSEKKSPKEISNLPRSVDVELLLVDDVTVVPENATIYNHPDVKETFSLVEGSGYFLVNSSEQGVVTITYMEAESSVELVPLHPGFFTLEVYDLCLAFLGPATAHLRVSDIQELELDLIDKVEIDKTVLVTVRVLGSSKRPFQNKYFRNMELKLQLASAIVTLTPMEQQDEYSENYILRATTIGQTTLVAIAKDKMGRKYTSTPRHIEVFPPFRLLPEKMTLIPMNMMQVMSEGGPQPQSIVHFSISNQTVAVVNRRGQVTGKIVGTAVVHGTIQTVNEDTGKVIVFSQDEVQIEVVQLRAVRILAAATRLITATKMPVYVMGVTSTQTPFSFSNANPGLTFHWSMSKRDVLDLVPRHSEVFLQLPVEHNFAMVVHTKAAGRTSIKVTVHCMNSSSGQFEGNLLELSDEVQILVFEKLQLFYPECQPEQILMPINSQLKLHTNREGAAFVSSRVLKCFPNSSVIEEDGEGLLKAGSIAGTAVLEVTSIEPFGVNQTTITGVQVAPVTYLRVSSQPKLYTAQGRTLSAFPLGMSLTFTVQFYNSIGEKFHTHNTQLYLALNRDDLLHIGPGNKNYTYMAQAVNRGLTLVGLWDRRHPGMADYIPVAVEHAIEPDTKLTFVGDIICFSTHLVSQHGEPGIWMISANNILQTDIVTGVGVARSPGTAMIFHDIPGVVKTYREVVVNASSRLMLSYDLKTYLTNTLNSTVFKLFITTGRNGVNLKGFCTPNQALAITKVLLPATLMLCHVQFSNTLLDIPASKVFQVHSDFSMEKGVYVCIIKVRPQSEELLQALSVADTSVYGWATLVSERSKNGMQRILIPFIPAFYINQSELVLSHKQDIGEIRVLGVDRVLRKLEVISSSPVLVVAGHSHSPLTPGLAIYSVRVVNFTSFQQMASPVFINISCVLTSQSEAVVVRAMKDKLGADHCEDSAILKRFTGSYQILLLTLFAVLASTASIFLAYNAFLNKIQTVPVVYVPTLGTPQPGFFNSTSSPPHFMSLQPPLAQSRLQHWLWSIRH

SEQ ID NO: 8641 - protein, 1141 aa, Homo sapiens
MRSVAHAAIFQSLCITPDTLAFNTSGNVCFMEQLSDDPEGAFVPPEFDVTGNTFEAHIYSLGATLKAALEYVAEPTLEPRLSQDLEALLSRMQAEDPGDRPDLESIIALCEEKLQLTSSCRVCRSLSAVGRRVLSIESFGALQDVSESSWRERPAPGNAGPRRPPGDPSTDPEVLPTPEGPESETSRGPRASPTKALLSTPVRNGESHSREGLAGLVLDAERTLGELDRDALRRSRLRKVQTFPRLLSDSPEATLCLPLTRGKSQLPISELFSPDPRKAFLDRKNGLSSFQAQPKCRLWPEQEPEHQLGRVPCAGRSTDRGPGVPGSPGQPETSHPSQGPAEAPADPRDASGEAQTPRDDERIPEGARQLESAAAEQWVSLQDLLSQLGRPFREYELWALCLACLRALQTRPEHPAYLCLDSVLVAEDGAVLFQPPPANGSYDSFFLAPELAEERLVTEKASVYCVAAVLWTAAKFSVPRNHKLALPRRLKTLLLDMARRSAPERPSAAEAIKVCGSYLLQRGMDSRKILAHLRASICQVYQEEETISLQNAFSVVELKPSVAPAPEPSPGFLPVNSDTGLVAVPGPVPGQHPCGEEATQLPAAFTSEATHFKPIVLAQNASVARDQPALAQEESEERGGQREGEGEEKLSLEAHAGSPSLKTPDGPVPGPGPQGAAPEPLGASVQRDSAQGRPCPPPQAPANQPEGASSAAPGSPVPAPPTKASALPVEQGPAEPIPPGVASGGLRPDALGPTTAHHGPRHPPKPPRSKATERPGQEPEGPGATPAGERDDQSPDSVPERPRPADRRLCLPCVDASPLPGRTACPSLQEATRLIQEEFAFDGYLDNGLEALIMGEYIFALKDLTFATFCGAISEKFCDLYWDEKLLQNLFKVVNGQASPSPSTAEEAGSQLEGSQSPRSPSSKRPSLHRLGKEKPAMARTSSRAPCSPTSVSDVDSDALSRGNFEVGFRPQRSVKAERAQQPEAGEDRRPAGGASDVEAVTRLARSKGVGPALSPGPAGFQSCSPGWCSAFYEADCFGADVHNYVKDLGRQQADGALPDAQSPELEQQLMMEKRNYRKTLKFYQKLLQKEKRNKGSDVKTMLSKLKGQLEEMKSRVQFLSLVKKYLQASGLRAPLCPVRQ

SEQ ID NO: 8642 - protein, 280 aa, Homo sapiens
MLSCNICGETVTSEPDMKAHLIVHMESEIICPFCKLSGVNYDEMCFHIETAHFEQNTLERNFERINTVQYGTSDNKKDNTLQCGMEVNSSILSGCASNHPKNSAQNLTKDSTLKHEGFYSENLTESRKFLKSREKQSSLTEIKGSVYETTYSPPECPFCGKIEEHSEDMETHVKTKHANLLDIPLEDCDQPLYDCPMCGLICTNYHILQEHVDLHLEENSFQQGMDRVQCSGDLQLAHQLQQEEDRKRRSEESRQEIEEFQKLQELLKHFIGIIRMLPQM

SEQ ID NO: 8643 - protein, 578 aa, Homo sapiens
MLSCNICGETVTSEPDMKAHLIVHMESEIICPFCKLSGVNYDEMCFHIETAHFEQNTLERNFERINTVQYGTSDNKKDNTLQCGMEVNSSILSGCASNHPKNSAQNLTKDSTLKHEGFYSENLTESRKFLKSREKQSSLTEIKGSVYETTYSPPECPFCGKIEEHSEDMETHVKTKHANLLDIPLEDCDQPLYDCPMCGLICTNYHILQEHVDLHLEENSFQQGMDRVQCSGDLQLAHQLQQEEDRKRRSEESRQEIEEFQKLQRQYGLDNSGGYKQQQLRNMEIEVNRGRMPPSEFHRRKADMMESLALGFDDGKTKTSGIIEALHRYYQNAATDVRRVWLSSVVDHFHSSLGDKGWGCGYRNFQMLLSSLLQNDAYNDCLKGMLIPCIPKIQSMIEDAWKEGFDPQGASQLNNRLQGTKAWIGACEVYILLTSLRVKCHIVDFHKSTGPLGTHPRLFEWILNYYSSEGEGSPKVVCTSKPPIYLQHQGHSRTVIGIEEKKNRTLCLLILDPGCPSREMQKLLKQDIEASSLKQLRKSMGNLKHKQYQILAVEGALSLEEKLARRQASQVFTAEKIP

SEQ ID NO: 8644 - protein, 600 aa, Homo sapiens
MEDSTSPKQEKENQEELGETRRPWEGKTAASPQYSEPESSEPLEAKQGPETGRQSRSSRPWSPQSRAKTPLGGPAGPETSSPAPVSPREPSSSPSPLAPARQDLAAPPQSDRTTSVIPEAGTPYPDPLEQSSDKRESTPHHTSQSEGNTFQQSQQPKPHLCGRRDVSYNNAKQKELRFDVFQEEDSNSDYDLQQPAPGGSEVAPSMLEITIQNAKAYLLKTSSNSGFNLYDHLSNMLTKILNERPENAVDIFENISQDVKMAHFSKKFDALQNENELLPTYEIAEKQKALFLQGHLEGVDQELEDEIAENALPNVMESAFYFEQAGVGLGTDETYRIFLALKQLTDTHPIQRCRFWGKILGLEMNYIVAEVEFREGEDEEEVEEEDVAEERDNGESEAHEDEEDELPKSFYKAPQAIPKEESRTGANKYVYFVCNEPGRPWVKLPPVIPAQIVIARKIKKFFTGRLDAPIISYPPFPGNESNYLRAQIARISAGTHVSPLGFYQFGEEEGEEEEEAEGGRNSFEENPDFEGIQVIDLVESLSNWVHHVQHILSQRFRIYPPGQHGYPQISFHNMLLQSFNPTFGLEHMPSPMAKSLKIST

SEQ ID NO: 8645 - protein, 2715 aa, Homo sapiens
MDLVITQELARAESQQDAASLKKAYELIKSANLGKSEFDPSESFSPDLFVLCAEQALKMRQPEVSEDCIQMYFKVKAPITQFLGRAHLCRAQMCAPKSAENLEEFENCVTEYMKAINFAKGEPRYYFLVYNASVLYWQMVRPFLKPGYRHHLIPSLSQIINVLSQTEEEDKEWRAELMLELLECYLQAGRKEEAARFCSTAAPFIKSHVPQKYRQIFSVMVRHELMDELQLKEEKKNSISLSVTFYINMLKAKAEQNDLPGDISVILRKAYRHLGHYNHQRFPSISEEKMLLLFELARFSLTLKCMEISSACLSDLKKMESKDPGKLIEMECLECESEALRLESKMKVYNRAAVEAQLDIIQRLDVALQRAVRLGDPRVIHVVCATQWNTCLPLLQHNLRHHLRKPLAGVADVLEKLDSLMTLLRCQVHMEMAQIEEDEDRLEPATEHLRKAARLDSLGLYRDRIQMASTRLRLCTTLYQAPERAEDKAIMAVEQAKKATPKDSVRKKRALLVNAGLALAPDAFQIVLDSENEAKVSTGKNRGRFTYLCAKAWHHTVSVDKAAGHLRRLGNENDKERIQIWAELAKVARKQGVWDVCRTASRFCLLYDNVKVKKLRLRRGKKKRGRDGSVQDTWSQPEVVLQRQVCPDLLRKFAEVGFIHAEATVHLLRSEGVELNDRAIPPEDLSQHPAGYVPEPPEVNAEWITYRTWIESLSRCAMNNWLRSAEIGQEIQEAWIVQNAVVYVLNHNHHLILAGRQKELVDALYHLLSIVKATGHSGDPVMLVTLCNTLARGLIISWIPVQAAEKSRKFMRPNAFHSPLDAGATSEIKTAVEVCEFALNLTNGSAPEETVPTGTRQQLIATWVKAKQLLQQQIGPRLGTEEQGTNEDVSSVTRVLVALEMYSCNGLGLMDFTVPSLAQLVKMASECNWSDPLVELQTLTRLTHFAHAARDHETTMACAHRALEMGIKYLKKFGPEESRLVAEMLCTATAIQGRSIMENLKGRKQLRLVAAKAFTESARFGGIAGSSALVMLAARHYWNAWLPLLSSAVYRKKAKGALKRLIGIINKTEARKQEKGKTLLLHQWPTADFQGGGTTEGYFLPGAEDDLALRAALYGLLFHSHADQDDWEGGLKVLDEAVQVLPRTAHRLLIFKHMVIVKAKLGQNFSMEIQKFKAESEDYLARMWHRLALNSPSVSGELACYNNAIQALQKPEMEWQKVEYLMEFGQWLHHRHFPLEDVVFHLRWAVEILLAMKPPGDVPEPQPTPDGEYVAVEMPPRSPVSEAEEAVSLEQLRSVRQLEALARVHILLALVLSPGAEGYEDCCLAAYAFFRHIWQVSLMTAGKSVLENRPLAATSSHLLLPKKEKENERSKEKEKERSKEKENERSKEKDKEKGKEEKVKEPKQSQSPAPIKQLEDLPMSIEEWASYSCPEEVLSVLKQDRSDSTVNPSSIQKPTYSLYFLDHLVKALQKMCLHELTVPVLQLGVLISDSVVGSKGLSDLYHLRLAHACSELKLREAAARHEEAVGQVCVSELEQASCRKEIALKKEKNKEPLLEESLPALNEQTLPVQPGEIKPLDAKDKILKMNGETGRDLDGTSFPHLWMLKAEVLLEMNLYQPARLLLSEAYLAFQELDEPCAEAQCLLLLAQLANKEKNYGQAKKMIAQAQHLGGSEEFWYNSTLTLAEALLSMEHSGREATVCHIFQKLINAFKILKKERPNRLPLLEFMITDLEARCLSLRVRVAQHSAVTEPTECSLLLKEMDDGLLEIERKFIDCGCKENCVDVKLERAKIKRLRAQNEKDEEQKTAYYLEAYGLAQGAVAEEEGRLHSIQGLYGLAQGAMAEEEGRLHSVQGLLSLQDLQNVNTPLMRKLARLKLGLVEMALDMLQFIWEEAHGQQSEQGSLEKLLADYLQNTSDYTSVGLQWFTLKRTLAHGALAQLGSLQPLSVGCVEIRARLLGLAGRALHLLAMQADPVHPTCYWEAGPSVGAKLSGLKSLELEVEEEGATKSSRDPPASRAAPEEHCRRGEDLKRRMVLAQQYLAQASEVLLQCLQVALGSGLLDVAAAASLEMVECVGTLDPATTCQFLALSQSCSASETMRDVLLAATANTSSSQLAALLQLQHQLRCQDRTTTSLGARVEQRLAAVSKAWQNLCVTEQHFNLLNEMPPTFWILFLHLSGDRSRLYGAAYEKPKFITAAKGKVQAVGGSCKVMRLAISPTAFSHLLACAQQFRKQTQAQVYSEDMALNIGSEPEGLQVEEKERPVQRLSSVLGPLEELLQPLFPLLSLSKARVQTPAVVADSGKSKGKDKERKTSTGQHSTVQPEVADKIVLVADRHLLELPLEGLSVFDEGTISSVSREFSLQMLWNRLHKEETEGGVKKEGRSRDPKKRSLAKKGRKGSIPRTIPPDCIIVDSDNFKFVVDPYEEAQGPEMLTPVSITQDILERFQDTFTSRWAGHLGSKHFPSQAQWEQALGSCSGFFFYGMESFLSHILVERLVAMNLQECQVAVLLDLARSYQSLKRHMESVEHRRSVGRWEANWRNSASPSEDEWRRGGEPRRGFSDLEGQAAAAPKLRAPSHHAQLGPVWAAAPSHRVVQAWTCLPSAAGAPALASALGSAPLPTHPHLPAPIPSSQLALPFLGLSPALGAASARDPPPATSRKAAAWTSSSACLCAPWGLRRGWSCVSSRGQDKGGLPLAALVLSCLDQKTIQTVSLFLI

SEQ ID NO: 8646 - protein, 387 aa, Homo sapiens
MAGKAAAPGTAVLLVTANVGSLFDDPENLQKNWLREFYQVVHTHKPHFMALHCQEFGGKNYEASMSHVDKFVKELLSSDAMKEYNRARVYLDENYKSQEHFTALGSFYFLHESLKNIYQFDFKAKKYRKVAGKEIYSDTLESTPMLEKEKFPQDYFPECKWSRKGFIRTRWCIADCAFDLVNIHLFHDASNLVAWETSPSVYSGIRHKALGYVLDRIIDQRFEKVSYFVFGDFNFRLDSKSVVETLCTKATMQTVRAADTNEVVKLIFRESDNDRKVMLQLEKKLFDYFNQEVFRDNNGTALLEFDKELSVFKDRLYELDISFPPSYPYSEDARQGEQYMNTRCPAWCDRILMSPSAKELVLRVSVCCPSPGHRGMWSAGSGLAQPW

SEQ ID NO: 8647 - protein, 412 aa, Homo sapiens
MAGKAAAPGTAVLLVTANVGSLFDDPENLQKNWLREFYQVVHTHKPHFMALHCQEFGGKNYEASMSHVDKFVKELLSSDAMKEYNRARVYLDENYKSQEHFTALGSFYFLHESLKNIYQFDFKAKKYRKVAGKEIYSDTLESTPMLEKEKFPQDYFPECKWSRKGFIRTRWCIADCAFDLVNIHLFHDASNLVAWETSPSVYSGIRHKALGYVLDRIIDQRFEKVSYFVFGDFNFRLDSKSVVETLCTKATMQTVRAADTNEVVKLIFRESDNDRKVMLQLEKKLFDYFNQEVFRDNNGTALLEFDKELSVFKDRLYELDISFPPSYPYSEDARQGEQYMNTRCPAWCDRILMSPSAKELVLRSESEEKVVTYDHIGPNVCMGDHKPVFLAFRIMPGAGKPHAHVHKCCVVQ

SEQ ID NO: 8648 - protein, 315 aa, Homo sapiens
MEKFRAVLDLHVKHHSALGYGLVTLLTAGGERIFSAVAFQCPCSAAWNLPYGLVFLLVPALALFLLGYVLSARTWRLLTGCCSSARASCGSALRGSLVCTQISAAAALAPLTWVAVALLGGAFYECAATGSAAFAQRLCLGRNRSCAAELPLVPCNQAKASDVQDLLKDLKAQSQVLGWILIAVVIIILLIFTSVTRCLSPVSFLQLKFWKIYLEQEQQILKSKATEHATELAKENIKCFFEGSHPKEYNTPSMKEWQQISSLYTFNPKGQYYSMLHKYVNRKEKTHSIRSTEGDTVIPVLGFVDSSGINSTPEL

SEQ ID NO: 8649 - protein, 468 aa, Homo sapiens
MDINTYNNQLHLQRNALCVIPQDFFQLLPNLTWLDLRYNRIKALPSGIGAHQHLKTLLLERNPIKMLPVELGSVTTLKALNLRHCPLEFPPQLVVQKGLVAIQRFLRMWAVEHSLPRNPTSQEAPPVREMTLRDLPSPGLELSGDHASNQGAVNAQDPEGAVMKEKASFLPPVEKPDLSELRKSADSSENWPSEEEIRRFWKLRQEIVEHVKADVLGDQLLTRELPPNLKAALNIEKELPKPRHVFRRKTASSRSILPDLLSPYQMAIRAKRLEESRAAALRELQEKQALMEQQRREKRALQEWRERAQRMRKRKEELSKLLPPRRSMVASKIPSATDLIDNRKVPLNPPGKMKPSKEKSPQASKEMSALQERNLEEKIKQHVLQMREQRRFHGQAPLEEMRKAAEDLEIATELQDEVLKLKLGLTLNKDRRRAALTGNLSLGLPAAQPQNTFFNTKYGESGNVRRYQ

SEQ ID NO: 8650 - protein, 530 aa, Homo sapiens
MEGSSSYEVPSVAAADLEEGAGQTRSLPATPSKDVHKGVGGIIFSSSPILDLSESGLCRLEEVFRIPSLQQLHLQRNALCVIPQDFFQLLPNLTWLDLRYNRIKALPSGIGAHQHLKTLLLERNPIKMLPVELGSVTTLKALNLRHCPLEFPPQLVVQKGLVAIQRFLRMWAVEHSLPRNPTSQEAPPVREMTLRDLPSPGLELSGDHASNQGAVNAQDPEGAVMKEKASFLPPVEKPDLSELRKSADSSENWPSEEEIRRFWKLRQEIVEHVKADVLGDQLLTRELPPNLKAALNIEKELPKPRHVFRRKTASSRSILPDLLSPYQMAIRAKRLEESRAAALRELQEKQALMEQQRREKRALQEWRERAQRMRKRKEELSKLLPPRRSMVASKIPSATDLIDNRKVPLNPPGKMKPSKEKSPQASKEMSALQERNLEEKIKQHVLQMREQRRFHGQAPLEEMRKAAEDLEIATELQDEVLKLKLGLTLNKDRRRAALTGNLSLGLPAAQPQNTFFNTKYGESGNVRRYQ

SEQ ID NO: 8651 - protein, 458 aa, Homo sapiens
MKPHRIRMTHNLLLNYGLYRKMEIYRPHKATAEEMTKYHSDEYIKFLRSIRPDNMSEYSKQMQRFNVGEDCPVFDGLFEFCQLSTGGSVAGAVKLNRQQTDMAVNWAGGLHHAKKSEASGFCYVNDIVLAILELLKYHQRVLYIDIDIHHGDGVEEAFYTTDRVMTVSFHKYGEYFPGTGDLRDIGAGKGKYYAVNFPMRDGIDDESYGQIFKPIISKVMEMYQPSAVVLQCGADSLSGDRLGCFNLTVKGHAKCVEVVKTFNLPLLMLGGGGYTIRNVARCWTYETAVALDCEIPNELPYNDYFEYFGPDFKLHISPSNMTNQNTPEYMEKIKQRLFENLRMLPHAPGVQMQAIPEDAVHEDSGDEDGEDPDKRISIRASDKRIACDEEFSDSEDEGEGGRRNVADHKKGAKKARIEEDKKETEDKKTDVKEEDKSKDNSGEKTDTKGTKSEQLSNP

SEQ ID NO: 8652 - protein, 693 aa, Homo sapiens
MATSGANGPGSATASASNPRKFSEKIALQKQRQAEETAAFEEVMMDIGSTRLQAQKLRLAYTRSSHYGGSLPNVNQIGSGLAEFQSPLHSPLDSSRSTRHHGLVERVQRDPRRMVSPLRRYTRHIDSSPYSPAYLSPPPESSWRRTMAWGNFPAEKGQLFRLPSALNRTSSDSALHTSVMNPSPQDTYPGPTPPSILPSRRGGILDGEMDPKVPAIEENLLDDKHLLKPWDAKKLSSSSSRPRSCEVPGINIFPSPDQPANVPVLPPAMNTGGSLPDLTNLHFPPPLPTPLDPEETAYPSLSGGNSTSNLTHTMTHLGISRGMGLGPGYDAPGLHSPLSHPSLQSSLSNPNLQASLSSPQPQLQGSHSHPSLPASSLARHVLPTTSLGHPSLSAPALSSSSSSSSTSSPVLGAPSYPASTPGASPHHRRVPLSPLSLLAGPADARRSQQQLPKQFSPTMSPTLSSITQGVPLDTSKLSTDQRLPPYPYSSPSLVLPTQPHTPKSLQQPGLPSQSCSVQSSGGQPPGRQSHYGTPYPPGPSGHGQQSYHRPMSDFNLGNLEQFSMESPSASLVLDPPGFSEGPGFLGGEGPMGGPQDPHTFNHQNLTHCSRHGSGPNIILTGDSSPGFSKEIAAALAGVPGFEVSAAGLELGLGLEDELRMEPLGLEGLNMLSDPCALLPDPAVEESFRSDRLQ

SEQ ID NO: 8653 - protein, 259 aa, Homo sapiens
MGDAAADPPGPALPCEFLRPGCGAPLSPGAQLGRGAPTSAFPPPAAEAHPAARRGLRSPQLPSGAMSQNGAPGMQEESLQGSWVELHFSNNGNGGSVPASVSIYNGDMEKILLDAQHESGRSSSKSSHCDSPPRSQTPQDTNRASETDTHSIGEKNSSQSEEDDIERRKEVESILKKNSDWIWDWSSRPENIPPKEFLFKHPKRTATLSMRNTSVMKKGGIFSAEFLKVFLPSLLLSHLLAIGLGIYIGRRLTTSTSTF

SEQ ID NO: 8654 - protein, 586 aa, Homo sapiens
MQAGARFQRRRRQLQQQQPRRRQPLLWPMDAEPPPPPPWVWMVPGSAGLLRLSAGVVVPPVLLASAPPPAAPLLPGLPGWPAPSEPVLPLLPLPSAPDSAAAAAAHPFPALHGQWLFGGHSPSLGLPPSSTVELVPVFPHLCPSALATPIGKSWIDKRIPNCKIFFNNSFALDSTWIHPEESRFFHGHEKPRLLANQVAVSLSRPAPASRPLPTVVLAPQPIPGGCHNSLKVTSSPAIAIATAAAAAMVSVDPENLRGPSPSSVQPRHFLTLAPIKIPLRTSPVSDTRTERGRVARPPALMLRAQKSRDGDKEDKEPPPMLGGGEDSTARGNRPVASTPVPGSPWCVVWTGDDRVFFFNPTMHLSVWEKPMDLKDRGDLNRIIEDPPHKRKLEAPATDNSDGSSSEDNREDQDVKTKRNRTEGCGSPKPEEAKREDKGTRTPPPQILLPLEERVTHFRDMLLERGVSAFSTWEKELHKIVFDPRYLLLNSEERKQIFEQFVKTRIKEEYKEKKSKLLLAKEEFKKLLEESKVSPRTTFKEFAEKYGRDQRFRLVQKRKDQEHFFNQFILILKKRDKENRLRLRKMR

SEQ ID NO: 8655 - protein, 1218 aa, Homo sapiens
MEADAVSEGGAMAEERPPRLVDYFVVAGLAGNGAPIPEETWVPEPSGPLRPPRPAEPITDVAVIARALGEEVPQGYTCIQASAGGHPLELSAGLLGGTQPVICYRRGRDKPPLVELGVLYEGKERPKPGFQVLDTTPYSHSANLAPPGPGHPRTYLTYRRAAEGAGLHALGITDLCLVLPSKGEGTPHTYCRLPRNLNPGMWGPAVYLCYKVGLAKANTLVYEAELLGRYPEEDNEAFPLPESVPVFCLPMGATIECWPAQTKYPVPVFSTFVLTGAAGDKVYGAALQFYEAFPRARLSERQARALGLLSAVERGRALGGRAVRSRRAIAVLSRWPAFPAFRAFLTFLYRYSVSGPHRLPLEAHISHFIHNVPFPSPQRPRILVQMSPYDNLLLCQPVSSPLPLSGASFLQLLQSLGPELAITLLLAVLTEHKLLVHSLRPDLLTSVCEALVSMIFPLHWQCPYIPLCPLVLADVLSAPVPFIVGIHSSYFDLHDPPADVICVDLDTNTLFQTEEKKLLSPRTLPRRPYKVLLATLTNLYQQLDQTYTGPEEEASLEFLLTDYEAVCGRRARLEREVQGAFLRFMACLLKGYRVFLRPLTQAPSEGARDVDNLFFLQGFLKSRERSSHKLYSQLLHTQMFSQFIEECSFGSARHAALEFFDSCVEKVHPEQEKPEPTPLVELEELSGSELTVFITPPEEPALPEGSESTPQYCYDGFPELRAELFESLQEQPGALPVPGPSRSAPSSPAPRRTKQEMKVAQRMAQKSAAVPELWARCLLGHCYGLWFLCLPAYVRSAPSRVQALHTAYHVLRQMESGKVVLPDEVCYRVLMQLCSHYGQPVLSVRVMLEMRQAGIVPNTITYGYYNKAVLESKWPSGTPGGRLRWAKLRNVVLGAAQFRQPLRERQQQQQQQQQQQQQQQQEQVSAHQEAGSSQAEPYLERPSPTRPLQRQTTWAGRSLRDPASPPGRLVKSGSLGSARGAQPTVEAGVAHMIEALGVLEPRGSPVPWHDGSLSDLSLTGEEPLPGGSPGGSGSALSAQSTEALEGLSGRGPKAGGRQDEAGTPRRGLGARLQQLLTPSRHSPASRIPPPELPPDLPPPARRSPMDSLLHPRERPGSTASESSASLGSEWDLSESSLSNLSLRRSSERLSDTPGSFQSPSLEILLSSCSLCRACDSLVYDEEIMAGWAPDDSNLNTTCPFCACPFVPLLSVQTLDSRP

SEQ ID NO: 8656 - protein, 551 aa, Homo sapiens
MFGIQENIPRGGTTMKEEPLGSGMNPVRSWMHTAGVVDANTAAQSGVGLARAHFEKQPPSNLRKSNFFHFVLALYDRQGQPVEIERTAFVDFVEKEKEPNNEKTNNGIHYKLQLLYSNGVRTEQDLYVRLIDSMTKQAIVYEGQDKNPEMCRVLLTHEIMCSRCCDKKSCGNRNETPSDPVIIDRFFLKFFLKCNQNCLKNAGNPRDMRRFQVVVSTTVNVDGHVLAVSDNMFVHNNSKHGRRARRLDPSEATPCIKAISPSEGWTTGGATVIIIGDNFFDGLQVVFGTMLVWSELITPHAIRVQTPPRHIPGVVEVTLSYKSKQFCKGAPGRFVYTALNEPTIDYGFQRLQKVIPRHPGDPERLPKEVLLKRAADLVEALYGMPHNNQEIILKRAADIAEALYSVPRNHNQIPTLGNNPAHTGMMGVNSFSSQLAVNVSETSQANDQVGYSRNTSSVSPRGYVPSSTPQQSNYNTVSTSMNGYGSGAMASLGVPGSPGFLNGSSANSPYGMKQKSAFAPVVRPQASPPPSCTSANGNGLQAMSGLVVPPM

SEQ ID NO: 8657 - protein, 2896 aa, Homo sapiens
MWPTRRLVTIKRSGVDGPHFPLSLSTCLFGRGIECDIRIQLPVVSKQHCKIEIHEQEAILHNFSSTNPTQVNGSVIDEPVRLKHGDVITIIDRSFRYENESLQNGRKSTEFPRKIREQEPARRVSRSSFSSDPDESEGIPLKRRRVSFGGHLRPELFDENLPPNTPLKRGEAPTKRKSLVMHTPPVLKKIIKEQPQPSGKQESGSEIHVEVKAQSLVISPPAPSPRKTPVASDQRRRSCKTAPASSSKSQTEVPKRGGRKSGNLPSKRVSISRSQHDILQMICSKRRSGASEANLIVAKSWADVVKLGAKQTQTKVIKHGPQRSMNKRQRRPATPKKPVGEVHSQFSTGHANSPCTIIIGKAHTEKVHVPARPYRVLNNFISNQKMDFKEDLSGIAEMFKTPVKEQPQLTSTCHIAISNSENLLGKQFQGTDSGEEPLLPTSESFGGNVFFSAQNAAKQPSDKCSASPPLRRQCIRENGNVAKTPRNTYKMTSLETKTSDTETEPSKTVSTANRSGRSTEFRNIQKLPVESKSEETNTEIVECILKRGQKATLLQQRREGEMKEIERPFETYKENIELKENDEKMKAMKRSRTWGQKCAPMSDLTDLKSLPDTELMKDTARGQNLLQTQDHAKAPKSEKGKITKMPCQSLQPEPINTPTHTKQQLKASLGKVGVKEELLAVGKFTRTSGETTHTHREPAGDGKSIRTFKESPKQILDPAARVTGMKKWPRTPKEEAQSLEDLAGFKELFQTPGPSEESMTDEKTTKIACKSPPPESVDTPTSTKQWPKRSLRKADVEEEFLALRKLTPSAGKAMLTPKPAGGDEKDIKAFMGTPVQKLDLAGTLPGSKRQLQTPKEKAQALEDLAGFKELFQTPGHTEELVAAGKTTKIPCDSPQSDPVDTPTSTKQRPKRSIRKADVEGELLACRNLMPSAGKAMHTPKPSVGEEKDIIIFVGTPVQKLDLTENLTGSKRRPQTPKEEAQALEDLTGFKELFQTPGHTEEAVAAGKTTKMPCESSPPESADTPTSTRRQPKTPLEKRDVQKELSALKKLTQTSGETTHTDKVPGGEDKSINAFRETAKQKLDPAASVTGSKRHPKTKEKAQPLEDLAGLKELFQTPVCTDKPTTHEKTTKIACRSQPDPVDTPTSSKPQSKRSLRKVDVEEEFFALRKRTPSAGKAMHTPKPAVSGEKNIYAFMGTPVQKLDLTENLTGSKRRLQTPKEKAQALEDLAGFKELFQTRGHTEESMTNDKTAKVACKSSQPDPDKNPASSKRRLKTSLGKVGVKEELLAVGKLTQTSGETTHTHTEPTGDGKSMKAFMESPKQILDSAASLTGSKRQLRTPKGKSEVPEDLAGFIELFQTPSHTKESMTNEKTTKVSYRASQPDLVDTPTSSKPQPKRSLRKADTEEEFLAFRKQTPSAGKAMHTPKPAVGEEKDINTFLGTPVQKLDQPGNLPGSNRRLQTRKEKAQALEELTGFRELFQTPCTDNPTTDEKTTKKILCKSPQSDPADTPTNTKQRPKRSLKKADVEEEFLAFRKLTPSAGKAMHTPKAAVGEEKDINTFVGTPVEKLDLLGNLPGSKRRPQTPKEKAKALEDLAGFKELFQTPGHTEESMTDDKITEVSCKSPQPDPVKTPTSSKQRLKISLGKVGVKEEVLPVGKLTQTSGKTTQTHRETAGDGKSIKAFKESAKQMLDPANYGTGMERWPRTPKEEAQSLEDLAGFKELFQTPDHTEESTTDDKTTKIACKSPPPESMDTPTSTRRRPKTPLGKRDIVEELSALKQLTQTTHTDKVPGDEDKGINVFRETAKQKLDPAASVTGSKRQPRTPKGKAQPLEDLAGLKELFQTPICTDKPTTHEKTTKIACRSPQPDPVGTPTIFKPQSKRSLRKADVEEESLALRKRTPSVGKAMDTPKPAGGDEKDMKAFMGTPVQKLDLPGNLPGSKRWPQTPKEKAQALEDLAGFKELFQTPGTDKPTTDEKTTKIACKSPQPDPVDTPASTKQRPKRNLRKADVEEEFLALRKRTPSAGKAMDTPKPAVSDEKNINTFVETPVQKLDLLGNLPGSKRQPQTPKEKAEALEDLVGFKELFQTPGHTEESMTDDKITEVSCKSPQPESFKTSRSSKQRLKIPLVKVDMKEEPLAVSKLTRTSGETTQTHTEPTGDSKSIKAFKESPKQILDPAASVTGSRRQLRTRKEKARALEDLVDFKELFSAPGHTEESMTIDKNTKIPCKSPPPELTDTATSTKRCPKTRPRKEVKEELSAVERLTQTSGQSTHTHKEPASGDEGIKVLKQRAKKKPNPVEEEPSRRRPRAPKEKAQPLEDLAGFTELSETSGHTQESLTAGKATKIPCESPPLEVVDTTASTKRHLRTRVQKVQVKEEPSAVKFTQTSGETTDADKEPAGEDKGIKALKESAKQTPAPAASVTGSRRRPRAPRESAQAIEDLAGFKDPAAGHTEESMTDDKTTKIPCKSSPELEDTATSSKRRPRTRAQKVEVKEELLAVGKLTQTSGETTHTDKEPVGEGKGTKAFKQPAKRKLDAEDVIGSRRQPRAPKEKAQPLEDLASFQELSQTPGHTEELANGAADSFTSAPKQTPDSGKPLKISRRVLRAPKVEPVGDVVSTRDPVKSQSKSNTSLPPLPFKRGGGKDGSVTGTKRLRCMPAPEEIVEELPASKKQRVAPRARGKSSEPVVIMKRSLRTSAKRIEPAEELNSNDMKTNKEEHKLQDSVPENKGISLRSRRQNKTEAEQQITEVFVLAERIEINRNEKKPMKTSPEMDIQNPDDGARKPIPRDKVTENKRCLRSARQNESSQPKVAEESGGQKSAKVLMQNQKGKGEAGNSDSMCLRSRKTKSQPAASTLESKSVQRVTRSVKRCAENPKKAEDNVCVKKIRTRSHRDSEDI

SEQ ID NO: 8658 - protein, 3256 aa, Homo sapiens
MWPTRRLVTIKRSGVDGPHFPLSLSTCLFGRGIECDIRIQLPVVSKQHCKIEIHEQEAILHNFSSTNPTQVNGSVIDEPVRLKHGDVITIIDRSFRYENESLQNGRKSTEFPRKIREQEPARRVSRSSFSSDPDEKAQDSKAYSKITEGKVSGNPQVHIKNVKEDSTADDSKDSVAQGTTNVHSSEHAGRNGRNAADPISGDFKEISSVKLVSRYGELKSVPTTQCLDNSKKNESPFWKLYESVKKELDVKSQKENVLQYCRKSGLQTDYATEKESADGLQGETQLLVSRKSRPKSGGSGHAVAEPASPEQELDQNKGKGRDVESVQTPSKAVGASFPLYEPAKMKTPVQYSQQQNSPQKHKNKDLYTTGRRESVNLGKSEGFKAGDKTLTPRKLSTRNRTPAKVEDAADSATKPENLSSKTRGSIPTDVEVLPTETEIHNEPFLTLWLTQVERKIQKDSLSKPEKLGTTAGQMCSGLPGLSSVDINNFGDSINESEGIPLKRRRVSFGGHLRPELFDENLPPNTPLKRGEAPTKRKSLVMHTPPVLKKIIKEQPQPSGKQESGSEIHVEVKAQSLVISPPAPSPRKTPVASDQRRRSCKTAPASSSKSQTEVPKRGGRKSGNLPSKRVSISRSQHDILQMICSKRRSGASEANLIVAKSWADVVKLGAKQTQTKVIKHGPQRSMNKRQRRPATPKKPVGEVHSQFSTGHANSPCTIIIGKAHTEKVHVPARPYRVLNNFISNQKMDFKEDLSGIAEMFKTPVKEQPQLTSTCHIAISNSENLLGKQFQGTDSGEEPLLPTSESFGGNVFFSAQNAAKQPSDKCSASPPLRRQCIRENGNVAKTPRNTYKMTSLETKTSDTETEPSKTVSTANRSGRSTEFRNIQKLPVESKSEETNTEIVECILKRGQKATLLQQRREGEMKEIERPFETYKENIELKENDEKMKAMKRSRTWGQKCAPMSDLTDLKSLPDTELMKDTARGQNLLQTQDHAKAPKSEKGKITKMPCQSLQPEPINTPTHTKQQLKASLGKVGVKEELLAVGKFTRTSGETTHTHREPAGDGKSIRTFKESPKQILDPAARVTGMKKWPRTPKEEAQSLEDLAGFKELFQTPGPSEESMTDEKTTKIACKSPPPESVDTPTSTKQWPKRSLRKADVEEEFLALRKLTPSAGKAMLTPKPAGGDEKDIKAFMGTPVQKLDLAGTLPGSKRQLQTPKEKAQALEDLAGFKELFQTPGHTEELVAAGKTTKIPCDSPQSDPVDTPTSTKQRPKRSIRKADVEGELLACRNLMPSAGKAMHTPKPSVGEEKDIIIFVGTPVQKLDLTENLTGSKRRPQTPKEEAQALEDLTGFKELFQTPGHTEEAVAAGKTTKMPCESSPPESADTPTSTRRQPKTPLEKRDVQKELSALKKLTQTSGETTHTDKVPGGEDKSINAFRETAKQKLDPAASVTGSKRHPKTKEKAQPLEDLAGLKELFQTPVCTDKPTTHEKTTKIACRSQPDPVDTPTSSKPQSKRSLRKVDVEEEFFALRKRTPSAGKAMHTPKPAVSGEKNIYAFMGTPVQKLDLTENLTGSKRRLQTPKEKAQALEDLAGFKELFQTRGHTEESMTNDKTAKVACKSSQPDPDKNPASSKRRLKTSLGKVGVKEELLAVGKLTQTSGETTHTHTEPTGDGKSMKAFMESPKQILDSAASLTGSKRQLRTPKGKSEVPEDLAGFIELFQTPSHTKESMTNEKTTKVSYRASQPDLVDTPTSSKPQPKRSLRKADTEEEFLAFRKQTPSAGKAMHTPKPAVGEEKDINTFLGTPVQKLDQPGNLPGSNRRLQTRKEKAQALEELTGFRELFQTPCTDNPTTDEKTTKKILCKSPQSDPADTPTNTKQRPKRSLKKADVEEEFLAFRKLTPSAGKAMHTPKAAVGEEKDINTFVGTPVEKLDLLGNLPGSKRRPQTPKEKAKALEDLAGFKELFQTPGHTEESMTDDKITEVSCKSPQPDPVKTPTSSKQRLKISLGKVGVKEEVLPVGKLTQTSGKTTQTHRETAGDGKSIKAFKESAKQMLDPANYGTGMERWPRTPKEEAQSLEDLAGFKELFQTPDHTEESTTDDKTTKIACKSPPPESMDTPTSTRRRPKTPLGKRDIVEELSALKQLTQTTHTDKVPGDEDKGINVFRETAKQKLDPAASVTGSKRQPRTPKGKAQPLEDLAGLKELFQTPICTDKPTTHEKTTKIACRSPQPDPVGTPTIFKPQSKRSLRKADVEEESLALRKRTPSVGKAMDTPKPAGGDEKDMKAFMGTPVQKLDLPGNLPGSKRWPQTPKEKAQALEDLAGFKELFQTPGTDKPTTDEKTTKIACKSPQPDPVDTPASTKQRPKRNLRKADVEEEFLALRKRTPSAGKAMDTPKPAVSDEKNINTFVETPVQKLDLLGNLPGSKRQPQTPKEKAEALEDLVGFKELFQTPGHTEESMTDDKITEVSCKSPQPESFKTSRSSKQRLKIPLVKVDMKEEPLAVSKLTRTSGETTQTHTEPTGDSKSIKAFKESPKQILDPAASVTGSRRQLRTRKEKARALEDLVDFKELFSAPGHTEESMTIDKNTKIPCKSPPPELTDTATSTKRCPKTRPRKEVKEELSAVERLTQTSGQSTHTHKEPASGDEGIKVLKQRAKKKPNPVEEEPSRRRPRAPKEKAQPLEDLAGFTELSETSGHTQESLTAGKATKIPCESPPLEVVDTTASTKRHLRTRVQKVQVKEEPSAVKFTQTSGETTDADKEPAGEDKGIKALKESAKQTPAPAASVTGSRRRPRAPRESAQAIEDLAGFKDPAAGHTEESMTDDKTTKIPCKSSPELEDTATSSKRRPRTRAQKVEVKEELLAVGKLTQTSGETTHTDKEPVGEGKGTKAFKQPAKRKLDAEDVIGSRRQPRAPKEKAQPLEDLASFQELSQTPGHTEELANGAADSFTSAPKQTPDSGKPLKISRRVLRAPKVEPVGDVVSTRDPVKSQSKSNTSLPPLPFKRGGGKDGSVTGTKRLRCMPAPEEIVEELPASKKQRVAPRARGKSSEPVVIMKRSLRTSAKRIEPAEELNSNDMKTNKEEHKLQDSVPENKGISLRSRRQNKTEAEQQITEVFVLAERIEINRNEKKPMKTSPEMDIQNPDDGARKPIPRDKVTENKRCLRSARQNESSQPKVAEESGGQKSAKVLMQNQKGKGEAGNSDSMCLRSRKTKSQPAASTLESKSVQRVTRSVKRCAENPKKAEDNVCVKKIRTRSHRDSEDI

SEQ ID NO: 8659 - protein, 593 aa, Homo sapiens
MDRMTEDALRLNLLKRSLDPADERDDVLAKRLKMEGHEAMERLKMLALLKRKDLANLEVPHELPTKQDGSGVKGYEEKLNGNLRPHGDNRTAGRPGKENINDEPVDMSARRSEPERGRLTPSPDIIVLSDNEASSPRSSSRMEERLKAANLEMFKGKGIEERQQLIKQLRDELRLEEARLVLLKKLRQSQLQKENVVQKTPVVQNAASIVQPSPAHVGQQGLSKLPSRPGAQGVEPQNLRTLQGHSVIRSATNTTLPHMLMSQRVIAPNPAQLQGQRGPPKPGLVRTTTPNMNPAINYQPQSSSSVPCQRTTSSAIYMNLASHIQPGTVNRVSSPLPSPSAMTDAANSQAAAKLALRKQLEKTLLEIPPPKPPAPLLHFLPSAANSEFIYMVGLEEVVQSVIDSQGKSCASLLRVEPFVCAQCRTDFTPHWKQEKNGKILCEQCMTSNQKKALKAEHTNRLKNAFVKALQQEQEIEQRLQQQAALSPTTAPAVSSVSKQETIMRHHTLRQAPQPQSSLQRGIPTSARSMLSNFAQAPQLSVPGGLLGMPGVNIAYLNTGIGGHKGPSLADRQREYLLDMIPPRSISQSISGQK

SEQ ID NO: 8660 - protein, 237 aa, Homo sapiens
MNKRRLLYPSGWLHGPSDMQGLLFSTLLLAGLAQFCCRVQGTGPLDTTPEGRPGEVSDAPQRKQFCHWPCKCPQQKPRCPPGVSLVRDGCGCCKICAKQPGEICNEADLCDPHKGLYCDYSVDRPRYETGVCAYLVAVGCEFNQVHYHNGQVFQPNPLFSCLCVSGAIGCTPLFIPKLAGSHCSGAKGGKKSDQSNCSLEPLLQQLSTSYKTMPDVCQASNLLPALRSLNCCLPSSL

SEQ ID NO: 8661 - protein, 738 aa, Homo sapiens
MAARPLPVSPARALLLALAGALLAPCEARGVSLWNQGRADEVVSASVGSGDLWIPVKSFDSKNHPEVLNIRLQRESKELIINLERNEGLIASSFTETHYLQDGTDVSLARNYTVILGHCYYHGHVRGYSDSAVSLSTCSGLRGLIVFENESYVLEPMKSATNRYKLFPAKKLKSVRGSCGSHHNTPNLAAKNVFPPPSQTWARRHKRETLKATKYVELVIVADNREFQRQGKDLEKVKQRLIEIANHVDKFYRPLNIRIVLVGVEVWNDMDKCSVSQDPFTSLHEFLDWRKMKLLPRKSHDNAQLVSGVYFQGTTIGMAPIMSMCTADQSGGIVMDHSDNPLGAAVTLAHELGHNFGMNHDTLDRGCSCQMAVEKGGCIMNASTGYPFPMVFSSCSRKDLETSLEKGMGVCLFNLPEVRESFGGQKCGNRFVEEGEECDCGEPEECMNRCCNATTCTLKPDAVCAHGLCCEDCQLKPAGTACRDSSNSCDLPEFCTGASPHCPANVYLHDGHSCQDVDGYCYNGICQTHEQQCVTLWGPGAKPAPGICFERVNSAGDPYGNCGKVSKSSFAKCEMRDAKCGKIQCQGGASRPVIGTNAVSIETNIPLQQGGRILCRGTHVYLGDDMPDPGLVLAGTKCADGKICLNRQCQNISVFGVHECAMQCHGRGVCNNRKNCHCEAHWAPPFCDKFGFGGSTDSGPIRQAEARQEAAESNRERGQGQEPVGSQEHASTASLTLI

SEQ ID NO: 8662 - protein, 534 aa, Homo sapiens
MGCVQCKDKEATKLTEERDGSLNQSSGYRYGTDPTPQHYPSFGVTSIPNYNNFHAAGGQGLTVFGGVNSSSHTGTLRTRGGTGVTLFVALYDYEARTEDDLSFHKGEKFQILNSSEGDWWEARSLTTGETGYIPSNYVAPVDSIQAEEWYFGKLGRKDAERQLLSFGNPRGTFLIRESETTKGAYSLSIRDWDDMKGDHVKHYKIRKLDNGGYYITTRAQFETLQQLVQHYSEKADGLCFNLTVIASSCTPQTSGLAKDAWEVARRSLCLEKKLGQGCFAEVWLGTWNGNTKVAIKTLKPGTMSPESFLEEAQIMKKLKHDKLVQLYAVVSEEPIYIVTEYMNKGSLLDFLKDGEGRALKLPNLVDMAAQVAAGMAYIERMNYIHRDLRSANILVGNGLICKIADFGLARLIEDNEYTARQGAKFPIKWTAPEAALYGRFTIKSDVWSFGILLTELVTKGRVPYPGMNNREVLEQVERGYRMPCPQDCPISLHELMIHCWKKDPEERPTFEYLQSFLEDYFTATEPQYQPGENL

SEQ ID NO: 8663 - protein, 909 aa, Homo sapiens
MAARPLPVSPARALLLALAGALLAPCEARGVSLWNQGRADEVVSASVGSGDLWIPVKSFDSKNHPEVLNIRLQRESKELIINLERNEGLIASSFTETHYLQDGTDVSLARNYTVILGHCYYHGHVRGYSDSAVSLSTCSGLRGLIVFENESYVLEPMKSATNRYKLFPAKKLKSVRGSCGSHHNTPNLAAKNVFPPPSQTWARRHKRETLKATKYVELVIVADNREFQRQGKDLEKVKQRLIEIANHVDKFYRPLNIRIVLVGVEVWNDMDKCSVSQDPFTSLHEFLDWRKMKLLPRKSHDNAQLVSGVYFQGTTIGMAPIMSMCTADQSGGIVMDHSDNPLGAAVTLAHELGHNFGMNHDTLDRGCSCQMAVEKGGCIMNASTGYPFPMVFSSCSRKDLETSLEKGMGVCLFNLPEVRESFGGQKCGNRFVEEGEECDCGEPEECMNRCCNATTCTLKPDAVCAHGLCCEDCQLKPAGTACRDSSNSCDLPEFCTGASPHCPANVYLHDGHSCQDVDGYCYNGICQTHEQQCVTLWGPGAKPAPGICFERVNSAGDPYGNCGKVSKSSFAKCEMRDAKCGKIQCQGGASRPVIGTNAVSIETNIPLQQGGRILCRGTHVYLGDDMPDPGLVLAGTKCADGKICLNRQCQNISVFGVHECAMQCHGRGVCNNRKNCHCEAHWAPPFCDKFGFGGSTDSGPIRQADNQGLTIGILVTILCLLAAGFVVYLKRKTLIRLLFTNKKTTIEKLRCVRPSRPPRGFQPCQAHLGHLGKGLMRKPPDSYPPKDNPRRLLQCQNVDISRPLNGLNVPQPQSTQRVLPPLHRAPRAPSVPARPLPAKPALRQAQGTCKPNPPQKPLPADPLARTTRLTHALARTPGQWETGLRLAPLRPAPQYPHQVPRSTHTAYIK

SEQ ID NO: 8664 - protein, 1061 aa, Homo sapiens
MPGPRRPAGSRLRLLLLLLLPPLLLLLRGSHAGNLTVAVVLPLANTSYPWSWARVGPAVELALAQVKARPDLLPGWTVRTVLGSSENALGVCSDTAAPLAAVDLKWEHNPAVFLGPGCVYAAAPVGRFTAHWRVPLLTAGAPALGFGVKDEYALTTRAGPSYAKLGDFVAALHRRLGWERQALMLYAYRPGDEEHCFFLVEGLFMRVRDRLNITVDHLEFAEDDLSHYTRLLRTMPRKGRVIYICSSPDAFRTLMLLALEAGLCGEDYVFFHLDIFGQSLQGGQGPAPRRPWERGDGQDVSARQAFQAAKIITYKDPDNPEYLEFLKQLKHLAYEQFNFTMEDGLVNTIPASFHDGLLLYIQAVTETLAHGGTVTDGENITQRMWNRSFQGVTGYLKIDSSGDRETDFSLWDMDPENGAFRVVLNYNGTSQELVAVSGRKLNWPLGYPPPDIPKCGFDNEDPACNQDHLSTLEVLALVGSLSLLGILIVSFFIYRKMQLEKELASELWRVRWEDVEPSSLERHLRSAGSRLTLSGRGSNYGSLLTTEGQFQVFAKTAYYKGNLVAVKRVNRKRIELTRKVLFELKHMRDVQNEHLTRFVGACTDPPNICILTEYCPRGSLQDILENESITLDWMFRYSLTNDIVKGMLFLHNGAICSHGNLKSSNCVVDGRFVLKITDYGLESFRDLDPEQGHTVYAKKLWTAPELLRMASPPVRGSQAGDVYSFGIILQEIALRSGVFHVEGLDLSPKEIIERVTRGEQPPFRPSLALQSHLEELGLLMQRCWAEDPQERPPFQQIRLTLRKFNRENSSNILDNLLSRMEQYANNLEELVEERTQAYLEEKRKAEALLYQILPHSVAEQLKRGETVQAEAFDSVTIYFSDIVGFTALSAESTPMQVVTLLNDLYTCFDAVIDNFDVYKVETIGDAYMVVSGLPVRNGRLHACEVARMALALLDAVRSFRIRHRPQEQLRLRIGIHTGPVCAGVVGLKMPRYCLFGDTVNTASRMESNGEALKIHLSSETKAVLEEFGGFELELRGDVEMKGKGKVRTYWLLGERGSSTRG

SEQ ID NO: 8665 - protein, 369 aa, Homo sapiens
MLPWLLVFSALGIQAWGDSSWNKTQAKQVSEGLQYLFENISQLTEKDVSTTVSRKAWGAEAVGCSIQLTTPVNVLVIHHVPGLECHDQTVCSQRLRELQAHHVHNNSGCDVAYNFLVGDDGRVYEGVGWNIQGVHTQGYNNISLGFAFFGTKKGHSPSPAALSAMENLITYAVQKGHLSSSYVQPLLGKGENCLAPRQKTSLKKACPGVVPRSVWGARETHCPRMTLPAKYGIIIHTAGRTCNISDECRLLVRDIQSFYIDRLKSCDIGYNFLVGQDGAIYEGVGWNVQGSSTPGYDDIALGITFMGTFTGIPPNAAALEAAQDLIQCAMVKGYLTPNYLLVGHSDVARTLSPGQALYNIISTWPHFKH

SEQ ID NO: 8666 - protein, 565 aa, Homo sapiens
MNRSIPVEVDESEPYPSQLLKPIPEYSPEEESEPPAPNIRNMAPNSLSAPTMLHNSSGDFSQAHSTLKLANHQRPVSRQVTCLRTQVLEDSEDSFCRRHPGLGKAFPSGCSAVSEPASESVVGALPAEHQFSFMEKRNQWLVSQLSAASPDTGHDSDKSDQSLPNASADSLGGSQEMVQRPQPHRNRAGLDLPTIDTGYDSQPQDVLGIRQLERPLPLTSVCYPQDLPRPLRSREFPQFEPQRYPACAQMLPPNLSPHAPWNYHYHCPGSPDHQVPYGHDYPRAAYQQVIQPALPGQPLPGASVRGLHPVQKVILNYPSPWDHEERPAQRDCSFPGLPRHQDQPHHQPPNRAGAPGESLECPAELRPQVPQPPSPAAVPRPPSNPPARGTLKTSNLPEELRKVFITYSMDTAMEVVKFVNFLLVNGFQTAIDIFEDRIRGIDIIKWMERYLRDKTVMIIVAISPKYKQDVEGAESQLDEDEHGLHTKYIHRMMQIEFIKQGSMNFRFIPVLFPNAKKEHVPTWLQNTHVYSWPKNKKNILLRLLREEEYVAPPRGPLPTLQVVPL

SEQ ID NO: 8667 - protein, 585 aa, Homo sapiens
MSQQHTLPVTLSPALSQELLKTVPPPVNTHQEQMKQPTPLPPPCQKVPVELPVEVPSKQEEKHMTAVKGLPEQECEQQQKEPQEQELQQQHWEQHEEYQKAENPEQQLKQEKTQRDQQLNKQLEEEKKLLDQQLDQELVKRDEQLGMKKEQLLELPEQQEGHLKHLEQQEGQLKHPEQQEGQLELPEQQEGQLELPEQQEGQLELPEQQEGQLELPEQQEGQLELPEQQEGQLELPQQQEGQLELSEQQEGQLELSEQQEGQLKHLEHQEGQLEVPEEQMGQLKYLEQQEGQLKHLDQQEKQPELPEQQMGQLKHLEQQEGQPKHLEQQEGQLEQLEEQEGQLKHLEQQEGQLEHLEHQEGQLGLPEQQVLQLKQLEKQQGQPKHLEEEEGQLKHLVQQEGQLKHLVQQEGQLEQQERQVEHLEQQVGQLKHLEEQEGQLKHLEQQQGQLEVPEQQVGQPKNLEQEEKQLELPEQQEGQVKHLEKQEAQLELPEQQVGQPKHLEQQEKHLEHPEQQDGQLKHLEQQEGQLKDLEQQKGQLEQPVFAPAPGQVQDIQPALPTKGEVLLPVEHQQQKQEVQWPPKHK

SEQ ID NO: 8668 - protein, 250 aa, Homo sapiens
MCDQQKQPQFPPSCVKGSGLGAGQGSNGASVKCPVPCQTQTVCVTGPAPCPTQTYVKYQVPCQTQTYVKCPAPCQRTYVKYPTPCQTYVKCPAPCQTTYVKCPTPCQTYVKCPAPCQMTYIKSPAPCQTQTCYVQGASPCQSYYVQAPASGSTSQYCVTDPCSAPCSTSYCCLAPRTFGVSPLRRWIQRPQNCNTGSSGCCENSGSSGCCGSGGCGCSCGCGSSGCCCLGIIPMRSRGPACCDHEDDCCC

SEQ ID NO: 8669 - protein, 4061 aa, Homo sapiens
MSTLLENIFAIINLFKQYSKKDKNTDTLSKKELKELLEKEFRQILKNPDDPDMVDVFMDHLDIDHNKKIDFTEFLLMVFKLAQAYYESTRKENLPISGHKHRKHSHHDKHEDNKQEENKENRKRPSSLERRNNRKGNKGRSKSPRETGGKRHESSSEKKERKGYSPTHREEEYGKNHHNSSKKEKNKTENTRLGDNRKRLSERLEEKEDNEEGVYDYENTGRMTQKWIQSGHIATYYTIQDEAYDTTDSLLEENKIYERSRSSDGKSSSQVNRSRHENTSQVPLQESRTRKRRGSRVSQDRDSEGHSEDSERHSGSASRNHHGSAWEQSRDGSRHPRSHDEDRASHGHSADSSRQSGTRHAETSSRGQTASSHEQARSSPGERHGSGHQQSADSSRHSATGRGQASSAVSDRGHRGSSGSQASDSEGHSENSDTQSVSGHGKAGLRQQSHQESTRGRSGERSGRSGSSLYQVSTHEQPDSAHGRTGTSTGGRQGSHHEQARDSSRHSASQEGQDTIRGHPGSSRGGRQGSHHEQSVNRSGHSGSHHSHTTSQGRSDASHGQSGSRSASRQTRNEEQSGDGTRHSGSRHHEASSQADSSRHSQVGQGQSSGPRTSRNQGSSVSQDSDSQGHSEDSERWSGSASRNHHGSAQEQSRDGSRHPRSHHEDRAGHGHSADSSRKSGTRHTQNSSSGQAASSHEQARSSAGERHGSRHQLQSADSSRHSGTGHGQASSAVRDSGHRGSSGSQATDSEGHSEDSDTQSVSGHGQAGHHQQSHQESARDRSGERSRRSGSFLYQVSTHKQSESSHGWTGPSTGVRQGSHHEQARDNSRHSASQDGQDTIRGHPGSSRRGRQGSHHEQSVDRSGHSGSHHSHTTSQGRSDASRGQSGSRSASRTTRNEEQSRDGSRHSGSRHHEASSHADISRHSQAGQGQSEGSRTSRRQGSSVSQDSDSEGHSEDSERWSGSASRNHRGSAQEQSRHGSRHPRSHHEDRAGHGHSADSSRQSGTPHAETSSGGQAASSHEQARSSPGERHGSRHQQSADSSRHSGIPRRQASSAVRDSGHWGSSGSQASDSEGHSEESDTQSVSGHGQDGPHQQSHQESARDWSGGRSGRSGSFIYQVSTHEQSESAHGRTRTSTGRRQGSHHEQARDSSRHSASQEGQDTIRAHPGSRRGGRQGSHHEQSVDRSGHSGSHHSHTTSQGRSDASHGQSGSRSASRQTRKDKQSGDGSRHSGSRHHEAASWADSSRHSQVGQEQSSGSRTSRHQGSSVSQDSDSERHSDDSERLSGSASRNHHGSSREQSRDGSRHPGFHQEDRASHGHSADSSRQSGTHHTESSSHGQAVSSHEQARSSPGERHGSRHQQSADSSRHSGIGHRQASSAVRDSGHRGSSGSQVTNSEGHSEDSDTQSVSAHGQAGPHQQSHKESARGQSGESSGRSRSFLYQVSSHEQSESTHGQTAPSTGGRQGSRHEQARNSSRHSASQDGQDTIRGHPGSSRGGRQGSYHEQSVDRSGHSGYHHSHTTPQGRSDASHGQSGPRSASRQTRNEEQSGDGSRHSGSRHHEPSTRAGSSRHSQVGQGESAGSKTSRRQGSSVSQDRDSEGHSEDSERRSESASRNHYGSAREQSRHGSRNPRSHQEDRASHGHSAESSRQSGTRHAETSSGGQAASSQEQARSSPGERHGSRHQQSADSSTDSGTGRRQDSSVVGDSGNRGSSGSQASDSEGHSEESDTQSVSAHGQAGPHQQSHQESTRGQSGERSGRSGSFLYQVSTHEQSESAHGRTGPSTGGRQRSRHEQARDSSRHSASQEGQDTIRGHPGSSRGGRQGSHYEQSVDSSGHSGSHHSHTTSQERSDVSRGQSGSRSVSRQTRNEKQSGDGSRHSGSRHHEASSRADSSRHSQVGQGQSSGPRTSRNQGSSVSQDSDSQGHSEDSERWSGSASRNHLGSAWEQSRDGSRHPGSHHEDRAGHGHSADSSRQSGTRHTESSSRGQAASSHEQARSSAGERHGSHHQLQSADSSRHSGIGHGQASSAVRDSGHRGYSGSQASDSEGHSEDSDTQSVSAQGKAGPHQQSHKESARGQSGESSGRSGSFLYQVSTHEQSESTHGQSAPSTGGRQGSHYDQAQDSSRHSASQEGQDTIRGHPGPSRGGRQGSHQEQSVDRSGHSGSHHSHTTSQGRSDASRGQSGSRSASRKTYDKEQSGDGSRHSGSHHHEASSWADSSRHSLVGQGQSSGPRTSRPRGSSVSQDSDSEGHSEDSERRSGSASRNHHGSAQEQSRDGSRHPRSHHEDRAGHGHSAESSRQSGTHHAENSSGGQAASSHEQARSSAGERHGSHHQQSADSSRHSGIGHGQASSAVRDSGHRGSSGSQASDSEGHSEDSDTQSVSAHGQAGPHQQSHQESTRGRSAGRSGRSGSFLYQVSTHEQSESAHGRTGTSTGGRQGSHHKQARDSSRHSTSQEGQDTIHGHPGSSSGGRQGSHYEQLVDRSGHSGSHHSHTTSQGRSDASHGHSGSRSASRQTRNDEQSGDGSRHSGSRHHEASSRADSSGHSQVGQGQSEGPRTSRNWGSSFSQDSDSQGHSEDSERWSGSASRNHHGSAQEQLRDGSRHPRSHQEDRAGHGHSADSSRQSGTRHTQTSSGGQAASSHEQARSSAGERHGSHHQQSADSSRHSGIGHGQASSAVRDSGHRGYSGSQASDNEGHSEDSDTQSVSAHGQAGSHQQSHQESARGRSGETSGHSGSFLYQVSTHEQSESSHGWTGPSTRGRQGSRHEQAQDSSRHSASQDGQDTIRGHPGSSRGGRQGYHHEHSVDSSGHSGSHHSHTTSQGRSDASRGQSGSRSASRTTRNEEQSGDGSRHSGSRHHEASTHADISRHSQAVQGQSEGSRRSRRQGSSVSQDSDSEGHSEDSERWSGSASRNHHGSAQEQLRDGSRHPRSHQEDRAGHGHSADSSRQSGTRHTQTSSGGQAASSHEQARSSAGERHGSHHQQSADSSRHSGIGHGQASSAVRDSGHRGYSGSQASDNEGHSEDSDTQSVSAHGQAGSHQQSHQESARGRSGETSGHSGSFLYQVSTHEQSESSHGWTGPSTRGRQGSRHEQAQDSSRHSASQYGQDTIRGHPGSSRGGRQGYHHEHSVDSSGHSGSHHSHTTSQGRSDASRGQSGSRSASRTTRNEEQSGDSSRHSVSRHHEASTHADISRHSQAVQGQSEGSRRSRRQGSSVSQDSDSEGHSEDSERWSGSASRNHRGSVQEQSRHGSRHPRSHHEDRAGHGHSADRSRQSGTRHAETSSGGQAASSHEQARSSPGERHGSRHQQSADSSRHSGIPRGQASSAVRDSRHWGSSGSQASDSEGHSEESDTQSVSGHGQAGPHQQSHQESARDRSGGRSGRSGSFLYQVSTHEQSESAHGRTRTSTGRRQGSHHEQARDSSRHSASQEGQDTIRGHPGSSRRGRQGSHYEQSVDRSGHSGSHHSHTTSQGRSDASRGQSGSRSASRQTRNDEQSGDGSRHSWSHHHEASTQADSSRHSQSGQGQSAGPRTSRNQGSSVSQDSDSQGHSEDSERWSGSASRNHRGSAQEQSRDGSRHPTSHHEDRAGHGHSAESSRQSGTHHAENSSGGQAASSHEQARSSAGERHGSHHQQSADSSRHSGIGHGQASSAVRDSGHRGSSGSQASDSEGHSEDSDTQSVSAHGQAGPHQQSHQESTRGRSAGRSGRSGSFLYQVSTHEQSESAHGRAGPSTGGRQGSRHEQARDSSRHSASQEGQDTIRGHPGSRRGGRQGSYHEQSVDRSGHSGSHHSHTTSQGRSDASHGQSGSRSASRETRNEEQSGDGSRHSGSRHHEASTQADSSRHSQSGQGESAGSRRSRRQGSSVSQDSDSEAYPEDSERRSESASRNHHGSSREQSRDGSRHPGSSHRDTASHVQSSPVQSDSSTAKEHGHFSSLSQDSAYHSGIQSRGSPHSSSSYHYQSEGTERQKGQSGLVWRHGSYGSADYDYGESGFRHSQHGSVSYNSNPVVFKERSDICKASAFGKDHPRYYATYINKDPGLCGHSSDISKQLGFSQSQRYYYYE

SEQ ID NO: 8670 - protein, 2850 aa, Homo sapiens
MPKLLQGVITVIDVFYQYATQHGEYDTLNKAELKELLENEFHQILKNPNDPDTVDIILQSLDRDHNKKVDFTEYLLMIFKLVQARNKIIGKDYCQVSGSKLRDDTHQHQEEQEETEKEENKRQESSFSHSSWSAGENDSYSRNVRGSLKPGTESISRRLSFQRDFSGQHNSYSGQSSSYGEQNSDSHQSSGRGQCGSGSGQSPNYGQHGSGSGQSSSNDTHGSGSGQSSGFSQHKSSSGQSSGYSQHGSGSGHSSGYGQHGSRSGQSSRGERHRSSSGSSSSYGQHGSGSRQSLGHGRQGSGSRQSPSHVRHGSGSGHSSSHGQHGSGSSYSYSRGHYESGSGQTSGFGQHESGSGQSSGYSKHGSGSGHSSSQGQHGSTSGQASSSGQHGSSSRQSSSYGQHESASRHSSGRGQHSSGSGQSPGHGQRGSGSGQSPSSGQHGTGFGRSSSSGPYVSGSGYSSGFGHHESSSEHSSGYTQHGSGSGHSSGHGQHGSRSGQSSRGERQGSSAGSSSSYGQHGSGSRQSLGHSRHGSGSGQSPSPSRGRHESGSRQSSSYGPHGYGSGRSSSRGPYESGSGHSSGLGHQESRSGQSSGYGQHGSSSGHSSTHGQHGSTSGQSSSCGQHGATSGQSSSHGQHGSGSSQSSRYGQQGSGSGQSPSRGRHGSDFGHSSSYGQHGSGSGWSSSNGPHGSVSGQSSGFGHKSGSGQSSGYSQHGSGSSHSSGYRKHGSRSGQSSRSEQHGSSSGLSSSYGQHGSGSHQSSGHGRQGSGSGHSPSRVRHGSSSGHSSSHGQHGSGTSCSSSCGHYESGSGQASGFGQHESGSGQGYSQHGSASGHFSSQGRHGSTSGQSSSSGQHDSSSGQSSSYGQHESASHHASGRGRHGSGSGQSPGHGQRGSGSGQSPSYGRHGSGSGRSSSSGRHGSGSGQSSGFGHKSSSGQSSGYTQHGSGSGHSSSYEQHGSRSGQSSRSEQHGSSSGSSSSYGQHGSGSRQSLGHGQHGSGSGQSPSPSRGRHGSGSGQSSSYGPYRSGSGWSSSRGPYESGSGHSSGLGHRESRSGQSSGYGQHGSSSGHSSTHGQHGSTSGQSSSCGQHGASSGQSSSHGQHGSGSSQSSGYGRQGSGSGQSPGHGQRGSGSRQSPSYGRHGSGSGRSSSSGQHGSGLGESSGFGHHESSSGQSSSYSQHGSGSGHSSGYGQHGSRSGQSSRGERHGSSSGSSSHYGQHGSGSRQSSGHGRQGSGSGHSPSRGRHGSGLGHSSSHGQHGSGSGRSSSRGPYESRSGHSSVFGQHESGSGHSSAYSQHGSGSGHFCSQGQHGSTSGQSSTFDQEGSSTGQSSSYGHRGSGSSQSSGYGRHGAGSGQSPSRGRHGSGSGHSSSYGQHGSGSGWSSSSGRHGSGSGQSSGFGHHESSSWQSSGCTQHGSGSGHSSSYEQHGSRSGQSSRGERHGSSSGSSSSYGQHGSGSRQSLGHGQHGSGSGQSPSPSRGRHGSGSGQSSSYSPYGSGSGWSSSRGPYESGSSHSSGLGHRESRSGQSSGYGQHGSSSGHSSTHGQHGSTSGQSSSCGQHGASSGQSSSHGQHGSGSSQSSGYGRQGSGSGQSPGHGQRGSGSRQSPSYGRHGSGSGRSSSSGQHGSGLGESSGFGHHESSSGQSSSYSQHGSGSGHSSGYGQHGSRSGQSSRGERHGSSSRSSSRYGQHGSGSRQSSGHGRQGSGSGQSPSRGRHGSGLGHSSSHGQHGSGSGRSSSRGPYESRSGHSSVFGQHESGSGHSSAYSQHGSGSGHFCSQGQHGSTSGQSSTFDQEGSSTGQSSSHGQHGSGSSQSSSYGQQGSGSGQSPSRGRHGSGSGHSSSYGQHGSGSGWSSSSGRHGSGSGQSSGFGHHESSSWQSSGYTQHGSGSGHSSSYEQHGSRSGQSSRGEQHGSSSGSSSSYGQHGSGSRQSLGHGQHGSGSGQSPSPSRGRHGSGSGQSSSYGPYGSGSGWSSSRGPYESGSGHSSGLGHRESRSGQSSGYGQHGSSSGHSSTHGQHGSASGQSSSCGQHGASSGQSSSHGQHGSGSSQSSGYGRQGSGSGQSPGHGQRGSGSRQSPSYGRHGSGSGRSSSSGQHGPGLGESSGFGHHESSSGQSSSYSQHGSGSGHSSGYGQHGSRSGQSSRGERHGSSSGSSSRYGQHGSGSRQSSGHGRQGSGSGHSPSRGRHGSGSGHSSSHGQHGSGSGRSSSRGPYESRSGHSSVFGQHESGSGHSSAYSQHGSGSGHFCSQGQHGSTSGQSSTFDQEGSSTGQSSSHGQHGSGSSQSSSYGQQGSGSGQSPSRGRHGSGSGHSSSYGQHGSGSGWSSSSGRHGSGSGQSSGFGHHESSSWQSSGYTQHGSGSGHSSSYEQHGSRSGQSSRGERHGSSSGSSSSYGQHGSGSRQSLGHGQHGSGSGQSPSPSRGRHGSGSGQSSSYSPYGSGSGWSSSRGPYESGSGHSSGLGHRESRSGQSSGYGQHGSSSGHSSTHGQHGSTSGQSSSCGQHGASSGQSSSHGQHGSGSSQSSGYGRQGSGSGQSPGHGQRGSGSRQSPSYGRHGSGSGRSSSSGQHGSGLGESSGFGHHESSSGQSSSYSQHGSGSGHSSGYGQHGSRSGQSSRGERHGSSSGSSSHYGQHGSGSRQSSGHGRQGSGSGQSPSRGRHGSGLGHSSSHGQHGSGSGRSSSRGPYESRLGHSSVFGQHESGSGHSSAYSQHGSGSGHFCSQGQHGSTSGQSSTFDQEGSSTGQSSSYGHRGSGSSQSSGYGRHGAGSGQSLSHGRHGSGSGQSSSYGQHGSGSGQSSGYSQHGSGSGQDGYSYCKGGSNHDGGSSGSYFLSFPSSTSPYEYVQEQRCYFYQ

SEQ ID NO: 8671 - protein, 1943 aa, Homo sapiens
MSPLLRSICDITEIFNQYVSHDCDGAALTKKDLKNLLEREFGAVLRRPHDPKTVDLILELLDLDSNGRVDFNEFLLFIFKVAQACYYALGQATGLDEEKRARCDGKESLLQDRRQEEDQRRFEPRDRQLEEEPGQRRRQKRQEQERELAEGEEQSEKQERLEQRDRQRRDEELWRQRQEWQEREERRAEEEQLQSCKGHETEEFPDEEQLRRRELLELRRKGREEKQQQRRERQDRVFQEEEEKEWRKRETVLRKEEEKLQEEEPQRQRELQEEEEQLRKLERQELRRERQEEEQQQQRLRREQQLRRKQEEERREQQEERREQQERREQQEERREQQLRREQEERREQQLRREQEEERREQQLRREQEEERREQQLRREQQLRREQQLRREQQLRREQQLRREQQLRREQQLRREQQLRREQQLRREQEEERHEQKHEQERREQRLKREQEERRDWLKREEETERHEQERRKQQLKRDQEEERRERWLKLEEEERREQQERREQQLRREQEERREQRLKRQEEEERLQQRLRSEQQLRREQEERREQLLKREEEKRLEQERREQRLKREQEERRDQLLKREEERRQQRLKREQEERLEQRLKREEVERLEQEERREQRLKREEPEEERRQQLLKSEEQEERRQQQLRREQQERREQRLKREEEEERLEQRLKREHEEERREQELAEEEQEQARERIKSRIPKWQWQLESEADARQSKVYSRPRKQEGQRRRQEQEEKRRRRESELQWQEEERAHRQQQEEEQRRDFTWQWQAEEKSERGRQRLSARPPLREQRERQLRAEERQQREQRFLPEEEEKEQRRRQRREREKELQFLEEEEQLQRRERAQQLQEEEDGLQEDQERRRSQEQRRDQKWRWQLEEERKRRRHTLYAKPALQEQLRKEQQLLQEEEEELQREEREKRRRQEQERQYREEEQLQQEEEQLLREEREKRRRQERERQYRKDKKLQQKEEQLLGEEPEKRRRQEREKKYREEEELQQEEEQLLREEREKRRRQEWERQYRKKDELQQEEEQLLREEREKRRLQERERQYREEEELQQEEEQLLGEERETRRRQELERQYRKEEELQQEEEQLLREEPEKRRRQERERQCREEEELQQEEEQLLREEREKRRRQELERQYREEEEVQQEEEQLLREEPEKRRRQELERQYREEEELQQEEEQLLREEQEKRRQERERQYREEEELQRQKRKQRYRDEDQRSDLKWQWEPEKENAVRDNKVYCKGRENEQFRQLEDSQLRDRQSQQDLQHLLGEQQERDREQERRRWQQRDRHFPEEEQLEREEQKEAKRRDRKSQEEKQLLREEREEKRRRQETDRKFREEEQLLQEREEQPLRRQERDRKFREEELRHQEQGRKFLEEEQRLRRQERERKFLKEEQQLRCQEREQQLRQDRDRKFREEEQQLSRQERDRKFREEEQQVRRQERERKFLEEEQQLRQERHRKFREEEQLLQEREEQQLHRQERDRKFLEEEQQLRRQERDRKFREQELRSQEPERKFLEEEQQLHRQQRQRKFLQEEQQLRRQERGQQRRQDRDRKFREEEQLRQEREEQQLSRQERDRKFRLEEQKVRRQEQERKFMEDEQQLRRQEGQQQLRQERDRKFREDEQLLQEREEQQLHRQERDRKFLEEEPQLRRQEREQQLRHDRDRKFREEEQLLQEGEEQQLRRQERDRKFREEEQQLRRQERERKFLQEEQQLRRQELERKFREEEQLRQETEQEQLRRQERYRKILEEEQLRPEREEQQLRRQERDRKFREEEQLRQEREEQQLRSQESDRKFREEEQLRQEREEQQLRPQQRDGKYRWEEEQLQLEEQEQRLRQERDRQYRAEEQFATQEKSRREEQELWQEEEQKRRQERERKLREEHIRRQQKEEQRHRQVGEIKSQEGKGHGRLLEPGTHQFASVPVRSSPLYEYIQEQRSQYRP

SEQ ID NO: 8672 - protein, 904 aa, Homo sapiens
MPQLLRNVLCVIETFHKYASEDSNGATLTGRELKQLIQGEFGDFFQPCVLHAVEKNSNLLNIDSNGIISFDEFVLAIFNLLNLCYLDIKSLLSSELRQVTKPEKEKLDDVDVQATTGDGQWTVGTSPTQEKRMLPSGMASSSQLIPEESGAVGNNRVDPWREAKTHNFPGEASEHNDPKNKHLEGDEQSQEVAQDIQTTEDNEGQLKTNKPMAGSKKTSSPTERKGQDKEISQEGDEPAREQSVSKIRDQFGEQEGNLATQSSPPKEATQRPCEDQEVRTEKEKHSNIQEPPLQREDEPSSQHADLPEQAAARSPSQTQKSTDSKDVCRMFDTQEPGKDADQTPAKTKNLGEPEDYGRTSETQEKECETKDLPVQYGSRNGSETSDMRDERKERRGPEAHGTAGQKERDRKTRPLVLETQTQDGKYQELQGLSKSKDAEKGSETQYLSSEGGDQTHPELEGTAVSGEEAEHTKEGTAEAFVNSKNAPAAERTLGARERTQDLAPLEKQSVGENTRVTKTHDQPVEEEDGYQGEDPESPFTQSDEGSSETPNSLASEEGNSSSETGELPVQGDSQSQGDQHGESVQGGHNNNPDTQRQGTPGEKNRALEAVVPAVRGEDVQLTEDQEQPARGEHKNQGPGTKGPGAAVEPNGHPEAQESTAGDENRKSLEIEITGALDEDFTDQLSLMQLPGKGDSRNELKVQGPSSKEEKGRATEAQNTLLESLDEDNSASLKIQLETKEPVTSEEEDESPQELAGEGGDQKSPAKKEHNSSVPWSSLEKQMQRDQEPCSVERGAVYSSPLYQYLQEKILQQTNVTQEEHQKQVQIAQASGPELCSVSLTSEISDCSVFFNYSQASQPYTRGLPLDESPAGAQETPAPQALEDKQGHPQRERLVLQREASTTKQ

SEQ ID NO: 8673 - protein, 569 aa, Homo sapiens
MLAASIFRPTLLLCWLAAPWPTQPESLFHSRDRSDLEPSPLRQAKPIADLHAAQRFLSRYGWSGVWAAWGPSPEGPPETPKGAALAEAVRRFQRANALPASGELDAATLAAMNRPRCGVPDMRPPPPSAPPSPPGPPPRARSRRSPRAPLSLSRRGWQPRGYPDGGAAQAFSKRTLSWRLLGEALSSQLSVADQRRIVALAFRMWSEVTPLDFREDLAAPGAAVDIKLGFGRGRHLGCPRAFDGSGQEFAHAWRLGDIHFDDDEHFTPPTSDTGISLLKVAVHEIGHVLGLPHTYRTGSIMQPNYIPQEPAFELDWSDRKAIQKLYGSCEGSFDTAFDWIRKERNQYGEVMVRFSTYFFRNSWYWLYENRNNRTRYGDPIQILTGWPGIPTHNIDAFVHIWTWKRDERYFFQGNQYWRYDSDKDQALTEDEQGKSYPKLISEGFPGIPSPLDTAFYDRRQKLIYFFKESLVFAFDVNRNRVLNSYPKRITEVFPAVIPQNHPFRNIDSAYYSYAYNSIFFFKGNAYWKVVNDKDKQQNSWLPANGLFPKKFISEKWFDVCDVHISTLNM

SEQ ID NO: 8674 - protein, 593 aa, Homo sapiens
MGDAKEAGAEGPPAGAAARGGLSLLSQGESEESSAQGSALFLGGNEVKSRAVVKYSSAPPRTAFARLEEKTDLKLPPANWLRESAKLGPAGTTILGNSKKSKPFSSFGMAYDFIDSVGNDVDVVSDSENIKKLLKIPYSKSHVSMAVHRIGRTLLLDELDIQELFMRSSQTGDWTWLKEFYQRLIDQKWQRKKKSKEHWYQKAILSKFLYYSINGDGAAQPVSSTAEQQESSSSDQTNDSEGASWPAPFEMPSSVSEDPSASSQGSEPLEPSYIVGHVASAPKEQNLITLFNDGEHSQGLKNDFVRNILWTFEDIHMLVGSNMPIFGGGRYPAVSLRLRDNNKPINVLTGIDYWLDNLICNVPELVMCFHVNGIVQKYEMIKTEEIPNLENSNFSTKVIKDIAQNILSFLKSNCTKEGHTYWLFKASGSDIVKLYDLTTLCEETEDKYQNPFTMPVAILLYKVACNMMMKKNQNKKHYGTIRTLLLNCLKLLDKSRHPQIIASANYMLSELFQLDEPKKEENSESPLNENSDESYSEEEEEMPDSDENGSYSTSSDPSDDSKAVAIIKSVGELSVPEKYKSIHQIRLCISSLP

SEQ ID NO: 8675 - protein, 593 aa, Homo sapiens
MDAATAPKQAWPPWPPLLFLLLLPGGSGGSCPAVCDCTSQPQAVLCGHRQLEAVPGGLPLDTELLDLSGNRLWGLQQGMLSRLSLLQELDLSYNQLSTLEPGAFHGLQSLLTLRLQGNRLRIMGPGVFSGLSALTLLDLRLNQIVLFLDGAFGELGSLQKLEVGDNHLVFVAPGAFAGLAKLSTLTLERCNLSTVPGLALARLPALVALRLRELDIGRLPAGALRGLGQLKELEIHLWPSLEALDPGSLVGLNLSSLAITRCNLSSVPFQALYHLSFLRVLDLSQNPISAIPARRLSPLVRLQELRLSGACLTSIAAHAFHGLTAFHLLDVADNALQTLEETAFPSPDKLVTLRLSGNPLTCDCRLLWLLRLRRHLDFGMSPPACAGPHHVQGKSLKEFSDILPPGHFTCKPALIRKSGPRWVIAEEGGHAVFSCSGDGDPAPTVSWMRPHGAWLGRAGRVRVLEDGTLEIRSVQLRDRGAYVCVVSNVAGNDSLRTWLEVIQVEPPNGTLSDPNITVPGIPGPFFLDSRGVAMVLAVGFLPFLTSVTLCFGLIALWSKGKGRVKHHMTFDFVAPRPSGDKNSGGNRVTAKLF

SEQ ID NO: 8676 - protein, 513 aa, Homo sapiens
MRPGLPGPTGLCAQTSSRGQKSVLKQKESCGIWQLYHFLSRKQEPRWEPCVSGSSSGDGAVADLADELRGYPALCCTLPVHSYRSWAGIRPQIMNGPLHPRPLVALLDGRDCTVEMPILKDLATVAFCDAQSTQEIHEKVLNEAVGAMMYHTITLTREDLEKFKALRVIVRIGSGYDNVDIKAAGELGIAVCNIPSAAVEETADSTICHILNLYRRNTWLYQALREGTRVQSVEQIREVASGAARIRGETLGLIGFGRTGQAVAVRAKAFGFSVIFYDPYLQDGIERSLGVQRVYTLQDLLYQSDCVSLHCNLNEHNHHLINDFTIKQMRQGAFLVNAARGGLVDEKALAQALKEGRIRGAALDVHESEPFSFAQGPLKDAPNLICTPHTAWYSEQASLEMREAAATEIRRAITGRIPESLRNCVNKEFFVTSAPWSVIDQQAIHPELNGATYRYPPGIVGVAPGGLPAAMEGIIPGGIPVTHNLPTVAHPSQAPSPNQPTKHGDNREHPNEQ

SEQ ID NO: 8677 - protein, 267 aa, Homo sapiens [sequence omitted]

SEQ ID NO: 8678 - protein, 528 aa, Homo sapiens
MADEDGEGIHPSAPHRNGGGGGGGGSGLHCAGNGGGGGGGPRVVRIVKSESGYGFNVRGQVSEGGQLRSINGELYAPLQHVSAVLPGGAADRAGVRKGDRILEVNHVNVEGATHKQVVDLIRAGEKELILTVLSVPPHEADNLDPSDDSLGQSFYDYTEKQAVPISVPRYKHVEQNGEKFVVYNVYMAGRQLCSKRYREFAILHQNLKREFANFTFPRLPGKWPFSLSEQQLDARRRGLEEYLEKVCSIRVIGESDIMQEFLSESDENYNGVSDVELRVALPDGTTVTVRVKKNSTTDQVYQAIAAKVGMDSTTVNYFALFEVISHSFVRKLAPNEFPHKLYIQNYTSAVPGTCLTIRKWLFTTEEEILLNDNDLAVTYFFHQAVDDVKKGYIKAEEKSYQLQKLYEQRKMVMYLNMLRTCEGYNEIIFPHCACDSRRKGHVITAISITHFKLHACTEEGQLENQVIAFEWDEMQRWDTDEEGMAFCFEYARGEKKPRWVKIFTPYFNYMHECFERVFCELKWRKEEY

SEQ ID NO: 8679 - protein, 439 aa, Homo sapiens
MFSKLAHLQRFAVLSRGVHSSVASATSVATKKTVQGPPTSDDIFEREYKYGAHNYHPLPVALERGKGIYLWDVEGRKYFDFLSSYSAVNQGHCHPKIVNALKSQVDKLTLTSRAFYNNVLGEYEEYITKLFNYHKVLPMNTGVEAGETACKLARKWGYTVKGIQKYKAKIVFAAGNFWGRTLSAISSSTDPTSYDGFGPFMPGFDIIPYNDLPALERALQDPNVAAFMVEPIQGEAGVVVPDPGYLMGVRELCTRHQVLFIADEIQTGLARTGRWLAVDYENVRPDIVLLGKALSGGLYPVSAVLCDDDIMLTIKPGEHGSTYGGNPLGCRVAIAALEVLEEENLAENADKLGIILRNELMKLPSDVVTAVRGKGLLNAIVIKETKDWDAWKVCLRLRDNGLLAKPTHGDIIRFAPPLVIKEDELRESIEIINKTILSF

SEQ ID NO: 8680 - protein, 515 aa, Homo sapiens
MVLSQEEPDSARGTSEAQPLGPAPTGAAPPPGPGPSDSPEAAVEKVEVELAGPATAEPHEPPEPPEGGWGWLVMLAAMWCNGSVFGIQNACGVLFVSMLETFGSKDDDKMVFKTAWVGSLSMGMIFFCCPIVSVFTDLFGCRKTAVVGAAVGFVGLMSSSFVSSIEPLYLTYGIIFACGCSFAYQPSLVILGHYFKKRLGLVNGIVTAGSSVFTILLPLLLRVLIDSVGLFYTLRVLCIFMFVLFLAGFTYRPLATSTKDKESGGSGSSLFSRKKFSPPKKIFNFAIFKVTAYAVWAVGIPLALFGYFVPYVHLMKHVNERFQDEKNKEVVLMCIGVTSGVGRLLFGRIADYVPGVKKVYLQVLSFFFIGLMSMMIPLCSIFGALIAVCLIMGLFDGCFISIMAPIAFELVGAQDVSQAIGFLLGFMSIPMTVGPPIAGLLRDKLGSYDVAFYLAGVPPLIGGAVLCFIPWIHSKKQREISKTTGKEKMEKMLENQNSLLSSSSGMFKKESDSII

SEQ ID NO: 8681 - protein, 1315 aa, Homo sapiens
MADTDLFMECEEEELEPWQKISDVIEDSVVEDYNSVDKTTTVSVSQQPVSAPVPIAAHASVAGHLSTSTTVSSSGAQNSDSTKKTLVTLIANNNAPGTQFVKPTVGVPQVFSQMTPVRPGSTMPVRPTTNTFTTVIPATLTIRSTVPQSQSQQTKSTPSTSTTPTATQPTSLGQLAVQSPGQSNQTTNPKLAPSFPSPPAVSIASFVTVKRPGVTGENSNEVAKLVNTLNTIPSLGQSPGPVVVSNNSSAHGSQRTSGPESSMKVTSSIPVFDLQDGGRKICPRCNAQFRVTEALRGHMCYCCPEMVEYQKKGKSLDSEPSVPSAAKPPSPEKTAPVASTPSSTPIPALSPPTKVPEPNENVGDAVQTKLIMLVDDFYYGRDGGKVAQLTNFPKVATSFRCPHCTKRLKNNIRFMNHMKHHVELDQQNGEVDGHTICQHCYRQFSTPFQLQCHLENVHSPYESTTKCKICEWAFESEPLFLQHMKDTHKPGEMPYVCQVCQYRSSLYSEVDVHFRMIHEDTRHLLCPYCLKVFKNGNAFQQHYMRHQKRNVYHCNKCRLQFLFAKDKIEHKLQHHKTFRKPKQLEGLKPGTKVTIRASRGQPRTVPVSSNDTPPSALQEAAPLTSSMDPLPVFLYPPVQRSIQKRAVRKMSVMGRQTCLECSFEIPDFPNHFPTYVHCSLCRYSTCCSRAYANHMINNHVPRKSPKYLALFKNSVSGIKLACTSCTFVTSVGDAMAKHLVFNPSHRSSSILPRGLTWIAHSRHGQTRDRVHDRNVKNMYPPPSFPTNKAATVKSAGATPAEPEELLTPLAPALPSPASTATPPPTPTHPQALALPPLATEGAECLNVDDQDEGSPVTQEPELASGGGGSGGVGKKEQLSVKKLRVVLFALCCNTEQAAEHFRNPQRRIRRWLRRFQASQGENLEGKYLSFEAEEKLAEWVLTQREQQLPVNEETLFQKATKIGRSLEGGFKISYEWAVRFMLRHHLTPHARRAVAHTLPKDVAENAGLFIDFVQRQIHNQDLPLSMIVAIDEISLFLDTEVLSSDDRKENALQTVGTGEPWCDVVLAILADGTVLPTLVFYRGQMDQPANMPDSILLEAKESGYSDDEIMELWSTRVWQKHTACQRSKGMLVMDCHRTHLSEEVLAMLSASSTLPAVVPAGCSSKIQPLDVCIKRTVKNFLHKKWKEQAREMADTACDSDVLLQLVLVWLGEVLGVIGDCPELVQRSFLVASVLPGPDGNINSPTRNADMQEELIASLEEQLKLSGEHSESSTPRPRSSPEETIEPESLHQLFEGESETESFYGFEEADLDLMEI

SEQ ID NO: 8682 - protein, 801 aa, Homo sapiens
MGDTVVEPAPLKPTSEPTSGPPGNNGGSLLSVITEGVGELSVIDPEVAQKACQEVLEKVKLLHGGVAVSSRGTPLELVNGDGVDSEIRCLDDPPAQIREEEDEMGAAVASGTAKGARRRRQNNSAKQSWLLRLFESKLFDISMAISYLYNSKEPGVQAYIGNRLFCFRNEDVDFYLPQLLNMYIHMDEDVGDAIKPYIVHRCRQSINFSLQCALLLGAYSSDMHISTQRHSRGTKLRKLILSDELKPAHRKRELPSLSPAPDTGLSPSKRTHQRSKSDATASISLSSNLKRTASNPKVENEDEPVRLAPEREFIKSLMAIGKRLATLPTKEQKTQRLISELSLLNHKLPARVWLPTAGFDHHVVRVPHTQAVVLNSKDKAPYLIYVEVLECENFDTTSVPARIPENRIRSTRSVENLPECGITHEQRAGSFSTVPNYDNDDEAWSVDDIGELQVELPEVHTNSCDNISQFSVDSITSQESKEPVFIAAGDIRRRLSEQLAHTPTAFKRDPEDPSAVALKEPWQEKVRRIREGSPYGHLPNWRLLSVIVKCGDDLRQELLAFQVLKQLQSIWEQERVPLWIKPYKILVISADSGMIEPVVNAVSIHQVKKQSQLSLLDYFLQEHGSYTTEAFLSAQRNFVQSCAGYCLVCYLLQVKDRHNGNILLDAEGHIIHIDFGFILSSSPRNLGFETSAFKLTTEFVDVMGGLDGDMFNYYKMLMLQGLIAARKHMDKVVQIVEIMQQGSQLPCFHGSSTIRNLKERFHMSMTEEQLQLLVEQMVDGSMRSITTKLYDGFQYLTNGIM

SEQ ID NO: 8683 - protein, 816 aa, Homo sapiens
MGDTVVEPAPLKPTSEPTSGPPGNNGGSLLSVITEGVGELSVIDPEVAQKACQEVLEKVKLLHGGVAVSSRGTPLELVNGDGVDSEIRCLDDPPAQIREEEDEMGAAVASGTAKGARRRRQNNSAKQSWLLRLFESKLFDISMAISYLYNSKEPGVQAYIGNRLFCFRNEDVDFYLPQLLNMYIHMDEDVGDAIKPYIVHRCRQSINFSLQCALLLGAYSSDMHISTQRHSRGTKLRKLILSDELKPAHRKRELPSLSPAPDTGLSPSKRTHQRSKSDATASISLSSNLKRTASNPKVENEDEELSSSTESIDNSFSSPVRLAPEREFIKSLMAIGKRLATLPTKEQKTQRLISELSLLNHKLPARVWLPTAGFDHHVVRVPHTQAVVLNSKDKAPYLIYVEVLECENFDTTSVPARIPENRIRSTRSVENLPECGITHEQRAGSFSTVPNYDNDDEAWSVDDIGELQVELPEVHTNSCDNISQFSVDSITSQESKEPVFIAAGDIRRRLSEQLAHTPTAFKRDPEDPSAVALKEPWQEKVRRIREGSPYGHLPNWRLLSVIVKCGDDLRQELLAFQVLKQLQSIWEQERVPLWIKPYKILVISADSGMIEPVVNAVSIHQVKKQSQLSLLDYFLQEHGSYTTEAFLSAQRNFVQSCAGYCLVCYLLQVKDRHNGNILLDAEGHIIHIDFGFILSSSPRNLGFETSAFKLTTEFVDVMGGLDGDMFNYYKMLMLQGLIAARKHMDKVVQIVEIMQQGSQLPCFHGSSTIRNLKERFHMSMTEEQLQLLVEQMVDGSMRSITTKLYDGFQYLTNGIM

SEQ ID NO: 8684 - protein, 828 aa, Homo sapiens
MRFLEARSLAVAMGDTVVEPAPLKPTSEPTSGPPGNNGGSLLSVITEGVGELSVIDPEVAQKACQEVLEKVKLLHGGVAVSSRGTPLELVNGDGVDSEIRCLDDPPAQIREEEDEMGAAVASGTAKGARRRRQNNSAKQSWLLRLFESKLFDISMAISYLYNSKEPGVQAYIGNRLFCFRNEDVDFYLPQLLNMYIHMDEDVGDAIKPYIVHRCRQSINFSLQCALLLGAYSSDMHISTQRHSRGTKLRKLILSDELKPAHRKRELPSLSPAPDTGLSPSKRTHQRSKSDATASISLSSNLKRTASNPKVENEDEELSSSTESIDNSFSSPVRLAPEREFIKSLMAIGKRLATLPTKEQKTQRLISELSLLNHKLPARVWLPTAGFDHHVVRVPHTQAVVLNSKDKAPYLIYVEVLECENFDTTSVPARIPENRIRSTRSVENLPECGITHEQRAGSFSTVPNYDNDDEAWSVDDIGELQVELPEVHTNSCDNISQFSVDSITSQESKEPVFIAAGDIRRRLSEQLAHTPTAFKRDPEDPSAVALKEPWQEKVRRIREGSPYGHLPNWRLLSVIVKCGDDLRQELLAFQVLKQLQSIWEQERVPLWIKPYKILVISADSGMIEPVVNAVSIHQVKKQSQLSLLDYFLQEHGSYTTEAFLSAQRNFVQSCAGYCLVCYLLQVKDRHNGNILLDAEGHIIHIDFGFILSSSPRNLGFETSAFKLTTEFVDVMGGLDGDMFNYYKMLMLQGLIAARKHMDKVVQIVEIMQQGSQLPCFHGSSTIRNLKERFHMSMTEEQLQLLVEQMVDGSMRSITTKLYDGFQYLTNGIM

SEQ ID NO: 8685 - protein, 265 aa, Homo sapiens
MFVSKRRFILKTCGTTLLLKALVPLLKLARDYSGFDSIQSFFYSRKNFMKPSHQGYPHRNFQEEIEFLNAIFPNGAAYCMGRMNSDCWYLYTLDFPESRVISQPDQTLEILMSELDPAVMDQFYMKDGVTAKDVTRESGIRDLIPGSVIDATMFNPCGYSMNGMKSDGTYWTIHITPEPEFSYVSFETNLSQTSYDDLIRKVVEVFKPGKFVTTLFVNQSSKCRTVLASPQKIEGFKRLDCQSAMFNDYNFVFTSFAKKQQQQQS

SEQ ID NO: 8686 - protein, 334 aa, Homo sapiens
MEAAHFFEGTEKLLEVWFSRQQPDANQGSGDLRTIPRSEWDILLKDVQCSIISVTKTDKQEAYVLSESSMFVSKRRFILKTCGTTLLLKALVPLLKLARDYSGFDSIQSFFYSRKNFMKPSHQGYPHRNFQEEIEFLNAIFPNGAAYCMGRMNSDCWYLYTLDFPESRVISQPDQTLEILMSELDPAVMDQFYMKDGVTAKDVTRESGIRDLIPGSVIDATMFNPCGYSMNGMKSDGTYWTIHITPEPEFSYVSFETNLSQTSYDDLIRKVVEVFKPGKFVTTLFVNQSSKCRTVLASPQKIEGFKRLDCQSAMFNDYNFVFTSFAKKQQQQQS

SEQ ID NO: 8687 - protein, 562 aa, Homo sapiens
MASASSGPSSSVGFSSFDPAVPSCTLSSAASGIKRPMASEVLEARQDSYISLVPYASGMPIKKIGHRSVDSSGETTYKKTTSSALKGAIQLGITHTVGSLSTKPERDVLMQDFYVVESIFFPSEGSNLTPAHHYNDFRFKTYAPVAFRYFRELFGIRPDDYLYSLCSEPLIELCSSGASGSLFYVSSDDEFIIKTVQHKEAEFLQKLLPGYYMNLNQNPRTLLPKFYGLYCVQAGGKNIRIVVMNNLLPRSVKMHIKYDLKGSTYKRRASQKEREKPLPTFKDLDFLQDIPDGLFLDADMYNALCKTLQRDCLVLQSFKIMDYSLLMSIHNIDHAQREPLSSETQYSVDTRRPAPQKALYSTAMESIQGEARRGGTMETDDHMGGIPARNSKGERLLLYIGIIDILQSYRFVKKLEHSWKALVHDGDTVSVHRPGFYAERFQRFMCNTVFKKIPLKPSPSKKFRSGSSFSRRAGSSGNSCITYQPSVSGEHKAQVTTKAEVEPGVHLGRPDVLPQTPPLEEISEGSPIPDPSFSPLVGETLQMLTTSTTLEKLEVAESEFTH

SEQ ID NO: 8688 - protein, 94 aa, Homo sapiens
MPVIAGGILAALLLLIVVVLCLYFKIHNALKAAKEPEAVAVKNHNPDKVWWAKNSQAKTIATESCPALQCCEGYRMCASFDSLPPCCCDINEGL

SEQ ID NO: 8689 - protein, 279 aa, Homo sapiens
MELVRRLMPLTLLILSCLAELTMAEAEGNASCTVSLGGANMAETHKAMILQLNPSENCTWTIERPENKSIRIIFSYVQLDPDGSCESENIKVFDGTSSNGPLLGQVCSKNDYVPVFESSSSTLTFQIVTDSARIQRTVFVFYYFFSPNISIPNCGGYLDTLEGSFTSPNYPKPHPELAYCVWHIQVEKDYKIKLNFKEIFLEIDKQCKFDFLAIYDGPSTNSGLIGQVCGRVTPTFESSSNSLTVVLSTDYANSYRGFSASYTSIYAENINTTSLTCSS

SEQ ID NO: 8690 - protein, 2413 aa, Homo sapiens
MGISTVILEMCLLWGQVLSTGGWIPRTTDYASLIPSEVPLDPTVAEGSPFPSESTLESTVAEGSPISLESTLESTVAEGSLIPSESTLESTVAEGSDSGLALRLVNGDGRCQGRVEILYRGSWGTVCDDSWDTNDANVVCRQLGCGWAMSAPGNAWFGQGSGPIALDDVRCSGHESYLWSCPHNGWLSHNCGHGEDAGVICSAAQPQSTLRPESWPVRISPPVPTEGSESSLALRLVNGGDRCRGRVEVLYRGSWGTVCDDYWDTNDANVVCRQLGCGWAMSAPGNAQFGQGSGPIVLDDVRCSGHESYLWSCPHNGWLTHNCGHSEDAGVICSAPQSRPTPSPDTWPTSHASTAGPESSLALRLVNGGDRCQGRVEVLYRGSWGTVCDDSWDTSDANVVCRQLGCGWATSAPGNARFGQGSGPIVLDDVRCSGYESYLWSCPHNGWLSHNCQHSEDAGVICSAAHSWSTPSPDTLPTITLPASTVGSESSLALRLVNGGDRCQGRVEVLYRGSWGTVCDDSWDTNDANVVCRQLGCGWAMLAPGNARFGQGSGPIVLDDVRCSGNESYLWSCPHNGWLSHNCGHSEDAGVICSGPESSLALRLVNGGDRCQGRVEVLYRGSWGTVCDDSWDTNDANVVCRQLGCGWATSAPGNARFGQGSGPIVLDDVRCSGHESYLWSCPNNGWLSHNCGHHEDAGVICSAAQSRSTPRPDTLSTITLPPSTVGSESSLTLRLVNGSDRCQGRVEVLYRGSWGTVCDDSWDTNDANVVCRQLGCGWATSAPGNARFGQGSGPIVLDDVRCSGHESYLWSCPHNGWLSHNCGHHEDAGVICSVSQSRPTPSPDTWPTSHASTAGPESSLALRLVNGGDRCQGRVEVLYRGSWGTVCDDSWDTSDANVVCRQLGCGWATSAPGNARFGQGSGPIVLDDVRCSGYESYLWSCPHNGWLSHNCQHSEDAGVICSAAHSWSTPSPDTLPTITLPASTVGSESSLALRLVNGGDRCQGRVEVLYQGSWGTVCDDSWDTNDANVVCRQLGCGWAMSAPGNARFGQGSGPIVLDDVRCSGHESYLWSCPHNGWLSHNCGHSEDAGVICSASQSRPTPSPDTWPTSHASTAGSESSLALRLVNGGDRCQGRVEVLYRGSWGTVCDDYWDTNDANVVCRQLGCGWAMSAPGNARFGQGSGPIVLDDVRCSGHESYLWSCPHNGWLSHNCGHHEDAGVICSASQSQPTPSPDTWPTSHASTAGSESSLALRLVNGGDRCQGRVEVLYRGSWGTVCDDYWDTNDANVVCRQLGCGWATSAPGNARFGQGSGPIVLDDVRCSGHESYLWSCPHNGWLSHNCGHHEDAGVICSASQSQPTPSPDTWPTSHASTAGSESSLALRLVNGGDRCQGRVEVLYRGSWGTVCDDYWDTNDANVVCRQLGCGWATSAPGNARFGQGSGPIVLDDVRCSGHESYLWSCPHNGWLSHNCGHHEDAGVICSASQSQPTPSPDTWPTSRASTAGSESTLALRLVNGGDRCRGRVEVLYQGSWGTVCDDYWDTNDANVVCRQLGCGWAMSAPGNAQFGQGSGPIVLDDVRCSGHESYLWSCPHNGWLSHNCGHHEDAGVICSAAQSQSTPRPDTWLTTNLPALTVGSESSLALRLVNGGDRCRGRVEVLYRGSWGTVCDDSWDTNDANVVCRQLGCGWAMSAPGNARFGQGSGPIVLDDVRCSGNESYLWSCPHKGWLTHNCGHHEDAGVICSATQINSTTTDWWHPTTTTTARPSSNCGGFLFYASGTFSSPSYPAYYPNNAKCVWEIEVNSGYRINLGFSNLKLEAHHNCSFDYVEIFDGSLNSSLLLGKICNDTRQIFTSSYNRMTIHFRSDISFQNTGFLAWYNSFPSDATLRLVNLNSSYGLCAGRVEIYHGGTWGTVCDDSWTIQEAEVVCRQLGCGRAVSALGNAYFGSGSGPITLDDVECSGTESTLWQCRNRGWFSHNCNHREDAGVICSGNHLSTPAPFLNITRPNTDYSCGGFLSQPSGDFSSPFYPGNYPNNAKCVWDIEVQNNYRVTVIFRDVQLEGGCNYDYIEVFDGPYRSSPLIARVCDGARGSFTSSSNFMSIRFISDHSITRRGFRAEYYSSPSNDSTNLLCLPNHMQASVSRSYLQSLGFSASDLVISTWNGYYECRPQITPNLVIFTIPYSGCGTFKQADNDTIDYSNFLTAAVSGGIIKRRTDLRIHVSCRMLQNTWVDTMYIANDTIHVANNTIQVEEVQYGNFDVNISFYTSSSFLYPVTSRPYYVDLNQDLYVQAEILHSDAVLTLFVDTCVASPYSNDFTSLTYDLIRSGCVRDDTYGPYSSPSLRIARFRFRAFHFLNRFPSVYLRCKMVVCRAYDPSSRCYRGCVLRSKRDVGSYQEKVDVVLGPIQLQTPPRREEEPR

SEQ ID NO: 8691 - protein, 922 aa, Homo sapiens
MPRAPHFMPLLLLLLLLSLPHTQAAFPQDPLPLLISDLQGTSPLSWFRGLEDDAVAAELGLDFQRFLTLNRTLLVAARDHVFSFDLQAEEEGEGLVPNKYLTWRSQDVENCAVRGKLTDECYNYIRVLVPWDSQTLLACGTNSFSPVCRSYGITSLQQEGEELSGQARCPFDATQSNVAIFAEPHFVQALEHGDHVYFFFREVSVEDARLGRVQFSRVARVCKRDMGGSPRALDRHWTSFLKLRLNCSVPGDSTFYFDVLQALTGPVNLHGRSALFGVFTTQTNSIPGSAVCAFYLDEIERGFEGKFKEQRSLDGAWTPVSEDRVPSPRPGSCAGVGGAALFSSSRDLPDDVLTFIKAHPLLDPAVPPVTHQPLLTLTSRALLTQVAVDGMAGPHSNITVMFLGSNDGTVLKVLTPGGRSGGPEPILLEEIDAYSPARCSGKRTAQTARRIIGLELDTEGHRLFVAFSGCIVYLPLSRCARHGACQRSCLASQDPYCGWHSSRGCVDIRGSGGTDVDQAGNQESMEHGDCQDGATGSQSGPGDSAYVLPGPGPSPGTPSPPSDAHPRPQSSTLGVHTRGVRRDLPPASASRSVPIPLLLASVAAAFALGASVSGLLVSCACRRAHRRRGKDIETPGLPRPLSLRSLARLHGGGPEPPPPSKDGDAVQTPQLYTTFLPPPEGVPPPELACLPTPESTPELPVKHLRAAGDPWEWNQNRNNAKEGPGRSRGGHAAGGPAPRVLVRPPPPGCPGQAVEVTTLEELLRYLHGPQPPRKGAEPPAPLTSRALPPEPAPALLGGPSPRPHECASPLRLDVPPEGRCASAPARPALSAPAPRLGVGGGRRLPFSGHRAPPALLTRVPSGGPSRYSGGPGKHLLYLGRPEGYRGRALKRVDVEKPQLSLKPPLVGPSSRQAVPNGGRFNF

SEQ ID NO: 8692 - protein, 962 aa, Homo sapiens
MPRAPHFMPLLLLLLLLSLPHTQAAFPQDPLPLLISDLQGTSPLSWFRGLEDDAVAAELGLDFQRFLTLNRTLLVAARDHVFSFDLQAEEEGEGLVPNKYLTWRSQDVENCAVRGKLTDECYNYIRVLVPWDSQTLLACGTNSFSPVCRSYGITSLQQEGEELSGQARCPFDATQSNVAIFAEGSLYSATAADFQASDAVVYRSLGPQPPLRSAKYDSKWLREPHFVQALEHGDHVYFFFREVSVEDARLGRVQFSRVARVCKRDMGGSPRALDRHWTSFLKLRLNCSVPGDSTFYFDVLQALTGPVNLHGRSALFGVFTTQTNSIPGSAVCAFYLDEIERGFEGKFKEQRSLDGAWTPVSEDRVPSPRPGSCAGVGGAALFSSSRDLPDDVLTFIKAHPLLDPAVPPVTHQPLLTLTSRALLTQVAVDGMAGPHSNITVMFLGSNDGTVLKVLTPGGRSGGPEPILLEEIDAYSPARCSGKRTAQTARRIIGLELDTEGHRLFVAFSGCIVYLPLSRCARHGACQRSCLASQDPYCGWHSSRGCVDIRGSGGTDVDQAGNQESMEHGDCQDGATGSQSGPGDSAYVLPGPGPSPGTPSPPSDAHPRPQSSTLGVHTRGVRRDLPPASASRSVPIPLLLASVAAAFALGASVSGLLVSCACRRAHRRRGKDIETPGLPRPLSLRSLARLHGGGPEPPPPSKDGDAVQTPQLYTTFLPPPEGVPPPELACLPTPESTPELPVKHLRAAGDPWEWNQNRNNAKEGPGRSRGGHAAGGPAPRVLVRPPPPGCPGQAVEVTTLEELLRYLHGPQPPRKGAEPPAPLTSRALPPEPAPALLGGPSPRPHECASPLRLDVPPEGRCASAPARPALSAPAPRLGVGGGRRLPFSGHRAPPALLTRVPSGGPSRYSGGPGKHLLYLGRPEGYRGRALKRVDVEKPQLSLKPPLVGPSSRQAVPNGGRFNF

SEQ ID NO: 8693 - protein, 577 aa, Homo sapiens
MGSRHFEGIYDHVGHFGRFQRVLYFICAFQNISCGIHYLASVFMGVTPHHVCRPPGNVSQVVFHNHSNWSLEDTGALLSSGQKDYVTVQLQNGEIWELSRCSRNKRENTSSLGYEYTGSKKEFPCVDGYIYDQNTWKSTAVTQWNLVCDRKWLAMLIQPLFMFGVLLGSVTFGYFSDRLGRRVVLWATSSSMFLFGIAAAFAVDYYTFMAARFFLAMVASGYLVVGFVYVMEFIGMKSRTWASVHLHSFFAVGTLLVALTGYLVRTWWLYQMILSTVTVPFILCCWVLPETPFWLLSEGRYEEAQKIVDIMAKWNRASSCKLSELLSLDLQGPVSNSPTEVQKHNLSYLFYNWSITKRTLTVWLIWFTGSLGFYSFSLNSVNLGGNEYLNLFLLGVVEIPAYTFVCIAMDKVGRRTVLAYSLFCSALACGVVMVIPQKHYILGVVTAMVGKFAIGAAFGLIYLYTAELYPTIVRSLAVGSGSMVCRLASILAPFSVDLSSIWIFIPQLFVGTMALLSGVLTLKLPETLGKRLATTWEEAAKLESENESKSSKLLLTTNNSGLEKTEAITPRDSGLGE

SEQ ID NO: 8694 - protein, 282 aa, Homo sapiens
MDTARIAVVGAGVVGLSTAVCISKLVPRCSVTIISDKFTPDTTSDVAAGMLIPHTYPDTPIHTQKQWFRETFNHLFAIANSAEAGDAGVHLVSGIKGSGGWTLTRRIEDLWELHPSFDIVVNCSGLGSRQLAGDSKIFPVRGQVLQVQAPWVEHFIRDGSGLTYIYPGTSHVTLGGTRQKGDWNLSPDAENSREILSRCCALEPSLHGACNIREKVGLRPYRPGVRLQTELLARDGQRLPVVHHYGHGSGGISVHWGTALEAARLVSECVHALRTPIPKSNL

SEQ ID NO: 8695 - protein, 369 aa, Homo sapiens
MRPARHWETRFGARDFGGFQDCFFRDRLMDTARIAVVGAGVVGLSTAVCISKLVPRCSVTIISDKFTPDTTSDVAAGMLIPHTYPDTPIHTQKQWFRETFNHLFAIANSAEAGDAGVHLVSGWQIFQSTPTEEVPFWADVVLGFRKMTEAELKKFPQYVFGQAFTTLKCECPAYLPWLEKRIKGSGGWTLTRRIEDLWELHPSFDIVVNCSGLGSRQLAGDSKIFPVRGQVLQVQAPWVEHFIRDGSGLTYIYPGTSHVTLGGTRQKGDWNLSPDAENSREILSRCCALEPSLHGACNIREKVGLRPYRPGVRLQTELLARDGQRLPVVHHYGHGSGGISVHWGTALEAARLVSECVHALRTPIPKSNL

SEQ ID NO: 8696 - protein, 539 aa, Homo sapiens
MSAAIAALAASYGSGSGSESDSDSESSRCPLPAADSLMHLTKSPSSKPSLAVAVDSAPEVAVKEDLETGVHLDPAVKEVQYNPTYETMFAPEFGPENPFRTQQMAAPRNMLSGYAEPAHINDFMFEQQRRTFATYGYALDPSLDNHQVSAKYIGSVEEAEKNQGLTVFETGQKKTEKRKKFKENDASNIDGFLGPWAKYVDEKDVAKPSEEEQKELDEITAKRQKKGKQEEEKPGEEKTILHVKEMYDYQGRSYLHIPQDVGVNLRSTMPPEKCYLPKKQIHVWSGHTKGVSAVRLFPLSGHLLLSCSMDCKIKLWEVYGERRCLRTFIGHSKAVRDICFNTAGTQFLSAAYDRYLKLWDTETGQCISRFTNRKVPYCVKFNPDEDKQNLFVAGMSDKKIVQWDIRSGEIVQEYDRHLGAVNTIVFVDENRRFVSTSDDKSLRVWEWDIPVDFKYIAEPSMHSMPAVTLSPNGKWLACQSMDNQILIFGAQNRFRLNKKKIFKGHMVAGYACQVDFSPDMRVPQSFQNLKEVTAGPQEG

SEQ ID NO: 8697 - protein, 345 aa, Homo sapiens
MSVTGGKMAPSLTQEILSHLGLASKTAAWGTLGTLRTFLNFSVDKDAQRLLRAITGQGVDRSAIVDVLTNRSREQRQLISRNFQERTQQDLMKSLQAALSGNLERIVMALLQPTAQFDAQELRTALKASDSAVDVAIEILATRTPPQLQECLAVYKHNFQVEAVDDITSETSGILQDLLLALAKGGRDSYSGIIDYNLAEQDVQALQRAEGPSREETWVPVFTQRNPEHLIRVFDQYQRSTGQELEEAVQNRFHGDAQVALLGLASVIKNTPLYFADKLHQALQETEPNYQVLIRILISRCETDLLSIRAEFRKKFGKSLYSSLQDAVKGDCQSALLALCRAEDM

SEQ ID NO: 8698 - protein, 736 aa, Homo sapiens
MTSQEKTEEYPFADIFDEDETERNFLLSKPVCFVVFGKPGVGKTTLARYITQAWKCIRVEALPILEEQIAAETESGVMLQSMLISGQSIPDELVIKLMLEKLNSPEVCHFGYIITEIPSLSQDAMTTLQQIELIKNLNLKPDVIINIKCPDYDLCQRISGQRQHNNTGYIYSRDQWDPEVIENHRKKKKEAQKDGKGEEEEEEEEQEEEEAFIAEMQMVAEILHHLVQRPEDYLENVENIVKLYKETILQTLEEVMAEHNPQYLIELNGNKPAEELFMIVMDRLKYLNLKRAAILTKLQGAEEEINDTMENDELFRTLASYKLIAPRYRWQRSKWGRTCPVNLKDGNIYSGLPDYSVSFLGKIYCLSSEEALKPFLLNPRPYLLPPMPGPPCKVFILGPQYSGKTTLCNMLAENYKGKVVDYAQLVQPRFDKARETLVENTIAEATAAAIKVVKEKLLRELQARKQAETALREFQRQYEKMEFGVFPMEATHSSIDEEGYIQGSQRDRGSSLVDTEEAKTKSENVLHDQAAKVDKDDGKETGETFTFKRHSQDASQDVKLYSDTAPTEDLIEEVTADHPEVVTMIEETIKMSQDINFEQPYEKHAEILQEVLGEVMEENKDRFPGAPKYGGWIVDNCPIVKELWMALIKKGIIPDLVIYLSDTENNGKCLFNRIYLQKKSEIDSKILERLLEELQKKKKEEEEARKATEEELRLEEENRRLLELMKVKAKGKHRLL

SEQ ID NO: 8699 - protein, 304 aa, Homo sapiens
MLQTLYDYFWWERLWLPVNLTWADLEDRDGRVYAKASDLYITLPLALLFLIVRYFFELYVATPLAALLNIKEKTRLRAPPNATLEHFYLTSGKQPKQVEVELLSRQSGLSGRQVERWFRRRRNQDRPSLLKKFREASWRFTFYLIAFIAGMAVIVDKPWFYDMKKVWEGYPIQSTIPSQYWYYMIELSFYWSLLFSIASDVKRKDFKEQIIHHVATIILISFSWFANYIRAGTLIMALHDSSDYLLESAKMFNYAGWKNTCNNIFIVFAIVFIITRLVILPFWILHCTLVYPLELYPAFFGYYF

SEQ ID NO: 8700 - protein, 2403 aa, Homo sapiens; identical to SEQ ID NO: 6584

SEQ ID NO: 8701 - protein, 1785 aa, Homo sapiens; identical to SEQ ID NO: 5391

SEQ ID NO: 8702 - protein, 1290 aa, Homo sapiens
MSSLPGCIGLDAATATVESEEIAELQQAVVEELGISMEELRHFIDEELEKMDCVQQRKKQLAELETWVIQKESEVAHVDQLFDDASRAVTNCESLVKDFYSKLGLQYRDSSSEDESSRPTEIIEIPDEDDDVLSIDSGDAGSRTPKDQKLREAMAALRKSAQDVQKFMDAVNKKSSSQDLHKGTLSQMSGELSKDGDLIVSMRILGKKRTKTWHKGTLIAIQTVGPGKKYKVKFDNKGKSLLSGNHIAYDYHPPADKLYVGSRVVAKYKDGNQVWLYAGIVAETPNVKNKLRFLIFFDDGYASYVTQSELYPICRPLKKTWEDIEDISCRDFIEEYVTAYPNRPMVLLKSGQLIKTEWEGTWWKSRVEEVDGSLVRILFLDDKRCEWIYRGSTRLEPMFSMKTSSASALEKKQGQLRTRPNMGAVRSKGPVVQYTQDLTGTGTQFKPVEPPQPTAPPAPPFPPAPPLSPQAGDSDLESQLAQSRKQVAKKSTSFRPGSVGSGHSSPTSPALSENVSGGKPGINQTYRSPLGSTASAPAPSALPAPPAPPVFHGMLERAPAEPSYRAPMEKLFYLPHVCSYTCLSRVRPMRNEQYRGKNPLLVPLLYDFRRMTARRRVNRKMGFHVIYKTPCGLCLRTMQEIERYLFETGCDFLFLEMFCLDPYVLVDRKFQPYKPFYYILDITYGKEDVPLSCVNEIDTTPPPQVAYSKERIPGKGVFINTGPEFLVGCDCKDGCRDKSKCACHQLTIQATACTPGGQINPNSGYQYKRLEECLPTGVYECNKRCKCDPNMCTNRLVQHGLQVRLQLFKTQNKGWGIRCLDDIAKGSFVCIYAGKILTDDFADKEGLEMGDEYFANLDHIESVENFKEGYESDAPCSSDSSGVDLKDQEDGNSGTEDPEESNDDSSDDNFCKDEDFSTSSVWRSYATRRQTRGQKENGLSETTSKDSHPPDLGPPHIPVPPSIPVGGCNPPSSEETPKNKVASWLSCNSVSEGGFADSDSHSSFKTNEGGEGRAGGSRMEAEKASTSGLGIKDEGDIKQAKKEDTDDRNKMSVVTESSRNYGYNPSPVKPEGLRRPPSKTSMHQSRRLMASAQSNPDDVLTLSSSTESEGESGTSRKPTAGQTSATAVDSDDIQTISSGSEGDDFEDKKNMTGPMKRQVAVKSTRGFALKSTHGIAIKSTNMASVDKGESAPVRKNTRQFYDGEESCYIIDAKLEGNLGRYLNHSCSPNLFVQNVFVDTHDLRFPWVAFFASKIRAGTELTWDYNYEVGSVEGKELLCCCGAIECRGRLL

SEQ ID NO: 8703 - protein, 702 aa, Homo sapiens
MMGDSMVKINGIYLTKSNAICHLKSHPLQLTDDGGFSEIKEQEMFKGTTSLPSHLKNGGDQGKRHARASSCPSSSDLSRLQTKAVPKADLQEEDAEIEVDEVFWNTRIVPILRELEKEENIETVCAACTQLHHALEEGNMLGNKFKGRSILLKTLCKLVDVGSDSLSLKLAKIILALKVSRKNLLNVCKLIFKISRNEKNDSLIQNDSILESLLEVLRSEDLQTNMEAFLYCMGSIKFISGNLGFLNEMISKGAVEILINLIKQINENIKKCGTFLPNSGHLLVQVTATLRNLVDSSLVRSKFLNISALPQLCTAMEQYKGDKDVCTNIARIFSKLTSYRDCCTALASYSRCYALFLNLINKYQKKQDLVVRVVFILGNLTAKNNQAREQFSKEKGSIQTLLSLFQTFHQLDLHSQKPVGQRGEQHRAQRPPSEAEDVLIKLTRVLANIAIHPGVGPVLAANPGIVGLLLTTLEYKSLDDCEELVINATATINNLSYYQVKNSIIQDKKLYIAELLLKLLVSNNMDGILEAVRVFGNLSQDHDVCDFIVQNNVHRFMMALLDAQHQDICFSACGVLLNLTVDKDKRVILKEGGGIKKLVDCLRDLGPTDWQLACLVCKTLWNFSENITNASSCFGNEDTNTLLLLLSSFLDEELALDGSFDPDLKNYHKLHWETEFKPVAQQLLNRIQRHHTFLEPLPIPSF

SEQ ID NO: 8704 - protein, 422 aa, Homo sapiens
MFRAGAEGAEKEPSPRPECRADPGPGLGFPLGSGLPWPSLLESPGGRILDIPCKVCGDRSSGKHYGVYACDGCSGFFKRSIRRNRTYVCKSGNQGGCPVDKTHRNQCRACRLKKCLEVNMNKDAVQHERGPRTSTIRKQVALYFRGHKEENGAAAHFPSAALPAPAFFTAVTQLEPHGLELAAVSTTPERQTLVSLAQPTPKYPHEVNGTPMYLYEVATESVCESAARLLFMSIKWAKSVPAFSTLSLQDQLMLLEDAWRELFVLGIAQWAIPVDANTLLAVSGMNGDNTDSQKLNKIISEIQALQEVVARFRQLRLDATEFACLKCIVTFKAVPTHSGSELRSFRNAAAIAALQDEAQLTLNSYIHTRYPTQPCRFGKLLLLLPALRSISPSTIEEVFFKKTIGNVPITRLLSDMYKSSDI

SEQ ID NO: 8705 - protein, 331 aa, Homo sapiens
MKRLVCVLLVCSSAVAQLHKDPTLDHHWHLWKKTYGKQYKEKNEEAVRRLIWEKNLKFVMLHNLEHSMGMHSYDLGMNHLGDMTSEEVMSLMSSLRVPSQWQRNITYKSNPNRILPDSVDWREKGCVTEVKYQGSCGACWAFSAVGALEAQLKLKTGKLVSLSAQNLVDCSTEKYGNKGCNGGFMTTAFQYIIDNKGIDSDASYPYKAMDQKCQYDSKYRAATCSKYTELPYGREDVLKEAVANKGPVSVGVDARHPSFFLYRSGVYYEPSCTQNVNHGVLVVGYGDLNGKEYWLVKNSWGHNFGEEGYIRMARNKGNHCGIASFPSYPEI

SEQ ID NO: 8706 - protein, 385 aa, Homo sapiens
MSKPAGSTSRILDIPCKVCGDRSSGKHYGVYACDGCSGFFKRSIRRNRTYVCKSGNQGGCPVDKTHRNQCRACRLKKCLEVNMNKDAVQHERGPRTSTIRKQVALYFRGHKEENGAAAHFPSAALPAPAFFTAVTQLEPHGLELAAVSTTPERQTLVSLAQPTPKYPHEVNGTPMYLYEVATESVCESAARLLFMSIKWAKSVPAFSTLSLQDQLMLLEDAWRELFVLGIAQWAIPVDANTLLAVSGMNGDNTDSQKLNKIISEIQALQEVVARFRQLRLDATEFACLKCIVTFKAVPTHSGSELRSFRNAAAIAALQDEAQLTLNSYIHTRYPTQPCRFGKLLLLLPALRSISPSTIEEVFFKKTIGNVPITRLLSDMYKSSDI

SEQ ID NO: 8707 - protein, 190 aa, Homo sapiens
MRLWNKISRWMLGCYDALQKKYLRMVVLAVYTNPEDPQTISECYQFKFKYTNNGPLMDFISKNQSNESSMLSTDTKKASILLIRKIYILMQNLGPLPNDVCLTMKLFYYDEVTPPDYQPPGFKDGDCEGVIFEGEPMYLNVGEVSTPFHIFKVKVTTERERMENIDSTILSPKQIKTPFQKILRDKDVED

SEQ ID NO: 8708 - protein, 383 aa, Homo sapiens
MPYVDRQNRICGFLDIEENENSGKFLRRYFILDTREDSFVWYMDNPQNLPSGSSRVGAIKLTYISKVSDATKLRPKAEFCFVMNAGMRKYFLQANDQQDLVEWVNVLNKAIKITVPKQSDSQPNSDNLSRHGECGKKQVSYRTDIVGGVPIITPTQKEEVNECGESIDRNNLKRSQSHLPYFTPKPPQDSAVIKAGYCVKQGAVMKNWKRRYFQLDENTIGYFKSELEKEPLRVIPLKEVHKVQECKQSDIMMRDNLFEIVTTSRTFYVQADSPEEMHSWIKAVSGAIVAQRGPGRSASSMRQARRLSNPCIQRSIPPVLQNPNTLSVLPTQPPPPHIPQPLAATLWSQPLPWRSEDFTSLLPRSSQGTSRSRLSLQENQLPK

SEQ ID NO: 8709 - protein, 404 aa, Homo sapiens
MPYVDRQNRICGFLDIEENENSGKFLRRYFILDTREDSFVWYMDNPQNLPSGSSRVGAIKLTYISKVSDATKLRPKAEFCFVMNAGMRKYFLQANDQQDLVEWVNVLNKAIKITVPKQSDSQPNSDNLSRHGECGKKQVSYRTDIVGGVPIITPTQKEEVNECGESIDRNNLKRSQSHLPYFTPKPPQDSAVIKAGYCVKQGAVMKNWKRRYFQLDENTIGYFKSELEKEPLRVIPLKEVHKVQECKQSDIMMRDNLFEIVTTSRTFYVQADSPEEMHSWIKAVSGAIVAQRGPGRSASSEHPPGPSESKHAFRPTNAATATSHSTASRSNSLVSTFTMEKRGFYESLAKVKPGNFKVQTVSPREPASKVTEQALLRPQSKNGPQEKDCDLVDLDDASLPVSDV

SEQ ID NO: 8710 - protein, 314 aa, Homo sapiens
MRLWNKISRWMLGCYDALQKKYLRMVVLATISECYQFKFKYTNNGPLMDFISKNQSNESSMLSTDTKKASILLIRKIYILMQNLGPLPNDVCLTMKLFYYDEVTPPDYQPPGFKDGDCEGVIFEGEPMYLNVGEVSTPFHIFKVKVTTERERMENIDSTILSPKQIKTPFQKILRDKDVEDEQEHYTSDDLDIETKMEEQEKNPASSELEEPSLVCEEDEIMRSKESPDLSISHSQVEQLVNKTSELDMSESKTRSGKVFQNKMANGNQPVKSSKENRKRSQHESGRIVLHHFDSSSQESVPKRRKFSEPKEHI

SEQ ID NO: 8711 - protein, 1038 aa, Homo sapiens
MGGSQSLQPAPASDLNLEASEAMSSDSEEAFETPESTTPVKAPPAPPPPPPEVIPEPEVSTQPPPEEPGCGSETVPVPDGPRSDSVEGSPFRPPSHSFSAVFDEDKPIASSGTYNLDFDNIELVDTFQTLEPRASDAKNQEGKVNTRRKSTDSVPISKSTLSRSLSLQASDFDGASSSGNPEAVALAPDAYSTGSSSASSTLKRTKKPRPPSLKKKQTTKKPTETPPVKETQQEPDEESLVPSGENLASETKTESAKTEGPSPALLEETPLEPAVGPKAACPLDSESAEGVVPPASGGGRVQNSPPVGRKTLPLTTAPEAGEVTPSDSGGQEDSPAKGLSVRLEFDYSEDKSSWDNQQENPPPTKKIGKKPVAKMPLRRPKMKKTPEKLDNTPASPPRSPAEPNDIPIAKGTYTFDIDKWDDPNFNPFSSTSKMQESPKLPQQSYNFDPDTCDESVDPFKTSSKTPSSPSKSPASFEIPASAMEANGVDGDGLNKPAKKKKTPLKTMVEDVMSVCSLFDTFRVKKSPKRSPLSDPPSQDPTPAATPETPPVISAVVHATDEEKLAVTNQKWTCMTVDLEADKQDYPQPSDLSTFVNETKFSSPTEELDYRNSYEIEYMEKIGSSLPQDDDAPKKQALYLMFDTSQESPVKSSPVRMSESPTPCSGSSFEETEALVNTAAKNQHPVPRGLAPNQESHLQVPEKSSQKELEAMGLGTPSEAIEITAPEGSFASADALLSRLAHPVSLCGALDYLEPDLAEKNPPLFAQKLQEELEFAIMRIEALKLARQIALASRSHQDAKREAAHPTDVSISKTALYSRIGTAEVEKPAGLLFQQPDLDSALQIARAEIITKEREVSEWKDKYEESRREVMEMRKIVAEYEKTIAQMIEDEQREKSVSHQTVQQLVLEKEQALADLNSVEKSLADLFRRYEKMKEVLEGFRKNEEVLKRCAQEYLSRVKKEEQRYQALKVHAEEKLDRANAEIAQVRGKAQQEQAAHQASLRKEQLRVDALERTLEQKNKEIEELTKICDELIAKMGKS

SEQ ID NO: 8712 - protein, 760 aa, Homo sapiens
MAGQQFQYDDSGNTFFYFLTSFVGLIVIPATYYLWPRDQNAEQIRLKNIRKVYGRCMWYRLRLLKPQPNIIPTVKKIVLLAGWALFLFLAYKVSKTDREYQEYNPYEVLNLDPGATVAEIKKQYRLLSLKYHPDKGGDEVMFMRIAKAYAALTDEESRKNWEEFGNPDGPQATSFGIALPAWIVDQKNSILVLLVYGLAFMVILPVVVGSWWYRSIRYSGDQILIRTTQIYTYFVYKTRNMDMKRLIMVLAGASEFDPQYNKDATSRPTDNILIPQLIREIGSINLKKNEPPLTCPYSLKARVLLLSHLARMKIPETLEEDQQFMLKKCPALLQEMVNVICQLIVMARNREEREFRAPTLASLENCMKLSQMAVQGLQQFKSPLLQLPHIEEDNLRRVSNHKKYKIKTIQDLVSLKESDRHTLLHFLEDEKYEEVMAVLGSFPYVTMDIKSQVLDDEDSNNITVGSLVTVLVKLTRQTMAEVFEKEQSICAAEEQPAEDGQGETNKNRTKGGWQQKSKGPKKTAKSKKKKPLKKKPTPVLLPQSKQQKQKQANGVVGNEAAVKEDEEEVSDKGSDSEEEETNRDSQSEKDDGSDRDSDREQDEKQNKDDEAEWQELQQSIQRKERALLETKSKITHPVYSLYFPEEKQEWWWLYIADRKEQTLISMPYHVCTLKDTEEVELKFPAPGKPGNYQYTVFLRSDSYMGLDQIKPLKLEVHEAKPVPENHPQWDTAIEGDEDQEDSEGFEDSFEEEEEEEEDDD

SEQ ID NO: 8713 - protein, 350 aa, Homo sapiens
MFGLKRNAVIGLNLYCGGAGLGAGSGGATRPGGRLLATEKEASARREIGGGEAGAVIGGSAGASPPSTLTPDSRRVARPPPIGAEVPDVTATPARLLFFAPTRRAAPLEEMEAPAADAIMSPEEELDGYEPEPLGKRPAVLPLLELVGESGNNTSTDGSLPSTPPPAEEEEDELYRQSLEIISRYLREQATGAKDTKPMGRSGATSRKALETLRRVGDGVQRNHETAFQGMLRKLDIKNEDDVKSLSRVMIHVFSDGVTNWGRIVTLISFGAFVAKHLKTINQESCIEPLAESITDVLVRTKRDWLVKQRGWDGFVEFFHVEDLEGGIRNVLLAFAGVAGVGAGLAYLIR

SEQ ID NO: 8714 - protein, 1097 aa, Homo sapiens
MENWTGRPWLYLLLLLSLPQLCLDQEVLSGHSLQTPTEEGQGPEGVWGPWVQWASCSQPCGVGVQRRSRTCQLPTVQLHPSLPLPPRPPRHPEALLPRGQGPRPQTSPETLPLYRTQSRGRGGPLRGPASHLGREETQEIRAARRSRLRDPIKPGMFGYGRVPFALPLHRNRRHPRSPPRSELSLISSRGEEAIPSPTPRAEPFSANGSPQTELPPTELSVHTPSPQAEPLSPETAQTEVAPRTRPAPLRHHPRAQASGTEPPSPTHSLGEGGFFRASPQPRRPSSQGWASPQVAGRRPDPFPSVPRGRGQQGQGPWGTGGTPHGPRLEPDPQHPGAWLPLLSNGPHASSLWSLFAPSSPIPRCSGESEQLRACSQAPCPPEQPDPRALQCAAFNSQEFMGQLYQWEPFTEAPLLPLRHAFFLLPGAGSGDSTGVQGSQRCELNCRPRGFRFYVRHTEKVQDGTLCQPGAPDICVAGRCLSPGCDGILGSGRRPDGCGVCGGDDSTCRLVSGNLTDRGGPLGYQKILWIPAGALRLQIAQLRPSSNYLALRGPGGRSIINGNWAVDPPGSYRAGGTVFRYNRPPREEGKGESLSAEGPTTQPVDVYMIFQEENPGVFYQYVISSPPPILENPTPEPPVPQLQPEILRVEPPLAPAPRPARTPGTLQRQVRIPQMPAPPHPRTPLGSPAAYWKRVGHSACSASCGKGVWRPIFLCISRESGEELDERSCAAGARPPASPEPCHGTPCPPYWEAGEWTSCSRSCGPGTQHRQLQCRQEFGGGGSSVPPERCGHLPRPNITQSCQLRLCGHWEVGSPWSQCSVRCGRGQRSRQVRCVGNNGDEVSEQECASGPPQPPSREACDMGPCTTAWFHSDWSSKCSAECGTGIQRRSVVCLGSGAALGPGQGEAGAGTGQSCPTGSRPPDMRACSLGPCERTWRWYTGPWGECSSECGSGTQRRDIICVSKLGTEFNVTSPSNCSHLPRPPALQPCQGQACQDRWFSTPWSPCSRSCQGGTQTREVQCLSTNQTLSTRCPPQLRPSRKRPCNSQPCSQRPDDQCKDSSPHCPLVVQARLCVYPYYTATCCRSCAHVLERSPQDPS

SEQ ID NO: 8715 - protein, 877 aa, Homo sapiens
MENWTGRPWLYLLLLLSLPQLCLDQEVLSGHSLQTPTEEGQGPEGVWGPWVQWASCSQPCGVGVQRRSRTCQLPTVQLHPSLPLPPRPPRHPEALLPRGQGPRPQTSPETLPLYRTQSRGRGGPLRGPASHLGREETQEIRAARRSRLRDPIKPGMFGYGRVPFALPLHRNRRHPRSPPRSELSLISSRGEEAIPSPTPRAEPFSANGSPQTELPPTELSVHTPSPQAEPLSPETAQTEVAPRTRPAPLRHHPRAQASGTEPPSPTHSLGEGGFFRASPQPRRPSSQGWASPQVAGRRPDPFPSVPRGRGQQGQGPWGTGGTPHGPRLEPDPQHPGAWLPLLSNGPHASSLWSLFAPSSPIPRCSGESEQLRACSQAPCPPEQPDPRALQCAAFNSQEFMGQLYQWEPFTEVQGSQRCELNCRPRGFRFYVRHTEKVQDGTLCQPGAPDICVAGRCLSPGCDGILGSGRRPDGCGVCGGDDSTCRLVSGNLTDRGGPLGYQKILWIPAGALRLQIAQLRPSSNYLALRGPGGRSIINGNWAVDPPGSYRAGGTVFRYNRPPREEGKGESLSAEGPTTQPVDVYMIFQEENPGVFYQYVISSPPPILENPTPEPPVPQLQPEILRVEPPLAPAPRPARTPGTLQRQVRIPQMPAPPHPRTPLGSPAAYWKRVGHSACSASCGKGVWRPIFLCISRESGEELDERSCAAGARPPASPEPCHGTPCPPYWEAGEWTSCSRSCGPGTQHRQLQCRQEFGGGGSSVPPERCGHLPRPNITQSCQLRLCGHWEVGSPWSQCSVRCGRGQRSRQVRCVGNNGDEVSEQECASGPPQPPSREACDMGPCTTAWFHSDWSSKVSPEPPAISCILGNHAQDTSAFPA

SEQ ID NO: 8716 - protein, 828 aa, Homo sapiens
MNSTEFTEDVEEVLKSITVKVETEAEDAALDCSVNSRTSEKHSVDSVLTALQDSSKRKQLVSDGLLDSVPGVKRRRLIPEALLAGMRNRENSSPCQGNGEQAGRGRSLGNVWPGEEEPCNDATTPSYKKPLYGISHKIMEKKNPPSGDLLNVYELFEKANASNSPSSLRLLNEPQKRDCGSTGAGTDNDPNIYFLIQKMFYMLNTLTSNMSQLHSKVDLLSLEVSRIKKQVSPTEMVAKFQPPPEYQLTAAELKQIVDQSLSGGDLACRLLVQLFPELFSDVDFSRGCSACGFAAKRKLESLHLQLIRNYVEVYYPSVKDTAVWQAECLPQLNDFFSRFWAQREMEDSQPSGQVASFFEAEQVDPGHFLDNKDQEEALSLDRSSTIASDHVVDTQDLTEFLDEASSPGEFAVFLLHRLFPELFDHRKLGEQYSCYGDGGKQELDPQRLQIIRNYTEIYFPDMQEEEAWLQQCAQRINDELEGLGLDAGSEGDPPRDDCYDSSSLPDDISVVKVEDSFEGERPGRRSKKIWLVPIDFDKLEIPQPDFEVPGADCLLSKEQLRSIYESSLSIGNFASRLLVHLFPELFTHENLRKQYNCSGSLGKKQLDPSRIKLIRHYVQLLYPRAKNDRVWTLEFVGKLDERCRRRDTEQRRSYQQQRKVHVPGPECRDLTSYAINPERFREEFEGPPLPPERSSKDFCKIPLDELVVPSPDFPVPSPYLLSDKEVREIVQQSLSVGNFAARLLVRLFPELFTAENLRLQYNHSGACNKKQLDPTRLRLIRHYVEAVYPVEKMEEVWHYECIPSIDERCRRPNRKKCDILKKAKKVEK

SEQ ID NO: 8717 - protein, 769 aa, Homo sapiens
MVSWGRFICLVVVTMATLSLARPSFSLVEDTTLEPEEPPTKYQISQPEVYVAAPGESLEVRCLLKDAAVISWTKDGVHLGPNNRTVLIGEYLQIKGATPRDSGLYACTASRTVDSETWYFMVNVTDAISSGDDEDDTDGAEDFVSENSNNKRAPYWTNTEKMEKRLHAVPAANTVKFRCPAGGNPMPTMRWLKNGKEFKQEHRIGGYKVRNQHWSLIMESVVPSDKGNYTCVVENEYGSINHTYHLDVVERSPHRPILQAGLPANASTVVGGDVEFVCKVYSDAQPHIQWIKHVEKNGSKYGPDGLPYLKVLKHSGINSSNAEVLALFNVTEADAGEYICKVSNYIGQANQSAWLTVLPKQQAPGREKEITASPDYLEIAIYCIGVFLIACMVVTVILCRMKNTTKKPDFSSQPAVHKLTKRIPLRRQVTVSAESSSSMNSNTPLVRITTRLSSTADTPMLAGVSEYELPEDPKWEFPRDKLTLGKPLGEGCFGQVVMAEAVGIDKDKPKEAVTVAVKMLKDDATEKDLSDLVSEMEMMKMIGKHKNIINLLGACTQDGPLYVIVEYASKGNLREYLRARRPPGMEYSYDINRVPEEQMTFKDLVSCTYQLARGMEYLASQKCIHRDLAARNVLVTENNVMKIADFGLARDINNIDYYKKTTNGRLPVKWMAPEALFDRVYTHQSDVWSFGVLMWEIFTLGGSPYPGIPVEELFKLLKEGHRMDKPANCTNELYMMMRDCWHAVPSQRPTFKQLVEDLDRILTLTTNEI

SEQ ID NO: 8718 - protein, 768 aa, Homo sapiens
MVSWGRFICLVVVTMATLSLARPSFSLVEDTTLEPEEPPTKYQISQPEVYVAAPGESLEVRCLLKDAAVISWTKDGVHLGPNNRTVLIGEYLQIKGATPRDSGLYACTASRTVDSETWYFMVNVTDAISSGDDEDDTDGAEDFVSENSNNKRAPYWTNTEKMEKRLHAVPAANTVKFRCPAGGNPMPTMRWLKNGKEFKQEHRIGGYKVRNQHWSLIMESVVPSDKGNYTCVVENEYGSINHTYHLDVVERSPHRPILQAGLPANASTVVGGDVEFVCKVYSDAQPHIQWIKHVEKNGSKYGPDGLPYLKVLKHSGINSSNAEVLALFNVTEADAGEYICKVSNYIGQANQSAWLTVLPKQQAPGREKEITASPDYLEIAIYCIGVFLIACMVVTVILCRMKNTTKKPDFSSQPAVHKLTKRIPLRRQVTVSAESSSSMNSNTPLVRITTRLSSTADTPMLAGVSEYELPEDPKWEFPRDKLTLGKPLGEGCFGQVVMAEAVGIDKDKPKEAVTVAVKMLKDDATEKDLSDLVSEMEMMKMIGKHKNIINLLGACTQDGPLYVIVEYASKGNLREYLRARRPPGMEYSYDINRVPEEQMTFKDLVSCTYQLARGMEYLASQKCIHRDLAARNVLVTENNVMKIADFGLARDINNIDYYKKTTNGRLPVKWMAPEALFDRVYTHQSDVWSFGVLMWEIFTLGGSPYPGIPVEELFKLLKEGHRMDKPANCTNELYMMMRDCWHAVPSQRPTFKQLVEDLDRILTLTTNE

SEQ ID NO: 8719 - protein, 707 aa, Homo sapiens
MVSWGRFICLVVVTMATLSLARPSFSLVEDTTLEPEGAPYWTNTEKMEKRLHAVPAANTVKFRCPAGGNPMPTMRWLKNGKEFKQEHRIGGYKVRNQHWSLIMESVVPSDKGNYTCVVENEYGSINHTYHLDVVERSPHRPILQAGLPANASTVVGGDVEFVCKVYSDAQPHIQWIKHVEKNGSKYGPDGLPYLKVLKHSGINSSNAEVLALFNVTEADAGEYICKVSNYIGQANQSAWLTVLPKQQAPGREKEITASPDYLEIAIYCIGVFLIACMVVTVILCRMKNTTKKPDFSSQPAVHKLTKRIPLRRQVTVSAESSSSMNSNTPLVRITTRLSSTADTPMLAGVSEYELPEDPKWEFPRDKLTLGKPLGEGCFGQVVMAEAVGIDKDKPKEAVTVAVKMLKDDATEKDLSDLVSEMEMMKMIGKHKNIINLLGACTQDGPLYVIVEYASKGNLREYLRARRPPGMEYSYDINRVPEEQMTFKDLVSCTYQLARGMEYLASQKCIHRDLAARNVLVTENNVMKIADFGLARDINNIDYYKKTTNGRLPVKWMAPEALFDRVYTHQSDVWSFGVLMWEIFTLGGSPYPGIPVEELFKLLKEGHRMDKPANCTNELYMMMRDCWHAVPSQRPTFKQLVEDLDRILTLTTNEEYLDLSQPLEQYSPSYPDTRSSCSSGDDSVFSPDPMPYEPCLPQYPHINGSVKT

SEQ ID NO: 8720 - protein, 705 aa, Homo sapiens
MVSWGRFICLVVVTMATLSLARPSFSLVEDTTLEPEEPPTKYQISQPEVYVAAPGESLEVRCLLKDAAVISWTKDGVHLGPNNRTVLIGEYLQIKGATPRDSGLYACTASRTVDSETWYFMVNVTDAISSGDDEDDTDGAEDFVSENSNNKRAPYWTNTEKMEKRLHAVPAANTVKFRCPAGGNPMPTMRWLKNGKEFKQEHRIGGYKVRNQHWSLIMESVVPSDKGNYTCVVENEYGSINHTYHLDVVERSPHRPILQAGLPANASTVVGGDVEFVCKVYSDAQPHIQWIKHVEKNGSKYGPDGLPYLKVLKVSAESSSSMNSNTPLVRITTRLSSTADTPMLAGVSEYELPEDPKWEFPRDKLTLGKPLGEGCFGQVVMAEAVGIDKDKPKEAVTVAVKMLKDDATEKDLSDLVSEMEMMKMIGKHKNIINLLGACTQDGPLYVIVEYASKGNLREYLRARRPPGMEYSYDINRVPEEQMTFKDLVSCTYQLARGMEYLASQKCIHRDLAARNVLVTENNVMKIADFGLARDINNIDYYKKTTNGRLPVKWMAPEALFDRVYTHQSDVWSFGVLMWEIFTLGGSPYPGIPVEELFKLLKEGHRMDKPANCTNELYMMMRDCWHAVPSQRPTFKQLVEDLDRILTLTTNEEYLDLSQPLEQYSPSYPDTRSSCSSGDDSVFSPDPMPYEPCLPQYPHINGSVKT

SEQ ID NO: 8721 - protein, 709 aa, Homo sapiens
MVSWGRFICLVVVTMATLSLARPSFSLVEDTTLEPEEPPTKYQISQPEVYVAAPGESLEVRCLLKDAAVISWTKDGVHLGPNNRTVLIGEYLQIKGATPRDSGLYACTASRTVDSETWYFMVNVTDAISSGDDEDDTDGAEDFVSENSNNKRAPYWTNTEKMEKRLHAVPAANTVKFRCPAGGNPMPTMRWLKNGKEFKQEHRIGGYKVRNQHWSLIMESVVPSDKGNYTCVVENEYGSINHTYHLDVVAPGREKEITASPDYLEIAIYCIGVFLIACMVVTVILCRMKNTTKKPDFSSQPAVHKLTKRIPLRRQVTVSAESSSSMNSNTPLVRITTRLSSTADTPMLAGVSEYELPEDPKWEFPRDKLTLGKPLGEGCFGQVVMAEAVGIDKDKPKEAVTVAVKMLKDDATEKDLSDLVSEMEMMKMIGKHKNIINLLGACTQDGPLYVIVEYASKGNLREYLRARRPPGMEYSYDINRVPEEQMTFKDLVSCTYQLARGMEYLASQKCIHRDLAARNVLVTENNVMKIADFGLARDINNIDYYKKTTNGRLPVKWMAPEALFDRVYTHQSDVWSFGVLMWEIFTLGGSPYPGIPVEELFKLLKEGHRMDKPANCTNELYMMMRDCWHAVPSQRPTFKQLVEDLDRILTLTTNEEYLDLSQPLEQYSPSYPDTRSSCSSGDDSVFSPDPMPYEPCLPQYPHINGSVKT

SEQ ID NO: 8722 - protein, 1723 aa, Homo sapiens
MEKRSSGRRSGRRRGSQKSTDSPGADAELPESAARDDAVFDDEVAPNAASDNASAEKKVKSPRAALDGGVASAASPESKPSPGTKGQLRGESDRSKQPPPASSPTKRKGRSRALEAVPAPPASGPRAPAKESPPKRVPDPSPVTKGTAAESGEEAARAIPRELPVKSSSLLPEIKPEHKRGPLPNHFNGRAEGGRSRELGRAAGAPGASDADGLKPRNHFGVGRSTVTTKVTLPAKPKHVELNLKTPKNLDSLGNEHNPFSQPVHKGNTATKISLFENKRTNSSPRHTDIRGQRNTPASSKTFVGRAKLNLAKKAKEMEQPEKKVMPNSPQNGVLVKETAIETKVTVSEEEILPATRGMNGDSSENQALGPQPNQDDKADVQTDAGCLSEPVASALIPVKDHKLLEKEDSEAADSKSLVLENVTDTAQDIPTTVDTKDLPPTAMPKPQHTFSDSQSPAESSPGPSLSLSAPAPGDVPKDTCVQSPISSFPCTDLKVSENHKGCVLPVSRQNNEKMPLLELGGETTPPLSTERSPEAVGSECPSRVLVQVRSFVLPVESTQDVSSQVIPESSEVREVQLPTCHSNEPEVVSVASCAPPQEEVLGNEHSHCTAELAAKSGPQVIPPASEKTLPIQAQSQGSRTPLMAESSPTNSPSSGNHLATPQRPDQTVTNGQDSPASLLNISAGSDDSVFDSSSDMEKFTEIIKQMDSAVCMPMKRKKARMPNSPAPHFAMPPIHEDHLEKVFDPKVFTFGLGKKKESQPEMSPALHLMQNLDTKSKLRPKRASAEQSVLFKSLHTNTNGNSEPLVMPEINDKENRDVTNGGIKRSRLEKSALFSSLLSSLPQDKIFSPSVTSVNTMTTAFSTSQNGSLSQSSVSQPTTEGAPPCGLNKEQSNLLPDNSLKVFNFNSSSTSHSSLKSPSHMEKYPQKEKTKEDLDSRSNLHLPETKFSELSKLKNDDMEKANHIESVIKSNLPNCANSDTDFMGLFKSSRYDPSISFSGMSLSDTMTLRGSVQNKLNPRPGKVVIYSEPDVSEKCIEVFSDIQDCSSWSLSPVILIKVVRGCWILYEQPNFEGHSIPLEEGELELSGLWGIEDILERHEEAESDKPVVIGSIRHVVQDYRVSHIDLFTEPEGLGILSSYFDDTEEMQGFGVMQKTCSMKVHWGTWLIYEEPGFQGVPFILEPGEYPDLSFWDTEEAYIGSMRPLKMGGRKVEFPTDPKVVVYEKPFFEGKCVELETGMCSFVMEGGETEEATGDDHLPFTSVGSMKVLRGIWVAYEKPGFTGHQYLLEEGEYRDWKAWGGYNGELQSLRPILGDFSNAHMIMYSEKNFGSKGSSIDVLGIVANLKETGYGVKTQSINVLSGVWVAYENPDFTGEQYILDKGFYTSFEDWGGKNCKISSVQPICLDSFTGPRRRNQIHLFSEPQFQGHSQSFEETTSQIDDSFSTKSCRVSGGSWVVYDGENFTGNQYVLEEGHYPCLSAMGCPPGATFKSLRFIDVEFSEPTIILFEREDFKGKKIELNAETVNLRSLGFNTQIRSVQVIGGIWVTYEYGSYRGRQFLLSPAEVPNWYEFSGCRQIGSLRPFVQKRIYFRLRNKATGLFMSTNGNLEDLKLLRIQVMEDVGADDQIWIYQEGCIKCRIAEDCCLTIVGSLVTSGSKLGLALDQNADSQFWSLKSDGRIYSKLKPNLVLDIKGGTQYDQNHIILNTVSKEKFTQVWEAMVLYT

SEQ ID NO: 8723 - protein, 1461 aa, Homo sapiens
MAAGGGGGSSKASSSSASSAGALESSLDRKFQSVTNTMESIQGLSSWCIENKKHHSTIVYHWMKWLRRSAYPHRLNLFYLANDVIQNCKRKNAIIFRESFADVLPEAAALVKDPSVSKSVERIFKIWEDRNVYPEEMIVALREALSTTFKTQKQLKENLNKQPNKQWKKSQTSTNPKAALKSKIVAEFRSQALIEELLLYKRSEDQIELKEKQLSTMRVDVCSTETLKCLKDKTGGKKFSKEFEEASSKLEEFVNGLDKQVKNGPSLTEALENAGIFYEAQYKEVKVVANAYKTFANRVNNLKKKLDQLKSTLPDPEESPVPSPSMDAPSPTGSESPFQGMGGEESQSPTMESEKSATPEPVTDNRDVEDMELSDVEDDGSKIIVEDRKEKPAEKSAVSTSVPTKPTENISKASSCTPVPVTMTATPPLPKPVNTSLSPSPALALPNLANVDLAKISSILSSLTSVMKNTGVSPASRPSPGTPTSPSNLTSGLKTPAPATTTSHNPLANILSKVEITPESILSALSKTQTQSAPALQGLSSLLQSVTGNPVPASEAASQSTSASPANTTVSTIKGRNLPSSAQPFIPKSFNYSPNSSTSEVSSTSASKASIGQSPGLPSTTFKLPSNSLGFTATHNTSPAAPPTEVTICQSSEVSKPKLESESTSPSLEMKIHNFLKGNPGFSGLNLNIPILSSLGSSAPSESHPSDFQRGPTSTSIDNIDGTPVRDERSGTPTQDEMMDKPTSSSVDTMSLLSKIISPGSSTPSSTRSPPPGRDESYPRELSNSVSTYRPFGLGSESPYKQPSDGMERPSSLMDSSQEKFYPDTSFQEDEDYRDFEYSGPPPSAMMNLEKKPAKSILKSSKLSDTTEYQPILSSYSHRAQEFGVKSAFPPSVRALLDSSENCDRLSSSPGLFGAFSVRGNEPGSDRSPSPSKNDSFFTPDSNHNSLSQSTTGHLSLPQKQYPDSPHPVPHRSLFSPQNTLAAPTGHPPTSGVEKVLASTISTTSTIEFKNMLKNASRKPSDDKHFGQAPSKGTPSDGVSLSNLTQPSLTATDQQQQEEHYRIETRVSSSCLDLPDSTEEKGAPIETLGYHSASNRRMSGEPIQTVESIRVPGKGNRGHGREASRVGWFDLSTSGSSFDNGPSSASELASLGGGGSGGLTGFKTAPYKERAPQFQESVGSFRSNSFNSTFEHHLPPSPLEHGTPFQREPVGPSSAPPVPPKDHGGIFSRDAPTHLPSVDLSNPFTKEAALAHAAPPPPPGEHSGIPFPTPPPPPPPGEHSSSGGSGVPFSTPPPPPPPVDHSGVVPFPAPPLAEHGVAGAVAVFPKDHSSLLQGTLAEHFGVLPGPRDHGGPTQRDLNGPGLSRVRESLTLPSHSLEHLGPPHGGGGGGGSNSSSGPPLGPSHRDTISRSGIILRSPRPDFRPREPFLSRDPFHSLKRPRPPFARGPPFFAPKRPFFPPRY

SEQ ID NO: 8724 - protein, 1000 aa, Homo sapiens
MAERKPNGGSGGASTSSSGTNLLFSSSATEFSFNVPFIPVTQASASPASLLLPGEDSTDVGEEDSFLGQTSIHTSAPQTFSYFSQVSSSSDPFGNIGQSPLTTAATSVGQSGFPKPLTALPFTTGSQDVSNAFSPSISKAQPGAPPSSLMGINSYLPSQPSSLPPSYFGNQPQGIPQPGYNPYRHTPGSSRANPYIAPPQLQQCQTPGPPAHPPPSGPPVQMYQMPPGSLPPVPSSVQSPAQQQVPARPGAPSVQVPSPFLLQNQYEPVQPHWFYCKEVEYKQLWMPFSVFDSLNLEEIYNSVQPDPESVVLGTDGGRYDVYLYDRIRKAAYWEEEPAEVRRCTWFYKGDTDSRFIPYTEEFSEKLEAEYKKAVTTNQWHRRLEFPSGETIVMHNPKVIVQFQPSSVPDEWGTTQDGQTRPRVVKRGIDDNLDEIPDGEMPQVDHLVFVVHGIGPVCDLRFRSIIECVDDFRVVSLKLLRTHFKKSLDDGKVSRVEFLPVHWHSSLGGDATGVDRNIKKITLPSIGRFRHFTNETLLDILFYNSPTYCQTIVEKVGMEINHLHALFMSRNPDFKGGVSVAGHSLGSLILFDILSNQKDLNLSKCPGPLAVANGVVKQLHFQEKQMPEEPKLTLDESYDLVVENKEVLTLQETLEALSLSEYFSTFEKEKIDMESLLMCTVDDLKEMGIPLGPRKKIANFVEHKAAKLKKAASEKKAVAATSTKGQEQSAQKTKDMASLPSESNEPKRKLPVGACVSSVCVNYESFEVGAGQVSVAYNSLDFEPEIFFALGSPIAMFLTIRGVDRIDENYSLPTCKGFFNIYHPLDPVAYRLEPMIVPDLDLKAVLIPHHKGRKRLHLELKESLSRMGSDLKQGFISSLKSAWQTLNEFARAHTSSTQLQEELEKVANQIKEEEEKQVVEAEKVVESPDFSKDEDYLGKVGMLNGGRRIDYVLQEKPIESFNEYLFALQSHLCYWESEDTALLLLKEIYRTMNISPEQPQH

SEQ ID NO: 8725 - protein, 575 aa, Homo sapiens
MSAATHSPMMQVASGNGDRDPLPPGWEIKIDPQTGWPFFVDHNSRTTTWNDPRVPSEGPKETPSSANGPSREGSRLPPAREGHPVYPQLRPGYIPIPVLHEGAENRQVHPFHVYPQPGMQRFRTEAAAAAPQRSQSPLRGMPETTQPDKQCGQVAAAAAAQPPASHGPERSQSPAASDCSSSSSSASLPSSGRSSLGSHQLPRGYISIPVIHEQNVTRPAAQPSFHQAQKTHYPAQQGEYQTHQPVYHKIQGDDWEPRPLRAASPFRSSVQGASSREGSPARSSTPLHSPSPIRVHTVVDRPQQPMTHRETAPVSQPENKPESKPGPVGPELPPGHIPIQVIRKEVDSKPVSQKPPPPSEKVEVKVPPAPVPCPPPSPGPSAVPSSPKSVATEERAAPSTAPAEATPPKPGEAEAPPKHPGVLKVEAILEKVQGLEQAVDNFEGKKTDKKYLMIEEYLTKELLALDSVDPEGRADVRQARRDGVRKVQTILEKLEQKAIDVPGQVQVYELQPSNLEADQPLQAIMEMGAVAADKGKKNAGNAEDPHTETQQPEATAAATSNPSSMTDTPGNPAAP

SEQ ID NO: 8726 - protein, 691 aa, Homo sapiens
MEKIYSRGELHHFIDGFNEEKSNWMRYVNPAHSPREQNLAACQNGMNIYFYTIKPIPANQELLVWYCRDFAERLHYPYPGELTMMNLTQTQSSLKQPSTEKNELCPKNVPKREYSVKEILKLDSNPSKGKDLYRSNISPLTSEKDLDDFRRRGSPEMPFYPRVVYPIRAPLPEDFLKASLAYGIERPTYITRSPIPSSTTPSPSARSSPDQSLKSSSPHSSPGNTVSPVGPGSQEHRDSYAYLNASYGTEGLGSYPGYAPLPHLPPAFIPSYNAHYPKFLLPPYGMNCNGLSAVSSMNGINNFGLFPRLCPVYSNLLGGGSLPHPMLNPTSLPSSLPSDGARRLLQPEHPREVLVPAPHSAFSFTGAAASMKDKACSPTSGSPTAGTAATAEHVVQPKATSAAMAAPSSDEAMNLIKNKRNMTGYKTLPYPLKKQNGKIKYECNVCAKTFGQLSNLKVHLRVHSGERPFKCQTCNKGFTQLAHLQKHYLVHTGEKPHECQVCHKRFSSTSNLKTHLRLHSGEKPYQCKVCPAKFTQFVHLKLHKRLHTRERPHKCSQCHKNYIHLCSLKVHLKGNCAAAPAPGLPLEDLTRINEEIEKFDISDNADRLEDVEDDISVISVVEKEILAVVRKEKEETGLKVSLQRNMGNGLLSSGCSLYESSDLPLMKLPPSNPLPLVPVKVKQETVEPMDP

SEQ ID NO: 8727 - protein, 789 aa, Homo sapiens
MKMDMEDADMTLWTEAEFEEKCTYIVNDHPWDSGADGGTSVQAEASLPRNLLFKYATNSEEVIGVMSKEYIPKGTRFGPLIGEIYTNDTVPKNANRKYFWRIYSRGELHHFIDGFNEEKSNWMRYVNPAHSPREQNLAACQNGMNIYFYTIKPIPANQELLVWYCRDFAERLHYPYPGELTMMNLTQTQSSLKQPSTEKNELCPKNVPKREYSVKEILKLDSNPSKGKDLYRSNISPLTSEKDLDDFRRRGSPEMPFYPRVVYPIRAPLPEDFLKASLAYGIERPTYITRSPIPSSTTPSPSARSSPDQSLKSSSPHSSPGNTVSPVGPGSQEHRDSYAYLNASYGTEGLGSYPGYAPLPHLPPAFIPSYNAHYPKFLLPPYGMNCNGLSAVSSMNGINNFGLFPRLCPVYSNLLGGGSLPHPMLNPTSLPSSLPSDGARRLLQPEHPREVLVPAPHSAFSFTGAAASMKDKACSPTSGSPTAGTAATAEHVVQPKATSAAMAAPSSDEAMNLIKNKRNMTGYKTLPYPLKKQNGKIKYECNVCAKTFGQLSNLKVHLRVHSGERPFKCQTCNKGFTQLAHLQKHYLVHTGEKPHECQVCHKRFSSTSNLKTHLRLHSGEKPYQCKVCPAKFTQFVHLKLHKRLHTRERPHKCSQCHKNYIHLCSLKVHLKGNCAAAPAPGLPLEDLTRINEEIEKFDISDNADRLEDVEDDISVISVVEKEILAVVRKEKEETGLKVSLQRNMGNGLLSSGCSLYESSDLPLMKLPPSNPLPLVPVKVKQETVEPMDP

SEQ ID NO: 8728 - protein, 392 aa, Homo sapiens
MMEDDGQPRTLYVGNLSRDVTEVLILQLFSQIGPCKSCKMITEQPDSRRVNSSVGFSVLQHTSNDPYCFVEFYEHRDAAAALAAMNGRKILGKEVKVNWATTPSSQKKDTSNHFHVFVGDLSPEITTEDIKSAFAPFGKISDARVVKDMATGKSKGYGFVSFYNKLDAENAIVHMGGQWLGGRQIRTNWATRKPPAPKSTQENNTKQLRFEDVVNQSSPKNCTVYCGGIASGLTDQLMRQTFSPFGQIMEIRVFPEKGYSFVRFSTHESAAHAIVSVNGTTIEGHVVKCYWGKESPDMTKNFQQVDYSQWGQWSQVYGNPQQYGQYMANGWQVPPYGVYGQPWNQQGFGVDQSPSAAWMGGFGAQPPQGQAPPPVIPPPNQAGYGMASYQTQ

SEQ ID NO: 8729 - protein, 825 aa, Homo sapiens
MLDICLEKRVGTTLAAPKCNSSTVRFQGLAEGTKGTMKMDMEDADMTLWTEAEFEEKCTYIVNDHPWDSGADGGTSVQAEASLPRNLLFKYATNSEEVIGVMSKEYIPKGTRFGPLIGEIYTNDTVPKNANRKYFWRIYSRGELHHFIDGFNEEKSNWMRYVNPAHSPREQNLAACQNGMNIYFYTIKPIPANQELLVWYCRDFAERLHYPYPGELTMMNLTQTQSSLKQPSTEKNELCPKNVPKREYSVKEILKLDSNPSKGKDLYRSNISPLTSEKDLDDFRRRGSPEMPFYPRVVYPIRAPLPEDFLKASLAYGIERPTYITRSPIPSSTTPSPSARSSPDQSLKSSSPHSSPGNTVSPVGPGSQEHRDSYAYLNASYGTEGLGSYPGYAPLPHLPPAFIPSYNAHYPKFLLPPYGMNCNGLSAVSSMNGINNFGLFPRLCPVYSNLLGGGSLPHPMLNPTSLPSSLPSDGARRLLQPEHPREVLVPAPHSAFSFTGAAASMKDKACSPTSGSPTAGTAATAEHVVQPKATSAAMAAPSSDEAMNLIKNKRNMTGYKTLPYPLKKQNGKIKYECNVCAKTFGQLSNLKVHLRVHSGERPFKCQTCNKGFTQLAHLQKHYLVHTGEKPHECQVCHKRFSSTSNLKTHLRLHSGEKPYQCKVCPAKFTQFVHLKLHKRLHTRERPHKCSQCHKNYIHLCSLKVHLKGNCAAAPAPGLPLEDLTRINEEIEKFDISDNADRLEDVEDDISVISVVEKEILAVVRKEKEETGLKVSLQRNMGNGLLSSGCSLYESSDLPLMKLPPSNPLPLVPVKVKQETVEPMDP

SEQ ID NO: 8730 - protein, 337 aa, Homo sapiens
MLFSALLLEVIWILAADGGQHWTYEGPHGQDHWPASYPECGNNAQSPIDIQTDSVTFDPDLPALQPHGYDQPGTEPLDLHNNGHTVQLSLPSTLYLGGLPRKYVAAQLHLHWGQKGSPGGSEHQINSEATFAELHIVHYDSDSYDSLSEAAERPQGLAVLGILIEVGETKNIAYEHILSHLHEVRHKDQKTSVPPFNLRELLPKQLGQYFRYNGSLTTPPCYQSVLWTVFYRRSQISMEQLEKLQGTLFSTEEEPSKLLVQNYRALQPLNQRMVFASFIQAGSSYTTGEMLSLGVGILVGCLCLLLAVYFIARKIRKKRLENRKSVVFTSAQATTEA

SEQ ID NO: 8731 - protein, 409 aa, Homo sapiens
MMKKNNSAKRGPQDGNQQPAPPEKVGWVRKFCGKGIFREIWKNRYVVLKGDQLYISEKEVKDEKNIQEVFDLSDYEKCEELRKSKSRSKKNHSKFTLAHSKQPGNTAPNLIFLAVSPEEKESWINALNSAITRAKNRILDEVTVEEDSYLAHPTRDRAKIQHSRRPPTRGHLMAVASTSTSDGMLTLDLIQEEDPSPEEPTSCAESFRVDLDKSVAQLAGSRRRADSDRIQPSADRASSLSRPWEKTDKGATYTPQAPKKLTPTEKGRCASLEEILSQRDAASARTLQLRAEEPPTPALPNPGQLSRIQDLVARKLEETQELLAEVQGLGDGKRKAKDPPRSPPDSESEQLLLETERLLGEASSNWSQAKRVLQEVRELRDLYRQMDLQTPDSHLRQTTPHSQYRKSLM

SEQ ID NO: 8732 - protein, 870 aa, Homo sapiens
GGIFEYVESGPMGAEELAFRFAVNTINRNRTLLPNTTLTYDTQKINLYDSFEASKKACDQLSLGVAAIFGPSHSSSANAVQSICNALGVPHIQTRWKHQVSDNKDSFYVSLYPDFSSLSRAILDLVQFFKWKTVTVVYDDSTGLIRLQELIKAPSRYNLRLKIRQLPADTKDAKPLLKEMKRGKEFHVIFDCSHEMAAGILKQALAMGMMTEYYHYIFTTLDLFALDVEPYRYSGVNMTGFRILNTENTQVSSIIEKWSMERLQAPPKPDSGLLDGFMTTDAALMYDAVHVVSVAVQQFPQMTVSSLQCNRHKPWRFGTRFMSLIKEAHWEGLTGRITFNKTNGLRTDFDLDVISLKEEGLEKIGTWDPASGLNMTESQKGKPANITDSLSNRSLIVTTILEEPYVLFKKSDKPLYGNDRFEGYCIDLLRELSTILGFTYEIRLVEDGKYGAQDDANGQWNGMVRELIDHKADLAVAPLAITYVREKVIDFSKPFMTLGISILYRKPNGTNPGVFSFLNPLSPDIWMYILLAYLGVSCVLFVIARFSPYEWYNPHPCNPDSDVVENNFTLLNSFWFGVGALMQQGSELMPKALSTRIVGGIWWFFTLIIISSYTANLAAFLTVERMESPIDSADDLAKQTKIEYGAVEDGATMTFFKKSKISTYDKMWAFMSSRRQSVLVKSNEEGIQRVLTSDYAFLMESTTIEFVTQRNCNLTQIGGLIDSKGYGVGTPMGSPYRDKITIAILQLQEEGKLHMMKEKWWRGNGCPEEESKEASALGVQNIGGIFIVLAAGLVLSVFVAVGEFLYKSKKNAQLEKRSFCSAMVEELRMSLKCQRRLKHKPQAPVIVKTEEVINMHTFNDRRLPGKETMA

SEQ ID NO: 8733 - protein, 831 aa, Homo sapiens
GGIFEYVESGPMGAEELAFRFAVNTINRNRTLLPNTTLTYDTQKINLYDSFEASKKACDQLSLGVAAIFGPSHSSSANAVQSICNALGVPHIQTRWKHQVSDNKDSFYVSLYPDFSSLSRAILDLVQFFKWKTVTVVYDDSTGLIRLQELIKAPSRYNLRLKIRQLPADTKDAKPLLKEMKRGKEFHVIFDCSHEMAAGILKQALAMGMMTEYYHYIFTTLDLFALDVEPYRYSGVNMTGFRILNTENTQVSSIIEKWSMERLQAPPKPDSGLLDGFMTTDAALMYDAVHVVSVAVQQFPQMTVSSLQCNRHKPWRFGTRFMSLIKEAHWEGLTGRITFNKTNGLRTDFDLDVISLKEEGLEKIGTWDPASGLNMTESQKGKPANITDSLSNRSLIVTTILEEPYVLFKKSDKPLYGNDRFEGYCIDLLRELSTILGFTYEIRLVEDGKYGAQDDANGQWNGMVRELIDHKADLAVAPLAITYVREKVIDFSKPFMTLGISILYRKPNGTNPGVFSFLNPLSPDIWMYILLAYLGVSCVLFVIARFSPYEWYNPHPCNPDSDVVENNFTLLNSFWFGVGALMQQGSELMPKALSTRIVGGIWWFFTLIIISSYTANLAAFLTVERMESPIDSADDLAKQTKIEYGAVEDGATMTFFKKSKISTYDKMWAFMSSRRQSVLVKSNEEGIQRVLTSDYAFLMESTTIEFVTQRNCNLTQIGGLIDSKGYGVGTPMGSPYRDKITIAILQLQEEGKLHMMKEKWWRGNGCPEEESKEASALGVQNIGGIFIVLAAGLVLSVFVAVGEFLYKSKKNAQLEKESSIWLVPPYHPDTV

SEQ ID NO: 8734 - protein, 892 aa, Homo sapiens
MKIIFPILSNPVFRRTVKLLLCLLWIGYSQGTTHVLRFGGIFEYVESGPMGAEELAFRFAVNTINRNRTLLPNTTLTYDTQKINLYDSFEASKKACDQLSLGVAAIFGPSHSSSANAVQSICNALGVPHIQTRWKHQVSDNKDSFYVSLYPDFSSLSRAILDLVQFFKWKTVTVVYDDSTGLIRLQELIKAPSRYNLRLKIRQLPADTKDAKPLLKEMKRGKEFHVIFDCSHEMAAGILKQALAMGMMTEYYHYIFTTLDLFALDVEPYRYSGVNMTGFRILNTENTQVSSIIEKWSMERLQAPPKPDSGLLDGFMTTDAALMYDAVHVVSVAVQQFPQMTVSSLQCNRHKPWRFGTRFMSLIKEAHWEGLTGRITFNKTNGLRTDFDLDVISLKEEGLEKIGTWDPASGLNMTESQKGKPANITDSLSNRSLIVTTILEEPYVLFKKSDKPLYGNDRFEGYCIDLLRELSTILGFTYEIRLVEDGKYGAQDDANGQWNGMVRELIDHKADLAVAPLAITYVREKVIDFSKPFMTLGISILYRKPNGTNPGVFSFLNPLSPDIWMYILLAYLGVSCVLFVIARFSPYEWYNPHPCNPDSDVVENNFTLLNSFWFGVGALMQQGSELMPKALSTRIVGGIWWFFTLIIISSYTANLAAFLTVERMESPIDSADDLAKQTKIEYGAVEDGATMTFFKKSKISTYDKMWAFMSSRRQSVLVKSNEEGIQRVLTSDYAFLMESTTIEFVTQRNCNLTQIGGLIDSKGYGVGTPMGSPYRDKITIAILQLQEEGKLHMMKEKWWRGNGCPEEESKEASALGVQNIGGIFIVLAAGLVLSVFVAVGEFLYKSKKNAQLEKRAKTKLPQDYVFLPILESVSISTVLSSSPSSSSLSSCS

SEQ ID NO: 8735 - protein, 640 aa, Homo sapiens
MPPRVTFQPCGWQWNQDTPLNSEYDFALVNIGRLEAVSGLSRVQLLRPGSLHKFIPEEILIHGRDFRLLRVGFEAGGLEPQAFQVTMAIVQARAQSNQAQQYSGITLSKAGQGSGSRKPPIPLMETAEDWETERKKQAARGWRVSTVNERFDVATSLPRYFWVPNRILDSEVRRAFGHFHQGRGPRLSWHHPGGSDLLRCGGFYTASDPNKEDIRAVELMLQAGHSDVVLVDTMDELPSLADVQLAHLRLRALCLPDSSVAEDKWLSALEGTRWLDYVRACLRKASDISVLVTSRVRSVILQERGDRDLNGLLSSLVQLLSAPEARTLFGFQSLVQREWVAAGHPFLTRLGGTGASEEAPVFLLFLDCVWQLLQQFPADFEFSEFFLLALHDSVRVPDTLTFLRNTPWERGKQSGQLNSYTQVYTPGYSQPPAGNSFNLQLSVWDWDLRYSNAQILQFQNPGYDPEHCPDSWLPRPQPSFMVPGPPSSVWLFSRGALTPLNQLCPWRDSPSLLAVSSRWLPRPAISSESLADQEWGLPSHWGACPLPPGLLLPGYLGPQIRLWRRCYLRGRPEVQMGLSAPTISGLQDELSHLQELLRKWTPRISPEDHSKKRDPHTILNPTEIAGILKGQSHPFWITRC

SEQ ID NO: 8736 - protein, 1382 aa, Homo sapiens
MPAYFQRPENALKRANEFLEVGKKQPALDVLYDVMKSKKHRTWQKIHEPIMLKYLELCVDLRKSHLAKEGLYQYKNICQQVNIKSLEDVVRAYLKMAEEKTEAAKEESQQMVLDIEDLDNIQTPESVLLSAVSGEDTQDRTDRLLLTPWVKFLWESYRQCLDLLRNNSRVERLYHDIAQQAFKFCLQYTRKAEFRKLCDNLRMHLSQIQRHHNQSTAINLNNPESQSMHLETRLVQLDSAISMELWQEAFKAVEDIHGLFSLSKKPPKPQLMANYYNKVSTVFWKSGNALFHASTLHRLYHLSREMRKNLTQDEMQRMSTRVLLATLSIPITPERTDIARLLDMDGIIVEKQRRLATLLGLQAPPTRIGLINDMVRFNVLQYVVPEVKDLYNWLEVEFNPLKLCERVTKVLNWVREQPEKEPELQQYVPQLQNNTILRLLQQVSQIYQSIEFSRLTSLVPFVDAFQLERAIVDAARHCDLQVRIDHTSRTLSFGSDLNYATREDAPIGPHLQSMPSEQIRNQLTAMSSVLAKALEVIKPAHILQEKEEQHQLAVTAYLKNSRKEHQRILARRQTIEERKERLESLNIQREKEELEQREAELQKVRKAEEERLRQEAKEREKERILQEHEQIKKKTVRERLEQIKKTELGAKAFKDIDIEDLEELDPDFIMAKQVEQLEKEKKELQERLKNQEKKIDYFERAKRLEEIPLIKSAYEEQRIKDMDLWEQQEEERITTMQLEREKALEHKNRMSRMLEDRDLFVMRLKAARQSVYEEKLKQFEERLAEERHNRLEERKRQRKEERRITYYREKEEEEQRRAEEQMLKEREERERAERAKREEELREYQERVKKLEEVERKKRQRELEIEERERRREEERRLGDSSLSRKDSRWGDRDSEGTWRKGPEADSEWRRGPPEKEWRRGEGRDEDRSHRRDEERPRRLGDDEDREPSLRPDDDRVPRRGMDDDRGPRRGPEEDRFSRRGADDDRPSWRNTDDDRPPRRIADEDRGNWRHADDDRPPRRGLDEDRGSWRTADEDRGPRRGMDDDRGPRRGGADDERSSWRNADDDRGPRRGLDDDRGPRRGMDDDRGPRRGMDDDRGPRRGMDDDRGPRRGLDDDRGPWRNADDDRIPRRGAEDDRGPWRNMDDDRLSRRADDDRFPRRGDDSRPGPWRPLVKPGGWREKEKAREESWGPPRESRPSEEREWDREKERDRDNQDREENDKDPERERDRERDVDREDRFRRPRDEGGWRRGPAEESSSWRDSSRRDDRDRDDRRRERDDRRDLRERRDLRDDRDRRGPPLRSEREEVSSWRRADDRKDDRVEERDPPRRVPPPALSRDRERDRDREREGEKEKASWRAEKDRESLRRTKNETDEDGWTTVRR

SEQ ID NO: 8737 - protein, 682 aa, Homo sapiens
MEEGFRDRAAFIRGAKDIAKEVKKHAAKKVVKGLDRVQDEYSRRSYSRFEEEDDDDDFPAPSDGYYRGEGTQDEEEGGASSDATEGHDEDDEIYEGEYQGIPRAESGGKGERMADGAPLAGVRGGLSDGEGPPGGRGEAQRRKEREELAQQYEAILRECGHGRFQWTLYFVLGLALMADGVEVFVVGFVLPSAEKDMCLSDSNKGMLGLIVYLGMMVGAFLWGGLADRLGRRQCLLISLSVNSVFAFFSSFVQGYGTFLFCRLLSGVGIGGSIPIVFSYFSEFLAQEKRGEHLSWLCMFWMIGGVYAAAMAWAIIPHYGWSFQMGSAYQFHSWRVFVLVCAFPSVFAIGALTTQPESPRFFLENGKHDEAWMVLKQVHDTNMRAKGHPERVFSVTHIKTIHQEDELIEIQSDTGTWYQRWGVRALSLGGQVWGNFLSCFGPEYRRITLMMMGVWFTMSFSYYGLTVWFPDMIRHLQAVDYASRTKVFPGERVEHVTFNFTLENQIHRGGQYFNDKFIGLRLKSVSFEDSLFEECYFEDVTSSNTFFRNCTFINTVFYNTDLFEYKFVNSRLINSTFLHNKEGCPLDVTGTGEGAYMVYFVSFLGTLAVLPGNIVSALLMDKIGRLRMLAGSSVMSCVSCFFLSFGNSESAMIALLCLFGGVSIASWNALDVLTVELYPSDKR

SEQ ID NO: 8738 - protein, 742 aa, Homo sapiens
MEEGFRDRAAFIRGAKDIAKEVKKHAAKKVVKGLDRVQDEYSRRSYSRFEEEDDDDDFPAPSDGYYRGEGTQDEEEGGASSDATEGHDEDDEIYEGEYQGIPRAESGGKGERMADGAPLAGVRGGLSDGEGPPGGRGEAQRRKEREELAQQYEAILRECGHGRFQWTLYFVLGLALMADGVEVFVVGFVLPSAEKDMCLSDSNKGMLGLIVYLGMMVGAFLWGGLADRLGRRQCLLISLSVNSVFAFFSSFVQGYGTFLFCRLLSGVGIGGSIPIVFSYFSEFLAQEKRGEHLSWLCMFWMIGGVYAAAMAWAIIPHYGWSFQMGSAYQFHSWRVFVLVCAFPSVFAIGALTTQPESPRFFLENGKHDEAWMVLKQVHDTNMRAKGHPERVFSVTHIKTIHQEDELIEIQSDTGTWYQRWGVRALSLGGQVWGNFLSCFGPEYRRITLMMMGVWFTMSFSYYGLTVWFPDMIRHLQAVDYASRTKVFPGERVEHVTFNFTLENQIHRGGQYFNDKFIGLRLKSVSFEDSLFEECYFEDVTSSNTFFRNCTFINTVFYNTDLFEYKFVNSRLINSTFLHNKEGCPLDVTGTGEGAYMVYFVSFLGTLAVLPGNIVSALLMDKIGRLRMLAGSSVMSCVSCFFLSFGNSESAMIALLCLFGGVSIASWNALDVLTVELYPSDKRTTAFGFLNALCKLAAVLGISIFTSFVGITKAAPILFASAALALGSSLALKLPETRGQVLQ

SEQ ID NO: 8739 - protein, 126 aa, Homo sapiens
MPEPAKSAPAPKKGSKKAVTKAQKKDGKKRKRSRKESYSIYVYKVLKQVHPDTGISSKAMGIMNSFVNDIFERIAGEASRLAHYNKRSTITSREIQTAVRLLLPGELAKHAVSEGTKAVTKYTSSK

SEQ ID NO: 8740 - protein, 2202 aa, Homo sapiens
MALPRLTGALRSFSNVTKQDNYNEEVADLKIKRSKLHEQVLDLGLTWKKIIKFLNEKLEKSKMQSINEDLKDILHAAKQIVGTDNGREAIESGAAFLFMTFHLKDSVGHKETKAIKQMFGPFPSSSATAACNATNRIISHFSQDDLTALVQMTEKEHGDRVFFGKNLAFSFDMHDLDHFDELPINGETQKTISLDYKKFLNEHLQEACTPELKPVEKTNGSFLWCEVEKYLNSTLKEMTEVPRVEDLCCTLYDMLASIKSGDELQDELFELLGPEGLELIEKLLQNRITIVDRFLNSSNDHRFQALQDNCKKILGENAKPNYGCQVTIQSEQEKQLMKQYRREEKRIARREKKAGEDLEVSEGLMCFDPKELRIQREQALLNARSVPILSRQRDADVEKIHYPHVYDSQAEAMKTSAFIAGAKMILPEGIQRENNKLYEEVRIPYSEPMPLSFEEKPVYIQDLDEIGQLAFKGMKRLNRIQSIVFETAYNTNENMLICAPTGAGKTNIAMLTVLHEIRQHFQQGVIKKNEFKIVYVAPMKALAAEMTDYFSRRLEPLGIIVKELTGDMQLSKSEILRTQMLVTTPEKWDVVTRKSVGDVALSQIVRLLILDEVHLLHEDRGPVLESIVARTLRQVESTQSMIRILGLSATLPNYLDVATFLHVNPYIGLFFFDGRFRPVPLGQTFLGIKCANKMQQLNNMDEVCYENVLKQVKAGHQVMVFVHARNATVRTAMSLIERAKNCGHIPFFFPTQGHDYVLAEKQVQRSRNKQVRELFPDGFSIHHAGMLRQDRNLVENLFSNGHIKVLVCTATLAWGVNLPAHAVIIKGTQIYAAKRGSFVDLGILDVMQIFGRAGRPQFDKFGEGIIITTHDKLSHYLTLLTQRNPIESQFLESLADNLNAEIALGTVTNVEEAVKWISYTYLYVRMRANPLAYGISHKAYQIDPTLRKHREQLVIEVGRKLDKAQMIRFEERTGYFSSTDLGRTASHYYIKYNTIETFNELFDAHKTEGDIFAIVSKAEEFDQIKVREEEIEELDTLLSNFCELSTPGGVENSYGKINILLQTYISRGEMDSFSLISDSAYVAQNAARIVRALFEIALRKRWPTMTYRLLNLSKVIDKRLWGWASPLRQFSILPPHILTRLEEKKLTVDKLKDMRKDEIGHILHHVNIGLKVKQCVHQIPSVMMEASIQPITRTVLRVTLSIYADFTWNDQVHGTVGEPWWIWVEDPTNDHIYHSEYFLALKKQVISKEAQLLVFTIPIFEPLPSQYYIRAVSDRWLGAEAVCIINFQHLILPERHPPHTELLDLQPLPITALGCKAYEALYNFSHFNPVQTQIFHTLYHTDCNVLLGAPTGSGKTVAAELAIFRVFNKYPTSKAVYIAPLKALVRERMDDWKVRIEEKLGKKVIELTGDVTPDMKSIAKADLIVTTPEKWDGVSRSWQNRNYVQQVTILIIDEIHLLGEERGPVLEVIVSRTNFISSHTEKPVRIVGLSTALANARDLADWLNIKQMGLFNFRPSVRPVPLEVHIQGFPGQHYCPRMASMNKPAFQAIRSHSPAKPVLIFVSSRRQTRLTALELIAFLATEEDPKQWLNMDEREMENIIATVRDSNLKLTLAFGIGMHHAGLHERDRKTVEELFVNCKVQVLIATSTLAWGVNFPAHLVIIKGTEYYDGKTRRYVDFPITDVLQMMGRAGRPQFDDQGKAVILVHDIKKDFYKKFLYEPFPVESSLLGVLSDHLNAEIAGGTITSKQDALDYITWTYFFRRLIMNPSYYNLGDVSHDSVNKFLSHLIEKSLIELELSYCIEIGEDNRSIEPLTYGRIASYYYLKHQTVKMFKDRLKPECSTEELLSILSDAEEYTDLPVRHNEDHMNSELAKCLPIESNPHSFDSPHTKAHLLLQAHLSRAMLPCPDYDTDTKTVLDQALRVCQAMLDVAANQGWLVTVLNITNLIQMVIQGRWLKDSSLLTLPNIENHHLHLFKKWKPIMKGPHARGRTSIESLPELIHACGGKDHVFSSMVESELHAAKTKQAWNFLSHLPVINVGISVKGSWDDLVEGHNELSVSTLTADKRDDNKWIKLHADQEYVLQVSLQRVHFGFHKGKPESCAVTPRFPKSKDEGWFLILGEVDKRELIALKRVGYIRNHHVASLSFYTPEIPGRYIYTLYFMSDCYLGLDQQYDIYLNVTQASLSAQVNTKVSDSLTDLALK

SEQ ID NO: 8741 - protein, 532 aa, Homo sapiens
MMLSEQAQKWFPTHVQVTVLQAKDLKPKGKSGTNDTYTIIQLGKEKYSTSVAEKTLEPVWKEEASFELPGLLIQGSPEKYILFLIVMHRSLVGLDKFLGQVAINLNDIFEDKQRRKTEWFRLESKQGKRIKNRGEIKVNIQFMRNNMTASMFDLSMKDKTRSPFAKLKDKMKGRKNDGTFSDTSSAIIPSTHMPDANSEFSSGEIQMKSKPKKPFLLGPQRLSSAHSMSDLSGSHMSSEKLKAGTIGQTHLLGHQLDSFGTVPESGSLKSPHRRTLSFDTSKMNQPDSIVDEGELCFGRQNDPFTNVTASLPQKFATLPRKKNPFEESSETWDSSMNLFSKPIEIRKENKREKREKVSLFERVTGKKDSRRSDKLNNGGSDSPCDLKSPNAFSENRQDYFDYESTNPFTAKFRASNIMPSSRNTLLTPAVAEWRGSLRWAELFHMSPTSNEDLRKIPDSNPFDATAGYRSLTYEEVLQELVKHKELLRRKDTHIRELEDYIDNLLVRVMEETPSILRVPYEPSRKAGKFSNS

SEQ ID NO: 8742 - protein, 421 aa, Homo sapiens
LEKSLEYSTVPTPLPPVPPPPPPPPPTKKKGQKPGRKDTITEKPIAPAEPVEPVLSGSMAIGAVSLAVAKACAMLLNKPLYLNIALLKHNQEQPTTLSMPLLMVSLVSCGKSSSGKLNLMKEVICIPHPELTTKQGVEMLMEMQKHINKIIEMPSPPKAETKKGHDGSKRGQQQITGKMSHLGCLTINCDSIEQPLLLIQEICANLGLELGTNLHLAINCAGHELMDYNKGKYEVIMGTYKNAAEMVDLYVDLINKYPSIIALIDPFRKEDSEQWDSIYHALGSRCYIIAGTASKSISKLLEQGNISIPKSNGLIIKHTNQTTMSDLVEITNLIDSKKHITVFGSTEGESSDDSLVDLAVGLGVRFIKLGGLSRGERVTKYNRLLTIEEELVQNGTLATSSSSCDARIGGQEQETMTLVKV

SEQ ID NO: 8743 - protein, 675 aa, Homo sapiens
MADKEAGGSDGPRETAPTSAYSSPARSLGDTGITPLSPSHIVNDTDSNVSEQQSFLVVVAVDFGTTSSGYAYSFTKEPECIHVMRRWEGGDPGVSNQKTPTTILLTPERKFHSFGYAARDFYHDLDPNEAKQWLYLEKFKMKLHTTGDLTMDTDLTAANGKKVKALEIFAYALQYFKEQALKELSDQAGSEFENSDVRWVITVPAIWKQPAKQFMRQAAYQAGLASPENSEQLIIALEPEAASIYCRKLRLHQMIELSSKAAVNGYSGSDTVGAGFTQAKEHIRRNRQSRTFLVENVIGEIWSELEEGDKYVVVDSGGGTVDLTVHQIRLPEGHLKELYKATGGPYGSLGVDYEFEKLLYKIFGEDFIEQFKIKRPAAWVDLMIAFESRKRAAAPDRTNPLNITLPFSFIDYYKKFRGHSVEHALRKSNVDFVKWSSQGMLRMSPDAMNALFKPTIDSIIEHLRDLFQKPEVSTVKFLFLVGGFAEAPLLQQAVQAAFGDQCRIIIPQDVGLTILKGAVLFGLDPAVIKVRRSPLTYGVGVLNRYVEGKHPPEKLLVKDGTRWCTDVFDKFISADQSVALGELVKRSYTPAKPSQLVIVINIYSSEHDNVSFITDPGVKKCGTLRLDLTGTSGTAVPARREIQTLMQFGDTEIKATAIDIATSKSVKVGIDFLNY

SEQ ID NO: 8744 - protein, 707 aa, Homo sapiens
MHGAARAPATSVSADCCIPAGLRLGPVPGTFKLGKYLSDRREPGPKKKVRMVRGELVDESGGSPLEWIGLIRAARNSQEQTLEAIADLPGGQIFYRALRDVQPGEELTVWYSNSLAQWFDIPTTATPTHDEKGEERYICWYCWRTFRYPNSLKAHLRFHCVFSGGGGGAFLHHEHAARQGAVPAADGLGLSPKPPAPDFAAPSQAGTLRPHPLGPPPVQACGAREGIKREASSAPSATSPTPGKWGQPKKGKEQLDRALDMSGAARGQGHFLGIVGGSSAGVGSLAFYPGVRSAFKPAGLARAAAAAHGDPYREESSSKQGAGLALGRLLGGGRACGRPGSGENSAAGGAGHHHHHHAHHHHHPKCLLAGDPPPPPPPGLPCSGALRGFPLLSVPPEEASAFKHVERAPPAAAALPGARYAQLPPAPGLPLERCALPPLDPGGLKAYPGGECSHLPAVMPAFTVYNGELLYGSPATTAYYPLKLHFGGLLKYPESISYFSGPAAAALSPAELGSLASIDREIAMHNQQLSEMAAGKGRGRLDSGTLPPAVAAAGGTGGGGSGGSGAGKPKTGHLCLYCGKLYSRKYGLKIHMRTHTGYKPLKCKVCLRPFGDPSNLNKHIRLHAEGNTPYRCEFCGKVLVRRRDLERHVKSRHPGQSLLAKAGDGPGAEPGYPPEPGDPKSDDSDVDVCFTDDQSDPEVGGGGERDL

SEQ ID NO: 8745 - protein, 465 aa, Homo sapiens
MLPLWTLSLLLGAVAGKEVCYERLGCFSDDSPWSGITERPLHILPWSPKDVNTRFLLYTNENPNNFQEVAADSSSISGSNFKTNRKTRFIIHGFIDKGEENWLANVCKNLFKVESVNCICVDWKGGSRTGYTQASQNIRIVGAEVAYFVEFLQSAFGYSPSNVHVIGHSLGAHAAGEAGRRTNGTIGRITGLDPAEPCFQGTPELVRLDPSDAKFVDVIHTDGAPIVPNLGFGMSQVVGHLDFFPNGGVEMPGCKKNILSQIVDIDGIWEGTRDFAACNHLRSYKYYTDSIVNPDGFAGFPCASYNVFTANKCFPCPSGGCPQMGHYADRYPGKTNDVGQKFYLDTGDASNFARWRYKVSVTLSGKKVTGHILVSLFGNKGNSKQYEIFKGTLKPDSTHSNEFDSDVDVGDLQMVKFIWYNNVINPTLPRVGASKIIVETNVGKQFNFCSPETVREEVLLTLTPC

SEQ ID NO: 8746 - protein, 467 aa, Homo sapiens
MLGIWIVAFLFFGTSRGKEVCYERLGCFKDGLPWTRTFSTELVGLPWSPEKINTRFLLYTIHNPNAYQEISAVNSSTIQASYFGTDKITRINIAGWKTDGKWQRDMCNVLLQLEDINCINLDWINGSREYIHAVNNLRVVGAEVAYFIDVLMKKFEYSPSKVHLIGHSLGAHLAGEAGSRIPGLGRITGLDPAGPFFHNTPKEVRLDPSDANFVDVIHTNAARILFELGVGTIDACGHLDFYPNGGKHMPGCEDLITPLLKFNFNAYKKEMASFFDCNHARSYQFYAESILNPDAFIAYPCRSYTSFKAGNCFFCSKEGCPTMGHFADRFHFKNMKTNGSHYFLNTGSLSPFARWRHKLSVKLSGSEVTQGTVFLRVGGAVRKTGEFAIVSGKLEPGMTYTKLIDADVNVGNITSVQFIWKKHLFEDSQNKLGAEMVINTSGKYGYKSTFCSQDIMGPNILQNLKPC

SEQ ID NO: 8747 - protein, 766 aa, Homo sapiens
MRVKDPTKALPEKAKRSKRPTVPHDEDSSDDIAVGLTCQHVSHAISVNHVKRAIAENLWSVCSECLKERRFYDGQLVLTSDIWLCLKCGFQGCGKNSESQHSLKHFKSSRTEPHCIIINLSTWIIWCYECDEKLSTHCNKKVLAQIVDFLQKHASKTQTSAFSRIMKLCEEKCETDEIQKGGKCRNLSVRGITNLGNTCFFNAVMQNLAQTYTLTDLMNEIKESSTKLKIFPSSDSQLDPLVVELSRPGPLTSALFLFLHSMKETEKGPLSPKVLFNQLCQKAPRFKDFQQQDSQELLHYLLDAVRTEETKRIQASILKAFNNPTTKTADDETRKKVKAYGKEGVKMNFIDRIFIGELTSTVMCEECANISTVKDPFIDISLPIIEERSQLIHDRKCIRKLSSGETVTYQKNENLEMNGDSLMFASLMNSESRLNESPTDDSEKEASHSESNVDADSEPSESESASKQTGLFRSSSGSGVQPDGPLYPLSAGKLLYTKETDSGDKEMAEAISELRLSSTVTGDQDFDRENQPLNISNNLCFLEGKHLRSYSPQNAFQTLSQSYITTSKECSIQSCLYQFTSMELLMGNNKLLCENCTKNKQKYQEETSFAEKKVEGVYTNARKQLLISAVPAVLILHLKRFHQAGLSLRKVNRHVDFPLMLDLAPFCSATCKNASVGDKVLYGLYGIVEHSGSMREGHYTAYVKVRTPSRKLSEHNTKKKNVPGLKAADNESAGQWVHVSDTYLQVVPESRALSAQAYLLFYERVL

SEQ ID NO: 8748 - protein, 460 aa, Homo sapiens
MFLATLYFALPLLDLLLSAEVSGGDRLDCVKASDQCLKEQSCSTKYRTLRQCVAGKETNFSLASGLEAKDECRSAMEALKQKSLYNCRCKRGMKKEKNCLRIYWSMYQSLQGNDLLEDSPYEPVNSRLSDIFRVVPFISVEHIPKGNNCLDAAKACNLDDICKKYRSAYITPCTTSVSNDVCNRRKCHKALRQFFDKVPAKHSYGMLFCSCRDIACTERRRQTIVPVCSYEEREKPNCLNLQDSCKTNYICRSRLADFFTNCQPESRSVSSCLKENYADCLLAYSGLIGTVMTPNYIDSSSLSVAPWCDCSNSGNDLEECLKFLNFFKDNTCLKNAIQAFGNGSDVTVWQPAFPVQTTTATTTTALRVKNKPLGPAGSENEIPTHVLPPCANLQAQKLKSNVSGNTHLCISNGNYEKEGLGASSHITTKSMAAPPSCGLSPLLVLVVTALSTLLSLTETS

SEQ ID NO: 8749 - protein, 805 aa, Homo sapiens
MWDQGGQPWQQWPLNQQQWMQSFQHQQDPSQIDWAALAQAWIAQREASGQQSMVEQPPGMMPNGQDMSTMESGPNNHGNFQGDSNFNRMWQPEWGMHQQPPHPPPDQPWMPPTPGPMDIVPPSEDSNSQDSGEFAPDNRHIFNQNNHNFGGPPDNFAVGPVNQFDYQHGAAFGPPQGGFHPPYWQPGPPGPPAPPQNRRERPSSFRDRQRSPIALPVKQEPPQIDAVKRRTLPAWIREGLEKMEREKQKKLEKERMEQQRSQLSKKEKKATEDAEGGDGPRLPQRSKFDSDEEEEDTENVEAASSGKVTRSPSPVPQEEHSDPEMTEEEKEYQMMLLTKMLLTEILLDVTDEEIYYVAKDAHRKATKAPAKQLAQSSALASLTGLGGLGGYGSGDSEDERSDRGSESSDTDDEELRHRIRQKQEAFWRKEKEQQLLHDKQMEEEKQQTERVTKEMNEFIHKEQNSLSLLEAREADGDVVNEKKRTPNETTSVLEPKKEHKEKEKQGRSRSGSSSSGSSSSNSRTSSTSSTVSSSSYSSSSGSSRTSSRSSSPKRKKRHSRSRSPTIKARRSRSRSYSRRIKIESNRARVKIRDRRRSNRNSIERERRRNRSPSRERRRSRSRSRDRRTNRASRSRSRDRRKIDDQRGNLSGNSHKHKGEAKEQERKKERSRSIDKDRKKKDKEREREQDKRKEKQKREEKDFKFSSQDDRLKRKRESERTFSRSGSISVKIIRHDSRQDSKKSTTKDSKKHSGSDSSGRSSSESPGSSKEKKAKKPKHSRSRSVEKSQRSGKKASRKHKSKSRSR

SEQ ID NO: 8750 - protein, 765 aa, Homo sapiens
MFSKFTSILQHAVEALAPSLPLQEDFVYHWKAITHYYIETSDDKAPVTDTNIPSHLEQMLDILVQEENERESGETGPCMEYLLHHKILETLYTLGKADCPPGMKQQVLVFYTKLLGRIRQPLLPHINVHRPVQKLIRLCGEVLATPTENEEIQFLCIVCAKLKQDPYLVNFFLENKMKSLASKGVPNVISEDTLKGQDSLSTDTGQSRQPEELSGATGMEQTELEDEPPHQMDHLSTSLDNLSVTSLPEASVVCPNQDYNLVNSLLNLTRSPDGRIAVKACEGLMLLVSLPEPAAAKCLTQSTCLCELLTDRLASLYKALPQSVDPLDIETVEAINWGLDSYSHKEDASAFPGKRALISFLSWFDYCDQLIKEAQKTAAVALAKAVHERFFIGVMEPQLMQTSEMGILTSTALLHRIVRQVTSDVLLQEMVFFILGEQREPETLAEISRHPLRHRLIEHCDHISDEISIMTLRMFEHLLQKPNEHILYNLVLRNLEERNYTEYKPLCPEDKDVVENGLIAGAVDLEEDPLFTDISPENTLPNQEWLSSSPPATPDHPKNDGKTEVHKIVNSFLCLVPDDAKSSYHVEGTGYDTYLRDAHRQFRDYCAICLRWEWPGSPKALEKCNLEAAFFEGHFLKVLFDRMGRILDQPYDVNLQVTSVLSRLSLFPHPHIHEYLLDPYVNLAPGCRSLFSVIVRVVGDLMLRIQRIQDFTPKLLLVRKRLLGLEPEGPIIDHITLLEGVIVLEEFCKELAAIAFVKYHASSTP

SEQ ID NO: 8751 - protein, 738 aa, Homo sapiens
MFSKFTSILQHAVEALAPSLPLQEDFVYHWKAITHYYIETSDDKAPVTDTNIPSHLEQMLDILVQEENERESGETGPCMEYLLHHKILETLYTLGKADCPPGMKQQVLVFYTKLLGRIRQPLLPHINVHRPVQKLIRLCGEVLATPTENEEIQFLCIVCAKLKQDPYLVNFFLENKMKSLASKGVPNVISEDTLKGQDSLSTDTGQSRQPEELSGATGMEQTELEDEPPHQMDHLSTSLDNLSVTSLPEASVVCPNQDYNLVNSLLNLTRSPDGRIAVKACEGLMLLVSLPEPAAAKCLTQSTCLCELLTDRLASLYKALPQSVDPLDIETVEAINWGLDSYSHKEDASAFPGKRALISFLSWFDYCDQLIKEAQKTAAVALAKAVHERFFIGVMEPQLMQTSEMGILTSTALLHRIVRQVTSDVLLQEMVFFILGEQREPETLAEISRHPLRHRLIEHCDHISDEISIMTLRMFEHLLQKPNEHILYNLVLRNLEERNYTEYKPLCPEDKDVVENGLIAGAVDLEEDPLFTDISPENTLPNQEWLSSSPPATPDHPKNDGKTEVHKIVNSFLCLVPDDAKSSYHVEGTGYDTYLRDAHRQFRDYCAICLRWEWPGSPKALEKCNLEAAFFEGHFLKVLFDRMGRILDQPYDVNLQVTSVLSRLSLFPHPHIHEYLLDPYVNLAPGCRSLFSVIVRVVGDLMLRIQRIQDFTPKLLLVRKRLLGLEPEGPMQTLPSWW

SEQ ID NO: 8752 - protein, 1203 aa, Homo sapiens
MENCSAASTFLTDSLELELGTEWCKPPYFSCAVDNRGGGKHFSGESYLCSGALKRLILNLDPLPTNFEEDTLEIFGIQWVTETALVNSSRELFHLFRQQLYNLETLLQSSCDFGKVSTLHCKADNIRQQCVLFLHYVKVFIFRYLKVQNAESHVPVHPYEALEAQLPSVLIDELHGLLLYIGHLSELPSVNIGAFVNQNQIKLFPPSWHLLHLHLDIHWLVLEILYMLGEKLKQVVYGHQFMNLASDNLTNISLFEEHCETLLCDLISLSLNRYDKVRSSESLMSDQCPCLCIKELWVLLIHLLDHRSKWFVSESFWNWLNKLLKTLLEKSSDRRRSSMPVIQSRDPLGFSWWIITHVASFYKFDRHGVPDEMRKVESNWNFVEELLKKSISVQNSSFSISWLPFKGLANTMKSPLSMLEMVKTCCCDKQDQELYKSSSSYTIFLCILAKVVKKAMKSNGPHPWKQVKGRIYSKFHQKRMEELTEVGLQNFFSLFLLLAAVAEVEDVASHVLDLLNFLKPAFVTSQRALIWKGHMAFLLMYAQKNLDIGVLAEKFSCAFREKAKEFLVSKNEEMVQRQTIWTLLSIYIDGVQEVFETSYCLYPSHEKLLNDGFSMLLRACRESELRTVLSFLQAVLARIRSMHQQLCQELQRDNVDLFVQSSLSAKERHLAAVASALWRHFFSFLKSQRMSQVVPFSQLADAAADFTLLAMDMPSTAPSDFQPQPVISIIQLFGWDDIICPQVVARYLSHVLQNSTLCEALSHSGYVSFQALTVRSWIRCVLQMYIKNLSGPDDLLIDKNLEEAVEKEYMKQLVKLTRLLFNLSEVKSIFSKAQVEYLSISEDPKKALVRFFEAVGVTYGNVQTLSDKSAMVTKSLEYLGEVLKYIKPYLGKKVFSAGLQLTYGMMGILVKSWAQIFATSKAQKLLFRIIDCLLLPHAVLQQEKELPAPMLSAIQKSLPLYLQGMCIVCCQSQNPNAYLNQLLGNVIEQYIGRFLPASPYVSDLGQHPVLLALRNTATIPPISSLKKCIVQVIRKSYLEYKGSSPPPRLASILAFILQLFKETNTDIYEVELLLPGILKCLVLVSEPQVKRLATENLQYMVKACQVGSEEEPSSQLTSVFRQFIQDYGMRYYYQVYSILETVATLDQQVVIHLISTLTQSLKDSEQKWGLGRNIAQREAYSKLLSHLGQMGQDEMQRLENDNT

SEQ ID NO: 8753 - protein, 746 aa, Homo sapiens
MLMTLEMTELTDPHHTMGDYKVAHPQDPHHPSEKPVIHCHKCGEPCKGEVLRVQTKHFHIKCFTCKVCGCDLAQGGFFIKNGEYLCTLDYQRMYGTRCHGCGEFVEGEVVTALGKTYHPNCFACTICKRPFPPGDRVTFNGRDCLCQLCAQPMSSSPKETTFSSNCAGCGRDIKNGQALLALDKQWHLGCFKCKSCGKVLTGEYISKDGAPYCEKDYQGLFGVKCEACHQFITGKVLEAGDKHYHPSCARCSRCNQMFTEGEEMYLQGSTVWHPDCKQSTKTEEKLRLPNIRRSSSDFFYSKSLIRRTGRSPSLQPTRTSSESIYSRPGSSIPGSPGHTIYAKVDNEILDYKDLAAIPKVKAIYDIERPDLITYEPFYTSGYDDKQERQSLGESPRTLSPTPSAEGYQDVRDRMIHRSTSQGSINSPVYSRHSYTPTTSRSPQHFHRPGNEPSSGRNSPLPYRPDSRPLTPTYAQAPKHFHVPDQGINIYRKPPIYKQHAALAAQSKSSEDIIKFSKFPAAQAPDPSETPKIETDHWPGPPSFAVVGPDMKRRSSGREEDDEELLRRRQLQEEQLMKLNSGLGQLILKEEMEKESRERSSLLASRYDSPINSASHIPSSKTASLPGYGRNGLHRPVSTDFAQYNSYGDVSGGVRDFQTLPDGHMPAMRMDRGVSMPNMLEPKIFPYEMLMVTNRGRNKILREVDRTRLERHLAPEVFREIFGMSIQEFDRLPLWRRNDMKKKAKLF

SEQ ID NO: 8754 - protein, 748 aa, Homo sapiens
MLMTLEMTELTDPHHTMGDYKVAHPQDPHHPSEKPVIHCHKCGEPCKGEVLRVQTKHFHIKCFTCKVCGCDLAQGGFFIKNGEYLCTLDYQRMYGTRCHGCGEFVEGEVVTALGKTYHPNCFACTICKRPFPPGDRVTFNGRDCLCQLCAQPMSSSPKETTFSSNCAGCGRDIKNGQALLALDKQWHLGCFKCKSCGKVLTGEYISKDGAPYCEKDYQGLFGVKCEACHQFITGKVLEAGDKHYHPSCARCSRCNQMFTEGEEMYLQGSTVWHPDCKQSTKTEEKLRLPNIRRSSSDFFYSKSLIRRTGRSPSLQPTRTSSESIYSRPGSSIPGSPGHTIYAKVDNEILDYKDLAAIPKVKAIYDIERPDLITYEPFYTSGYDDKQERQSLGESPRTLSPTPSAEGYQDVRDRMIHRSTSQGSINSPVYSRHSYTPTTSRSPQHFHRPGNEPSSGRNSPLPYRPDSRPLTPTYAQAPKHFHVPDQGINIYRKPPIYKQHDAAALAAQSKSSEDIIKFSKFPAAQAPDPSETPKIETDHWPGPPSFAVVGPDMKRRSSGREEDDEELLRRRQLQEEQLMKLNSGLGQLILKEEMEKESRERSSLLASRYDSPINSASHIPSSKTASLPGYGRNGLHRPVSTDFAQYNSYGDVSGGVRDYQTLPDGHMPAMRMDRGVSMPNMLEPKIFPYEMLMVTNRGRNKILREVDRTRLERHLAPEVFREIFGMSIQEFDRLPLWRRNDMKKKAKLF

SEQ ID NO: 8755 - protein, 620 aa, Homo sapiens
MPSERCLSIQEMLTGQRLCHSESHNDSVLAALNQQRSDGILCDITLIAEEQKFHAHKAVLAACSDYFRAMFSLCMVESGADEVNLHGVTSLGLKQALEFAYTGQILLEPGVIQDVLAAGSHLQLLELLNLCSHYLIQELNSFNYLDLYRLADLFNLTLLEKAVIDFLVKHLSELLKSRPEEVLTLPYCLLQEVLKSDRLTSLSEEQIWQLAVRWLEHNCHYQYMDELLQYIRFGLMDVDTLHTVALSHPLVQASETATALVNEALEYHQSIYAQPVWQTRRTKPRFQSDTLYIIGGKKREVCKVKELRYFNPVDQENALIAAIANWSELAPMPVGRSHHCVAVMGDFLFVAGGEVEHASGRTCAVRTACRYDPRSNSWAEIAPMKNCREHFVLGAMEEYLYAVGGRNELRQVLPTVERYCPKKNKWTFVQSFDRSLSCHAGYVADGLLWISGGVTNTAQYQNRLMVYEPNQNKWISRSPMLQRRVYHSMAAVQRKLYVLGGNDLDYNNDRILVRHIDSYNIDTDQWTRCNFNLLTGQNESGVAVHNGRIYLVGGYSIWTNEPLACIQVLDVSREGKEEVFYGPTLPFASNGIAACFLPAPYFTCPNLQTLQVPHHRIGTI

SEQ ID NO: 8756 - protein, 285 aa, Homo sapiens
MTKKRIAVIGGGVSGLSSIKCCVEEGLEPVCFERTDDIGGLWRFQENPEEGRASIYKSVIINTSKEMMCFSDYPIPDHYPNFMHNAQVLEYFRMYAKEFDLLKYIRFKTTVCSVKKQPDFATSGQWEVVTESEGKKEMNVFDGVMVCTGHHTNAHLPLESFPGIEKFKGQYFHSRDYKNPEGFTGKRVIIIGIGNSGGDLAVEISQTAKQVFLSTRRGAWILNRVGDYGYPADVLFSSRLTHFIWKICGQSLANKYLEKKINQRFDHEMFGLKPKHRSKDIALTE

SEQ ID NO: 8757 - protein, 1104 aa, Homo sapiens
MSVKSPFNVMSRNNLEAPPCKMTEPFNFEKNENKLPPHESLRSPGTLPNHPNFRLKSSENGNKKNNFLLCEQTKQYLASQEDNSVSSNPNGINGEVVGSKGDRKKLPAGNSVSPPSAESNSPPKEVNIKPGNNVRPAKSKKLNKLVENSLSISNPGLFTSLGPPLRSTTCHRCGLFGSLRCSQCKQTYYCSTACQRRDWSAHSIVCRPVQPNFHKLENKSSIETKDVEVNNKSDCPLGVTKEIAIWAERIMFSDLRSLQLKKTMEIKGTVTEFKHPGDFYVQLYSSEVLEYMNQLSASLKETYANVHEKDYIPVKGEVCIAKYTVDQTWNRAIIQNVDVQQKKAHVLYIDYGNEEIIPLNRIYHLNRNIDLFPPCAIKCFVANVIPAEGNWSSDCIKATKPLLMEQYCSIKIVDILEEEVVTFAVEVELPNSGKLLDHVLIEMGYGLKPSGQDSKKENADQSDPEDVGKMTTENNIVVDKSDLIPKVLTLNVGDEFCGVVAHIQTPEDFFCQQLQSGRKLAELQASLSKYCDQLPPRSDFYPAIGDICCAQFSEDDQWYRASVLAYASEESVLVGYVDYGNFEILSLMRLCPIIPKLLELPMQAIKCVLAGVKPSLGIWTPEAICLMKKLVQNKIITVKVVDKLENSSLVELIDKSETPHVSVSKVLLDAGFAVGEQSMVTDKPSDVKETSVPLGVEGKVNPLEWTWVELGVDQTVDVVVCVIYSPGEFYCHVLKEDALKKLNDLNKSLAEHCQQKLPNGFKAEIGQPCCAFFAGDGSWYRALVKEILPNGHVKVHFVDYGNIEEVTADELRMISSTFLNLPFQGIRCQLADIQSRNKHWSEEAITRFQMCVAGIKLQARVVEVTENGIGVELTDLSTCYPRIISDVLIDEHLVLKSASPHKDLPNDRLVNKHELQVHVQGLQATSSAEQWKTIELPVDKTIQANVLEIISPNLFYALPKGMPENQEKLCMLTAELLEYCNAPKSRPPYRPRIGDACCAKYTSDDFWYRAVVLGTSDTDVEVLYADYGNIETLPLCRVQPITSSHLALPFQIIRCSLEEKMYRMNCCCTELQKQVEKHEHILLFLLNNSTNQNKFIEMKKLLKS

SEQ ID NO: 8758 - protein, 1113 aa, Homo sapiens
MSVKSPFNVMSRNNLEAPPCKMTEPFNFEKNENKLPPHESLRSPGTLPNHPNFRLKSSENGNKKNNFLLCEQTKQYLASQEDNSVSSNPNGINGEVVGSKGDRKKLPAGNSVSPPSAESNSPPKEVNIKPGNNVRPAKSKKLNKLVENSLSISNPGLFTSLGPPLRSTTCHRCGLFGSLRCSQCKQTYYCSTACQRRDWSAHSIVCRPVQPNFHKLENKSSIETKDVEVNNKSDCPLGVTKEIAIWAERIMFSDLRSLQLKKTMEIKGTVTEFKHPGDFYVQLYSSEVLEYMNQLSASLKETYANVHEKDYIPVKGEVCIAKYTVDQTWNRAIIQNVDVQQKKAHVLYIDYGNEEIIPLNRIYHLNRNIDLFPPCAIKCFVANVIPAEGNWSSDCIKATKPLLMEQYCSIKIVDILEEEVVTFAVEVELPNSGKLLDHVLIEMGYGLKPSGQDSKKENADQSDPEDVGKMTTENNIVVDKSDLIPKVLTLNVGDEFCGVVAHIQTPEDFFCQQLQSGRKLAELQASLSKYCDQLPPRSDFYPAIGDICCAQFSEDDQWYRASVLAYASEESVLVGYVDYGNFEILSLMRLCPIIPKLLELPMQAIKCVLAGVKPSLGIWTPEAICLMKKLVQNKIITVKVVDKLENSSLVELIDKSETPHVSVSKVLLDAGFAVGEQSMVTDKPSDVKETSVPLGVEGKVNPLEWTWVELGVDQTVDVVVCVIYSPGEFYCHVLKEDALKKLNDLNKSLAEHCQQKLPNGFKAEIGQPCCAFFAGDGSWYRALVKEILPNGHVKVHFVDYGNIEEVTADELRMISSTFLNLPFQGIRCQLADIQSRNKHWSEEAITRFQMCVAGIKLQARVVEVTENGIGVELTDLSTCYPRIISDVLIDEHLVLKSASPHKDLPNDRLVNKHELQVHVQGLQATSSAEQWKTIELPVDKTIQANVLEIISPNLFYALPKGMPENQEKLCMLTAELLEYCNAPKSRPPYRPRIGDACCAKYTSDDFWYRAVVLGTSDTDVEVLYADYGNIETLPLCRVQPITSSHLALPFQIIRCSLEEKMYRMNCCCTELQKQVEKHEHILLFLLNNSTNQNKFIEMKKLLKKTASLGGKPL

SEQ ID NO: 8759 - protein, 898 aa, Homo sapiens
MSETDHIASTSSDKNVGKTPELKEDSCNLFSGNESSKLENESKLLSLNTDKTLCQPNEHNNRIEAQENYIPDHGGGEDSCAKTDTGSENSEQIANFPSGNFAKHISKTNETEQKVTQILVELRSSTFPESANEKTYSESPYDTDCTKKFISKIKSVSASEDLLEEIESELLSTEFAEHRVPNGMNKGEHALVLFEKCVQDKYLQQEHIIKKLIKENKKHQELFVDICSEKDNLREELKKRTETEKQHMNTIKQLESRIEELNKEVKASRDQLIAQDVTAKNAVQQLHKEMAQRMEQANKKCEEARQEKEAMVMKYVRGEKESLDLRKEKETLEKKLRDANKELEKNTNKIKQLSQEKGRLHQLYETKEGETTRLIREIDKLKEDINSHVIKVKWAQNKLKAEMDSHKETKDKLKETTTKLTQAKEEADQIRKNCQDMIKTYQESEEIKSNELDAKLRVTKGELEKQMQEKSDQLEMHHAKIKELEDLKRTFKEGMDELRTLRTKVKCLEDERLRTEDELSKYKEIINRQKAEIQNLLDKVKTADQLQEQLQRGKQEIENLKEEVESLNSLINDLQKDIEGSRKRESELLLFTERLTSKNAQLQSESNSLQSQFDKVSCSESQLQSQCEQMKQTNINLESRLLKEEELRKEEVQTLQAELACRQTEVKALSTQVEELKDELVTQRRKHASSIKDLTKQLQQARRKLDQVESGSYDKEVSSMGSRSSSSGSLNARSSAEDRSPENTGSSVAVDNFPQVDKAMLIERIVRLQKAHARKNEKIEFMEDHIKQLVEEIRKKTKIIQSYILREESGTLSSEASDFNKVHLSRRGGIMASLYTSHPADNGLTLELSLEINRKLQAVLEDTLLKNITLKENLQTLGTEIERLIKHQHELEQRTKKT

SEQ ID NO: 8760 - protein, 477 aa, Homo sapiens
MGAGVLVLGASEPGNLSSAAPLPDGAATAARLLVPASPPASLLPPASESPEPLSQQWTAGMGLLMALIVLLIVAGNVLVIVAIAKTPRLQTLTNLFIMSLASADLVMGLLVVPFGATIVVWGRWEYGSFFCELWTSVDVLCVTASIETLCVIALDRYLAITSPFRYQSLLTRARARGLVCTVWAISALVSFLPILMHWWRAESDEARRCYNDPKCCDFVTNRAYAIASSVVSFYVPLCIMAFVYLRVFREAQKQVKKIDSCERRFLGGPARPPSPSPSPVPAPAPPPGPPRPAAAAATAPLANGRAGKRRPSRLVALREQKALKTLGIIMGVFTLCWLPFFLANVVKAFHRELVPDRLFVFFNWLGYANSAFNPIIYCRSPDFRKAFQGLLCCARRAARRRHATHGDRPRASGCLARPGPPPSPGAASDDDDDDVVGATPPARLLEPWAGCNGGAAADSDSSLDEPCRPGFASESKV

SEQ ID NO: 8761 - protein, 593 aa, Homo sapiens
MAELGELKHMVMSFRVSELQVLLGFAGRNKSGRKHELLAKALHLLKSSCAPSVQMKIKELYRRRFPRKTLGPSDLSLLSLPPGTSPPVHPDVTMKPLPFYEVYGELIRPTTLASTSSQRFEEAHFTFALTPQQVQQILTSREVLPGAKCDYTIQVQLRFCLCETSCPQEDYFPPNLFVKVNGKLCPLPGYLPPTKNGAEPKRPSRPINITPLARLSATVPNTIVVNWSSEFGRNYSLSVYLVRQLTAGTLLQKLRAKGIRNPDHSRALIKEKLTADPDSEVATTSLRVSLMCPLGKMRLTVPCRALTCAHLQSFDAALYLQMNEKKPTWTCPVCDKKAPYESLIIDGLFMEILSSCSDCDEIQFMEDGSWCPMKPKKEASEVCPPPGYGLDGLQYSPVQGGDPSENKKKVEVIDLTIESSSDEEDLPPTKKHCSVTSAAIPALPGSKGVLTSGHQPSSVLRSPAMGTLGGDFLSSLPLHEYPPAFPLGADIQGLDLFSFLQTESQHYGPSVITSLDEQDALGHFFQYRGTPSHFLGPLAPTLGSSHCSATPAPPPGRVSSIVAPGGALREGHGGPLPSGPSLTGCRSDIISLD

SEQ ID NO: 8762 - protein, 998 aa, Homo sapiens
MVFQTRYPSWIILCYIWLLRFAHTGEAQAAKEVLLLDSKAQQTELEWISSPPNGWEEISGLDENYTPIRTYQVCQVMEPNQNNWLRTNWISKGNAQRIFVELKFTLRDCNSLPGVLGTCKETFNLYYYETDYDTGRNIRENLYVKIDTIAADESFTQGDLGERKMKLNTEVREIGPLSKKGFYLAFQDVGACIALVSVKVYYKKCWSIIENLAIFPDTVTGSEFSSLVEVRGTCVSSAEEEAENAPRMHCSAEGEWLVPIGKCICKAGYQQKGDTCEPCGRGFYKSSSQDLQCSRCPTHSFSDKEGSSRCECEDGYYRAPSDPPYVACTRPPSAPQNLIFNINQTTVSLEWSPPADNGGRNDVTYRILCKRCSWEQGECVPCGSNIGYMPQQTGLEDNYVTVMDLLAHANYTFEVEAVNGVSDLSRSQRLFAAVSITTGQAAPSQVSGVMKERVLQRSVELSWQEPEHPNGVITEYEIKYYEKDQRERTYSTVKTKSTSASINNLKPGTVYVFQIRAFTAAGYGNYSPRLDVATLEEATGKMFEATAVSSEQNPVIIIAVVAVAGTIILVFMVFGFIIGRRHCGYSKADQEGDEELYFHFKFPGTKTYIDPETYEDPNRAVHQFAKELDASCIKIERVIGAGEFGEVCSGRLKLPGKRDVAVAIKTLKVGYTEKQRRDFLCEASIMGQFDHPNVVHLEGVVTRGKPVMIVIEFMENGALDAFLRKHDGQFTVIQLVGMLRGIAAGMRYLADMGYVHRDLAARNILVNSNLVCKVSDFGLSRVIEDDPEAVYTTTGGKIPVRWTAPEAIQYRKFTSASDVWSYGIVMWEVMSYGERPYWDMSNQDVIKAIEEGYRLPAPMDCPAGLHQLMLDCWQKERAERPKFEQIVGILDKMIRNPNSLKTPLGTCSRPISPLLDQNTPDFTTFCSVGEWLQAIKMERYKDNFTAAGYNSLESVARMTIEDVMSLGITLVGHQKKIMSSIQTMRAQMLHLHGTGIQV

SEQ ID NO: 8763 - protein, 1167 aa, Homo sapiens
MELPFVTHLFLPLVFLTGLCSPFNLDEHHPRLFPGPPEAEFGYSVLQHVGGGQRWMLVGAPWDGPSGDRRGDVYRCPVGGAHNAPCAKGHLGDYQLGNSSHPAVNMHLGMSLLETDGDGGFMACAPLWSRACGSSVFSSGICARVDASFQPQGSLAPTAQRCPTYMDVVIVLDGSNSIYPWSEVQTFLRRLVGKLFIDPEQIQVGLVQYGESPVHEWSLGDFRTKEEVVRAAKNLSRREGRETKTAQAIMVACTEGFSQSHGGRPEAARLLVVVTDGESHDGEELPAALKACEAGRVTRYGIAVLGHYLRRQRDPSSFLREIRTIASDPDERFFFNVTDEAALTDIVDALGDRIFGLEGSHAENESSFGLEMSQIGFSTHRLKDGILFGMVGAYDWGGSVLWLEGGHRLFPPRMALEDEFPPALQNHAAYLGYSVSSMLLRGGRRLFLSGAPRFRHRGKVIAFQLKKDGAVRVAQSLQGEQIGSYFGSELCPLDTDRDGTTDVLLVAAPMFLGPQNKETGRVYVYLVGQQSLLTLQGTLQPEPPQDARFGFAMGALPDLNQDGFADVAVGAPLEDGHQGALYLYHGTQSGVRPHPAQRIAAASMPHALSYFGRSVDGRLDLDGDDLVDVAVGAQGAAILLSSRPIVHLTPSLEVTPQAISVVQRDCRRRGQEAVCLTAALCFQVTSRTPGRWDHQFYMRFTASLDEWTAGARAAFDGSGQRLSPRRLRLSVGNVTCEQLHFHVLDTSDYLRPVALTVTFALDNTTKPGPVLNEGSPTSIQKLVPFSKDCGPDNECVTDLVLQVNMDIRGSRKAPFVVRGGRRKVLVSTTLENRKENAYNTSLSLIFSRNLHLASLTPQRESPIKVECAAPSAHARLCSVGHPVFQTGAKVTFLLEFEFSCSSLLSQVFVKLTASSDSLERNGTLQDNTAQTSAYIQYEPHLLFSSESTLHRYEVHPYGTLPVGPGPEFKTTLRVQNLGCYVVSGLIISALLPAVAHGGNYFLSLSQVITNNASCIVQNLTEPPGPPVHPEELQHTNRLNGSNTQCQVVRCHLGQLAKGTEVSVGLLRLVHNEFFRRAKFKSLTVVSTFELGTEEGSVLQLTEASRWSESLLEVVQTRPILISLWILIGSVLGGLLLLALLVFCLWKLGFFAHKKIPEEEKREEKLEQ

SEQ ID NO: 8764 - protein, 465 aa, Homo sapiens
MAGGKQFTFSYENEVCKQDYFIKSPPSQLFSSVTSWKKRFFILSKAGEKSFSLSYYKDHHHRGSIEIDQNSSVEVGISSQEKMQSVQKMFKCHPDEVMSIRTTNREYFLIGHDREKIKDWVSFMSSFRQDIKATQQNTEEELSLGNKRTLFYSSPLLGPSSTSEAVGSSSPRNGLQDKHLMEQSSPGFRQTHLQDLSEATQDVKEENHYLTPRSVLLELDNIIASSDSGESIETDGPDQVSGRIECHYEPMESYFFKETSHESVDSSKEEPQTLPETQDGDLHLQEQGSGIDWCLSPADVEAQTTNDQKGNIPDESQVEKLNVFLSPPDVINYLALTEATGRICVSQWEGPPRLGCIFCHGDHLLAVNDLKPQSLEEVSLFLTRSIQKEDSFRILSYQVAFGEGTELRDRAPGFRTSDRHDVAKRACMESDWCRDSKTAPSTNLCLSFLFCKIMTNDGAGCWIIK

SEQ ID NO: 8765 - protein, 366 aa, Homo sapiens
MQSVQKMFKCHPDEVMSIRTTNREYFLIGHDREKIKDWVSFMSSFRQDIKATQQNTEEELSLGNKRTLFYSSPLLGPSSTSEAVGSSSPRNGLQDKHLMEQSSPGFRQTHLQDLSEATQDVKEENHYLTPRSVLLELDNIIASSDSGESIETDGPDQVSGRIECHYEPMESYFFKETSHESVDSSKEEPQTLPETQDGDLHLQEQGSGIDWCLSPADVEAQTTNDQKGNIPDESQVEKLNVFLSPPDVINYLALTEATGRICVSQWEGPPRLGCIFCHGDHLLAVNDLKPQSLEEVSLFLTRSIQKEKLKLTIGRIPNSETFHAASCMCPSKCQSAAPSQLDKPRLNRAPKRSPAIKKSQQKGARE

SEQ ID NO: 8766 - protein, 218 aa, Homo sapiens
MASRGGGRGRGRGQLTFNVEAVGIGKGDALPPPTLQPSPLFPPLEFRPVPLPSGEEGEYVLALKQELRGAMRQLPYFIRPAVPKRDVERYSDKYQMSGPIDNAIDWNPDWRRLPRELKIRVRKLQKERITILLPKRPPKTTEDKEETIQKLETLEKKEEEVTSEEDEEKEEEEEKEEEEEEEYDEEEHEEETDYIMSYFDNGEDFGGDSDDNMDEAIY

SEQ ID NO: 8767 - protein, 388 aa, Homo sapiens
MRAGTRVALGSSTPAERTTPSQGRCKPRPALPRAAPPSAAPRLLVSLSLKGPQTLAAERRRETVPVPAALPPWERWQMIRAVLKSRGLRIQQMKIQWMLSQTGPRLYRPSSAPDSGTLYFTSKKKKNVTMRSIKTTRDRVPTYQYNMNFEKLGKCIIINNKNFDKVTGMGVRNGTDKDAEALFKCFRSLGFDVIVYNDCSCAKMQDLLKKASEEDHTNAACFACILLSHGEENVIYGKDGVTPIKDLTAHFRGDRCKTLLEKPKLFFIQACRGTELDDGIQADSGPINDTDANPRYKIPVEADFLFAYSTVPGYYSWRSPGRGSWFVQALCSILEEHGKDLEIMQILTRVNDRVARHFESQSDDPHFHEKKQIPCVVSMLTKELYFSQ

SEQ ID NO: 8768 - protein, 253 aa, Homo sapiens
MADDQGCIEEQGVEDSANEDSVDAKPDRSSFVPSLFSKKKKNVTMRSIKTTRDRVPTYQYNMNFEKLGKCIIINNKNFDKVTGMGVRNGTDKDAEALFKCFRSLGFDVIVYNDCSCAKMQDLLKKASEEDHTNAACFACILLSHGEENMESCSVTQAGVQRRDLGRLQPPPPRLAEGPSLMMASRPTRGPSMTQMLILDTRSQWKLTSSSPIPRFQAITRGGAQEEAPGLCKPSAPSWRSTEKTWKSCRSSPG

SEQ ID NO: 8769 - protein, 969 aa, Homo sapiens
MSNGYRTLSQHLNDLKKENFSLKLRIYFLEERMQQKYEASREDIYKRNIELKVEVESLKRELQDKKQHLDKTWADVENLNSQNEAELRRQFEERQQETEHVYELLENKIQLLQEESRLAKNEAARMAALVEAEKECNLELSEKLKGVTKNWEDVPGDQVKPDQYTEALAQRDKRIEELNQSLAAQERLVEQLSREKQQLLHLLEEPTSMEVQPMTEELLKQQKLNSHETTITQQSVSDSHLAELQEKIQQTEATNKILQEKLNEMSYELKCAQESSQKQDGTIQNLKETLKSRERETEELYQVIEGQNDTMAKLREMLHQSQLGQLHSSEGTSPAQQQVALLDLQSALFCSQLEIQKLQRVVRQKERQLADAKQCVQFVEAAAHESEQQKEASWKHNQELRKALQQLQEELQNKSQQLRAWEAEKYNEIRTQEQNIQHLNHSLSHKEQLLQEFRELLQYRDNSDKTLEANEMLLEKLRQRIHDKAVALERAIDEKFSALEEKEKELRQLRLAVRERDHDLERLRDVLSSNEATMQSMESLLRAKGLEVEQLSTTCQNLQWLKEEMETKFSRWQKEQESIIQQLQTSLHDRNKEVEDLSATLLCKLGPGQSEIAEELCQRLQRKERMLQDLLSDRNKQVLEHEMEIQGLLQSVSTREQESQAAAEKLVQALMERNSELQALRQYLGGRDSLMSQAPISNQQAEVTPTGRLGKQTDQGSMQIPSRDDSTSLTAKEDVSIPRSTLGDLDTVAGLEKELSNAKEELELMAKKERESQMELSALQSMMAVQEEELQVQAADMESLTRNIQIKEDLIKDLQMQLVDPEDIPAMERLTQEVLLLREKVASVESQGQEISGNRRQQLLLMLEGLVDERSRLNEALQAERQLYSSLVKFHAHPESSERDRTLQVELEGAQVLRSRLEEVLGRSLERLNRLETLAAIGGAAAGDDTEDTSTEFTDSIEEEAAHHSHQQL

SEQ ID NO: 8770 - protein, 988 aa, Homo sapiens
MSNGYRTLSQHLNDLKKENFSLKLRIYFLEERMQQKYEASREDIYKRNIELKVEVESLKRELQDKKQHLDKTWADVENLNSQNEAELRRQFEERQQETEHVYELLENKIQLLQEESRLAKNEAARMAALVEAEKECNLELSEKLKGVTKNWEDVPGDQVKPDQYTEALAQRDKRIEELNQSLAAQERLVEQLSREKQQLLHLLEEPTSMEVQPMTEELLKQQKLNSHETTITQQSVSDSHLAELQEKIQQTEATNKILQEKLNEMSYELKCAQESSQKQDGTIQNLKETLKSRERETEELYQVIEGQNDTMAKLREMLHQSQLGQLHSSEGTSPAQQQVALLDLQSALFCSQLEIQKLQRVVRQKERQLADAKQCVQFVEAAAHESEQQKEASWKHNQELRKALQQLQEELQNKSQQLRAWEAEKYNEIRTQEQNIQHLNHSLSHKEQLLQEFRELLQYRDNSDKTLEANEMLLEKLRQRIHDKAVALERAIDEKFSALEEKEKELRQLRLAVRERDHDLERLRDVLSSNEATMQSMESLLRAKGLEVEQLSTTCQNLQWLKEEMETKFSRWQKEQESIIQQLQTSLHDRNKEVEDLSATLLCKLGPGQSEIAEELCQRLQRKERMLQDLLSDRNKQVLEHEMEIQGLLQSVSTREQESQAAAEKLVQALMERNSELQALRQYLGGRDSLMSQAPISNQQAEVTPTGRLGKQTDQGSMQIPSRDDSTSLTAKEDVSIPRSTLGDLDTVAGLEKELSNAKEELELMAKKERESQMELSALQSMMAVQEEELQVQAADMESLTRNIQIKEDLIKDLQMQLVDPEDIPAMERLTQEVLLLREKVASVESQGQEISGNRRQQLLLMLEGLVDERSRLNEALQAERQLYSSLVKFHAHPESSERDRTLQVELEGAQVLRSRLEEVLGRSLERLNRLETLAAIGGAAAGDDTEDTSTEFTDSIEEEAAHHSHQQVSQCQGLGLPGWTAHSPSEV

SEQ ID NO: 8771 - protein, 543 aa, Homo sapiens
MGDWNLLGGILEEVHSHSTIVGKIWLTILFIFRMLVLRVAAEDVWDDEQSAFACNTRQPGCNNICYDDAFPISLIRFWVLQIIFVSSPSLVYMGHALYRLRAFEKDRQRKKSHLRAQMENPDLDLEEQQRIDRELRRLEEQKRIHKVPLKGCLLRTYVLHILTRSVLEVGFMIGQYILYGFQMHPLYKCTQPPCPNAVDCFVSRPTEKTIFMLFMHSIAAISLLLNILEIFHLGIRKIMRTLYKKSSSEGIEDETGPPFHLKKYSVAQQCMICSSLPERISPLQANNQQQVIRVNVPKSKTMWQIPQPRQLEVDPSNGKKDWSEKDQHSGQLHVHSPCPWAGSAGNQHLGQQSDHSSFGLQNTMSQSWLGTTTAPRNCPSFAVGTWEQSQDPEPSGEPLTDLHSHCRDSEGSMRESGVWIDRSRPGSRKASFLSRLLSEKRHLHSDSGSSGSRNSSCLDFPHWENSPSPLPSVTGHRTSMVRQAALPIMELSQELFHSGCFLFPFFLPGVCMYVCVDREADGGGDYLWRDKIIHSIHSVKFNS

SEQ ID NO: 8772 - protein, 2346 aa, Homo sapiens
MSNGYRTLSQHLNDLKKENFSLKLRIYFLEERMQQKYEASREDIYKRNIELKVEVESLKRELQDKKQHLDKTWADVENLNSQNEAELRRQFEERQQETEHVYELLENKIQLLQEESRLAKNEAARMAALVEAEKECNLELSEKLKGVTKNWEDVPGDQVKPDQYTEALAQRDKRIEELNQSLAAQERLVEQLSREKQQLLHLLEEPTSMEVQPMTEELLKQQKLNSHETTITQQSVSDSHLAELQEKIQQTEATNKILQEKLNEMSYELKCAQESSQKQDGTIQNLKETLKSRERETEELYQVIEGQNDTMAKLREMLHQSQLGQLHSSEGTSPAQQQVALLDLQSALFCSQLEIQKLQRVVRQKERQLADAKQCVQFVEAAAHESEQQKEASWKHNQELRKALQQLQEELQNKSQQLRAWEAEKYNEIRTQEQNIQHLNHSLSHKEQLLQEFRELLQYRDNSDKTLEANEMLLEKLRQRIHDKAVALERAIDEKFSALEEKEKELRQLRLAVRERDHDLERLRDVLSSNEATMQSMESLLRAKGLEVEQLSTTCQNLQWLKEEMETKFSRWQKEQESIIQQLQTSLHDRNKEVEDLSATLLCKLGPGQSEIAEELCQRLQRKERMLQDLLSDRNKQVLEHEMEIQGLLQSVSTREQESQAAAEKLVQALMERNSELQALRQYLGGRDSLMSQAPISNQQAEVTPTGRLGKQTDQGSMQIPSRDDSTSLTAKEDVSIPRSTLGDLDTVAGLEKELSNAKEELELMAKKERESQMELSALQSMMAVQEEELQVQAADMESLTRNIQIKEDLIKDLQMQLVDPEDIPAMERLTQEVLLLREKVASVESQGQEISGNRRQQLLLMLEGLVDERSRLNEALQAERQLYSSLVKFHAHPESSERDRTLQVELEGAQVLRSRLEEVLGRSLERLNRLETLAAIGGAAAGDDTEDTSTEFTDSIEEEAAHHSHQQLVKVALEKSLATVETQNPSFSPPSPMGGDSNRCLQEEMLHLRAEFHQHLEEKRKAEEELKELKAQIEEAGFSSVSHIRNTMLSLCLENAELKEQMGEAMSDGWEIEEDKEKGEVMVETVVTKEGLSESSLQAEFRKLQGKLKNAHNIINLLKEQLVLSSKEGNSKLTPELLVHLTSTIERINTELVGSPGKHQHQEEGNVTVRPFPRPQSLDLGATFTVDAHQLDNQSQPRDPGPQSAFSLPGSTQHLRSQLSQCKQRYQDLQEKLLLSEATVFAQANELEKYRVMLTGESLVKQDSKQIQVDLQDLGYETCGRSENEAEREETTSPECEEHNSLKEMVLMEGLCSEQGRRGSTLASSSERKPLENQLGKQEEFRVYGKSENILVLRKDIKDLKAQLQNANKVIQNLKSRVRSLSVTSDYSSSLERPRKLRAVGTLEGSSPHSVPDEDEGWLSDGTGAFYSPGLQAKKDLESLIQRVSQLEAQLPKNGLEEKLAEELRSASWPGKYDSLIQDQARELSYLRQKIREGRGICYLITRHAKDTVKSFEDLLRSNDIDYYLGQSFREQLAQGSQLTERLTSKLSTKDHKSEKDQAGLEPLALRLSRELQEKEKVIEVLQAKLDARSLTPSSSHALSDSHRSPSSTSFLSDELEACSDMDIVSEYTHYEEKKASPSHSDSIHHSSHSAVLSSKPSSTSASQGAKAESNSNPISLPTPQNTPKEANQAHSGFHFHSIPKLASLPQAPLPSAPSSFLPFSPTGPLLLGCCETPVVSLAEAQQELQMLQKQLGESASTVPPASTATLLSNDLEADSSYYLNSAQPHSPPRGTIELGRILEPGYLGSSGKWDVMRPQKGSVSGDLSSGSSVYQLNSKPTGADLLEEHLGEIRNLRQRLEESICINDRLREQLEHRLTSTARGRGSTSNFYSQGLESIPQLCNENRVLREDNRRLQAQLSHVSREHSQETESLREALLSSRSHLQELEKELEHQKVERQQLLEDLREKQQEVLHFREERLSLQENDSRLQHKLVLLQQQCEEKQQLFESLQSELQIYEALYGNSKKGLKAYSLDACHQIPLSSDLSHLVAEVRALRGQLEQSIQGNNCLRLQLQQQLESGAGKASLSPSSINQNFPASTDPGNKQLLLQDSAVSPPVRDVGMNSPALVFPSSASSTPGSETPIINRANGLGLDTSPVMKTPPKLEGDATDGSFANKHGRHVIGHIDDYSALRQQIAEGKLLVKKIVSLVRSACSFPGLEAQGTEVLGSKGIHELRSSTSALHHALEESASLLTMFWRAALPSTHIPVLPGKVGESTERELLELRTKVSKQERLLQSTTEHLKNANQQKESMEQFIVSQLTRTHDVLKKARTNLEVKSLRALPCTPAL

SEQ ID NO: 8773 - protein, 2362 aa, Homo sapiens
MSNGYRTLSQHLNDLKKENFSLKLRIYFLEERMQQKYEASREDIYKRNIELKVEVESLKRELQDKKQHLDKTWADVENLNSQNEAELRRQFEERQQETEHVYELLENKIQLLQEESRLAKNEAARMAALVEAEKECNLELSEKLKGVTKNWEDVPGDQVKPDQYTEALAQRDKRIEELNQSLAAQERLVEQLSREKQQLLHLLEEPTSMEVQPMTEELLKQQKLNSHETTITQQSVSDSHLAELQEKIQQTEATNKILQEKLNEMSYELKCAQESSQKQDGTIQNLKETLKSRERETEELYQVIEGQNDTMAKLREMLHQSQLGQLHSSEGTSPAQQQVALLDLQSALFCSQLEIQKLQRVVRQKERQLADAKQCVQFVEAAAHESEQQKEASWKHNQELRKALQQLQEELQNKSQQLRAWEAEKYNEIRTQEQNIQHLNHSLSHKEQLLQEFRELLQYRDNSDKTLEANEMLLEKLRQRIHDKAVALERAIDEKFSALEEKEKELRQLRLAVRERDHDLERLRDVLSSNEATMQSMESLLRAKGLEVEQLSTTCQNLQWLKEEMETKFSRWQKEQESIIQQLQTSLHDRNKEVEDLSATLLCKLGPGQSEIAEELCQRLQRKERMLQDLLSDRNKQVLEHEMEIQGLLQSVSTREQESQAAAEKLVQALMERNSELQALRQYLGGRDSLMSQAPISNQQAEVTPTGRLGKQTDQGSMQIPSRDDSTSLTAKEDVSIPRSTLGDLDTVAGLEKELSNAKEELELMAKKERESQMELSALQSMMAVQEEELQVQAADMESLTRNIQIKEDLIKDLQMQLVDPEDIPAMERLTQEVLLLREKVASVESQGQEISGNRRQQLLLMLEGLVDERSRLNEALQAERQLYSSLVKFHAHPESSERDRTLQVELEGAQVLRSRLEEVLGRSLERLNRLETLAAIGGAAAGDDTEDTSTEFTDSIEEEAAHHSHQQLVKVALEKSLATVETQNPSFSPPSPMGGDSNRCLQEEMLHLRAEFHQHLEEKRKAEEELKELKAQIEEAGFSSVSHIRNTMLSLCLENAELKEQMGEAMSDGWEIEEDKEKGEVMVETVVTKEGLSESSLQAEFRKLQGKLKNAHNIINLLKEQLVLSSKEGNSKLTPELLVHLTSTIERINTELVGSPGKHQHQEEGNVTVRPFPRPQSLDLGATFTVDAHQLDNQSQPRDPGPQSAFSLPGSTQHLRSQLSQCKQRYQDLQEKLLLSEATVFAQANELEKYRVMLTGESLVKQDSKQIQVDLQDLGYETCGRSENEAEREETTSPECEEHNSLKEMVLMEGLCSEQGRRGSTLASSSERKPLENQLGKQEEFRVYGKSENILVLRKDIKDLKAQLQNANKVIQNLKSRVRSLSVTSDYSSSLERPRKLRAVGTLEGSSPHSVPDEDEGWLSDGTGAFYSPGLQAKKDLESLIQRVSQLEAQLPKNGLEEKLAEELRSASWPGKYDSLIQDQARELSYLRQKIREGRGICYLITRHAKDTVKSFEDLLRSNDIDYYLGQSFREQLAQGSQLTERLTSKLSTKDHKSEKDQAGLEPLALRLSRELQEKEKVIEVLQAKLDARSLTPSSSHALSDSHRSPSSTSFLSDELEACSDMDIVSEYTHYEEKKASPSHSDSIHHSSHSAVLSSKPSSTSASQGAKAESNSNPISLPTPQNTPKEANQAHSGFHFHSIPKLASLPQAPLPSAPSSFLPFSPTGPLLLGCCETPVVSLAEAQQELQMLQKQLGESASTVPPASTATLLSNDLEADSSYYLNSAQPHSPPRGTIELGRILEPGYLGSSGKWDVMRPQKGSVSGDLSSGSSVYQLNSKPTGADLLEEHLGEIRNLRQRLEESICINDRLREQLEHRLTSTARGRGSTSNFYSQGLESIPQLCNENRVLREDNRRLQAQLSHVSREHSQETESLREALLSSRSHLQELEKELEHQKVERQQLLEDLREKQQEVLHFREERLSLQENDSRLQHKLVLLQQQCEEKQQLFESLQSELQIYEALYGNSKKGLKAYSLDACHQIPLSSDLSHLVAEVRALRGQLEQSIQGNNCLRLQLQQQLESGAGKASLSPSSINQNFPASTDPGNKQLLLQDSAVSPPVRDVGMNSPALVFPSSASSTPGSETPIINRANGLGLDTSPVMKTPPKLEGDATDGSFANKHGRHVIGHIDDYSALRQQIAEGKLLVKKIVSLVRSACSFPGLEAQGTEVLGSKGIHELRSSTSALHHALEESASLLTMFWRAALPSTHIPVLPGKVGESTERELLELRTKVSKQERLLQSTTEHLKNANQQKESMEQFIVSQLTRTHDVLKKARTNLEEPCKKRSHQKSLKQQERWACPPFVQLPIC

SEQ ID NO: 8774 - protein, 1731 aa, Homo sapiens
MNVQPCSRCGYGVYPAEKISCIDQIWHKACFHCEVCKMMLSVNNFVSHQKKPYCHAHNPKNNTFTSVYHTPLNLNVRTFPEAISGIHDQEDGEQCKSVFHWDMKSKDKEGAPNRQPLANERAYWTGYGEGNAWCPGALPDPEIVRMVEARKSLGEEYTEDYEQPRGKGSFPAMITPAYQRAKKANQLASQVEYKRGHDERISRFSTVVDTPELLRSKAGAQLQSDVRYTEDYEQQRGKGSFPAMITPAYQIAKRANELASDVRYHQQYQKEMRGMAGPAIGAEGILTRECADQYGQGYPEEYEEHRGKGSFPAMITPAYQNAKKAHELASDIKYRQDFNKMKGAAHYHSLPAQDNLVLKQAQSVNKLVSEVEYKKDLESSRGHSINYCETPQFRNVSKISKFTSDNKYKENYQNHMRGRYEGVGMDRRTLHAMKVGSLASNVAYKADYKHDIVDYNYPATLTPSYQTAMKLVPLKDANYRQSIDKLKYSSVTDTPQIVQAKINAQQLSHVNYRADYEKNKLNYTLPQDVPQLVKAKTNAKLFSEVKYKEGWEKTKGKGFEMKLDAMSLLAAKASGELASNIKYKEEYEKTKGKAMGTADSRLLHSLQIAKMSSEVEYKKGFEESKTRFHLPMDMVNIRHAKKAQTLASDLDYRKKLHEYTVLPEDMKTQWAKKAYGLQSELQYKADLAWMKGVGWLTEGSLNLEQAKKAGQLVSEKNYRQRVDELKFTSVTDSSQMEHAKKSQELQSGVAYKAGNEQSVHQYTISKDEPLFLQARANAANLSEKLYKSSWENQKAKGFELRLDSLTFLAAKAKRDLASEVKYKEDYERSRGKLIGAKDVQGDSQMSHSLQMSKLQSELEYKKGFEDTKSQCHVSLDMVHLVHARKAQHLATDVGYKTAEHHFTALPTDMKVEWAKKAYGLQSDNQYRADVKWMKGMGWVATGSLNVEQAKKAGELISEKKYRQHPDALKFTSIKDTPEMVQARISYTQAVDRLYREQGENIKHHYTPTADLPEVLLAKLNAMNISETRYKESWSKLRDGGYKLRLDALPFQAAKASGEIISDYKYKEAFEKMKGQMLGSRSLEDDISLAHSVYATSLQSDVNYKKGFEHSKAQFHLPLDMAALVHAKKAQTLASNQDYKHPLPQYTSLAEDLRLSCAKKAHKLQSENLYRSDLNFMRGVACVIPGTLEIEGRKKASELISESKYRQHPHSFKYTAVTDTPNLLHAKFSNQITNERLYKAAGEDARHEYTMTLGLPEFIRAKTNAANLSDARYKESWRNLRAQGYKLTIEALPFQAARASGDIASDFLYRHDFVKERGKLIGPQSVRDDPRIQHCRRMGQLQSELQYRRGATSSQAQFHLPMDMVHLVHAKNAQALASDHDYRTQYHKFTALPEDLKMAWAKKAHALQSELRYKSDLIGMKGIGWLALRSPQMESAKKAGELISETKYRKKPDSIKFTTVVDSPDLVHAKNSYMHCNERMYRSGDAESLHRYTLIPDHPDFTRARLNALHLSDKVYRNSWEQTRAGSYDFRLDAIPFQTARASREIASDFRYKEAFLRDRGLQIGYRSVDDDPRMKHFLNVGRLQSDNEYKKDFAKSRSQFHSSTDQPGLLQAKRSQQLASDVHYRQPLPQPTCDPEQLGLRHAQKAHQLQSDVKYKSDLNLTRGVGWTPPGSYKVEMARRAAELANARGLGLQGAYQRGAEAVEAGDHQSGEVNPDATEILHVKKKKALLL

SEQ ID NO: 8775 - protein, 1703 aa, Homo sapiens
MNVQPCSRCGYGVYPAEKISCIDQIWHKACFHCEVCKMMLSVNNFVSHQKKPYCHAHNPKNNTFTSVYHTPLNLNVRTFPEAISGIHDQEDGEQCKSVFHWDMKSKDKEGAPNRQPLANERAYWTGYGEGNAWCPGALPDPEIVRMVEARKSLGEEYTEDYEQPRGKGSFPAMITPAYQRAKKANQLASQVEYKRGHDERISRFSTVVDTPELLRSKAGAQLQSDVRYTEDYEQQRGKGSFPAMITPAYQIAKRANELASDVRYHQQYQKEMRGMAGPAIGAEGILTRECADQYGQGYPEEYEEHRGKGSFPAMITPAYQNAKKAHELASDIKYRQDFNKMKGAAHYHSLPAQDNLVLKQAQSVNKLVSENKYKENYQNHMRGRYEGVGMDRRTLHAMKVGSLASNVAYKADYKHDIVDYNYPATLTPSYQTAMKLVPLKDANYRQSIDKLKYSSVTDTPQIVQAKINAQQLSHVNYRADYEKNKLNYTLPQDVPQLVKAKTNAKLFSEVKYKEGWEKTKGKGFEMKLDAMSLLAAKASGELASNVHLLLSLKIKYKEEYEKTKGKAMGTADSRLLHSLQIAKMSSEVEYKKGFEESKTRFHLPMDMVNIRHAKKAQTLASDLDYRKKLHEYTVLPEDMKTQWAKKAYGLQSELQYKADLAWMKGVGWLTEGSLNLEQAKKAGQLVSEKNYRQRVDELKFTSVTDSSQMEHAKKSQELQSGVAYKAGNEQSVHQYTISKDEPLFLQARANAANLSEKLYKSSWENQKAKGFELRLDSLTFLAAKAKRDLASEVKYKEDYERSRGKLIGAKDVQGDSQMSHSLQMSKLQSELEYKKGFEDTKSQCHVSLDMVHLVHARKAQHLATDVGYKTAEHHFTALPTDMKVEWAKKAYGLQSDNQYRADVKWMKGMGWVATGSLNVEQAKKAGELISEKKYRQHPDALKFTSIKDTPEMVQARISYTQAVDRLYREQGENIKHHYTPTADLPEVLLAKLNAMNISETRYKESWSKLRDGGYKLRLDALPFQAAKASGEIISDYKYKEAFEKMKGQMLGSRSLEDDISLAHSVYATSLQSDVNYKKGFEHSKAQFHLPLDMAALVHAKKAQTLASNQDYKHPLPQYTSLAEDLRLSCAKKAHKLQSENLYRSDLNFMRGVACVIPGTLEIEGRKKASELISESKYRQHPHSFKYTAVTDTPNLLHAKFSNQITNERLYKAAGEDARHEYTMTLGLPEFIRAKTNAANLSDARYKESWRNLRAQGYKLTIEALPFQAARASGDIASDFLYRHDFVKERGKLIGPQSVRDDPRIQHCRRMGQLQSELQYRRGATSSQAQFHLPMDMVHLVHAKNAQALASDHDYRTQYHKFTALPEDLKMAWAKKAHALQSELRYKSDLIGMKGIGWLALRSPQMESAKKAGELISETKYRKKPDSIKFTTVVDSPDLVHAKNSYMHCNERMYRSGDAESLHRYTLIPDHPDFTRARLNALHLSDKVYRNSWEQTRAGSYDFRLDAIPFQTARASREIASDFRYKEAFLRDRGLQIGYRSVDDDPRMKHFLNVGRLQSDNEYKKDFAKSRSQFHSSTDQPGLLQAKRSQQLASDVHYRQPLPQPTCDPEQLGLRHAQKAHQLQSDVKYKSDLNLTRGVGWTPPGSYKVEMARRAAELANARGLGLQGAYRGAEAVEAGDHQSGEVNPDATEILHVKKKKALLL

SEQ ID NO: 8776 - protein, 1463 aa, Homo sapiens
MKKKTVCTLNMGDKKYEDMEGEENGDNTISTGLLYSEADRCPICLNCLLEKEVGFPESCNHVFCMTCILKWAETLASCPIDRKPFQAVFKFSALEGYVKVQVKKQLRETKDKKNENSFEKQVSCHENSKSCIRRKAIVREDLLSAKVCDLKWIHRNSLYSETGGKKNAAIKINKPQRSNWSTNQCFRNFFSNMFSSVSHSGESSFTYRAYCTEFIEASEISALIRQKRHELELSWFPDTLPGIGRIGFIPWNVETEVLPLISSVLPRTIFPTSTISFEHFGTSCKGYALAHTQEGEEKKQTSGTSNTRGSRRKPAMTTPTRRSTRNTRAETASQSQRSPISDNSGCDAPGNSNPSLSVPSSAESEKQTRQAPKRKSVRRGRKPPLLKKKLRSSVAAPEKSSSNDSVDEETAESDTSPVLEKEHQPDVDSSNICTVQTHVENQSANCLKSCNEQIEESEKHTANYDTEERVGSSSSESCAQDLPVLVGEEGEVKKLENTGIEANVLCLESEISENILEKGGDPLEKQDQISGLSQSEVKTDVCTVHLPNDFPTCLTSESKVYQPVSCPLSDLSENVESVVNEEKITESSLVEITEHKDFTLKTEELIESPKLESSEGEIIQTVDRQSVKSPEVQLLGHVETEDVEIIATCDTFGNEDFNNIQDSENNLLKNNLLNTKLEKSLEEKNESLTEHPRSTELPKTHIEQIQKHFSEDNNEMIPMECDSFCSDQNESEVEPSVNADLKQMNENSVTHCSENNMPSSDLADEKVETVSQPSESPKDTIDKTKKPRTRRSRFHSPSTTWSPNKDTPQEKKRPQSPSPRRETGKESRKSQSPSPKNESARGRKKSRSQSPKKDIARERRQSQSRSPKRDTTRESRRSESLSPRRETSRENKRSQPRVKDSSPGEKSRSQSRERESDRDGQRRERERRTRKWSRSRSHSRSPSRCRTKSKSSSFGRIDRDSYSPRWKGRWANDGWRCPRGNDRYRKNDPEKQNENTRKEKNDIHLDADDPNSADKHRNDCPNWITEKINSGPDPRTRNPEKLKESHWEENRNENSGNSWNKNFGSGWVSNRGRGRGNRGRGTYRSSFAYKDQNENRWQNRKPLSGNSNSSGSESFKFVEQQSYKRKSEQEFSFDTPADRSGWTSASSWAVRKTLPADVQNYYSRRGRNSSGPQSGWMKQEEETSGQDSSLKDQTNQQVDGSQLPINMMQPQMNVMQQQMNAQHQPMNIFPYPVGVHAPLMNIQRNPFNIHPQLPLHLHTGVPLMQVATPTSVSQGLPPPPPPPPPSQQVNYIASQPDGKQLQGIPSSSHVSNNMSTPVLPAPTAAPGNTGMVQGPSSGNTSSSSHSKASNAAVKLAESKVSVAVEASADSSKTDKKLQIQEKAAQEVKLAIKPFYQNKDITKEEYKEIVRKAVDKVCHSKSGEVNSTKVANLVKAYVDKYKYSRKGSQKKTLEEPVSTEKNIG

SEQ ID NO: 8777 - protein, 157 aa, Homo sapiens
QESSQSDVGSLHSSKHQDSKKEEEKKKPHIKKPLNAFMLYMKEMRAKVVAECTLKESAAINQILGRRWHALSREEQAKYYELARKERQLHMQLYPGWSARDNYGKKKKRKRDKQPGETNDLSAPKKCRARFGLDQQNNWCGPCRCKYSKEVSGTVRA

SEQ ID NO: 8778 - protein, 5596 aa, Homo sapiens
MEHFLLEVAAAPLRLIAAKNEKSRSELGRFLAKQVWTPQDRQCVLSTLAQLLLDKDCTVLVGRQLRPLLLDLLERNAEAIKAGGQINHDLHERLCVSMSKLIGNHPDVLPFALRYFKDTSPVFQRLFLESSDANPVRYGRRRMKLRDLMEAAFKFLQQEQSVFRELWDWSVCVPLLRSHDTLVRWYTANCLALVTCMNEEHKLSFLKKIFNSDELIHFRLRLLEEAQLQDLEKALVLANPEVSLWRKQKELQYLQGHLVSSDLSPRVTAVCGVVLPGQLPAPGELGGNRSSSREQELALRSYVLVESVCKSLQTLAMAVASQNAVLLEGPIGCGKTSLVEYLAAVTGRTKPPQLLKVQLGDQTDSKMLLGMYRCTDVPGEFVWQPGTLTQAATMGHWILLEDIDYAPLDVVSVLIPLLENGELLIPGRGDCLKVAPGFQFFATRRLLSCGGNWYRPLNSHATLLDKYWTKIHLDNLDKRELNEVLQSRYPSLLAVVDHLLDIYIQLTGEKHHSWSDSSVGCEQAPEEVSEARRENKRPTLEGRELSLRDLLNWCNRIAHSFDSSSLSASLNIFQEALDCFTAMLSEHTSKLKMAEVIGSKLNISRKKAEFFCQLYKPEIVINELDLQVGRVRLLRKQSEAVHLQREKFTFAATRPSSVLIEQLAVCVSKGEPVLLVGETGTGKTSTIQYLAHITGHRLRVVNMNQQSDTADLLGGYKPVDHKLIWLPLREAFEELFAQTFSKKQNFTFLGHIQTCYRQKRWHDLLRLMQHVHKSAVNKDGKDSETGLLIKEKWEAFGLRLNHAQQQMKMTENTLLFAFVEGTLAQAVKKGEWILLDEINLAAPEILECLSGLLEGSSGSLVLLDRGDTEPLVRHPDFRLFACMNPATDVGKRNLPPGIRNRFTELYVEELESKEDLQVLIVDYLKGLSVNKNTVQGIINFYTALRKESGTKLVDGTGHRPHYSLRTLCRALRFAASNPCGNIQRSLYEGFCLGFLTQLDRASHPIVQKLICQHIVPGNVKSLLKQPIPEPKGGRLIQVEGYWIAVGDKEPTIDETYILTSSVKLNLRDIVRVVSAGTYPVLIQGETSVGKTSLIQWLAAATGNHCVRINNHEHTDIQEYIGCYTSDSSGKLVFKEGVLIDAMRKGYWIILDELNLAPTDVLEALNRLLDDNRELLVTETQEVVKAHPRFMLFATQNPPGLYGGRKVLSRAFRNRFVELHFDELPSSELETILHKRCSLPPSYCSKLVKVMLDLQSYRRSSSVFAGKQGFITLRDLFRWAERYRLAEPTEKEYDWLQHLANDGYMLLAGRVRKQEEIDVIQEVLEKHFKKKLCPQSLFSKENVLKLLGKLSTQISTLECNFGHIVWTEGMRRLAMLVGRALEFGEPVLLVGDTGCGKTTICQVFAALANQKLYSVSCHLHMETSDFLGGLRPVRQKPNDKEEIDTSRLFEWHDGPLVQAMKEDGFFLLDEISLADDSVLERLNSVLEVEKSLVLAEKGSPEDKDSEIELLTAGKKFRILATMNPGGDFGKKELSPALRNRFTEIWCPQSTSREDLIQIISHNLRPGLCLGRIDPKGSDIPEVMLDFIDWLTHQEFGRKCVVSIRDILSWVNFMNKMGEEAALKRPEIISTVTSFVHAACLVYIDGIGSGVTSSGFGTALLARKECLKFLIKRLAKIVRLTEYQKNELKIYDRMKAKEFTGIDNLWGIHPFFIPRGPVLHRNNIADYALSAGTTAMNAQRLLRATKLKKPILLEGSPGVGKTSLVGALAKASGNTLVRINLSEQTDITDLFGADLPVEGGKGGEFAWRDGPLLAALKAGHWVVLDELNLASQSVLEGLNACFDHRGEIYVPELGMSFQVQHEKTKIFGCQNPFRQGGGRKGLPRSFLNRFTQVFVDPLTVIDMEFIASTLFPAIEKNIVKKMVAFNNQIDHEVTVEKKWGQKGGPWEFNLRDLFRWCQLMLVDQSPGCYDPGQHVFLVYGERMRTEEDKKKVIAVFKDVFGSNSNPYMGTRLFRITPYDVQLGYSVLSRGSCVPHPSRHPLLLLHQSFQPLESIMKCVQMSWMVILVGPASVGKTSLVQLLAHLTGHTLKIMAMNSAMDTTELLGGFEQVDLIRPWRRLLEKVEGTVRALLRDSLLISADDAEVVLRAWSHFLLTYKPKCLGEGGKAITMEIVNKLEAVLLLMQRLNNKINSYCKAEFAKLVEEFRSFGVKLTQLASGHSHGTFEWVDSMLVQALKSGDWLLMDNVNFCNPSVLDRLNALLEPGGVLTISERGMIDGSTPTITPNPNFRLFLSMDPVHGDISRAMRNRGLEIYISGEGDASTPDNLDLKVLLHSLGLVGNSVCDILLALHTETRSTVVGSPTSSVSTLIQTAILIVQYLQRGLSLDRAFSEACWEVYVCSQHSPANRKLVQALLEKHVSSLRAHETWGDSILGMGLWPDSVPSALFATEDSHLSTVRRDGQILVYCLNRMSMKTSSWTRSQPFTLQDLEKIMQSPSPENLKFNAVEVNTYWIDEPDVLVMAVKLLIERATNQDWMLRVKWLYHLAKNIPQGLESIQIHLEASAASLRNFYSHSLSGAVSNVFKILQPNTTDEFVIPLDPRWNMQALDMIRNLMDFDPQTDQPDQLFALLESAANKTIIYLDREKRVFTEANLVSVGSKKLRESVLRMSFEFHQDPESYHTLPHEIVVNLAAFFELCDALVLLWVQSSQGMVSDASANEILGSLRWRDRFWTVADTVKVDAPGLALLALHWHWVLKHLVHQIPRLLMNYEDKYYKEVQTVSEHIQNCLGSQTGGFAGIKKLQKFLGRPFPFKDKLVVECFSQLKVLNKVLAIREQMSALGESGWQEDINRLQVVASQWTLKKSLLQAWGLILRANILEDVSLDELKNFVHAQCLELKAKGLSLGFLEKKHDEASSLSHPDLTSVIHLTRSVQLWPAMEYLAMLWRYKVTADFMAQACLRRCSKNQQPQINEEISHLISFCLYHTPVTPQELRDLWSLLHHQKVSPEEITSLWSELFNSMFMSFWSSTVTTNPEYWLMWNPLPGMQQREAPKSVLDSTLKGPGNLNRPIFSKCCFEVLTSSWRASPWDVSGLPILSSSHVTLGEWVERTQQLQDISSMLWTNMAISSVAEFRRTDSQLQGQVLFRHLAGLAELLPESRRQEYMQNCEQLLLGSSQAFQHVGQTLGDMAGQEVLPKELLCQLLTSLHHFVGEGESKRSLPEPAQRGSLWVSLGLLQIQTWLPQARFDPAVKREYKLNYVKEELHQLQCEWKTRNLSSQLQTGRDLEDEVVVSYSHPHVRLLRQRMDRLDNLTCHLLKKQAFRPQLPAYESLVQEIHHYVTSIAKAPAVQDLLTRLLQALHIDGPRSAQVAQSLLKEEASWQQSHHQFRKRLSEEYTFYPDAVSPLQASILQLQHGMRLVASELHTSLHSSMVGADRLGTLATALLAFPSVGPTFPTYYAHADTLCSVKSEEVLRGLGKLILKRSGGKELEGKGQKACPTREQLLMNALLYLRSHVLCKGELDQRALQLFRHVCQEIISEWDEQERIAQEKAEQESGLYRYRSRNSRTALSEEEEEEREFRKQFPLHEKDFADILVQPTLEENKGTSDGQEEEAGTNPALLSQNSMQAVMLIHQQLCLNFARSLWYQQTLPPHEAKHYLSLFLSCYQTGASLVTHFYPLMGVELNDRLLGSQLLACTLSHNTLFGEAPSDLMVKPDGPYDFYQHPNVPEARQCQPVLQGFSEAVSHLLQDWPEHPALEQLLVVMDRIRSFPLSSPISKFLNGLEILLAKAQDWEENASRALSLRKHLDLISQMIIRWRKLELNCWSMSLDNTMKRHTEKSTKHWFSIYQMLEKHMQEQTEEQEDDKQMTLMLLVSTLQAFIEGSSLGEFHVRLQMLLVFHCHVLLMPQVEGKDSLCSVLWNLYHYYKQFFDRVQAKIVELRSPLEKELKEFVKISKWNDVSFWSIKQSVEKTHRTLFKFMKKFEAVLSEPCRSSLVESDKEEQPDFLPRPTDGAASELSSIQNLNRALRETLLAQPAAGQATIPEWCQGAAPSGLEGELLRRLPKLRKRMRKMCLTFMKESPLPRLVEGLDQFTGEVISSVSELQSLKVEPSAEKEKQRSEAKHILMQKQRALSDLFKHLAKIGLSYRKGLAWARSKNPQEMLHLHPLDLQSALSIVSSTQEADSRLLTEISSSWDGCQKYFYRSLARHARLNAALATPAKEMGMGNVERCRGFSAHLMKMLVRQRRSLTTLSEQWIILRNLLSCVQEIHSRLMGPQAYPVAFPPQDGVQQWTERLQHLAMQCQILLEQLSWLLQCCPSVGPAPGHGNVQVLGQPPGPCLEGPELSKGQLCGVVLDLIPSNLSYPSPIPGSQLPSGCRMRKQDHLWQQSTTRLTEMLKTIKTVKADVDKIRQQSCETLFHSWKDFEVCSSALSCLSQVSVHLQGLESLFILPGMEVEQRDSQMALVESLEYVRGEISKAMADFTTWKTHLLTSDSQGGNQMLDEGFVEDFSEQMEIAIRAILCAIQNLEERKNEKAEENTDQASPQEDYAGFERLQSGHLTKLLEDDFWADVSTLHVQKIISAISELLERLKSYGEDGTAAKHLFFSQSCSLLVRLVPVLSSYSDLVLFFLTMSLATHRSTAKLLSVLAQVFTELAQKGFCLPKEFMEDSAGEGATEFHDYEGGGIGEGEGMKDVSDQIGNEEQVEDTFQKGQEKDKEDPDSKSDIKGEDNAIEMSEDFDGKMHDGELEEQEEDDEKSDSEGGDLDKHMGDLNGEEADKLDERLWGDDDEEEDEEEEDNKTEETGPGMDEEDSELVAKDDNLDSGNSNKDKSQQDKKEEKEEAEADDGGQGEDKINEQIDERDYDENEVDPYHGNQEKVPEPEALDLPDDLNLDSEDKNGGEDTDNEEGEEENPLEIKEKPEEAGHEAEERGETETDQNESQSPQEPEEGPSEDDKAEGEEEMDTGADDQDGDAAQHPEEHSEEQQQSVEEKDKEADEEGGENGPADQGFQPQEEEEREDSDTEEQVPEALERKEHASCGQTGVENMQNTQAMELAGAAPEKEQGKEEHGSGAADANQAEGHESNFIAQLASQKHTRKNTQSFKRKPGQADNERSMGDHNERVHKRLRTVDTDSHAEQGPAQQPQAQVEDADAFEHIKQGSDAYDAQTYDVASKEQQQSAKDSGKDQEEEEIEDTLMDTEEQEEFKAADVEQLKPEEIKSGTTAPLGFDEMEVEIQTVKTEEDQDPRTDKAHKETENEKPERSRESTIHTAHQFLMDTIFQPFLKDVNELRQELERQLEMWQPRESGNPEEEKVAAEMWQSYLILTAPLSQRLCEELRLILEPTQAAKLKGDYRTGKRLNIRKVIPYIASQFRKDKIWLRRTKPSKRQYQICLAIDDSSSMVDNHTKQLAFESLAVIGNALTLLEVGQIAVCSFGESVKLLHPFHEQFSDYSGSQILRLCKFQQKKTKIAQFLESVANMFAAAQQLSQNISSETAQLLLVVSDGRGLFLEGKERVLAAVQAARNANIFVIFVVLDNPSSRDSILDIKVPIFKGPGEMPEIRSYMEEFPFPYYIILRDVNALPETLSDALRQWFELVTASDHP

SEQ ID NO: 8779 - protein, 455 aa, Homo sapiens
MPQLNGGGGDDLGANDELISFKDEGEQEEKSSENSSAERDLADVKSSLVNESETNQNSSSDSEAERRPPPRSESFRDKSRESLEEAAKRQDGGLFKGPPYPGYPFIMIPDLTSPYLPNGSLSPTARTYLQMKWPLLDVQAGSLQSRQALKDARSPSPAHIVSNKVPVVQHPHHVHPLTPLITYSNEHFTPGNPPPHLPADVDPKTGIPRPPHPPDISPYYPLSPGTVGQIPHPLGWQGQPVYPITTGGFRHPYPTALTVNASMSRFPPHMVPPHHTLHTTGIPHPAIVTPTVKQESSQSDVGSLHSSKHQDSKKEEEKKKPHIKKPLNAFMLYMKEMRAKVVAECTLKESAAINQILGRRWHALSREEQAKYYELARKERQLHMQLYPGWSARDNYGKKKKRKRDKQPGETNEHSECFLNPCLSLPPITDLSAPKKCRARFGLDQQNNWCGPCSL

SEQ ID NO: 8780 - protein, 596 aa, Homo sapiens
MPQLNGGGGDDLGANDELISFKDEGEQEEKSSENSSAERDLADVKSSLVNESETNQNSSSDSEAERRPPPRSESFRDKSRESLEEAAKRQDGGLFKGPPYPGYPFIMIPDLTSPYLPNGSLSPTARTYLQMKWPLLDVQAGSLQSRQALKDARSPSPAHIVSNKVPVVQHPHHVHPLTPLITYSNEHFTPGNPPPHLPADVDPKTGIPRPPHPPDISPYYPLSPGTVGQIPHPLGWLVPQQGQPVYPITTGGFRHPYPTALTVNASMSRFPPHMVPPHHTLHTTGIPHPAIVTPTVKQESSQSDVGSLHSSKHQDSKKEEEKKKPHIKKPLNAFMLYMKEMRAKVVAECTLKESAAINQILGRRWHALSREEQAKYYELARKERQLHMQLYPGWSARDNYGKKKKRKRDKQPGETNEHSECFLNPCLSLPPITDLSAPKKCRARFGLDQQNNWCGPCRRKKKCVRYIQGEGSCLSPPSSDGSLLDSPPPSPNLLGSPPRDAKSQTEQTQPLSLSLKPDPLAHLSMMPPPPALLLAEATHKASALCPNGALDLPPAALQPAAPSSSIAQPSTSSLHSHSSLAGTQPQPLSLVTKSLE

SEQ ID NO: 8781 - protein, 790 aa, Homo sapiens
MRSVQIFLSQCRLLLLLVPTMLLKSLGEDVIFHPEGEFDSYEVTIPEKLSFRGEVQGVVSPVSYLLQLKGKKHVLHLWPKRLLLPRHLRVFSFTEHGELLEDHPYIPKDCNYMGSVKESLDSKATISTCMGGLRGVFNIDAKHYQIEPLKASPSFEHVVYLLKKEQFGNQVCGLSDDEIEWQMAPYENKARLRDFPGSYKHPKYLELILLFDQSRYRFVNNNLSQVIHDAILLTGIMDTYFQDVRMRIHLKALEVWTDFNKIRVGYPELAEVLGRFVIYKKSVLNARLSSDWAHLYLQRKYNDALAWSFGKVCSLEYAGSVSTLLDTNILAPATWSAHELGHAVGMSHDEQYCQCRGRLNCIMGSGRTGFSNCSYISFFKHISSGATCLNNIPGLGYVLKRCGNKIVEDNEECDCGSTEECQKDRCCQSNCKLQPGANCSIGLCCHDCRFRPSGYVCRQEGNECDLAEYCDGNSSSCPNDVYKQDGTPCKYEGRCFRKGCRSRYMQCQSIFGPDAMEAPSECYDAVNLIGDQFGNCEITGIRNFKKCESANSICGRLQCINVETIPDLPEHTTIISTHLQAENLMCWGTGYHLSMKPMGIPDLGMINDGTSCGEGRVCFKKNCVNSSVLQFDCLPEKCNTRGVCNNRKNCHCMYGWAPPFCEEVGYGGSIDSGPPGLLRGAIPSSIWVVSIIMFRLILLILSVVFVFFRQVIGNHLKPKQEKMPLSKAKTEQEESKTKTVQEESKTKTGQEESEAKTGQEESKAKTGQEESKANIESKRPKAKSVKKQKK

SEQ ID NO: 8782 - protein, 532 aa, Homo sapiens
MAFANLRKVLISDSLDPCCRKILQDGGLQVVEKQNLSKEELIAELQDCEGLIVRSATKVTADVINAAEKLQVVGRAGTGVDNVDLEAATRKGILVMNTPNGNSLSAAELTCGMIMCLARQIPQATASMKDGKWERKKFMGTELNGKTLGILGLGRIGREVATRMQSFGMKTIGYDPIISPEVSASFGVQQLPLEEIWPLCDFITVHTPLLPSTTGLLNDNTFAQCKKGVRVVNCARGGIVDEGALLRALQSGQCAGAALDVFTEEPPRDRALVDHENVISCPHLGASTKEAQSRCGEEIAVQFVDMVKGKSLTGVVNAQALTSAFSPHTKPWIGLAEALGTLMRAWAGSPKGTIQVITQGTSLKNAGNCLSPAVIVGLLKEASKQADVNLVNAKLLVKEAGLNVTTSHSPAAPGEQGFGECLLAVALAGAPYQAVGLVQGTTPVLQGLNGAVFRPEVPLRRDLPLLLFRTQTSDPAMLPTMIGVSSISRPPGRGRRAAAVLPDFTGVRWGDLARHGHLLLAAQPGSVEAACD

SEQ ID NO: 8783 - protein, 710 aa, Homo sapiens
MDESALTLGTIDVSYLPHSSEYSVGRCKHTSEEWGECGFRPTIFRSATLKWKESLMSRKRPFVGRCCYSCTPQSWDKFFNPSIPSLGLRNVIYINETHTRHRGWLARRLSYVLFIQERDVHKGMFATNVTENVLNSSRVQEAIAEVAAELNPDGSAQQQSKAVNKVKKKAKRILQEMVATVSPAMIRLTGWVLLKLFNSFFWNIQIHKGQLEMVKAATETNLPLLFLPVHRSHIDYLLLTFILFCHNIKAPYIASGNNLNIPIFSTLIHKLGGFFIRRRLDETPDGRKDVLYRALLHGHIVELLRQQQFLEIFLEGTRSRSGKTSCARAGLLSVVVDTLSTNVIPDILIIPVGISYDRIIEGHYNGEQLGKPKKNESLWSVARGVIRMLRKNYGCVRVDFAQPFSLKEYLESQSQKPVSALLSLEQALLPAILPSRPSDAADEGRDTSINESRNATDESLRRRLIANLAEHILFTASKSCAIMSTHIVACLLLYRHRQGIDLSTLVEDFFVMKEEVLARDFDLGFSGNSEDVVMHAIQLLGNCVTITHTSRNDEFFITPSTTVPSVFELNFYSNGVLHVFIMEAIIACSLYAVLNKRGLGGPTSTPPNLISQEQLVRKAASLCYLLSNEGTISLPCQTFYQVCHETVGKFIQYGILTVAEHDDQEDISPSLAEQQWDKKLPEPLSWRSDEEDEDSDFGEEQRDCYLKVLG

SEQ ID NO: 8784 - protein, 602 aa, Homo sapiens
MSERRRSAVALSSRAHAFSVEALIGSNKKRKLRDWEEKGLDLSMEALSPAGPLGDTEDAAAHGLEPHPDSEQSTGSDSEVLTERTSCSFSTHTDLASGAAGPVPAAMSSMEEIQVELQCADLWKRFHDIGTEMIITKAGRRMFPAMRVKITGLDPHQQYYIAMDIVPVDNKRYRYVYHSSKWMVAGNADSPVPPRVYIHPDSLASGDTWMRQVVSFDKLKLTNNELDDQGHIILHSMHKYQPRVHVIRKDFSSDLSPTKPVPVGDGVKTFNFPETVFTTVTAYQNQQITRLKIDRNPFAKGFRDSGRNRTGLEAIMETYAFWRPPVRTLTFEDFTTMQKQQGGSTGTSPTTSSTGTPSPSASSHLLSPSCSPPTFHLAPNTFNVGCRESQLCNLNLSDYPPCARSNMAALQSYPGLSDSGYNRLQSGTTSATQPSETFMPQRTPSLISGIPTPPSLPGNSKMEAYGGQLGSFPTSQFQYVMQAGNAASSSSSPHMFGGSHMQQSSYNAFSLHNPYNLYGYNFPTSPRLAASPEKLSASQSTLLCSSPSNGAFGERQYLPSGMEHSMHMISPSPNNQQATNTCDGRQYGAVPGSSSQMSVHMV

SEQ ID NO: 8785 - protein, 376 aa, Homo sapiens
MWYHRLSHLHSRLQDLLKGGVIYPALPQPNFKSLLPLAVHWHHTASKSLTCAWQQHEDHFELKYANTVMRFDYVWLRDHCRSASCYNSKTHQRSLDTASVDLCIKPKTIRLDETTLFFTWPDGHVTKYDLNWLVKNSYEGQKQKVIQPRILWNAEIYQQAQVPSVDCQSFLETNEGLKKFLQNFLLYGIAFVENVPPTQEHTEKLAERISLIRETIYGRMWYFTSDFSRGDTAYTKLALDRHTDTTYFQEPCGIQVFHCLKHEGTGGRTLLVDGFYAAEQVLQKAPEEFELLSKVPLKHEYIEDVGECHNHMIGIGPVLNIYPWNKELYLIRLFKEKQNTVNRQWNSSLQCDIPERILTYRHFVSGTSIEHRGSLI

SEQ ID NO: 8786 - protein, 496 aa, Homo sapiens
MDPLGAPSQFVDVDTLPSWGDSCQDELNSSDTTAEIFQEDTVRSPFLYNKDVNGKVVLWKGDVALLNCTAIVNTSNESLTDKNPVSESIFMLAGPDLKEDLQKLKGCRTGEAKLTKGFNLAARFIIHTVGPKYKSRYRTAAESSLYSCYRNVLQLAKEQSMSSVGFCVINSAKRGYPLEDATHIALRTVRRFLEIHGETIEKVVFAVSDLEEGTYQKLLPLYFPRSLKEENRSLPYLPADIGNAEGEPVVPERQIRISEKPGAPEDNQEEEDEGLGVDLSFIGSHAFARMEGDIDKQRKLILQGQLSEAALQKQHQRNYNRWLCQARSEDLSDIASLKALYQTGVDNCGRTVMVVVGRNIPVTLIDMDKALLYFIHVMDHIAVKEYVLVYFHTLTSEYNHLDSDFLKKLYDVVDVKYKRNLKAVYFVHPTFRSKVSTWFFTTFSVSGLKDKIHHVDSLHQLFSAISPEQIDFPPFVLEYDARVRSTRSSPSPGMVY

SEQ ID NO: 8787 - protein, 497 aa, Homo sapiens
MDPLGAPSQFVDVDTLPSWGDSCQDELNSSDTTAEIFQEDTVRSPFLYNKDVNGKVVLWKGDVALLNCTAIVNTSNESLTDKNPVSESIFMLAGPDLKEDLQKLKGCRTGEAKLTKGFNLAARFIIHTVGPKYKSRYRTAAESSLYSCYRNVLQLAKEQSMSSVGFCVINSAKRGYPLEDATHIALRTVRRFLEIHGETIEKVVFAVSDLEEGTYQKLLPLYFPRSLKEENRSLPYLPADIGNAEGEPVVPERQIRISEKPGAPEDNQEEEDEGLGVDLSFIGSHAFARMEGDIDKQRKLILQGQLSEAALQKQHQRNYNRWLCQARSEDLSDIASLKALYQTGVDNCGRTVMVVVGRNIPVTLIDMDKALLYFIHVMDHIAVKEYVLVYFHTLTSEYNHLDSDFLKKLYDVVDVKYKRNLKAVYFVHPTFRSKVSTWFFTTFSVSGLKDKIHHVDSLHQLFSAISPEQIDFPPFVLEYDARENGPYYTSYPPSPDL

SEQ ID NO: 8788 - protein, 391 aa, Homo sapiens
MAEESSCTRDCMSFSVLNWDQVSRLHEVLTEVVPIHGRGNFPTLEITLKDIVQTVRSRLEEAGIKVHDVRLNGSAAGHVLVKDNGLGCKDLDLIFHVALPTEAEFQLVRDVVLCSLLNFLPEGVNKLKISPVTLKEAYVQKLVKVCTDTDRWSLISLSNKNGKNVELKFVDSIRRQFEFSVDSFQIILDSLLFFYDCSNNPISEHFHPTVIGESMYGDFEEAFDHLQNRLIATKNPEEIRGGGLLKYSNLLVRDFRPTDQEEIKTLERYMCSRFFIDFPDILEQQRKLETYLQNHFAEEERSKYDYLMILRRVVNESTVCLMGHERRQTLNLISLLALRVLAEQNIIPSATNVTCYYQPAPYVSDGNFSNYYVAHPPVTYSQPYPTWLPCN

SEQ ID NO: 8789 - protein, 392 aa, Homo sapiens
MRPGFGGPAIPVGVDVQVESLDSISEVDMDFTMTLYLRHYWKDERLSFPSTNNLSMTFDGRLVKKIWVPDMFFVHSKRSFIHDTTTDNVMLRVQPDGKVLYSLRVTVTAMCNMDFSRFPLDTQTCSLEIESYAYTEDDLMLYWKKGNDSLKTDERISLSQFLIQEFHTTTKLAFYSSTGWYNRLYINFTLRRHIFFFLLQTYFPATLMVMLSWVSFWIDRRAVPARVPLGITTVLTMSTIITGVNASMPRVSYIKAVDIYLWVSFVFVFLSVLEYAAVNYLTTVQERKEQKLREKLPCTSGLPPPRTAMLDGNYSDGEVNDLDNYMPENGEKPDRMMVQLTLASERSSPQRKSQRSSYVSMRIDTHAIDKYSRIIFPAAYILFNLIYWSIFS

SEQ ID NO: 8790 - protein, 582 aa, Homo sapiens
MSSSLGKEKDSKEKDPKVPSAKEREKEAKASGGFGKESKEKEPKTKGKDAKDGKKDSSAAQPGVAFSVDNTIKRPNPAPGTRKKSSNAEVIKELNKCREENSMRLDLSKRSIHILPSSIKELTQLTELYLYSNKLQSLPAEVGCLVNLMTLALSENSLTSLPDSLDNLKKLRMLDLRHNKLREIPSVVYRLDSLTTLYLRFNRITTVEKDIKNLSKLSMLSIRENKIKQLPAEIGELCNLITLDVAHNQLEHLPKEIGNCTQITNLDLQHNELLDLPDTIGNLSSLSRLGLRYNRLSAIPRSLAKCSALEELNLENNNISTLPESLLSSLVKLNSLTLARNCFQLYPVGGPSQFSTIYSLNMEHNRINKIPFGIFSRAKVLSKLNMKDNQLTSLPLDFGTWTSMVELNLATNQLTKIPEDVSGLVSLEVLILSNNLLKKLPHGLGNLRKLRELDLEENKLESLPNEIAYLKDLQKLVLTNNQLTTLPRGIGHLTNLTHLGLGENLLTHLPEEIGTLENLEELYLNDNPNLHSLPFELALCSKLSIMSIENCPLSHLPPQIVAGGPSFIIQFLKMQGPYRAMV

SEQ ID NO: 8791 - protein, 523 aa, Homo sapiens
MLSGVTLEGGGARSGEGRRSRTELKPRSLQSQIGILCPVCDAQVDLPMGGVKALTIDHLAVNDVMLESLRGEGQGLVCDLCNDREVEKRCQTCKANLCHFCCQAHRRQKKTTYHTMVDLKDLKGYSRIGKPILCPVHPAEELRLFCEFCDRPVCQDCVVGEHREHPCDFTSNVIHKHGDSVWELLKGTQPHVEALEEALAQIHIINSALQKRVEAVAADVRTFSEGYIKAIEEHRDKLLKQLEDIRAQKENSLQLQKAQLEQLLADMRTGVEFTEHLLTSGSDLEILITKRVVVERLRKLNKVQYSTRPGVNDKIRFCPQEKAGQCRGYEIYGTINTKEVDPAKCVLQGEDLHRAREKQTASFTLLCKDAAGEIMGRGGDNVQVAVVPKDKKDSPVRTMVQDNKDGTYYISYTPKEPGVYTVWVCIKEQHVQGSPFTVMVRRKHRPHSGVFHCCTFCSSGGQKTARCACGGTMPGGYLGCGHGHKGHPGHPHWSCCGKFNEKSECTWTGGQSAPRSLLRTVAL

SEQ ID NO: 8792 - protein, 562 aa, Homo sapiens
MSENRKPLLGFVSKLTSGTALGNSGKTHCPLCLGLFKAPRLLPCLHTVCTTCLEQLEPFSVVDIRGGDSDTSSEGSIFQELKPRSLQSQIGILCPVCDAQVDLPMGGVKALTIDHLAVNDVMLESLRGEGQGLVCDLCNDREVEKRCQTCKANLCHFCCQAHRRQKKTTYHTMVDLKDLKGYSRIGKPILCPVHPAEELRLFCEFCDRPVCQDCVVGEHREHPCDFTSNVIHKHGDSVWELLKGTQPHVEALEEALAQIHIINSALQKRVEAVAADVRTFSEGYIKAIEEHRDKLLKQLEDIRAQKENSLQLQKAQLEQLLADMRTGVEFTEHLLTSGSDLEILITKRVVVERLRKLNKVQYSTRPGVNDKIRFCPQEKAGQCRGYEIYDLHRAREKQTASFTLLCKDAAGEIMGRGGDNVQVAVVPKDKKDSPVRTMVQDNKDGTYYISYTPKEPGVYTVWVCIKEQHVQGSPFTVMVRRKHRPHSGVFHCCTFCSSGGQKTARCACGGTMPGGYLGCGHGHKGHPGHPHWSCCGKFNEKSECTWTGGQSAPRSLLRTVAL

SEQ ID NO: 8793 - protein, 1162 aa, Homo sapiens
MEEVRCPEHGTFCFLKTGVRDGPNKGKSFYVCRADTCSFVRATDIPVSHCLLHEDFVVELQGLLLPQDKKEYRLFFRCIRSKAEGKRWCGSIPWQDPDSKEHSVSNKSQHASETFHHSSNWLRNPFKVLDKNQEPALWKQLIKGEGEEKKADKKQREKGDQLFDQKKEQKPEMMEKDLSSGLVPKKKQSVVQEKKQEEGAEIQCEAETGGTHKRDFSEIKSQQCQGNELTRPSASSQEKSSGKSQDVQRESEPLREKVTQLLPQNVHSHNSISKPQKGGPLNKEYTNWEAKETKAKDGPSIQATQKSLPQGHFQERPETHSVPAPGGPAAQAAPAAPGLSLGEGREAATSSDDEEEDDVVFVSSKPGSPLLFDSTLDLETKENLQFPDRSVQRKVSPASGVSKKVEPSDPVARRVYLTTQLKQKKSTLASVNIQALPDKGQKLIKQIQELEEVLSGLTLSPEQGTNEKSNSQVPQQSHFTKTTTGPPHLVPPQPLPRRGTQPVGSLELKSACQVTAGGSSQCYRGHTNQDHVHAVWKITSEAIGQLHRSLESCPGETVVAEDPAGLKVPLLLHQKQALAWLLWRESQKPQGGILADDMGLGKTLTMIALILTQKNQEKKEEKEKSTALTWLSKDDSCDFTSHGTLIICPASLIHHWKNEVEKRVNSNKLRVYLYHGPNRDSRARVLSTYDIVITTYSLVAKEIPTNKQEAEIPGANLNVEGTSTPLLRIAWARIILDEAHNVKNPRVQTSIAVCKLQACARWAVTGTPIQNNLLDMYSLLKFLRCSPFDEFNLWRSQVDNGSKKGGERLSILTKSLLLRRTKDQLDSTGRPLVILPQRKFQLHHLKLSEDEETVYNVFFARSRSALQSYLKRHESRGNQSGRSPNNPFSRVALEFGSEEPRHSEAADSPRSSTVHILSQLLRLRQCCCHLSLLKSALDPMELKGEGLVLSLEEQLSALTLSELRDSEPSSTVSLNGTFFKMELFEGMRESTKISSLLAELEAIQRNSASQKSVIVSQWTNMLKVVALHLKKHGLTYATIDGSVNPKQRMDLVEAFNHSRGPQVMLISLLAGGVGLNLTGGNHLFLLDMHWNPSLEDQACDRIYRVGQQKDVVIHRFVCEGTVEEKILQLQEKKKDLAKQVLSGSGESVTKLTLADLRVLFGI

SEQ ID NO: 8794 - protein, 574 aa, Homo sapiens
MAHNKIPPRWLNCPRRGQPVAGRFLPLKTMLGPRYDSQVAEENRFHPSMLSNYLKSLKVKMGLLVDLTNTSRFYDRNDIEKEGIKYIKLQCKGHGECPTTENTETFIRLCERFNERNPPELIGVHCTHGFNRTGFLICAFLVEKMDWSIEAAVATFAQARPPGIYKGDYLKELFRRYGDIEEAPPPPLLPDWCFEDDEDEDEDEDGKKESEPGSSASFGKRRKERLKLGAIFLEGVTVKGVTQVTTQPKLGEVQQKCHQFCGWEGSGFPGAQPVSMDKQNIKLLDLKPYKVSWKADGTRYMMLIDGTNEVFMIDRDNSVFHVSNLEFPFRKDLRMHLSNTLLDGEMIIDRVNGQAVPRYLIYDIIKFNSQPVGDCDFNVRLQCIEREIISPRHEKMKTGLIDKTQEPFSVRNKPFFDICTSRKKYKPGRCDDILKWKPPSLNSVDFRLKITRMGGEGLLPQNVGLLYVGGYERPFAQIKVTKELKQYDNKIIECKFENNSWVFMRQRTDKSFPNAYNTAMAVCNSISNPVTKEMLFEFIDRCTAASQGQKRKHHLDPDTELMPPPPPKRPRPLT

SEQ ID NO: 8795 - protein, 351 aa, Homo sapiens
MSFPCKFVASFLLIFNVSSKGAVSKEITNALETWGALGQDINLDIPSFQMSDDIDDIKWEKTSDKKKIAQFRKEKETFKEKDTYKLFKNGTLKIKHLKTDDQDIYKVSIYDTKGKNVLEKIFDLKIQERVSKPKISWTCINTTLTCEVMNGTDPELNLYQDGKHLKLSQRVITHKWTTSLSAKFKCTAGNKVSKESSVEPVSCPEKGLDIYLIIGICGGGSLLMVFVALLVFYITKRKKQRSRRNDEELETRAHRVATEERGRKPHQIPASTPQNPATSQHPPPPPGHRSQAPSHRPPPPGHRVQHQPQKRPPAPSGTQVHQQKGPPLPRPRVQPKPPHGAAENSLSPSSN

SEQ ID NO: 8796 - protein, 597 aa, Homo sapiens
MAHNKIPPRWLNCPRRGQPVAGRFLPLKTMLGPRYDSQVAEENRFHPSMLSNYLKSLKVKMGLLVDLTNTSRFYDRNDIEKEGIKYIKLQCKGHGECPTTENTETFIRLCERFNERNPPELIGVHCTHGFNRTGFLICAFLVEKMDWSIEAAVATFAQARPPGIYKGDYLKELFRRYGDIEEAPPPPLLPDWCFEDDEDEDEDEDGKKESEPGSSASFGKRRKERLKLGAIFLEGVTVKGVTQVTTQPKLGEVQQKCHQFCGWEGSGFPGAQPVSMDKQNIKLLDLKPYKVSWKADGTRYMMLIDGTNEVFMIDRDNSVFHVSNLEFPFRKDLRMHLSNTLLDGEMIIDRVNGQAVPRYLIYDIIKFNSQPVGDCDFNVRLQCIEREIISPRHEKMKTGLIDKTQEPFSVRNKPFFDICTSRKLLEGNFAKEVSHEMDGLIFQPTGKYKPGRCDDILKWKPPSLNSVDFRLKITRMGGEGLLPQNVGLLYVGGYERPFAQIKVTKELKQYDNKIIECKFENNSWVFMRQRTDKSFPNAYNTAMAVCNSISNPVTKEMLFEFIDRCTAASQGQKRKHHLDPDTELMPPPPPKRPRPLT

SEQ ID NO: 8797 - protein, 240 aa, Homo sapiens
MVAGSDAGRALGVLSVVCLLHCFGFISCFSQQIYGVVYGNVTFHVPSNVPLKEVLWKKQKDKVAELENSEFRAFSSFKNRVYLDTVSGSLTIYNLTSSDEDEYEMESPNITDTMKFFLYVLESLPSPTLTCALTNGSIEVQCMIPEHYNSHRGLIMYSWDCPMEQCKRNSTSIYFKMENDLPQKIQCTLSNPLFNTTSSIILTTCIPSSGHSRHRYALIPIPLAVITTCIVLYMNGMYAF

SEQ ID NO: 8798 - protein, 250 aa, Homo sapiens
MVAGSDAGRALGVLSVVCLLHCFGFISCFSQQIYGVVYGNVTFHVPSNVPLKEVLWKKQKDKVAELENSEFRAFSSFKNRVYLDTVSGSLTIYNLTSSDEDEYEMESPNITDTMKFFLYVLESLPSPTLTCALTNGSIEVQCMIPEHYNSHRGLIMYSWDCPMEQCKRNSTSIYFKMENDLPQKIQCTLSNPLFNTTSSIILTTCIPSSGHSRHRYALIPIPLAVITTCIVLYMNGILKCDRKPDRTNSN

SEQ ID NO: 8799 - protein, 992 aa, Homo sapiens
MDELKKEVSMDDHKLSLDELHRKYGTDLSRGLTSARAAEILARDGPNALTPPPTTPEWIKFCRQLFGGFSMLLWIGAILCFLAYSIQAATEEEPQNDNLYLGVVLSAVVIITGCFSYYQEAKSSKIMESFKNMVPQQALVIRNGEKMSINAEEVVVGDLVEVKGGDRIPADLRIISANGCKVDNSSLTGESEPQTRSPDFTNENPLETRNIAFFSTNCVEGTARGIVVYTGDRTVMGRIATLASGLEGGQTPIAAEIEHFIHIITGVAVFLGVSFFILSLILEYTWLEAVIFLIGIIVANVPEGLLATVTVCLTLTAKRMARKNCLVKNLEAVETLGSTSTICSDKTGTLTQNRMTVAHMWFDNQIHEADTTENQSGVSFDKTSATWLALSRIAGLCNRAVFQANQENLPILKRAVAGDASESALLKCIELCCGSVKEMRERYAKIVEIPFNSTNKYQLSIHKNPNTSEPQHLLVMKGAPERILDRCSSILLHGKEQPLDEELKDAFQNAYLELGGLGERVLGFCHLFLPDEQFPEGFQFDTDDVNFPIDNLCFVGLISMIDPPRAAVPDAVGKCRSAGIKVIMVTGDHPITAKAIAKGVGIISEGNETVEDIAARLNIPVSQVNPRDAKACVVHGSDLKDMTSEQLDDILKYHTEIVFARTSPQQKLIIVEGCQRQGAIVAVTGDGVNDSPALKKADIGVAMGIAGSDVSKQAADMILLDDNFASIVTGVEEGRLIFDNLKKSIAYTLTSNIPEITPFLIFIIANIPLPLGTVTILCIDLGTDMVPAISLAYEQAESDIMKRQPRNPKTDKLVNERLISMAYGQIGMIQALGGFFTYFVILAENGFLPIHLLGLRVDWDDRWINDVEDSYGQQWTYEQRKIVEFTCHTAFFVSIVVVQWADLVICKTRRNSVFQQGMKNKILIFGLFEETALAAFLSYCPGMGVALRMYPLKPTWWFCAFPYSLLIFVYDEVRKLIIRRRPGGWVEKETYY

SEQ ID NO: 8800 - protein, 472 aa, Homo sapiens
MKSILDGLADTTFRTITTDLLYVGSNDIQYEDIKGDMASKLGYFPQKFPLTSFRGSPFQEKMTAGDNPQLVPADQVNITEFYNKSLSSFKENEENIQCGENFMDIECFMVLNPSQQLAIAVLSLTLGTFTVLENLLVLCVILHSRSLRCRPSYHFIGSLAVADLLGSVIFVYSFIDFHVFHRKDSRNVFLFKLGGVTASFTASVGSLFLTAIDRYISIHRPLAYKRIVTRPKAVVAFCLMWTIAIVIAVLPLLGWNCEKLQSVCSDIFPHIDETYLMFWIGVTSVLLLFIVYAYMYILWKAHSHAVRMIQRGTQKSIIIHTSEDGKVQVTRPDQARMDIRLAKTLVLILVVLIICWGPLLAIMVYDVFGKMNKLIKTVFAFCSMLCLLNSTVNPIIYALRSKDLRHAFRSMFPSCEGTAQPLDNSMGDSDCLHKHANNAASVHRAAESCIKSTVKIAKVTMSVSTDTSAEAL

SEQ ID NO: 8801 - protein, 547 aa, Homo sapiens
MEVEEAFQAVGEMGIYQMYLCFLLAVLLQLYVATEAILIALVGATPSYHWDLAELLPNQSHGNQSAGEDQAFGDWLLTANGSEIHKHVHFSSSFTSIASEWFLIANRSYKVSAASSFFFSGVFVGVISFGQLSDRFGRKKVYLTGFALDILFAIANGFSPSYEFFAVTRFLVGMMNGGMSLVAFVLLNECVGTAYWALAGSIGGLFFAVGIAQYALLGYFIRSWRTLAILVNLQGTVVFLLSLFIPESPRWLYSQGRLSEAEEALYLIAKRNRKLKCTFSLTHPANRSCRETGSFLDLFRYRVLLGHTLILMFIWFVCSLVYYGLTLSAGDLGGSIYANLALSGLIEIPSYPLCIYLINQKWFGRKRTLSAFLCLGGLACLIVMFLPEKKDTGVFAVVNSHSLSLLGKLTISAAFNIVYIYTSELYPTVIRNVGLGTCSMFSRVGGIIAPFIPSLKYVQWSLPFIVFGATGLTSGLLSLLLPETLNSPLLETFSDLQVYSYRRLGEEALSLQALDPQQCVDKESSLGSESEEEEEFYDADEETQMIK

SEQ ID NO: 8802 - protein, 976 aa, Homo sapiens
MEKQKPFALFVPPRSSSSQVSAVKPQTLGGDSTFFKSFNKCTEDDFEFPFAKTNLSKNGENIDSDPALQKVNFLPVLEQVGNSDCHYQEGLKDSDLENSEGLSRVYSKLYKEAEKIKKWKVSTEAELRQKESKLQENRKIIEAQRKAIQELQFGNEKVSLKLEEGIQENKDLIKENNATRHLCNLLKETCARSAEKTKKYEYEREETRQVYMDLNNNIEKMITAFEELRVQAENSRLEMHFKLKEDYEKIQHLEQEYKKEINDKEKQVSLLLIQITEKENKMKDLTFLLEESRDKVNQLEEKTKLQSENLKQSIEKQHHLTKELEDIKVSLQRSVSTQKALEEDLQIATKTICQLTEEKETQMEESNKARAAHSFVVTEFETTVCSLEELLRTEQQRLEKNEDQLKILTMELQKKSSELEEMTKLTNNKEVELEELKKVLGEKETLLYENKQFEKIAEELKGTEQELIGLLQAREKEVHDLEIQLTAITTSEQYYSKEVKDLKTELENEKLKNTELTSHCNKLSLENKELTQETSDMTLELKNQQEDINNNKKQEERMLKQIENLQETETQLRNELEYVREELKQKRDEVKCKLDKSEENCNNLRKQVENKNKYIEELQQENKALKKKGTAESKQLNVYEIKVNKLELELESAKQKFGEITDTYQKEIEDKKISEENLLEEVEKAKVIADEAVKLQKEIDKRCQHKIAEMVALMEKHKHQYDKIIEERDSELGLYKSKEQEQSSLRASLEIELSNLKAELLSVKKQLEIEREEKEKLKREAKENTATLKEKKDKKTQTFLLETPEIYWKLDSKAVPSQTVSRNFTSVDHGISKDKRDYLWTSAKNTLSTPLPKAYTVKTPTKPKLQQRENLNIPIEESKKKRKMAFEFDINSDSSETTDLLSMVSEEETLKTLYRNNNPPASHLCVKTPKKAPSSLTTPGSTLKFGAIRKMREDRWAVIAKMDRKKKLKEAEKLFV

SEQ ID NO: 8803 - protein, 1227 aa, Homo sapiens
MVLAAAMSQDADPSGPEQPDRVACSVPGARASPAPSGPRGMQQPPPPPQPPPPPQAGLPQIIQNAAKLLDKNPFSVSNPNPLLPSPASLQLAQLQAQLTLHRLKLAQTAVTNNTAAATVLNQVLSKVAMSQPLFNQLRHPSVITGPHGHAGVPQHAAAIPSTRFPSNAIAFSPPSQTRGPGPSMNLPNQPPSAMVMHPFTGVMPQTPGQPAVILGIGKTGPAPATAGFYEYGKASSGQTYGPETDGQPGFLPSSASTSGSVTYEGHYSHTGQDGQAAFSKDFYGPNSQGSHVASGFPAEQAGGLKSEVGPLLQGTNSQWESPHGFSGQSKPDLTAGPMWPPPHNQPYELYDPEEPTSDRTPPSFGGRLNNSKQGFIGAGRRAKEDQALLSVRPLQAHELNDFHGVAPLHLPHICSICDKKVFDLKDWELHVKGKLHAQKCLVFSENAGIRCILGSAEGTLCASPNSTAVYNPAGNEDYASNLGTSYVPIPARSFTQSSPTFPLASVGTTFAQRKGAGRVVHICNLPEGSCTENDVINLGLPFGKVTNYILMKSTNQAFLEMAYTEAAQAMVQYYQEKSAVINGEKLLIRMSKRYKELQLKKPGKAVAAIIQDIHSQRERDMFREADRYGPERPRSRSPVSRSLSPRSHTPSFTSCSSSHSPPGPSRADWGNGRDSWEHSPYARREEERDPAPWRDNGDDKRDRMDPWAHDRKHHPRQLDKAELDERPEGGRPHREKYPRSGSPNLPHSVSSYKSREDGYYRKEPKAKSDKYLKQQQDAPGRSRRKDEARLRESRHPHPDDSGKEDGLGPKVTRAPEGAKAKQNEKNKTKRTDRDQEGADDRKENTMAENEAGKEEQEGMEESPQSVGRQEKEAEFSDPENTRTKKEQDWESESEAEGESWYPTNMEELVTVDEVGEEEDFIVEPDIPELEEIVPIDQKDKICPETCLCVTTTLDLDLAQDFPKEGVKAVGNGAAEISLKSPRELPSASTSCPSDMDVEMPGLNLDAERKPAESETGLSLEDSDCYEKEAKGVESSDVHPAPTVQQMSSPKPAEERARQPSPFVDDCKTRGTPEDGACEGSPLEEKASPPIETDLQNQACQEVLTPENSRYVEMKSLEVRSPEYTEVELKQPLSLPSWEPEDVFSELSIPLGVEFVVPRTGFYCKLCGLFYTSEETAKMSHCRSAVHYRNLQKYLSQLAEEGLKETEGADSPRPEDSGIVPRFERKKL

SEQ ID NO: 8804 - protein, 813 aa, Homo sapiens
MENVFTVSSDPHPSPAAPPSLSLPLSSSSTSSGTKKQKRTPTYQRSMSFDPNLLHNNGHNGYPNGTSAALRETGVIEKLLTSYGFIQCSERQARLFFHCSQYNGNLQDLKVGDDVEFEVSSDRRTGKPIAVKLVKIKQEILPEERMNGQEVFYLTYTPEDVEGNVQLETGDKINFVIDNNKHTGAVSARNIMLLKKKQARCQGVVCAMKEAFGFIERGDVVKEIFFHYSEFKGDLETLQPGDDVEFTIKDRNGKEVATDVRLLPQGTVIFEDISIEHFEGTVTKVIPKVPSKNQNDPLPGRIKVDFVIPKELPFGDKDTKSKVTLLEGDHVRFNISTDRRDKLERATNIEVLSNTFQFTNEAREMGVIAAMRDGFGFIKCVDRDVRMFFHFSEILDGNQLHIADEVEFTVVPDMLSAQRNHAIRIKKLPKGTVSFHSHSDHRFLGTVEKEATFSNPKTTSPNKGKEKEAEDGIIAYDDCGVKLTIAFQAKDVEGSTSPQIGDKVEFSISDKQRPGQQVATCVRLLGRNSNSKRLLGYVATLKDNFGFIETANHDKEIFFHYSEFSGDVDSLELGDMVEYSLSKGKGNKVSAEKVNKTHSVNGITEEADPTIYSGKVIRPLRSVDPTQTEYQGMIEIVEEGDMKGEVYPFGIVGMANKGDCLQKGESVKFQLCVLGQNAQTMAYNITPLRRATVECVKDQFGFINYEVGDSKKLFFHVKEVQDGIELQAGDEVEFSVILNQRTGKCSACNVWRVCEGPKAVAAPRPDRLVNRLKNITLDDASAPRLMVLRQPRGPDNSMGFGAERKIRQAGVID

SEQ ID NO: 8805 - protein, 189 aa, Homo sapiens
MTEYKLVVVGAGGVGKSALTIQLIQNHFVDEYDPTIEDSYRKQVVIDGETCLLDILDTAGQEEYSAMRDQYMRTGEGFLCVFAINNSKSFADINLYREQIKRVKDSDDVPMVLVGNKCDLPTRTVDTKQAHELAKSYGIPFIETSAKTRQGVEDAFYTLVREIRQYRMKKLNSSDDGTQGCMGLPCVVM

SEQ ID NO: 8806 - protein, 776 aa, Homo sapiens
MNVRIFYSVSQSPHSLLSLLFYCAILESRISATMPLFKLPEIDDAMRNFAEKVFASEVKDEGGRQEISPFDVDEICPISHHEMQAHIFHLETLSTSTEARRKKRFQGRKTVNLSIPLSETSSTKLSHIDEYISSSPTYQTVPDFQRVQITGDYASGVTVEDFEIVCKGLYRALCIREKYMQKSFQRFPKTPSKYLRNIDGEAWVANESFYPVFTPPVKKGEDPFRTDNLPENLGYHLKMKDGVVYVYPNEAAVSKDEPKPLPYPNLDTFLDDMNFLLALIAQGPVKTYTHRRLKFLSSKFQVHQMLNEMDELKELKNNPHRDFYNCRKVDTHIHAAACMNQKHLLRFIKKSYQIDADRVVYSTKEKNLTLKELFAKLKMHPYDLTVDSLDVHAGRQTFQRFDKFNDKYNPVGASELRDLYLKTDNYINGEYFATIIKEVGADLVEAKYQHAEPRLSIYGRSPDEWSKLSSWFVCNRIHCPNMTWMIQVPRIYDVFRSKNFLPHFGKMLENIFMPVFEATINPQADPELSVFLKHITGFDSVDDESKHSGHMFSSKSPKPQEWTLEKNPSYTYYAYYMYANIMVLNSLRKERGMNTFLFRPHCGEAGALTHLMTAFMIADDISHGLNLKKSPVLQYLFFLAQIPIAMSPLSNNSLFLEYAKNPFLDFLQKGLMISLSTDDPMQFHFTKEPLMEEYAIAAQVFKLSTCDMCEVARNSVLQCGISHEEKVKFLGDNYLEEGPAGNDIRRTNVAQIRMAYRYETWCYELNLIAEGLKSTE

SEQ ID NO: 8807 - protein, 1110 aa, Homo sapiens
MAENKGGGEAESGGGGSGSAPVTAGAAGPAAQEAEPPLTAVLVEEEEEEGGRAGAEGGAAGPDDGGVAAASSGSAQAASSPAASVGTGVAGGAVSTPAPAPASAPAPGPSAGPPPGPPASLLDTCAVCQQSLQSRREAEPKLLPCLHSFCLRCLPEPERQLSVPIPGGSNGDIQQVGVIRCPVCRQECRQIDLVDNYFVKDTSEAPSSSDEKSEQVCTSCEDNASAVGFCVECGEWLCKTCIEAHQRVKFTKDHLIRKKEDVSESVGASGQRPVFCPVHKQEQLKLFCETCDRLTCRDCQLLEHKEHRYQFLEEAFQNQKGAIENLLAKLLEKKNYVHFAATQVQNRIKEVNETNKRVEQEIKVAIFTLINEINKKGKSLLQQLENVTKERQMKLLQQQNDITGLSRQVKHVMNFTNWAIASGSSTALLYSKRLITFQLRHILKARCDPVPAANGAIRFHCDPTFWAKNVVNLGNLVIESKPAPGYTPNVVVGQVPPGTNHISKTPGQINLAQLRLQHMQQQVYAQKHQQLQQMRMQQPPAPVPTTTTTTQQHPRQAAPQMLQQQPPRLISVQTMQRGNMNCGAFQAHQMRLAQNAARIPGIPRHSGPQYSMMQPHLQRQHSNPGHAGPFPVVSVHNTTINPTSPTTATMANANRGPTSPSVTAIELIPSVTNPENLPSLPDIPPIQLEDAGSSSLDNLLSRYISGSHLPPQPTSTMNPSPGPSALSPGSSGLSNSHTPVRPPSTSSTGSRGSCGSSGRTAEKTSLSFKSDQVKVKQEPGTEDEICSFSGGVKQEKTEDGRRSACMLSSPESSLTPPLSTNLHLESELDALASLENHVKIEPADMNESCKQSGLSSLVNGKSPIRSLMHRSARIGGDGNNKDDDPNEDWCAVCQNGGDLLCCEKCPKVFHLTCHVPTLLSFPSGDWICTFCRDIGKPEVEYDCDNLQHSKKGKTAQGLSPVDQRKCERLLLYLYCHELSIEFQEPVPASIPNYYKIIKKPMDLSTVKKKLQKKHSQHYQIPDDFVADVRLIFKNCERFNEADSEVAQAGKAVALYFEDKLTEIYSDRTFAPLPEFEQEEDDGEVTEDSDEDFIQPRRKRLKSDERPVHIK

SEQ ID NO: 8808 - protein, 1165 aa, Homo sapiens
MASQLQVFSPPSVSSSAFCSAKKLKIEPSGWDVSGQSSNDKYYTHSKTLPATQGQANSSHQVANFNIPAYDQGLLLPAPAVEHIVVTAADSSGSAATSTFQSSQTLTHRSNVSLLEPYQKCGLKRKSEEVDSNGSVQIIEEHPPLMLQNRTVVGAAATTTTVTTKSSSSSGEGDYQLVQHEILCSMTNSYEVLEFLGRGTFGQVAKCWKRSTKEIVAIKILKNHPSYARQGQIEVSILSRLSSENADEYNFVRSYECFQHKNHTCLVFEMLEQNLYDFLKQNKFSPLPLKYIRPILQQVATALMKLKSLGLIHADLKPENIMLVDPVRQPYRVKVIDFGSASHVSKAVCSTYLQSRYYRAPEIILGLPFCEAIDMWSLGCVIAELFLGWPLYPGASEYDQIRYISQTQGLPAEYLLSAGTKTTRFFNRDPNLGYPLWRLKTPEEHELETGIKSKEARKYIFNCLDDMAQVNMSTDLEGTDMLAEKADRREYIDLLKKMLTIDADKRITPLKTLNHQFVTMTHLLDFPHSNHVKSCFQNMEICKRRVHMYDTVSQIKSPFTTHVAPNTSTNLTMSFSNQLNTVHNQASVLASSSTAAAATLSLANSDVSLLNYQSALYPSSAAPVPGVAQQGVSLQPGTTQICTQTDPFQQTFIVCPPAFQTGLQATTKHSGFPVRMDNAVPIVPQAPAAQPLQIQSGVLTQQAWPGGTQQILLPSTWQQLPGVALHNSVQPTAMIPEAMGSGQQLADWRNAHSHGNQYSTIMQQPSLLTNHVTLATAQPLNVGVAHVVRQQQSSSLPSKKNKQSAPVSSKSSLDVLPSQVYSLVGSSPLRTTSSYNSLVPVQDQHQPIIIPDTPSPPVSVITIRSDTDEEEDNKYKPSSSGLKPRSNVISYVTVNDSPDSDSSLSSPYSTDTLSALRGNSGSVLEGPGRVVADGTGTRTIIVPPLKTQLGDCTVATQASGLLSNKTKPVASVSGQSSGCCITPTGYRAQRGGTSAAQPLNLSQNQQSSAAPTSQERSSNPAPRRQQAFVAPLSQAPYTFQHGSPLHSTGHPHLAPAPAHLPSQAHLYTYAAPTSAAALGSTSSIAHLFSPQGSSRHAAAYTTHPSTLVHQVPVSVGPSLLTSASVAPAQYQHQFATQSYIGSSRGSTIYTGYPLSPTKISQYSYL

SEQ ID NO: 8809 - protein, 1210 aa, Homo sapiens
MASQLQVFSPPSVSSSAFCSAKKLKIEPSGWDVSGQSSNDKYYTHSKTLPATQGQANSSHQVANFNIPAYDQGLLLPAPAVEHIVVTAADSSGSAATSTFQSSQTLTHRSNVSLLEPYQKCGLKRKSEEVDSNGSVQIIEEHPPLMLQNRTVVGAAATTTTVTTKSSSSSGEGDYQLVQHEILCSMTNSYEVLEFLGRGTFGQVAKCWKRSTKEIVAIKILKNHPSYARQGQIEVSILSRLSSENADEYNFVRSYECFQHKNHTCLVFEMLEQNLYDFLKQNKFSPLPLKYIRPILQQVATALMKLKSLGLIHADLKPENIMLVDPVRQPYRVKVIDFGSASHVSKAVCSTYLQSRYYRAPEIILGLPFCEAIDMWSLGCVIAELFLGWPLYPGASEYDQIRYISQTQGLPAEYLLSAGTKTTRFFNRDPNLGYPLWRLKTPEEHELETGIKSKEARKYIFNCLDDMAQVNMSTDLEGTDMLAEKADRREYIDLLKKMLTIDADKRITPLKTLNHQFVTMTHLLDFPHSNHVKSCFQNMEICKRRVHMYDTVSQIKSPFTTHVAPNTSTNLTMSFSNQLNTVHNQASVLASSSTAAAATLSLANSDVSLLNYQSALYPSSAAPVPGVAQQGVSLQPGTTQICTQTDPFQQTFIVCPPAFQTGLQATTKHSGFPVRMDNAVPIVPQAPAAQPLQIQSGVLTQGSCTPLMVATLHPQVATITPQYAVPFTLSCAAGRPALVEQTAAVLQAWPGGTQQILLPSTWQQLPGVALHNSVQPTAMIPEAMGSGQQLADWRNAHSHGNQYSTIMQQPSLLTNHVTLATAQPLNVGVAHVVRQQQSSSLPSKKNKQSAPVSSKSSLDVLPSQVYSLVGSSPLRTTSSYNSLVPVQDQHQPIIIPDTPSPPVSVITIRSDTDEEEDNKYKPSSSGLKPRSNVISYVTVNDSPDSDSSLSSPYSTDTLSALRGNSGSVLEGPGRVVADGTGTRTIIVPPLKTQLGDCTVATQASGLLSNKTKPVASVSGQSSGCCITPTGYRAQRGGTSAAQPLNLSQNQQSSAAPTSQERSSNPAPRRQQAFVAPLSQAPYTFQHGSPLHSTGHPHLAPAPAHLPSQAHLYTYAAPTSAAALGSTSSIAHLFSPQGSSRHAAAYTTHPSTLVHQVPVSVGPSLLTSASVAPAQYQHQFATQSYIGSSRGSTIYTGYPLSPTKISQYSYL

SEQ ID NO: 8810 - protein, 1075 aa, Homo sapiens
MASQLQVFSPPSVSSSAFCSAKKLKIEPSGWDVSGQSSNDKYYTHSKTLPATQGQANSSHQVANFNIPAYDQGLLLPAPAVEHIVVTAADSSGSAATSTFQSSQTLTHRSNVSLLEPYQKCGLKRKSEEVDSNGSVQIIEEHPPLMLQNRTVVGAAATTTTVTTKSSSSSGEGDYQLVQHEILCSMTNSYEVLEFLGRGTFGQVAKCWKRSTKEIVAIKILKNHPSYARQGQIEVSILSRLSSENADEYNFVRSYECFQHKNHTCLVFEMLEQNLYDFLKQNKFSPLPLKYIRPILQQVATALMKLKSLGLIHADLKPENIMLVDPVRQPYRVKVIDFGSASHVSKAVCSTYLQSRYYRAPEIILGLPFCEAIDMWSLGCVIAELFLGWPLYPGASEYDQIRYISQTQGLPAEYLLSAGTKTTRFFNRDPNLGYPLWRLKTPEEHELETGIKSKEARKYIFNCLDDMAQVNMSTDLEGTDMLAEKADRREYIDLLKKMLTIDADKRITPLKTLNHQFVTMTHLLDFPHSNHVKSCFQNMEICKRRVHMYDTVSQIKSPFTTHVAPNTSTNLTMSFSNQLNTVHNQASVLASSSTAAAATLSLANSDVSLLNYQSALYPSSAAPVPGVAQQGVSLQPGTTQICTQTDPFQQTFIVCPPAFQTGLQATTKHSGFPVRMDNAVPIVPQAPAAQPLQIQSGVLTQGSCTPLMVATLHPQVATITPQYAVPFTLSCAAGRPALVEQTAAVLQAWPGGTQQILLPSTWQQLPGVALHNSVQPTAMIPEAMGSGQQLADWRNAHSHGNQYSTIMQQPSLLTNHVTLATAQPLNVGVAHVVRQQQSSSLPSKKNKQSAPVSSKSSLDVLPSQVYSLVGSSPLRTTSSYNSLVPVQDQHQPIIIPDTPSPPVSVITIRSDTDEEEDNKYKPSSSGLKPRSNVISYVTVNDSPDSDSSLSSPYSTDTLSALRGNSGSVLEGPGRVVADGTGTRTIIVPPLKTQLGDCTVATQASGLLSNKTKPVASVSGQSSGCCITPTGYRAQRGGTSAAQPLNLSQVSAMGYCLLFGPCTVVTFWRTLLLAGC

SEQ ID NO: 8811 - protein, 1176 aa, Homo sapiens
MASQLQVFSPPSVSSSAFCSAKKLKIEPSGWDVSGQSSNDKYYTHSKTLPATQGQANSSHQVANFNIPAYDQGLLLPAPAVEHIVVTAADSSGSAATSTFQSSQTLTHRSNVSLLEPYQKCGLKRKSEEVDSNGSVQIIEEHPPLMLQNRTVVGAAATTTTVTTKSSSSSGEGDYQLVQHEILCSMTNSYEVLEFLGRGTFGQVAKCWKRSTKEIVAIKILKNHPSYARQGQIEVSILSRLSSENADEYNFVRSYECFQHKNHTCLVFEMLEQNLYDFLKQNKFSPLPLKYIRPILQQVATALMKLKSLGLIHADLKPENIMLVDPVRQPYRVKVIDFGSASHVSKAVCSTYLQSRYYRAPEIILGLPFCEAIDMWSLGCVIAELFLGWPLYPGASEYDQIRYISQTQGLPAEYLLSAGTKTTRFFNRDPNLGYPLWRLKTPEEHELETGIKSKEARKYIFNCLDDMAQVNMSTDLEGTDMLAEKADRREYIDLLKKMLTIDADKRITPLKTLNHQFVTMTHLLDFPHSNHVKSCFQNMEICKRRVHMYDTASVLASSSTAAAATLSLANSDVSLLNYQSALYPSSAAPVPGVAQQGVSLQPGTTQICTQTDPFQQTFIVCPPAFQTGLQATTKHSGFPVRMDNAVPIVPQAPAAQPLQIQSGVLTQGSCTPLMVATLHPQVATITPQYAVPFTLSCAAGRPALVEQTAAVLQAWPGGTQQILLPSTWQQLPGVALHNSVQPTAMIPEAMGSGQQLADWRNAHSHGNQYSTIMQQPSLLTNHVTLATAQPLNVGVAHVVRQQQSSSLPSKKNKQSAPVSSKSSLDVLPSQVYSLVGSSPLRTTSSYNSLVPVQDQHQPIIIPDTPSPPVSVITIRSDTDEEEDNKYKPSSSGLKPRSNVISYVTVNDSPDSDSSLSSPYSTDTLSALRGNSGSVLEGPGRVVADGTGTRTIIVPPLKTQLGDCTVATQASGLLSNKTKPVASVSGQSSGCCITPTGYRAQRGGTSAAQPLNLSQNQQSSAAPTSQERSSNPAPRRQQAFVAPLSQAPYTFQHGSPLHSTGHPHLAPAPAHLPSQAHLYTYAAPTSAAALGSTSSIAHLFSPQGSSRHAAAYTTHPSTLVHQVPVSVGPSLLTSASVAPAQYQHQFATQSYIGSSRGSTIYTGYPLSPTKISQYSYL

SEQ ID NO: 8812 - protein, 622 aa, Homo sapiens
MPPTQAESVIRSIIREIGQECAAHGEIVSETLIAFMVKAVVLDPSNGFNMDRTLMKSDVQNLVKLCMTRLLDTKNPSLDTIKMQVYFDMNYTNRVEFLEEHHRVLESRLGSVTREITDNRACAKEELESLYRKIISYVLLRSGLGSPTDIKTVREVTAALQSVFPQAELGTFLTLSKKDKERQLKELTMIVTGIRLFNRDCGKGGEGIDDLPAVLHVAIPATMQHIDYQLETARSQVYRYTAILEKAANDPLMRAELQPYMLKEALYNIRQYEVFLQIILSDIITGAQEVEMMTKQLGAHLEQLKMTIKSKIAVPTSQVFPIFIALSTLWTSLQDETIVVGVLSNLFTHIQPFLGAHELYFPERVMQCHLNGATVKTDVCRMKEHMEDRVNVADFRKLEWLFPETTANFDKLLIQYRGFCAYTFAATDGLLLPGNPAIGILKYKEKYYTFNSKDAAYSFAENPEHYIDIVREKAKKNTELIQLLELHQQFETFIPYSQMRDADKHYIKPITKCESSTQTNTHILPPTIVRSYEWNEWELRRKAIKLANLRQKVTHSVQTDLSHLRRENCSQVYPPKDTSTQSMREDSTGVPRPQIYLAGLRGGKSEITDEVKVNLTRDVDET

SEQ ID NO: 8813 - protein, 548 aa, Homo sapiens
MSAGDAVCTGWLVKSPPERKLQRYAWRKRWFVLRRGRMSGNPDVLEYYRNKHSSKPIRVIDLSECAVWKHVGPSFVRKEFQNNFVFIVKTTSRTFYLVAKTEQEMQVWVHSISQVCNLGHLEDGAADSMESLSYTPSSLQPSSASSLLTAHAASSSLPRDDPNTNAVATEETRSESELLFLPDYLVLSNCETGRLHHTSLPTRCDSWSNSDRSLEQASFDDVFVDCLQPLPSSHLVHPSCHGSGAQEVPSSRPQAALIWSREINGPPRDHLSSSPLLESSLSSTIQVDKNQGSLPCGAKELDIMSNTPPPRPPKPSHLSERRQEEWSTHSGSKKPECTLVPRRISLSGLDNMRTWKADVEGQSLRHRDKRLSLNLPCRFSPMYPTASASIEDSYVPMSPQAGASGLGPHCSPDDYIPMNSGSISSPLPELPANLEPPPVNRDLKPQRKSRPPPLDLRNLSIIREHASLTRTRTVPCSRTSFLSPERNGINSARFFANPVSREDEESYIEMKLLLSEEQRVDYVQVDEQKTQALQSTKQEWTDERQSKV

SEQ ID NO: 8814 - protein, 586 aa, Homo sapiens
MSAGDAVCTGWLVKSPPERKLQRYAWRKRWFVLRRGRMSGNPDVLEYYRNKHSSKPIRVIDLSECAVWKHVGPSFVRKEFQNNFVFIVKTTSRTFYLVAKTEQEMQVWVHSISQVCNLGHLEDGADSMESLSYTPSSLQPSSASSLLTAHAASSSLPRDDPNTNAVATEETRSESELLFLPDYLVLSNCETGRLHHTSLPTRCDSWSNSDRSLEQASFDDVFVDCLQPLPSSHLVHPSCHGSGAQEVPSSRPQAALIWSREINGPPRDHLSSSPLLESSLSSTIQVDKNQGSLPCGAKELDIMSNTPPPRPPKPSHLSERRQEEWSTHSGSKKPECTLVPRRISLSGLDNMRTWKADVEGQSLRHRDKRLSLNLPCRFSPMYPTASASIEDSYVPMSPQAGASGLGPHCSPDDYIPMNSGSISSPLPELPANLEPPPVNRDLKPQRKSRPPPLDLRNLSIIREHASLTRTRTVPCSRTSFLSPERNGINSARFFANPVSREDEESYIEMEEHRTASSLSSGALTWTKKFSLDYLALDFNSASPAPMQQKLLLSEEQRVDYVQVDEQKTQALQSTKQEWTDERQSKV

SEQ ID NO: 8815 - protein, 162 aa, Homo sapiens
MSWMFLRDLLSGVNKYSTGTGWIWLAVVFVFRLLVYMVAAEHVWKDEQKEFECNSRQPGCKNVCFDDFFPISQVRLWALQLIMVSTPSLLVVLHVAYHEGREKRHRKKLYVSPGTMDGGLWYAYLISLIVKTGFEIGFLVLFYKLYDGFSVPYLIKCDLKPC

SEQ ID NO: 8816 - protein, 2723 aa, Homo sapiens
MADEEAEQERLSCGEGGCVAELQRLGERLQELELQLRESRVPAVEAATDYCQQLCQTLLEYAEKWKTSEDPLPLLEVYTVAIQSYVKARPYLTSECENVALVLERLALSCVELLLCLPVELSDKQWEQFQTLVQVAHEKLMENGSCELHFLATLAQETGVWKNPVLCTILSQEPLDKDKVNEFLAFEGPILLDMRIKHLIKTNQLSQATALAKLCSDHPEIGIKGSFKQTYLVCLCTSSPNGKLIEEISEVDCKDALEMICNLESEGDEKSALVLCTAFLSRQLQQGDMYCAWELTLFWSKLQQRVEPSIQVYLERCRQLSLLTKTVYHIFFLIKVINSETEGAGLATCIELCVKALRLESTENTEVKISICKTISCLLPDDLEVKRACQLSEFLIEPTVDAYYAVEMLYNQPDQKYDEENLPIPNSLRCELLLVLKTQWPFDPEFWDWKTLKRQCLALMGEEASIVSSIDELNDSEVYEKVVDYQEESKETSMNGLSGGVGANSGLLKDIGDEKQKKREIKQLRERGFISARFRNWQAYMQYCVLCDKEFLGHRIVRHAQKHYKDGIYSCPICAKNFNSKETFVPHVTLHVKQSSKERLAAMKPLRRLGRPPKITTTNENQKTNTVAKQEQRPIKKNSLYSTDFIVFNDNDGSDDENDDKDKSYEPEVIPVQKPVPVNEFNCPVTFCKKGFKYFKNLIAHVKGHKDNEDAKRFLEMQSKKVICQYCRRHFVSVTHLNDHLQMHCGSKPYICIQMKCKAGFNSYAELLTHRKEHQVFRAKCMFPKCGRIFSEAYLLYDHEAQHYNTYTCKFTGCGKVYRSQGELEKHLDDHSTPPEKVLPPEAQLNSSGDSIQPSEVNQNTAENIEKERSMLPSENNIENSLLADRSDAWDKSKAESAVTKQDQISASELRQANGPLSNGLENPATTPLLQSSEVAVSIKVSLNQGIEDNFGKQENSTVEGSGEALVTDLHTPVEDTCNDLCHPGFQERKEQDCFNDAHVTQNSLVNSETLKIGDLTPQNLERQVNNLMTFSVQNQAAFQNNLPTSKFECGDNVKTSSNLYNLPLKTLESIAFVPPQSDLSNSLGTPSVPPKAPVQKFSCQVEGCTRTYNSSQSIGKHMKTAHPDQYAAFKMQRKSKKGQKANNLNTPNNGKFVYFLPSPVNSSNPFFTSQTKANGNPACSAQLQHVSPPIFPAHLASVSTPLLSSMESVINPNITSQDKNEQGGMLCSQMENLPSTALPAQMEDLTKTVLPLNIDSGSDPFLPLPAESSSMSLFPSPADSGTNSVFSQLENNTNHYSSQIEGNTNSSFLKGGNGENAVFPSQVNVANNFSSTNAQQSAPEKVKKDRGRGPNGKERKPKHNKRAKWPAIIRDGKFICSRCYRAFTNPRSLGGHLSKRSYCKPLDGAEIAQELLQSNGQPSLLASMILSTNAVNLQQPQQSTFNPEACFKDPSFLQLLAENRSPAFLPNTFPRSGVTNFNTSVSQEGSEIIKQALETAGIPSTFEGAEMLSHVSTGCVSDASQVNATVMPNPTVPPLLHTVCHPNTLLTNQNRTSNSKTSSIEECSSLPVFPTNDLLLKTVENGLCSSSFPNSGGPSQNFTSNSSRVSVISGPQNTRSSHLNKKGNSASKRRKKVAPPLIAPNASQNLVTSDLTTMGLIAKSVEIPTTNLHSNVIPTCEPQSLVENLTQKLNNVNNQLFMTDVKENFKTSLESHTVLAPLTLKTENGDSQMMALNSCTTSINSDLQISEDNVIQNFEKTLEIIKTAMNSQILEVKSGSQGAGETSQNAQINYNIQLPSVNTVQNNKLPDSSPFSSFISVMPTKSNIPQSEVSHKEDQIQEILEGLQKLKLENDLSTPASQCVLINTSVTLTPTPVKSTADITVIQPVSEMINIQFNDKVNKPFVCQNQGCNYSAMTKDALFKHYGKIHQYTPEMILEIKKNQLKFAPFKCVVPTCTKTFTRNSNLRAHCQLVHHFTTEEMVKLKIKRPYGRKSQSENVPASRSTQVKKQLAMTEENKKESQPALELRAETQNTHSNVAVIPEKQLVEKKSPDKTESSLQVITVTSEQCNTNALTNTQTKGRKIRRHKKEKEEKKRKKPVSQSLEFPTRYSPYRPYRCVHQGCFAAFTIQQNLILHYQAVHKSDLPAFSAEVEEESEAGKESEETETKQTLKEFRCQVSDCSRIFQAITGLIQHYMKLHEMTPEEIESMTASVDVGKFPCDQLECKSSFTTYLNYVVHLEADHGIGLRASKTEEDGVYKCDCEGCDRIYATRSNLLRHIFNKHNDKHKAHLIRPRRLTPGQENMSSKANQEKSKSKHRGTKHSRCGKEGIKMPKTKRKKKNNLENKNAKIVQIEENKPYSLKRGKHVYSIKARNDALSECTSRFVTQYPCMIKGCTSVVTSESNIIRHYKCHKLSKAFTSQHRNLLIVFKRCCNSQVKETSEQEGAKNDVKDSDTCVSESNDNSRTTATVSQKEVEKNEKDEMDELTELFITKLINEDSTSVETQANTSSNVSNDFQEDNLCQSERQKASNLKRVNKEKNVSQNKKRKVEKAEPASAAELSSVRKEEETAVAIQTIEEHPASFDWSSFKPMGFEVSFLKFLEESAVKQKKNTDKDHPNTGNKKGSHSNSRKNIDKTAVTSGNHVCPCKESETFVQFANPSQLQCSDNVKIVLDKNLKDCTELVLKQLQEMKPTVSLKKLEVHSNDPDMSVMKDISIGKATGRGQY

SEQ ID NO: 8817 - protein, 384 aa, Homo sapiens
MKVTSLDGRQLRKMLRKEAAARCVVLDCRPYLAFAASNVRGSLNVNLNSVVLRRARGGAVSARYVLPDEAARARLLQEGGGGVAAVVVLDQGSRHWQKLREESAARVVLTSLLACLPAGPRVYFLKGGYETFYSEYPECCVDVKPISQEKIESERALISQCGKPVVNVSYRPAYDQGGPVEILPFLYLGSAYHASKCEFLANLHITALLNVSRRTSEACATHLHYKWIPVEDSHTADISSHFQEAIDFIDCVREKGGKVLVHCEAGISRSPTICMAYLMKTKQFRLKEAFDYIKQRRSMVSPNFGFMGQLLQYESEILPSTPNPQPPSCQGEAAGSSLIGHLQTLSPDMQGAYCTFPASVLAPVPTHSTVSELSRSPVATATSC

SEQ ID NO: 8818 - protein, 717 aa, Homo sapiens
MASNERDAISWYQKKIGAYDQQIWEKSIEQTQIKGLKNKPKKMGHIKPDLIDVDLIRGSTFAKAKPEIPWTSLTRKGLVRVVFFPLFSNWWIQVTSLRIFVWLLLLYFMQVIAIVLYLMMPIVNISEVLGPLCLMLLMGTVHCQIVSTQITRPSGNNGNRRRRIKRVKLISNKGTETDNDPSCVHPIIKRRQCRPEIRMWQTREKAKFSDGEKCRREAFRRLGNGVSDDLSSEEDGEARTQMILLRRSVEGASSDNGCEVKNRKSILSRHLNSQVKKTTTRWCHIVRDSDSLAESEFESAAFSQGSRSGVSGGSRSLNMSRRDSESTRHDSETEDMLWDDLLHGPECRSSVTSDSEGAHVNTLHSGTKRDPKEDVFQQNHLFWLQNSSPSSDRVSAIIWEGNECKKMDMSVLEISGIIMSRVNAYQQGVGYQMLGNVVTIGLAFFPFLHRLFREKSLDQLKSISAEEILTLFCGAPPVTPIIVLSIINFFERLCLTWMFFFMMCVAERTYKQRFLFAKLFSHITSARKARKYEIPHFRLKKVENIKIWLSLRSYLKRRGPQRSVDVVVSSVFLLTLSIAFICCAQVLQGHKTFLNDAYNWEFLIWETALLLFLLRLASLGSETNKKYSNVSILLTEQINLYLKMEKKPNKKEQLTLVNNVLKLSTKLLKELDTPFRLYGLTMNPLIYNITRVVILSAVSGVISDLLGFNIRLWKIKS

SEQ ID NO: 8819 - protein, 709 aa, Homo sapiens
MASNERDAISWYQKKIGAYDQQIWEKSIEQTQIKGLKNKPKKMGHIKPDLIDVDLIRVIAIVLYLMMPIVNISEVLGPLCLMLLMGTVHCQIVSTQITRPSGNNGNRRRRKLRKTVNGDGSRENGNNSSDKVRGIETLESVPIIGGFWETIFGNRIKRVKLISNKGTETDNDPSCVHPIIKRRQCRPEIRMWQTREKAKFSDGEKCRREAFRRLGNGVSDDLSSEEDGEARTQMILLRRSVEGASSDNGCEVKNRKSILSRHLNSQVKKTTTRWCHIVRDSDSLAESEFESAAFSQGSRSGVSGGSRSLNMSRRDSESTRHDSETEDMLWDDLLHGPECRSSVTSDSEGAHVNTLHSGTKRDPKEDVFQQNHLFWLQNSSPSSDRVSAIIWEGNECKKMDMSVLEISGIIMSRVNAYQQGVGYQMLGNVVTIGLAFFPFLHRLFREKSLDQLKSISAEEILTLFCGAPPVTPIIVLSIINFFERLCLTWMFFFMMCVAERTYKQRFLFAKLFSHITSARKARKYEIPHFRLKKVENIKIWLSLRSYLKRRGPQRSVDVVVSSVFLLTLSIAFICCAQVLQGHKTFLNDAYNWEFLIWETALLLFLLRLASLGSETNKKYSNVSILLTEQINLYLKMEKKPNKKEQLTLVNNVLKLSTKLLKELDTPFRLYGLTMNPLIYNITRVVILSAVSGVISDLLGFNIRLWKIKS

SEQ ID NO: 8820 - protein, 762 aa, Homo sapiens
MASNERDAISWYQKKIGAYDQQIWEKSIEQTQIKGLKNKPKKMGHIKPDLIDVDLIRGSTFAKAKPEIPWTSLTRKGLVRVVFFPLFSNWWIQVTSLRIFVWLLLLYFMQVIAIVLYLMMPIVNISEVLGPLCLMLLMGTVHCQIVSTQITRPSGNNGNRRRRKLRKTVNGDGSRENGNNSSDKVRGIETLESVPIIGGFWETIFGNRIKRVKLISNKGTETDNDPSCVHPIIKRRQCRPEIRMWQTREKAKFSDGEKCRREAFRRLGNGVSDDLSSEEDGEARTQMILLRRSVEGASSDNGCEVKNRKSILSRHLNSQVKKTTTRWCHIVRDSDSLAESEFESAAFSQGSRSGVSGGSRSLNMSRRDSESTRHDSETEDMLWDDLLHGPECRSSVTSDSEGAHVNTLHSGTKRDPKEDVFQQNHLFWLQNSSPSSDRVSAIIWEGNECKKMDMSVLEISGIIMSRVNAYQQGVGYQMLGNVVTIGLAFFPFLHRLFREKSLDQLKSISAEEILTLFCGAPPVTPIIVLSIINFFERLCLTWMFFFMMCVAERTYKQRFLFAKLFSHITSARKARKYEIPHFRLKKVENIKIWLSLRSYLKRRGPQRSVDVVVSSVFLLTLSIAFICCAQVLQGHKTFLNDAYNWEFLIWETALLLFLLRLASLGSETNKKYSNVSILLTEQINLYLKMEKKPNKKEQLTLVNNVLKLSTKLLKELDTPFRLYGLTMNPLIYNITRVVILSAVSGVISDLLGFNIRLWKIKS

SEQ ID NO: 8821 - protein, 1125 aa, Homo sapiens
MSKTLKKKKHWLSKVQECAVSWAGPPGDFGAEIRGGAERGEFPYLGRLREEPGGGTCCVVSGKAPSPGDVLLEVNGTPVSGLTNRDTLAVIRHFREPIRLKTVKPGKVINKDLRHYLSLQFQKGSIDHKLQQVIRDNLYLRTIPCTTRAPRDGEVPGVDYNFISVEQFKALEESGALLESGTYDGNFYGTPKPPAEPSPFQPDPVDQVLFDNEFDAESQRKRTTSVSKMERMDSSLPEEEEDEDKEAINGSGNAENRERHSESSDWMKTVPSYNQTNSSMDFRNYMMRDETLEPLPKNWEMAYTDTGMIYFIDHNTKTTTWLDPRLCKKAKAPEDCEDGELPYGWEKIEDPQYGTYYVDHLNQKTQFENPVEEAKRKKQLGQVEIGSSKPDMEKSHFTRDPSQLKGVLVRASLKKSTMGFGFTIIGGDRPDEFLQVKNVLKDGPAAQDGKIAPGDVIVDINGNCVLGHTHADVVQMFQLVPVNQYVNLTLCRGYPLPDDSEDPVVDIVAATPVINGQSLTKGETCMNPQDFKPGAMVLEQNGKSGHTLTGDGLNGPSDASEQRVSMASSGSSQPELVTIPLIKGPKGFGFAIADSPTGQKVKMILDSQWCQGLQKGDIIKEIYHQNVQNLTHLQVVEVLKQFPVGADVPLLILRGGPPSPTKTAKMKTDKKENAGSLEAINEPIPQPMPFPPSIIRSGSPKLDPSEVYLKSKTLYEDKPPNTKDLDVFLRKQESGFGFRVLGGDGPDQSIYIGAIIPLGAAEKDGRLRAADELMCIDGIPVKGKSHKQVLDLMTTAARNGHVLLTVRRKIFYGEKQPEDDSSQAFISTQNGSPRLNRAEVPARPAPQEPYDVVLQRKENEGFGFVILTSKNKPPPGVIPHKIGRVIEGSPADRCGKLKVGDHISAVNGQSIVELSHDNIVQLIKDAGVTVTLTVIAEEEHHGPPSGTNSARQSPALQHRPMGQSQANHIPGDRSALEGEIGKDVSTSYRHSWSDHKHLAQPDTAVISVVGSRHNQNLGCYPVELERGPRGFGFSLRGGKEYNMGLFILRLAEDGPAIKDGRIHVGDQIVEINGEPTQGITHTRAIELIQAGGNKVLLLLRPGTGLIPDHGLAPSGLCSYVKPEQH

SEQ ID NO: 8822 - protein, 1150 aa, Homo sapiens
MSKTLKKKKHWLSKVQECAVSWAGPPGDFGAEIRGGAERGEFPYLGRLREEPGGGTCCVVSGKAPSPGDVLLEVNGTPVSGLTNRDTLAVIRHFREPIRLKTVKPGKVINKDLRHYLSLQFQKGSIDHKLQQVIRDNLYLRTIPCTTRAPRDGEVPGVDYNFISVEQFKALEESGALLESGTYDGNFYGTPKPPAEPSPFQPDPVDQVLFDNEFDAESQRKRTTSVSKMERMDSSLPEEEEDEDKEAINGSGNAENRERHSESSDWMKTVPSYNQTNSSMDFRNYMMRDETLEPLPKNWEMAYTDTGMIYFIDHNTKTTTWLDPRLCKKAKAPEDCEDGELPYGWEKIEDPQYGTYYVDFTLVAQAGVQWHDLGSLQPPPPGFNHLNQKTQFENPVEEAKRKKQLGQVEIGSSKPDMEKSHFTRDPSQLKGVLVRASLKKSTMGFGFTIIGGDRPDEFLQVKNVLKDGPAAQDGKIAPGDVIVDINGNCVLGHTHADVVQMFQLVPVNQYVNLTLCRGYPLPDDSEDPVVDIVAATPVINGQSLTKGETCMNPQDFKPGAMVLEQNGKSGHTLTGDGLNGPSDASEQRVSMASSGSSQPELVTIPLIKGPKGFGFAIADSPTGQKVKMILDSQWCQGLQKGDIIKEIYHQNVQNLTHLQVVEVLKQFPVGADVPLLILRGGPPSPTKTAKMKTDKKENAGSLEAINEPIPQPMPFPPSIIRSGSPKLDPSEVYLKSKTLYEDKPPNTKDLDVFLRKQESGFGFRVLGGDGPDQSIYIGAIIPLGAAEKDGRLRAADELMCIDGIPVKGKSHKQVLDLMTTAARNGHVLLTVRRKIFYGEKQPEDDSSQAFISTQNGSPRLNRAEVPARPAPQEPYDVVLQRKENEGFGFVILTSKNKPPPGVIPHKIGRVIEGSPADRCGKLKVGDHISAVNGQSIVELSHDNIVQLIKDAGVTVTLTVIAEEEHHGPPSGTNSARQSPALQHRPMGQSQANHIPGDRSALEGEIGKDVSTSYRHSWSDHKHLAQPDTAVISVVGSRHNQNLGCYPVELERGPRGFGFSLRGGKEYNMGLFILRLAEDGPAIKDGRIHVGDQIVEINGEPTQGITHTRAIELIQAGGNKVLLLLRPGTGLIPDHGLAPSGLCSYVKPEQH

SEQ ID NO: 8823 - protein, 623 aa, Homo sapiens
MATEHVNGNGTEEPMDTTSAVIHSENFQTLLDAGLPQKVAEKLDEIYVAGLVAHSDLDERAIEALKEFNEDGALAVLQQFKDSDLSHVQNKSAFLCGVMKTYRQREKQGTKVADSSKGPDEAKIKALLERTGYTLDVTTGQRKYGGPPPDSVYSGQQPSVGTEIFVGKIPRDLFEDELVPLFEKAGPIWDLRLMMDPLTGLNRGYAFVTFCTKEAAQEAVKLYNNHEIRSGKHIGVCISVANNRLFVGSIPKSKTKEQILEEFSKVTEGLTDVILYHQPDDKKKNRGFCFLEYEDHKTAAQARRRLMSGKVKVWGNVGTVEWADPIEDPDPEVMAKVKVLFVRNLANTVTEEILEKAFSQFGKLERVKKLKDYAFIHFDERDGAVKAMEEMNGKDLEGENIEIVFAKPPDQKRKERKAQRQAAKNQMYDDYYYYGPPHMPPPTRGRGRGGRGGYGYPPDYYGYEDYYDYYGYDYHNYRGGYEDPYYGYEDFQVGARGRGGRGARGAAPSRGRGAAPPRGRAGYSQRGGPGSARGVRGARGGAQQQRGRGVRGARGGRGGNVGGKRKADGYNQPDSKRRQTNNQNWGSQPIAQQPLQGGDHSGNYGYKSENQEFYQDTFGQQWK

SEQ ID NO: 8824 - protein, 500 aa, Homo sapiens
MPPAVGGPVGYTPPDGGWGWAVVIGAFISIGFSYAFPKSITVFFKEIEGIFHATTSEVSWISSIMLAVMYGGGPISSILVNKYGSRIVMIVGGCLSGCGLIAASFCNTVQQLYVCIGVIGGLGLAFNLNPALTMIGKYFYKRRPLANGLAMAGSPVFLCTLAPLNQVFFGIFGWRGSFLILGGLLLNCCVAGALMRPIGPKPTKAGKDKSKASLEKAGKSGVKKDLHDANTDLIGRHPKQEKRSVFQTINQFLDLTLFTHRGFLLYLSGNVIMFFGLFAPLVFLSSYGKSQHYSSEKSAFLLSILAFVDMVARPSMGLVANTKPIRPRIQYFFAASVVANGVCHMLAPLSTTYVGFCVYAGFFGFAFGWLSSVLFETLMDLVGPQRFSSAVGLVTIVECCPVLLGPPLLGRLNDMYGDYKYTYWACGVVLIISGIYLFIGMGINYRLLAKEQKANEQKKESKEEETSIDVAGKPNEVTKAAESPDQKDTDGGPKEEESPV

SEQ ID NO: 8825 - protein, 937 aa, Homo sapiens
MVPWVRTMGQKLKQRLRLDVGREICRQYPLFCFLLLCLSAASLLLNRYIHILMIFWSFVAGVVTFYCSLGPDSLLPNIFFTIKYKPKQLGLQELFPQGHSCAVCGKVKCKRHRPSLLLENYQPWLDLKISSKVDASLSEVLELVLENFVYPWYRDVTDDESFVDELRITLRFFASVLIRRIHKVDIPSIITKKLLKAAMKHIEVIVKARQKVKNTEFLQQAALEEYGPELHVALRSRRDELHYLRKLTELLFPYILPPKATDCRSLTLLIREILSGSVFLPSLDFLADPDTVNHLLIIFIDDSPPEKATEPASPLVPFLQKFAEPRNKKPSVLKLELKQIREQQDLLFRFMNFLKQEGAVHVLQFCLTVEEFNDRILRPELSNDEMLSLHEELQKIYKTYCLDESIDKIRFDPFIVEEIQRIAEGPYIDVVKLQTMRCLFEAYEHVLSLLENVFTPMFCHSDEYFRQLLRGAESPTRNSKLNRNTQKRGESFGISRIGSKIKGVFKSTTMEGAMLPNYGVAEGEDDFIEEGIVVMEDDSPVEAVSTPNTPRNLAAWKISIPYVDFFEDPSSERKEKKERIPVFCIDVERNDRRAVGHEPEHWSVYRRYLEFYVLESKLTEFHGAFPDAQLPSKRIIGPKNYEFLKSKREEFQEYLQKLLQHPELSNSQLLADFLSPNGGETQFLDKILPDVNLGKIIKSVPGKLMKEKGQHLEPFIMNFINSCESPKPKPSRPELTILSPTSENNKKLFNDLFKNNANRAENTERKQNQNYFMEVMTVEGVYDYLMYVGRVVFQVPDWLHHLLMGTRILFKNTLEMYTDYYLQCKLEQLFQEHRLVSLITLLRDAIFCENTEPRSLQDKQKGAKQTFEEMMNYIPDLLVKCIGEETKYESIRLLFDGLQQPVLNKQLTYVLLDIVIQELFPELNKVQKEVTSVTSWM

SEQ ID NO: 8826 - protein, 183 aa, Homo sapiens
MVPWVRTMGQKLKQRLRLDVGREICRQYPLFCFLLLCLSAASLLLNRYIHILMIFWSFVAGVVTFYCSLGPDSLLPNIFFTIKYKPKQLGLQELFPQGHSCAVCGKVKCKRHRPSLLLENYQPWLDLKISSKVDASLSEVLELVLENFVYPWYRDVTDDESFVDELRITLRFFASVLIRRIHK

SEQ ID NO: 8827 - protein, 947 aa, Homo sapiens
MLYGMKIANLAYVTKTRVRFFRLDRWADVRFPEKRRMKLGSDISKHHKSLLAKIFYDRAEYLHGKHGVDVEVQGPHEARDGQLLIRLDLNRKEVLTLRLRNGGTQSVTLTHLFPLCRTPQFAFYNEDQELPCPLGPGECYELHVHCKTSFVGYFPATVLWELLGPGESGSEGAGTFYIARFLAAVAHSPLAAQLKPMTPFKRTRITGNPVVTNRIEEGERPDRAKGYDLELSMALGTYYPPPRLRQLLPMLLQGTSIFTAPKEIAEIKAQLETALKWRNYEVKLRLLLHLEELQMEHDIRHYDLESVPMTWDPVDQNPRLLTLEVPGVTESRPSVLRGDHLFALLSSETHQEDPITYKGFVHKVELDRVKLSFSMSLLSRFVDGLTFKVNFTFNRQPLRVQHRALELTGRWLLWPMLFPVAPRDVPLLPSDVKLKLYDRSLESNPEQLQAMRHIVTGTTRPAPYIIFGPPGTGKTVTLVEAIKQVVKHLPKAHILACAPSNSGADLLCQRLRVHLPSSIYRLLAPSRDIRMVPEDIKPCCNWDAKKGEYVFPAKKKLQEYRVLITTLITAGRLVSAQFPIDHFTHIFIDEAGHCMEPESLVAIAGLMEVKETGDPGGQLVLAGDPRQLGPVLRSPLTQKHGLGYSLLERLLTYNSLYKKGPDGYDPQFITKLLRNYRSHPTILDIPNQLYYEGELQACADVVDRERFCRWAGLPRQGFPIIFHGVMGKDEREGNSPSFFNPEEAATVTSYLKLLLAPSSKKGKARLSPRSVGVISPYRKQVEKIRYCITKLDRELRGLDDIKDLKVGSVEEFQGQERSVILISTVRSSQSFVQLDLDFNLGFLKNPKRFNVAVTRAKALLIIVGNPLLLGHDPDWKVFLEFCKENGGYTGCPFPAKLDLQQGQNLLQGLSKLSPSTSGPHSHDYLPQEREGEGGLSLQVEPEWRNEL

SEQ ID NO: 8828 - protein, 607 aa, Homo sapiens
MAEKRRGSPCSMLSLKAHAFSVEALIGAEKQQQLQKKRRKLGAEEAAGAVDDGGCSRGGGAGEKGSSEGDEGAALPPPAGATSGPARSGADLERGAAGGCEDGFQQGASPLASPGGSPKGSPARSLARPGTPLPSPQAPRVDLQGAELWKRFHEIGTEMIITKAGRRMFPAMRVKISGLDPHQQYYIAMDIVPVDNKRYRYVYHSSKWMVAGNADSPVPPRVYIHPDSPASGETWMRQVISFDKLKLTNNELDDQGHIILHSMHKYQPRVHVIRKDCGDDLSPIKPVPSGEGVKAFSFPETVFTTVTAYQNQQITRLKIDRNPFAKGFRDSGRNRMGLEALVESYAFWRPSLRTLTFEDIPGIPKQGNASSSTLLQGTGNGVPATHPHLLSGSSCSSPAFHLGPNTSQLCSLAPADYSACARSGLTLNRYSTSLAETYNRLTNQAGETFAPPRTPSYVGVSSSTSVNMSMGGTDGDTFSCPQTSLSMQISGMSPQLQYIMPSPSSNAFATNQTHQGSYNTFRLHSPCALYGYNFSTSPKLAASPEKIVSSQGSFLGSSPSGTMTDRQMLPPVEGVHLLSSGGQQSFFDSRTLGSLTLSSSQVSAHMV

SEQ ID NO: 8829 - protein, 538 aa, Homo sapiens
MADRGGVGEAAAVGASPASVPGLNPTLGWRERLRAGLAGTGASLWFVAGLGLLYALRIPLRLCENLAAGTSSLISGLIFIFEWWYFHKHGTSFIEQVSVSHLQPLMGGTESSISEPGSPSRNRENETSRQNLSECKVWRNPLNLFRGAEYRRYTWVTGKEPLTYYDMNLSAQDHQTFFTCDTDFLRPSDTVMQKAWRERNPPARIKAAYQALELNNDCATAYVLLAEEEATTIVDAERLFKQALKAGETIYRQSQQCQHQSPQHEAQLRRDTNVLVYIKRRLAMCARKLGRIREAVKIMRDLMKEFPPLTMLNIHENLLESLLELQAYPDVQAVLAKYDDISLPKSAAICYTAALLKTRTVSEKFSPETASRRGLSTAEINAVEAIHRAVEFNPHVPKYLLEMKSLILPPEHILKRGDSEAIAYAFFHLQHWKRIEGALNLLQCTWEGTFRMIPYPLEKGHLFYPYPSCTETADRELLPTFHHVSVYPKKELPLFIHFTAGFCSSTAMIAILTHQFPEIMGIFAKAVSMISRTCVDYL

SEQ ID NO: 8830 - protein, 521 aa, Homo sapiens
MLNVPSQSFPAPRSQQRVASGGRSKVPLKQGRSLMDWIRLTKSGKDLTGLKGRLIEVTEEELKKHNKKDDCWICIRGFVYNVSPYMEYHPGGEDELMRAAGSDGTELFDQVHRWVNYESMLKECLVGRMAIKPAVLKDYREEEKKVLNGMLPKSQVTDTLAKEGPSYPSYDWFQTDSLVTIAIYTKQKDINLDSIIVDHQNDSFRAETIIKDCLYLIHIGLSHEVQEDFSVRVVESVGKIEIVLQKKENTSWDFLGHPLKNHNSLIPRKDTGLYYRKCQLISKEDVTHDTRLFCLMLPPSTHLQVPIGQHVYLKLPITGTEIVKPYTPVSGSLLSEFKEPVLPNNKYIYFLIKIYPTGLFTPELDRLQIGDFVSVSSPEGNFKISKFQELEDLFLLAAGTGFTPMVKILNYALTDIPSLRKVKLMFFNKTEDDIIWRSQLEKLAFKDKRLDVEFVLSAPISEWNGKQGHISPALLSEFLKRNLDKSKVLVCICGPVPFTEQGVRLLHDLNFSKNEIHSFTA

SEQ ID NO: 8831 - protein, 1871 aa, Homo sapiens
MPSVCLLLLLFLAVGGALGNRPFRAFVVTDTTLTHLAVHRVTGEVFVGAVNRVFKLAPNLTELRAHVTGPVEDNARCYPPPSMRVCAHRLAPVDNINKLLLIDYAARRLVACGSIWQGICQFLRLDDLFKLGEPHHRKEHYLSGAQEPDSMAGVIVEQGQGPSKLFVGTAVDGKSEYFPTLSSRKLISDEDSADMFSLVYQDEFVSSQIKIPSDTLSLYPAFDIYYIYGFVSASFVYFLTLQLDTQQTLLDTAGEKFFTSKIVRMCAGDSEFYSYVEFPIGCSWRGVEYRLVQSAHLAKPGLLLAQALGVPADEDVLFTIFSQGQKNRASPPRQTILCLFTLSNINAHIRRRIQSCYRGEGTLALPWLLNKELPCINTPMQINGNFCGLVLNQPLGGLHVIEGLPLLADSTDGMASVAAYTYRQHSVVFIGTRSGSLKKVRVDGFQDAHLYETVPVVDGSPILRDLLFSPDHRHIYLLSEKQVSQLPVETCEQYQSCAACLGSGDPHCGWCVLRHRCCREGACLGASAPHGFAEELSKCVQVRVRPNNVSVTSPGVQLTVTLHNVPDLSAGVSCAFEAAAENEAVLLPSGELLCPSPSLQELRALTRGHGATRTVRLQLLSKETGVRFAGADFVFYNCSVLQSCMSCVGSPYPCHWCKYRHTCTSRPHECSFQEGRVHSPEGCPEILPSGDLLIPVGVMQPLTLRAKNLPQPQSGQKNYECVVRVQGRQQRVPAVRFNSSSVQCQNASYSYEGDEHGDTELDFSVVWDGDFPIDKPPSFRALLYKCWAQRPSCGLCLKADPRFNCGWCISEHRCQLRTHCPAPKTNWMHLSQKGTRCSHPRITQIHPLVGPKEGGTRVTIVGENLGLLSREVGLRVAGVRCNSIPAEYISAERIVCEMEESLVPSPPPGPVELCVGDCSADFRTQSEQVYSFVTPTFDQVSPSRGPASGGTRLTISGSSLDAGSRVTVTVRDSECQFVRRDAKAIVCISPLSTLGPSQAPITLAIDRANISSPGLIYTYTQDPTVTRLEPTWSIINGSTAITVSGTHLLTVQEPRVRAKYRGIETTNTCQVINDTAMLCKAPGIFLGRPQPRAQGEHPDEFGFLLDHVQTARSLNRSSFTYYPDPSFEPLGPSGVLDVKPGSHVVLKGKNLIPAAAGSSRLNYTVLIGGQPCSLTVSDTQLLCDSPSQTGRQPVMVLVGGLEFWLGTLHISAERALTLPAMMGLAAGGGLLLLAITAVLVAYKRKTQDADRTLKRLQLQMDNLESRVALECKEAFAELQTDINELTNHMDEVQIPFLDYRTYAVRVLFPGIEAHPVLKELDTPPNVEKALRLFGQLLHSRAFVLTFIHTLEAQSSFSMRDRGTVASLTMVALQSRLDYATGLLKQLLADLIEKNLESKNHPKLLLRRTESVAEKMLTNWFTFLLHKFLKECAGEPLFLLYCAIKQQMEKGPIDAITGEARYSLSEDKLIRQQIDYKTLTLHCVCPENEGSAQVPVKVLNCDSITQAKDKLLDTVYKGIPYSQRPKAEDMDLEWRQGRMTRIILQDEDVTTKIECDWKRLNSLAHYQVTDGSLVALVPKQVSAYNMANSFTFTRSLSRYESLLRTASSPDSLRSRAPMITPDQETGTKLWHLVKNHDHADHREGDRGSKMVSEIYLTRLLATKGTLQKFVDDLFETVFSTAHRGSALPLAIKYMFDFLDEQADQRQISDPDVRHTWKSNCLPLRFWVNVIKNPQFVFDIHKNSITDACLSVVAQTFMDSCSTSEHRLGKDSPSNKLLYAKDIPNYKSWVERYYRDIAKMASISDQDMDAYLVEQSRLHASDFSVLSALNELYFYVTKYRQEILTALDRDASCRKHKLRQKLEQIISLVSSDS

SEQ ID NO: 8832 - protein, 142 aa, Homo sapiens
TSKPSSDLLDLQPDFSSGGAAAAAAPAPPPPAGGATAWGDLLGEDSLAALSSVPSEAQISDPFAPEPTPPTTTAEIATASASASTTTTVTAVTAEVDLFGGSAEAAPELDLFAMKPPETSVPVVTPTASTAPPVPATAPSPA

SEQ ID NO: 8833 - protein, 907 aa, Homo sapiens
MSGQTLTDRIAAAQYSVTGSAVARAVCKATTHEVMGPKKKHLDYLIQATNETNVNIPQMADTLFERATNSSWVVVFKALVTTHHLMVHGNERFIQYLASRNTLFNLSNFLDKSGSHGYDMSTFIRRYSRYLNEKAFSYRQMAFDFARVKKGADGVMRTMAPEKLLKSMPILQGQIDALLEFDVHPNELTNGVINAAFMLLFKDLIKLFACYNDGVINLLEKFFEMKKGQCKDALEIYKRFLTRMTRVSEFLKVAEQVGIDKGDIPDLTQAPSSLMETLEQHLNTLEGKKPGNNEGSGAPSPLSKSSPATTVTSPNSTPAKTIDTSPPVDLFATASAAVPVSTSKPSSDLLDLQPDFSSGGAAAAAAPAPPPPAGGATAWGDLLGEDSLAALSSVPSEAQISDPFAPEPTPPTTTAEIATASASASTTTTVTAVTAEVDLFGDAFAASPGEAPAASEGAAAPATPTPVAAALDACSGNDPFAPSEGSAEAAPELDLFAMKPPETSVPVVTPTASTAPPVPATAPSPAPAVAAAAAATTAATAAATTTTTTSAATATTAPPALDIFGDLFESTPEVAAAPKPDAAPSIDLFSTDAFSSPPQGASPVPESSLTADLLSVDAFAAPSPATTASPAKVDSSGVIDLFGDAFGSSASEPQPASQAASSSSASADLLAGFGGSFMAPSPSPVTPAQNNLLQPNFEAAFGTTPSTSSSSSFDPSVFDGLGDLLMPTMAPAGQPAPVSMVPPSPAMAASKALGSDLDSSLASLVGNLGISGTTTKKGDLQWNAGEKKLTGGANWQPKVAPATWSAGVPPSAPLQGAVPPTSSVPPVAGAPSVGQPGAGFGMPPAGTGMPMMPQQPVMFAQPMMRPPFGAAAVPGTQLSPSPTPASQSPKKPPAKDPLADLNIKDFL

SEQ ID NO: 8834 - protein, 714 aa, Homo sapiens
MIDLYEVAGIKGMFLANKKIDNQVKTFITYNKGRDWRLLQAPDTDLRGDPVHCLLPYCSLHLHLKVSENPYTSGIIASKDTAPSIIVASGNIGSELSDTDISMFVSSDAGNTWRQIFEEEHSVLYLDQGGVLVAMKHTSLPIRHLWLSFDEGRSWSKYSFTSIPLFVDGVLGEPGEETLIMTVFGHFSHRSEWQLVKVDYKSIFDRRCAEEDYRPWQLHSQGEACIMGAKRIYKKRKSERKCMQGKYAGAMESEPCVCTEADFDCDYGYERHSNGQCLPAFWFNPSSLSKDCSLGQSYLNSTGYRKVVSNNCTDGVREQYTAKPQKCPGKAPRGLRIVTADGKLTAEQGHNVTLMVQLEEGDVQRTLIQVDFGDGIAVSYVNLSSMEDGIKHVYQNVGIFRVTVQVDNSLGSDSAVLYLHVTCPLEHVHLSLPFVTTKNKEVNATAVLWPSQVGTLTYVWWYGNNTEPLITLEGSISFRFTSEGMNTITVQVSAGNAILQDTKTIAVYEEFRSLRLSFSPNLDDYNPDIPEWRRDIGRVIKKSLVEATGVPGQHILVAVLPGLPTTAELFVLPYQDPAGENKRSTDDLEQISELLIHTLNQNSVHFELKPGVRVLVHAAHLTAAPLVDLTPTHSGSAMLMLLSVVFVGLAVFVIYKFKRKIPGINVYAQMQNEKEQEMISPVSHSESRPNVPQTELRRPGQLIDEKVESQLIGE

SEQ ID NO: 8835 - protein, 1222 aa, Homo sapiens
MEAARTERPAGRPGAPLVRTGLLLLSTWVLAGAEITWDATGGPGRPAAPASRPPALSPLSPRAVASQWPEELASARRAAVLGRRAGPELLPQQGGGRGGEMQVEAGGTSPAGERRGRGIPAPAKLGGARRSRRAQPPITQERGDAWATAPADGSRGSRPLAKGSREEVKAPRAGGSAAEDLRLPSTSFALTGDSAHNQAMVHWSGHNSSVILILTKLYDFNLGSVTESSLWRSTDYGTTYEKLNDKVGLKTVLSYLYVNPTNKRKIMLLSDPEMESSILISSDEGATYQKYRLTFYIQSLLFHPKQEDWVLAYSLDQKLYSSMDFGRRWQLMHERITPNRFYWSVAGLDKEADLVHMEVRTTDGYAHYLTCRIQECAETTRSGPFARSIDISSLVVQDEYIFIQVTTSGRASYYVSYRREAFAQIKLPKYSLPKDMHIISTDENQVFAAVQEWNQNDTYNLYISDTRGIYFTLAMENIKSSRGLMGNIIIELYEVAGIKGIFLANKKVDDQVKTYITYNKGRDWRLLQAPDVDLRGSPVHCLLPFCSLHLHLQLSENPYSSGRISSKETAPGLVVATGNIGPELSYTDIGVFISSDGGNTWRQIFDEEYNVWFLDWGGALVAMKHTPLPVRHLWVSFDEGHSWDKYGFTSVPLFVDGALVEAGMETHIMTVFGHFSLRSEWQLVKVDYKSIFSRHCTKEDYQTWHLLNQGEPCVMGERKIFKKRKPGAQCALGRDHSGSVVSEPCVCANWDFECDYGYERHGESQCVPAFWYNPASPSKDCSLGQSYLNSTGYRRIVSNNCTDGLREKYTAKAQMCPGKAPRGLHVVTTDGRLVAEQGHNATFIILMEEGDLQRTNIQLDFGDGIAVSYANFSPIEDGIKHVYKSAGIFQVTAYAENNLGSDTAVLFLHVVCPVEHVHLRVPFVAIRNKEVNISAVVWPSQLGTLTYFWWFGNSTKPLITLDSSISFTFLAEGTDTITVQVAAGNALIQDTKEIAVHEYFQSQLLSFSPNLDYHNPDIPEWRKDIGNVIKRALVKVTSVPEDQILIAVFPGLPTSAELFILPPKNLTERRKGNEGDLEQIVETLFNALNQNLVQFELKPGVQVIVYVTQLTLAPLVDSSAGHSSSAMLMLLSVVFVGLAVFLIYKFKRKIPWINIYAQVQHDKEQEMIGSVSQSENAPKITLSDFTEPEELLDKELDTRVIGGIATIANSESTKEIPNCTSV

SEQ ID NO: 8836 - protein, 413 aa, Homo sapiens
MENMLLWLIFFTPGWTLIDGSEMEWDFMWHLRKVPRIVSERTFHLTSPAFEADAKMMVNTVCGIECQKELPTPSLSELEDYLSYETVFENGTRTLTRVKVQDLVLEPTQNITTKGVSVRRKRQVYGTDSRFSILDKRFLTNFPFSTAVKLSTGCSGILISPQHVLTAAHCVHDGKDYVKGSKKLRVGLLKMRNKSGGKKRRGSKRSRREASGGDQREGTREHLRERAKGGRRRKKSGRGQRIAEGRPSFQWTRVKNTHIPKGWARGGMGDATLDYDYALLELKRAHKKKYMELGISPTIKKMPGGMIHFSGFDNDRADQLVYRFCSVSDESNDLLYQYCDAESGSTGSGVYLRLKDPDKKNWKRKIIAVYSGHQWVDVHGVQKDYNVAVRITPLKYAQICLWIHGNDANCAYG

SEQ ID NO: 8837 - protein, 1222 aa, Homo sapiens; identical to SEQ ID NO: 8835

SEQ ID NO: 8838 - protein, 824 aa, Homo sapiens
MAAAFEASGALAAVATAMPAEHVAVQVPAPEPTPGPVRILRTAQDLSSPRTRTGDVLLAEPADFESLLLSRPVLEGLRAAGFERPSPVQLKAIPLGRCGLDLIVQAKSGTGKTCVFSTIALDSLVLENLSTQILILAPTREIAVQIHSVITAIGIKMEGLECHVFIGGTPLSQDKTRLKKCHIAVGSPGRIKQLIELDYLNPGSIRLFILDEADKLLEEGSFQEQINWIYSSLPASKQMLAVSATYPEFLANALTKYMRDPTFVRLNSSDPSLIGLKQYYKVVNSYPLAHKVFEEKTQHLQELFSRIPFNQALVFSNLHSRAQHLADILSSKGFPAECISGNMNQNQRLDAMAKLKHFHCRVLISTDLTSRGIDAEKVNLVVNLDVPLDWETYMHRIGRAGRFGTLGLTVTYCCRGEEENMMMRIAQKCNINLLPLPDPIPSGLMEECVDWDVEVKAAVHTYGIASVPNQPLKKQIQKIERTLQIQKAHGDHMASSRNNSVSGLSVKSKNNTKQKLPVKSHSECGIIEKATSPKELGCDRQSEEQMKNSVQTPVENSTNSQHQVKEALPVSLPQIPCLSSFKIHQPYTLTFAELVEDYEHYIKEGLEKPVEIIRHYTGPGDQTVNPQNGFVRNKVIEQRVPVLASSSQSGDSESDSDSYSSRTSSQSKGNKSYLEGSSDNQLKDSESTPVDDRISLEQPPNGSDTPNPEKYQESPGIQMKTRLKEGASQRAKQSRRNLPRRSSFRLQTEAQEDDWYDCHREIRLSFSDTYQDYEEYWRAYYRAWQEYYAAASHSYYWNAQRHPSWMAAYHMNTIYLQEMMHSNQ

SEQ ID NO: 8839 - protein, 872 aa, Homo sapiens
MAEEKGGKQVLEESAFEEMERDFQGVLHELSGDKSLEKFRIEYERLHAVMKKSYDNEKRLMAKCRELNAEIVVNSAKVATALKLSQDDQTTIASLKKEIEKAWKMVDSAYDKEQKAKETILALKEEIVNLTKLVEQGSGLSMDQHSNIRDLLRFKEEVTKERDQLLSEVVKLRESLAQTTEQQQETERSKEEAEHAISQFQQEIQQRQNEASREFRKKEKLEKELKQIQADMDSRQTEIKALQQYVQKSKEELQKLEQQLKEQKILNERAAKELEQFQMRNAKLQQENEQHSLVCEQLSQENQQKALELKAKEEEVHQMRLDIGKLNKIREQIHKKLHHTEDQKAEVEQHKETLKNQIVGLEREVEASKKQAELDRKAMDELLRERDILNKNMLKAVNATQKQTDLVKLHEQAKRNLEGEIQNYKDEAQKQRKIIFHLEKERDRYINQASDLTQKVLMNMEDIKVRETQIFDYRKKIAESEIKLKQQQNLYEAVRSDRNLYSKNLVEAQDEITDMKRKLKIMIHQVDELKEDISAKESALVKLHLEQQRIEKEKETLKAELQKLRQQALETKHFIEKQEAEERKLLRIIAEADGERLRQKKELDQVISERDILGSQLVRRNDELALLYEKIKIQQSVLNKGESQYNQRLEDMRILRLEIKKLRREKGILARSMANVEELRQEFFHMQRELLKERTRCRALEEELENPLNVHRWRKLEASDPNAYELIQKIHTLQKRLISKTEEVVEKELLLQEKEKLYMELKHVLARQPGPEAAEQLKLYRRTLHDKKQQLKVLSSELNMYEVQSKEYKYEVEKLTNELQNLKKKYLAQKRKEQLQKNKDTAPMDNTFLMVKPNGPGFTGGGFPLRSTKMTF

SEQ ID NO: 8840 - protein, 572 aa, Homo sapiens
MEPEAPRRRHTHQRGYLLTRNPHLNKDLAFTLEERQQLNIHGLLPPSFNSQEIQVLRVVKNFEHLNSDFDRYLLLMDLQDRNEKLFYRVLTSDIEKFMPIVYTPTVGLACQQYSLVFRKPRGLFITIHDRGHIASVLNAWPEDVIKAIVVTDGERILGLGDLGCNGMGIPVGKLALYTACGGMNPQECLPVILDVGTENEELLKDPLYIGLRQRRVRGSEYDDFLDEFMEAVSSKYGMNCLIQFEDFANVNAFRLLNKYRNQYCTFNDDIQGTASVAVAGLLAALRITKNKLSDQTILFQGAGEAALGIAHLIVMALEKEGLPKEKAIKKIWLVDSKGLIVKGRASLTQEKEKFAHEHEEMKNLEAIVQEIKPTALIGVAAIGGAFSEQILKDMAAFNERPIIFALSNPTSKAECSAEQCYKITKGRAIFASGSPFDPVTLPNGQTLYPGQGNNSYVFPGVALGVVACGLRQITDNIFLTTAEVIAQQVSDKHLEEGRLYPPLNTIRDVSLKIAEKIVKDAYQEKTATVYPEPQNKEAFVRSQMYSTDYDQILPDCYSWPEEVQKIQTKVDQ

SEQ ID NO: 8841 - protein, 373 aa, Homo sapiens
MAQGRERDEGPHSAGGASLSVRWVQGFPKQNVHFVNDNTICYPCGNYVIFINIETKKKTVLQCSNGIVGVMATNIPCEVVAFSDRKLKPLIYVYSFPGLTRRTKLKGNILLDYTLLSFSYCGTYLASYSSLPEFELALWNWESSIILCKKSQPGMDVNQMSFNPMNWRQLCLSSPSTVSVWTIERSNQEHCFRARSVKLPLEDGSFFNETDVVFPQSLPKDLIYGPVLPLSAIAGLVGKEAETFRPKDDLYPLLHPTMHCWTPTSDLYIGCEEGHLLMINGDTLQVTVLNKIEEESPLEDRRNFISPVTLVYQKEGVLASGIDGFVYSFIIKDRSYMIEDFLEIERPVEHMTFSPNYTVLLIQTDKVCWMVIS

SEQ ID NO: 8842 - protein, 482 aa, Homo sapiens
MAQGRERDEGPHSAGGASLSVRWVQGFPKQNVHFVNDNTICYPCGNYVIFINIETKKKTVLQCSNGIVGVMATNIPCEVVAFSDRKLKPLIYVYSFPGLTRRTKLKGNILLDYTLLSFSYCGTYLASYSSLPEFELALWNWESSIILCKKSQPGMDVNQMSFNPMNWRQLCLSSPSTVSVWTIERSNQEHCFRARSVKLPLEDGSFFNETDVVFPQSLPKDLIYGPVLPLSAIAGLVGKEAETFRPKDDLYPLLHPTMHCWTPTSDLYIGCEEGHLLMINGDTLQVTVLNKIEEESPLEDRRNFISPVTLVYQKEGVLASGIDGFVYSFIIKDRSYMIEDFLEIERPVEHMTFSPNYTVLLIQTDKGSVYIYTFGKEPTLNKVLDACDGKFQAIDFITPGTQYFMTLTYSGEICVWWLEDCACVSKIYLNTLATVLACCPSSLSAAVGTEDGSVYFISVYDKESPQVVHKAFLSESSVQHVV

SEQ ID NO: 8843 - protein, 678 aa, Homo sapiens
MWKLLLWVGLVLVLKHHDGAAHKLVCYFTNWAHSRPGPASILPHDLDPFLCTHLIFAFASMNNNQIVAKDLQDEKILYPEFNKLKERNRELKTLLSIGGWNFGTSRFTTMLSTFANREKFIASVISLLRTHDFDGLDLFFLYPGLRGSPMHDRWTFLFLIEELLFAFRKEALLTMRPRLLLSAAVSGVPHIVQTSYDVRFLGRLLDFINVLSYDLHGSWERFTGHNSPLFSLPEDPKSSAYAMNYWRKLGAPSEKLIMGIPTYGRTFRLLKASKNGLQARAIGPASPGKYTKQEGFLAYFEICSFVWGAKKHWIDYQYVPYANKGKEWVGYDNAISFSYKAWFIRREHFGGAMVWTLDMDDVRGTFCGTGPFPLVYVLNDILVRAEFSSTSLPQFWLSSAVNSSSTDPERLAVTTAWTTDSKILPPGGEAGVTEIHGKCENMTITPRGTTVTPTKETVSLGKHTVALGEKTEITGAMTMTSVGHQSMTPGEKALTPVGHQSVTTGQKTLTSVGYQSVTPGEKTLTPVGHQSVTPVSHQSVSPGGTTMTPVHFQTETLRQNTVAPRRKAVAREKVTVPSRNISVTPEGQTMPLRGENLTSEVGTHPRMGNLGLQMEAENRMMLSSSPVIQLPEQTPLAFDNRFVPIYGNHSSVNSVTPQTSPLSLKKEIPENSAVDEEA

SEQ ID NO: 8844 - protein, 1415 aa, Homo sapiens
MDVTKKNKRDGTEVTERIVTETVTTRLTSLPPKGGTSNGYAKTASLGGGSRLEKQSLTHGSSGYINSTGSTRGHASTSSYRRAHSPASTLPNSPGSTFERKTHVTRHAYEGSSSGNSSPEYPRKEFASSSTRGRSQTRESEIRVRLQSASPSTRWTELDDVKRLLKGSRSASVSPTRNSSNTLPIPKKGTVETKIVTASSQSVSGTYDATILDANLPSHVWSSTLPAGSSMGTYHNNMTTQSSSLLNTNAYSAGSVFGVPNNMASCSPTLHPGLSTSSSVFGMQNNLAPSLTTLSHGTTTTSTAYGVKKNMPQSPAAVNTGVSTSAACTTSVQSDDLLHKDCKFLILEKDNTPAKKEMELLIMTKDSGKVFTASPASIAATSFSEDTLKKEKQAAYNADSGLKAEANGDLKTVSTKGKTTTADIHSYGSSGGGGSGGGGGVGGAGGGPWGPAPAWCPCGSCCSWWKWLLGLLLTWLLLLGLLFGLIALAEEVRKLKARVDELERIRRSILPYGDSMDRIEKDRLQGMAPAAGADLDKIGLHSDSQEELWMFVRKKLMMEQENGNLRGSPGPKGDMGSPGPKGDRGFPGTPGIPGPLGHPGPQGPKGQKGSVGDPGMEGPMGQRGREGPMGPRGEAGPPGSGEKGERGAAGEPGPHGPPGVPGSVGPKGSSGSPGPQGPPGPVGLQGLRGEVGLPGVKGDKGPMGPPGPKGDQGEKGPRGLTGEPGMRGLPGAVGEPGAKGAMGPAGPDGHQGPRGEQGLTGMPGIRGPPGPSGDPGKPGLTGPQGPQGLPGTPGRPGIKGEPGAPGKIVTSEGSSMLTVPGPPGPPGAMGPPGPPGAPGPAGPAGLPGHQEVLNLQGPPGPPGPRGPPGPSIPGPPGPRGPPGEGLPGPPGPPGSFLSNSETFLSGPPGPPGPPGPKGDQGDPGVPGALGIPSGPSEGGSSSTMYVSGPPGPPGPPGPPGSISSSGQEIQQYISEYMQSDSIRSYLSGVQGPPGPPGPPGPVTTITGETFDYSELASHVVSYLRTSGYGVSLFSSSISSEDILAVLQRDDVRQYLRQYLMGPRGPPGPPGASGDGSLLSLDYAELSSRILSYMSSSGISIGLPGPPGPPGLPGTSYEELLSLLRAAGLSFIPGPPGPPGPPGPRGPPGVSGALATYAAENSDSFRSELISYLTSPDVRSFIVGPPGPPGPQGPPGDSRLLSTDASHSRGSSSSSHSSSVRRGSSYSSSMSTGGGGAGSLGAGGAFGEAAGDRGPYGTDIGPGGGYGAAAEGGMYAGNGGLLGADFAGDLDYNELAVRVSESMQRQGLLQGMAYTVQGPPGQPGPQGPPGISKVFSAYSNVTADLMDFFQTYGAIQGPPGQKGEMGTPGPKGDRGPAGPPGHPGPPGPRGHKGEKGDKGDQVYAGRRRRRSIAVKP

SEQ ID NO: 8845 - protein, 380 aa, Homo sapiens
MGATTMDQKSLWAGSAYKLVCYFTNWSQDRQEPGKFTPENIDPFLCSHLIYSFASIENNKVIIKDKSEVMLYQTINSLKTKNPKLKILLSIGGYLFGSKGFHPMVDSSTSRLEFINSIILFLRNHNFDGLDVSWIYPDQKENTHFTVLIHELAEAFQKDFTKSTKERLLLTAGVSAGRQMIDNSYQVEKLAKDLDFINLLSFDFHGSWEKPLITGHNSPLSKGWQDRGPSSYYNVEYAVGYWIHKGMPSEKVVMGIPTYGHSFTLASAETTVGAPASGPGAAGPITESSGFLAYYEICQFLKGAKITRLQDQQVPYAVKGNQWVGYDDVKSMETKVQFLKNLNLGGAMIWSIDMDDFTGKSCNQGPYPLVQAVKRSLGSL

SEQ ID NO: 8846 - protein, 390 aa, Homo sapiens
MGATTMDQKSLWAGVVVLLLLQGGSAYKLVCYFTNWSQDRQEPGKFTPENIDPFLCSHLIYSFASIENNKVIIKDKSEVMLYQTINSLKTKNPKLKILLSIGGYLFGSKGFHPMVDSSTSRLEFINSIILFLRNHNFDGLDVSWIYPDQKENTHFTVLIHELAEAFQKDFTKSTKERLLLTAGVSAGRQMIDNSYQVEKLAKDLDFINLLSFDFHGSWEKPLITGHNSPLSKGWQDRGPSSYYNVEYAVGYWIHKGMPSEKVVMGIPTYGHSFTLASAETTVGAPASGPGAAGPITESSGFLAYYEICQFLKGAKITRLQDQQVPYAVKGNQWVGYDDVKSMETKVQFLKNLNLGGAMIWSIDMDDFTGKSCNQGPYPLVQAVKRSLGSL

SEQ ID NO: 8847 - protein, 420 aa, Homo sapiens
MPGGCSRGPAAGDGRLRLARLALVLLGWVSSSSPTSSASSFSSSAPFLASAVSAQPPLPDQCPALCECSEAARTVKCVNRNLTEVPTDLPAYVRNLFLTGNQLAVLPAGAFARRPPLAELAALNLSGSRLDEVRAGAFEHLPSLRQLDLSHNPLADLSPFAFSGSNASVSAPSPLVELILNHIVPPEDERQNRSFEGMVVAALLAGRALQGLRRLELASNHFLYLPRDVLAQLPSLRHLDLSNNSLVSLTYVSFRNLTHLESLHLEDNALKVLHNGTLAELQGLPHIRVFLDNNPWVCDCHMADMVTWLKETEVVQGKDRLTCAYPEKMRNRVLLELNSADLDCDPILPPSLQTSYVFLGIVLALIGAIFLLVLYLNRKGIKKWMHNIRDACRDHMEGYHYRYEINADPRLTNLSSNSDV

SEQ ID NO: 8848 - protein, 1235 aa, Homo sapiens
MSFFNFRKIFKLGSEKKKKQYEHVKRDLNPEDFWEIIGELGDGAFGKVYKAQNKETSVLAAAKVIDTKSEEELEDYMVEIDILASCDHPNIVKLLDAFYYENNLWILIEFCAGGAVDAVMLELERPLTESQIQVVCKQTLDALNYLHDNKIIHRDLKAGNILFTLDGDIKLADFGVSAKNTRTIQRRDSFIGTPYWMAPEVVMCETSKDRPYDYKADVWSLGITLIEMAEIEPPHHELNPMRVLLKIAKSEPPTLAQPSRWSSNFKDFLKKCLEKNVDARWTTSQLLQHPFVTVDSNKPIRELIAEAKAEVTEEVEDGKEEDEEEETENSLPIPASKRASSDLSIASSEEDKLSQNACILESVSEKTERSNSEDKLNSKILNEKPTTDEPEKAVEDINEHITDAQLEAMTELHDRTAVIKENEREKRPKLENLPDTEDQETVDINSVSEGKENNIMITLETNIEHNLKSEEEKDQEKQQMFENKLIKSEEIKDTILQTVDLVSQETGEKEANIQAVDSEVGLTKEDTQEKLGEDDKTQKDVISNTSDVIGTCEAADVAQKVDEDSAEDTQSNDGKEVVEVGQKLINKPMVGPEAGGTKEVPIKEIVEMNEIEEGKNKEQAINSSENIMDINEEPGTTEGEEITESSSTEEMEVRSVVADTDQKALGSEVQDASKVTTQIDKEKKEIPVSIKKEPEVTVVSQPTEPQPVLIPSININSDSGENKEEIGSLSKTETILPPESENPKENDNDSGTGSTADTSSIDLNLSISSFLSKTKDSGSISLQETRRQKKTLKKTRKFIVDGVEVSVTTSKIVTDSDSKTEELRFLRRQELRELRFLQKEEQRAQQQLNSKLQQQREQIFRRFEQEMMSKKRQYDQEIENLEKQQKQTIERLEQEHTNRLRDEAKRIKGEQEKELSKFQNMLKNRKKEVINEVEKAPKELRKELMKRRKEELAQSQHAQEQEFVQKQQQELDGSLKKIIQQQKAELANIERECLNNKQQLMRAREAAIWELEERHLQEKHQLLKQQLKDQYFMQRHQLLKRHEKETEQMQRYNQRLIEELKNRQTQERARLPKIQRSEAKTRMAMFKKSLRINSTATPDQDRDKIKQFAAQEEKRQKNERMAQHQKHENQMRDLQLQCEANVRELHQLQNEKCHLLVEHETQKLKELDEEHSQELKEWREKLRPRKKTLEEEFARKLQEQEVFFKMTGESECLNPSTQSRISKFYPIPSLHSTGS

SEQ ID NO: 8849 - protein, 523 aa, Homo sapiens
MQMRRVWRTCRSGPRKRREARYKKSTEDIFPAQLLKLQRHERVWQQEPPVRDHRSWGGSGAGGVAGREWTDQGQVALGGHYMAEGEGYFAMSEDELACSPYIPLGGDFGGGDFGGGDFGGGDFGGGGSFGGHCLDYCESPTAHCNVLNWEQVQRLDGILSETIPIHGRGNFPTLELQPSLIVKVVRRRLAEKRIGVRDVRLNGSAASHVLHQDSGLGYKDLDLIFCADLRGEGEFQTVKDVVLDCLLDFLPEGVNKEKITPLTLKEAYVQKMVKVCNDSDRWSLISLSNNSGKNVELKFVDSLRRQFEFSVDSFQIKLDSLLLFYECSENPMTETFHPTIIGESVYGDFQEAFDHLCNKIIATRNPEEIRGGGLLKYCNLLVRGFRPASDEIKTLQRYMCSRFFIDFSDIGEQQRKLESYLQNHFVGLEDRKYEYLMTLHGVVNESTVCLMGHERRQTLNLITMLAIRVLADQNVIPNVANVTCYYQPAPYVADANFSNYYIAQVQPVFTCQQQTYSTWLPCN

SEQ ID NO: 8850 - protein, 334 aa, Homo sapiens
MGGAVSAGEDNDELIDNLKEAQYIRTELVEQAFRAIDRADYYLEEFKENAYKDLAWKHGNIHLSAPCIYSEVMEALDLQPGLSFLNLGSGTGYLSSMVGLILGPFGVNHGVELHSDVIEYAKQKLDFFIRTSDSFDKFDFCEPSFVTGNCLEISPDCSQYDRVYCGAGVQKEHEEYMKNLLKVGGILVMPLEEKPCHSESGKSRLVQLPPVAVRSLQDLARIAIRGTIKKIIHQETVSKNGNGLKNTPRFKRRRVRRRRMETIVFLDKEVFASRISNPSDDNSCEDLEEERREEEEKTPPETKPDPPVNFLRQKVLSLPLPDPLKYYLLYYREK

SEQ ID NO: 8851 - protein, 769 aa, Homo sapiens
MSNNLRRVFLKPAEENSGNASRCVSGCMYQVVQTIGSDGKNLLQLLPIPKSSGNLIPLVQSSVMSDALKGNTGKPVQVTFQTQISSSSTSASVQLPIFQPASSSNYFLTRTVDTSEKGRVTSVGTGNFSSSVSKVQSHGVKIDGLTMQTFAVPPSTQKDSSFIVVNTQSLPVTVKSPVLPSGHHLQIPAHAEVKSVPASSLPPSVQQKILATATTSTSGMVEASQMPTVIYVSPVNTVKNVVTKNFQNIYPKPVTEIAKPVILNTTQIPKNVATETQLKGGQHSQAAPVKWIFQDNLQPFTPSLVPVKSSNNVASKILKTFVDRKNLGDNTINMPPLSTIDPSGTRSKNMPIKDNALVMFNGKVYLLAKKGTDVLPSQIDQQNSVSPDTPVRKDTLQTVSSSPVTEISREVVNIVLAKSKSSQMETKSLSNTQLASMANLRAEKNKVEKPSPSTTNPHMNQSSNYLKQSKTLFTNPIFPVGFSTGHNAPRKVTAVIYARKGSVLQSIEKISSSVDATTVTSQQCVFRDQEPKIHNEMASTSDKGAQGRNDKKDSQGRSNKALHLKSDAEFKKIFGLTKDLRVCLTRIPDHLTSGEGFDSFSSLVKSGTYKETEFMVKEGERKQQNFDKKRKAKTNKKMDHIKKRKTENAYNAIINGEANVTGSQLLSSILPTSDVSQHNILTSHSKTRQEKRTEMEYYTHEKQEKGTLNSNAAYEQSHFFNKNYTEDIFPVTPPELEETIRDEKIRRLKQVLREKEAALEEMRKKMHQK

SEQ ID NO: 8852 - protein, 333 aa, Homo sapiens
MQAAGHPEPLDSRGSFSLPTMGANVSQDNGTGHNATFSEPLPFLYVLLPAVYSGICAVGLTGNTAVILVILRAPKMKTVTNVFILNLAVADGLFTLVLPVNIAEHLLQYWPFGELLCKLVLAVDHYNIFSSIYFLAVMSVDRYLVVLATVRSRHMPWRTYRGAKVASLCVWLGVTVLVLPFFSFAGVYSNELQVPSCGLSFPWPEQVWFKASRVYTLVLGFVLPVCTICVLYTDLLRRLRAVRLRSGAKALGKARRKVTVLVLVVLAVCLLCWTPFHLASVVALTTDLPQTPLVISMSYVITSLSYANSCLNPFLYAFLDDNFRKNFRSILRC

SEQ ID NO: 8853 - protein, 575 aa, Homo sapiens
MDERLSLLRSPPPPSARHRAHPPQRPASSGGAHTLVNHGYAEPAAGRELPPDMTVVPGDHLLEPEVADGGGAPPQGGCGGGGCDRYEPLPPSLPAAGEQDCCGERVVINISGLRFETQLKTLCQFPETLLGDPKRRMRYFDPLRNEYFFDRNRPSFDAILYYYQSGGRIRRPVNVPIDIFSEEIRFYQLGEEAMEKFREDEGFLREEERPLPRRDFQRQVWLLFEYPESSGPARGIAIVSVLVILISIVIFCLETLPEFRDEKDYPASTSQDSFEAAGNSTSGSRAGASSFSDPFFVVETLCIIWFSFELLVRFFACPSKATFSRNIMNLIDIVAIIPYFITLGTELAERQGNGQQAMSLAILRVIRLVRVFRIFKLSRHSKGLQILGQTLKASMRELGLLIFFLFIGVILFSSAVYFAEADDPTSGFSSIPDAFWWAVVTMTTVGYGDMHPVTIGGKIVGSLCAIAGVLTIALPVPVIVSNFNYFYHRETEGEEQSQYMHVGSCQHLSSSAEELRKARSNSTLSKSEYMVIEEGGMNHSAFPQTPFKTGNSTATCTTNNNPNSCVNIKKIFTDV

SEQ ID NO: 8854 - protein, 356 aa, Homo sapiens
MTVATGDPADEAAALPGHPQDTYDPEADHECCERVVINISGLRFETQLKTLAQFPETLLGDPKKRMRYFDPLRNEYFFDRNRPSFDAILYYYQSGGRLRRPVNVPLDIFSEEIRFYELGEEAMEMFREDEGYIKEEERPLPENEFQRQVWLLFEYPESSGPARIIAIVSVMVILISIVSFCLETLPIFRDENEDMHGSGVTFHTYSNSTIGYQQSTSFTDPFFIVETLCIIWFSFEFLVRFFACPSKAGFFTNIMNIIDIVAIIPYFITLGTELAEKPEDAQQGQQAMSLAILRVIRLERRPLQSQKSKRGRQHLNTSHDCTLGINLVAGMTVQWTRASGPDDRQTPAVTTLHRMY

SEQ ID NO: 8855 - protein, 511 aa, Homo sapiens
MDVCGWKEMEVALVNFDNSDEIQEEPGYATDFDSTSPKGRPGGSSFSNGKILISESTNHETAFSKLPGDYADPPGPEPVVLNEGNQRVIINIAGLRFETQLRTLSQFPETLLGDREKRMQFFDSMRNEYFFDRNRPSFDGILYYYQSGGKIRRPANVPIDIFADEISFYELGSEAMDQFREDEGFIKDPETLLPTNDIHRQFWLLFEYPESSSAARAVAVVSVLVVVISITIFCLETLPEFREDRELKVVRDPNLNMSKTVLSQTMFTDPFFMVESTCIVWFTFELVLRFVVCPSKTDFFRNIMNIIDIISIIPYFATLITELVQETEPSAQQNMSLAILRIIRLVRVFRIFKLSRHSKGLQILGQTLKASMRELGLLIFFLFIGVILFSSAVYFAEVDEPESHFSSIPDGFWWAVVTMTTVGYGDMCPTTPGGKIVGTLCAIAGVLTIALPVPVIVSNFNYFYHRETENEEKQNIPGEIERILNSVGSRMGSTDSLNKTNGGCSTEKSRK

SEQ ID NO: 8856 - protein, 1133 aa, Homo sapiens
MLAYCVQDATVVDVEKRRNPSKHYVYIINVTWSDSTSQTIYRRYSKFFDLQMQLLDKFPIEGGQKDPKQRIIPFLPGKILFRRSHIRDVAVKRLKPIDEYCRALVRLPPHISQCDEVFRFFEARPEDVNPPKEDYGSSKRKSVWLSSWAESPKKDVTGADATAEPMILEQYVVVSNYKKQENSELSLQAGEVVDVIEKNESGWWFVSTSEEQGWVPATYLEAQNGTRDDSDINTSKTGEVSKRRKAHLRRLDRRWTLGGMVNRQHSREEKYVTVQPYTSQSKDEIGFEKGVTVEVIRKNLEGWWYIRYLGKEGWAPASYLKKAKDDLPTRKKNLAGPVEIIGNIMEISNLLNKKASGDKETPPAEGEGHEAPIAKKEISLPILCNASNGSAVGVPDRTVSRLAQGSPAVARIAPQRAQISSPNLRTRPPPRRESSLGFQLPKPPEPPSVEVEYYTIAEFQSCISDGISFRGGQKAEVIDKNSGGWWYVQIGEKEGWAPASYIDKRKKPNLSRRTSTLTRPKVPPPAPPSKPKEAEEGPTGASESQDSPRKLKYEEPEYDIPAFGFDSEPELSEEPVEDRASGERRPAQPHRPSPASSLQRARFKVGESSEDVALEEETIYENEGFRPYAEDTLSARGSSGDSDSPGSSSLSLTRKNSPKSGSPKSSSLLKLKAEKNAQAEMGKNHSSASFSSSITINTTCCSSSSSSSSSLSKTSGDLKPRSASDAGIRGTPKVRAKKDADANAGLTSCPRAKPSVRPKPFLNRAESQSQEKMDISTLRRQLRPTGQLRGGLKGSKSEDSELPPQTASEAPSEGSRRSSSDLITLPATTPPCPTKKEWEGPATSYMTCSAYQKVQDSEISFPAGVEVQVLEKQESGWWYVRFGELEGWAPSHYLVLDENEQPDPSGKELDTVPAKGRQNEGKSDSLEKIERRVQALNTVNQSKKATPPIPSKPPGGFGKTSGTPAVKMRNGVRQVAVRPQSVFVSPPPKDNNLSCALRRNESLTATDGLRGVRRNSSFSTARSAAAEAKGRLAERAASQGSDSPLLPAQRNSIPVSPVRPKPIEKSQFIHNNLKDVYVSIADYEGDEETAGFQEGVSMEVLERNPNGWWYCQILDGVKPFKGWVPSNYLEKKN

SEQ ID NO: 8857 - protein, 574 aa, Homo sapiens
MGNNFSSIPSLPRGNPSRAPRGHPQNLKDSIGGPFPVTSHRCHHKQKHCPAVLPSGGLPATPLLFHPHTKGSQILMDLSHKAVKRQASFCNAITFSNRPVLIYEQVRLKITKKQCCWSGALRLGFTSKDPSRIHPDSLPKYACPDLVSQSGFWAKALPEEFANEGNIIAFWVDKKGRVFHRINDSAVMLFFSGVRTADPLWALVDVYGLTRGVQLLDSELVLPDCLRPRSFTALRRPSLRREADDARLSVSLCDLNVPGADGDEAAPAAGCPIPQNSLNSQHSRALPAQLDGDLRFHALRAGAHVRILDEQTVARVEHGRDERALVFTSRPVRVAETIFVKVTRSGGARPGALSFGVTTCDPGTLRPADLPFSPEALVDRKEFWAVCRVPGPLHSGDILGLVVNADGELHLSHNGAAAGMQLCVDASQPLWMLFGLHGTITQIRILGSTILAERGIPSLPCSPASTPTSPSALGSRLSDPLLSTCSSGPLGSSAGGTAPNSPVSLPESPVTPGLGQWSDECTICYEHAVDTVIYTCGHMCLCYACGLRLKKALHACCPICRRPIKDIIKTYRSS

SEQ ID NO: 8858 - protein, 344 aa, Homo sapiens
MDKFRMLFQHFQSSSESVMNGICLLLAAVTVKLYSSFDFNCPCLVHYNALYGLGLLLTPPLALFLCGLLANRQSVVMVEEWRRPAGHRRKDPGIIRYMCSSVLQRALAAPLVWILLALLDGKCFVCAFSSSVDPEKFLDFANMTPSQVQLFLAKVPCKEDELVRDSPARKAVSRYLRCLSQAIGWSVTLLLIIAAFLARCLRPCFDQTVFLQRRYWSNYVDLEQKLFDETCCEHARDFAHRCVLHFFASMRSELQARGLRRGNAGRRLELPAVPEPPEGLDSGSGKAHLRAISSREQVDRLLSTWYSSKPPLDLAASPGLCGGGLSHRAPTLALGTRLSQHTDV

SEQ ID NO: 8859 - protein, 977 aa, Homo sapiens
MRTAGRDPVPRRSPRWRRAVPLCETSAGRRVTQLRGDDLRRPATMKGKERSPVKAKRSRGGEDSTSRGERSKKLGGSGGSNGSSSGKTDSGGGSRRSLHLDKSSSRGGSREYDTGGGSSSSRLHSYSSPSTKNSSGGGESRSSSRGGGGESRSSGAASSAPGGGDGAEYKTLKISELGSQLSDEAVEDGLFHEFKRFGDVSVKISHLSGSGSGDERVAFVNFRRPEDARAAKHARGRLVLYDRPLKIEAVYVSRRRSRSPLDKDTYPPSASVVGASVGGHRHPPGGGGGQRSLSPGGAALGYRDYRLQQLALGRLPPPPPPPLPRDLERERDYPFYERVRPAYSLEPRVGAGAGAAPFREVDEISPEDDQRANRTLFLGNLDITVTESDLRRAFDRFGVITEVDIKRPSRGQTSTYGFLKFENLDMSHRAKLAMSGKIIIRNPIKIGYGKATPTTRLWVGGLGPWVPLAALAREFDRFGTIRTIDYRKGDSWAYIQYESLDAAHAAWTHMRGFPLGGPDRRLRVDFADTEHRYQQQYLQPLPLTHYELVTDAFGHRAPDPLRGARDRTPPLLYRDRDRDLYPDSDWVPPPPPVRERSTRTAATSVPAYEPLDSLDRRRDGWSLDRDRGDRDLPSSRDQPRKRRLPEESGGRHLDRSPESDRPRKRHCAPSPDRSPELSSSRDRYNSDNDRSSRLLLERPSPIRDRRGSLEKSQGDKRDRKNSASAERDRKHRTTAPTEGKSPLKKEDRSDGSAPSTSTASSKLKSPSQKQDGGTAPVASASPKLCLAWQGMLLLKNSNFPSNMHLLQGDLQVASSLLVEGSTGGKVAQLKITQRLRLDQPKLDEVTRRIKVAGPNGYAILLAVPGSSDSRSSSSSAASDTATSTQRPLRNLVSYLKQKQAAGVISLPVGGNKDKENTGVLHAFPPCEFSQQFLDSPAKALAKSEEDYLVMIIVRGFGFQIGVRYENKKRENLALTLL

SEQ ID NO: 8860 - protein, 635 aa, Homo sapiens
MISSVCVSSYRGRKSGNKPPSKTCLKEEMAKGEASEKIIINVGGTRHETYRSTLRTLPGTRLAWLADPDGGGRPETDGGGVGSSGSSGGGGCEFFFDRHPGVFAYVLNYYRTGKLHCPADVCGPLFEEELTFWGIDETDVEPCCWMTYRQHRDAEEALDIFESPDGGGSGAGPSDEAGDDERELALQRLGPHEGGAGHGAGSGGCRGWQPRMWALFEDPYSSRAARVVAFASLFFILVSITTFCLETHEAFNIDRNVTEILRVGNITSVHFRREVETEPILTYIEGVCVLWFTLEFLVRIVCCPDTLDFVKNLLNIIDFVAILPFYLEVGLSGLSSKAARDVLGFLRVVRFVRILRIFKLTRHFVGLRVLGHTLRASTNEFLLLIIFLALGVLIFATMIYYAERIGARPSDPRGNDHTDFKNIPIGFWWAVVTMTTLGYGDMYPKTWSGMLVGALCALAGVLTIAMPVPVIVNNFGMYYSLAMAKQKLPKKRKKHVPRPAQLESPMYCKSEETSPRDSTCSDTSPPAREEGMIERKRADSKQNGDANAVLSDEEGAGLTQPLASSPTPEERRALRRSTTRDRNKKAAACFLLSTGDYACADGSVRKGTFVLRDLPLQHSPEAACPPTAGTLFLPH

SEQ ID NO: 8861 - protein, 1871 aa, Homo sapiens
MANLEESFPRGGTRKIHKPEKAFQQSVEQDNLFDISTEEGSTKRKKSQKGPAKTKKLKIEKRESSKSAREKFEILSVESLCEGMRILGCVKEVNELELVISLPNGLQGFVQVTEICDAYTKKLNEQVTQEQPLKDLLHLPELFSPGMLVRCVVSSLGITDRGKKSVKLSLNPKNVNRVLSAEALKPGMLLTGTVSSLEDHGYLVDIGVDGTRAFLPLLKAQEYIRQKNKGAKLKVGQYLNCIVEKVKGNGGVVSLSVGHSEVSTAIATEQQSWNLNNLLPGLVVKAQVQKVTPFGLTLNFLTFFTGVVDFMHLDPKKAGTYFSNQAVRACILCVHPRTRVVHLSLRPIFLQPGRPLTRLSCQNLGAVLDDVPVQGFFKKAGATFRLKDGVLAYARLSHLSDSKNVFNPEAFKPGNTHKCRIIDYSQMDELALLSLRTSIIEAQYLRYHDIEPGAVVKGTVLTIKSYGMLVKVGEQMRGLVPPMHLADILMKNPEKKYHIGDEVKCRVLLCDPEAKKLMMTLKKTLIESKLPVITCYADAKPGLQTHGFIIRVKDYGCIVKFYNNVQGLVPKHELSTEYIPDPERVFYTGQVVKVVVLNCEPSKERMLLSFKLSSDPEPKKEPAGHSQKKGKAINIGQLVDVKVLEKTKDGLEVAVLPHNIRAFLPTSHLSDHVANGPLLHHWLQAGDILHRVLCLSQSEGRVLLCRKPALVSTVEGGQDPKNFSEIHPGMLLIGFVKSIKDYGVFIQFPSGLSGLAPKAIMSDKFVTSTSDHFVEGQTVAAKVTNVDEEKQRMLLSLRLSDCGLGDLAITSLLLLNQCLEELQGVRSLMSNRDSVLIQTLAEMTPGMFLDLVVQEVLEDGSVVFSGGPVPDLVLKASRYHRAGQEVESGQKKKVVILNVDLLKLEVHVSLHQDLVNRKARKLRKGSEHQAIVQHLEKSFAIASLVETGHLAAFSLTSHLNDTFRFDSEKLQVGQGVSLTLKTTEPGVTGLLLAVEGPAAKRTMRPTQKDSETVDEDEEVDPALTVGTIKKHTLSIGDMVTGTVKSIKPTHVVVTLEDGIIGCIHASHILDDVPEGTSPTTKLKVGKTVTARVIGGRDMKTFKYLPISHPRFVRTIPELSVRPSELEDGHTALNTHSVSPMEKIKQYQAGQTVTCFLKKYNVVKKWLEVEIAPDIRGRIPLLLTSLSFKVLKHPDKKFRVGQALRATVVGPDSSKTLLCLSLTGPHKLEEGEVAMGRVVKVTPNEGLTVSFPFGKIGTVSIFHMSDSYSETPLEDFVPQKVVRCYILSTADNVLTLSLRSSRTNPETKSKVEDPEINSIQDIKEGQLLRGYVGSIQPHGVFFRLGPSVVGLARYSHVSQHSPSKKALYNKHLPEGKLLTARVLRLNHQKNLVELSFLPGDTGKPDVLSASLEGQLTKQEERKTEAEERDQKGEKKNQKRNEKKNQKGQEEVEMPSKEKQQPQKPQAQKRGGRECRESGSEQERVSKKPKKAGLSEEDDSLVDVYYREGKEEAEETNVLPKEKQTKPAEAPRLQLSSGFAWNVGLDSLTPALPPLAESSDSEEDEKPHQATIKKSKKERELEKQKAEKELSRIEEALMDPGRQPESADDFDRLVLSSPNSSILWLQYMAFHLQATEIEKARAVAERALKTISFREEQEKLNVWVALLNLENMYGSQESLTKVFERAVQYNEPLKVFLHLADIYAKSEKFQEAGELYNRMLKRFRQEKAVWIKYGAFLLRRSQAAASHRVLQRALECLPSKEHVDVIAKFAQLEFQLGDAERAKAIFENTLSTYPKRTDVWSVYIDMTIKHGSQKDVRDIFERVIHLSLAPKRMKFFFKRYLDYEKQHGTEKDVQAVKAKALEYVEAKSSVLED

SEQ ID NO: 8862 - protein, 857 aa, Homo sapiens
MESEDLSGRELTIDSIMNKVRDIKNKFKNEDLTDELSLNKISADTTDNSGTVNQIMMMANNPEDWLSLLLKLEKNSVPLSDALLNKLIGRYSQAIEALPPDKYGQNESFARIQVRFAELKAIQEPDDARDYFQMARANCKKFAFVHISFAQFELSQGNVKKSKQLLQKAVERGAVPLEMLEIALRNLNLQKKQLLSEEEKKNLSASTVLTAQESFSGSLGHLQNRNNSCDSRGQTTKARFLYGENMPPQDAEIGYRNSLRQTNKTKQSCPFGRVPVNLLNSPDCDVKTDDSVVPCFMKRQTSRSECRDLVVPGSKPSGNDSCELRNLKSVQNSHFKEPLVSDEKSSELIITDSITLKNKTESSLLAKLEETKEYQEPEVPESNQKQWQSKRKSECINQNPAASSNHWQIPELARKVNTEQKHTTFEQPVFSVSKQSPPISTSKWFDPKSICKTPSSNTLDDYMSCFRTPVVKNDFPPACQLSTPYGQPACFQQQQHQILATPLQNLQVLASSSANECISVKGRIYSILKQIGSGGSSKVFQVLNEKKQIYAIKYVNLEEADNQTLDSYRNEIAYLNKLQQHSDKIIRLYDYEITDQYIYMVMECGNIDLNSWLKKKKSIDPWERKSYWKNMLEAVHTIHQHGIVHSDLKPANFLIVDGMLKLIDFGIANQMQPDTTSVVKDSQVGTVNYMPPEAIKDMSSSRENGKSKSKISPKSDVWSLGCILYYMTYGKTPFQQIINQISKLHAIIDPNHEIEFPDIPEKDLQDVLKCCLKRDPKQRISIPELLAHPYVQIQTHPVNQMAKGTTEEMKYVLGQLVGLNSPNSILKAAKTLYEHYSGGESHNSSSSKTFEKKRGKK

SEQ ID NO: 8863 - protein, 530 aa, Homo sapiens
MSMPDAMPLPGVGEELKQAKEIEDAEKYSFMATVTKAPKKQIQFADDMQEFTKFPTKTGRRSLSRSISQSSTDSYSSAASYTDSSDDEVSPREKQQTNSKGSSNFCVKNIKQAEFGRREIEIAEQDMSALISLRKRAQGEKPLAGAKIVGCTHITAQTAVLIETLCALGAQCRWSACNIYSTQNEVAAALAEAGVAVFAWKGESEDDFWWCIDRCVNMDGWQANMILDDGGDLTHWVYKKYPNVFKKIRGIVEESVTGVHRLYQLSKAGKLCVPAMNVNDSVTKQKFDNLYCCRESILDGLKRTTDVMFGGKQVVVCGYGEVGKGCCAALKALGAIVYITEIDPICALQACMDGFRVVKLNEVIRQVDVVITCTGNKNVVTREHLDRMKNSCIVCNMGHSNTEIDVTSLRTPELTWERVRSQVDHVIWPDGKRVVLLAEGRLLNLSCSTVPTFVLSITATTQALALIELYNAPEGRYKQDVYLLPKKMDEYVASLHLPSFDAHLTELTDDQAKYLGLNKNGPFKPNYYRY

SEQ ID NO: 8864 - protein, 594 aa, Homo sapiens
MSRPSSRAIYLHRKEYSQNLTSEPTLLQHRVEHLMTCKQGSQRVQGPEDALQKLFEMDAQGRVWSQDLILQVRDGWLQLLDIETKEELDSYRLDSIQAMNVALNTCSYNSILSITVQEPGLPGTSTLLFQCQEVGAERLKTSLQKALEEELEQSRPRLGGLQPGQDRWRGPAMERPLPMEQARYLEPGIPPEQPHQRTLEHSLPPSPRPLPRHTSAREPSAFTLPPPRRSSSPEDPERDEEVLNHVLRDIELFMGKLEKAQAKTSRKKKFGKKNKDQGGLTQAQYIDCFQKIKHSFNLLGRLATWLKETSAPELVHILFKSLNFILARCPEAGLAAQVISPLLTPKAINLLQSCLSPPESNLWMGLGPAWTTSRADWTGDEPLPYQPTFSDDWQLPEPSSQAPLGYQDPVSLRRGSHRLGSTSHFPQEKTHNHDPQPGDPNSRPSSPKPAQPALKMQVLYEFEARNPRELTVVQGEKLEVLDHSKRWWLVKNEAGRSGYIPSNILEPLQPGTPGTQGQSPSRVPMLRLSSRPEEVTDWLQAENFSTATVRTLGSLTGSQLLRIRPGELQMLCPQEAPRILSRLEAVRRMLGISP

SEQ ID NO: 8865 - protein, 237 aa, Homo sapiens
MPMILGYWDIRGLAHAIRLLLEYTDSSYEEKKYTMGDAPDYDRSQWLNEKFKLGLDFPNGMLGSLVAQLSFAGFPSIQLPYLIDGAHKITQSNAILCYIARKHNLCGETEEEKIRVDILENQTMDNHMQLGMICYNPEFEKLKPKYLEELPEKLKLYSEFLGKRPWFAGNKITFVDFLVYDVLDLHRIFEPKCLDAFPNLKDFISRFEGLEKISAYMKSSRFLPRPVFSKMAVWGNK

SEQ ID NO: 8866 - protein, 800 aa, Homo sapiens
MAALAEEQTEVAVKLEPEGPPTLLPPQAGDGAGEGSGGTTNNGPNGGGGNVAASSSTGGDGGTPKPTVAVSAAAPAGAAPVPAAAPDAGAPHDRQTLLAVLQFLRQSKLREAEEALRREAGLLEEAVAGSGAPGEVDSAGAEVTSALLSRVTASAPGPAAPDPPGTGASGATVVSGSASGPAAPGKVGSVAVEDQPDVSAVLSAYNQQGDPTMYEEYYSGLKHFIECSLDCHRAELSQLFYPLFVHMYLELVYNQHENEAKSFFEKFHGDQECYYQDDLRVLSSLTKKEHMKGNETMLDFRTSKFVLRISRDSYQLLKRHLQEKQNNQIWNIVQEHLYIDIFDGMPRSKQQIDAMVGSLAGEAKREANKSKVFFGLLKEPEIEVPLDDEDEEGENEEGKPKKKKPKKDSIGSKSKKQDPNAPPQNRIPLPELKDSDKLDKIMNMKETTKRVRLGPDCLPSICFYTFLNAYQGLTAVDVTDDSSLIAGGFADSTVRVWSVTPKKLRSVKQASDLSLIDKESDDVLERIMDEKTASELKILYGHSGPVYGASFSPDRNYLLSSSEDGTVRLWSLQTFTCLVGYKGHNYPVWDTQFSPYGYYFVSGGHDRVARLWATDHYQPLRIFAGHLADVNCTRFHPNSNYVATGSADRTVRLWDVLNGNCVRIFTGHKGPIHSLTFSPNGRFLATGATDGRVLLWDIGHGLMVGELKGHTDTVCSLRFSRDGEILASGSMDNTVRLWDAIKAFEDLETDDFTTATGHINLPENSQELLLGTYMTKSTPVVHLHFTRRNLVLAAGAYSPQ

SEQ ID NO: 8867 - protein, 697 aa, Homo sapiens
MGERAGSPGTDQERKAGKHHYSYLSDFETPQSSGRSSLVSSSPASVRRKNPKRQTSDGQVHHQAPRKPSPKGLPNRKGVRVGFRSQSLNREPLRKDTDLVTKRILSARLLKINELQNEVSELQVKLAELLKENKSLKRLQYRQEKALNKFEDAENEISQLIFRHNNEITALKERLRKSQEKERATEKRVKDTESELFRTKFSLQKLKEISEARHLPERDDLAKKLVSAELKLDDTERRIKELSKNLELSTNSFQRQLLAERKRAYEAHDENKVLQKEVQRLYHKLKEKERELDIKNIYSNRLPKSSPNKEKELALRKNAACQSDFADLCTKGVQTMEDFKPEEYPLTPETIMCYENKWEEPGHLTLDLQSQKQDRHGEAGILNPIMEREEKFVTDEELHVVKQEVEKLEDEWEREELDKKQKEKASLLEREEKPEWETGRYQLGMYPIQNMDKLQGEEEERLKREMLLAKLNEIDRELQDSRNLKYPVLPLLPDFESKLHSPERSPKTYRFSESSERLFNGHHLQDISFSTPKGEGQNSGNVRSPASPNEFAFGSYVPSFAKTSERSNPFSQKSSFLDFQRNSMEKLSKDGVDLITRKEKKANLMEQLFGASGSSTISSKSSDPNSVASSKGDIDPLNFLPGNKGSRDQEHDEDEGFFLSEGRSFNPNRHRLKHADDKPAVKAADSVEDEIEEVALR

SEQ ID NO: 8868 - protein, 499 aa, Homo sapiens
MSFGSEHYLCSSSSYRKVFGDGSRLSARLSGAGGAGGFRSQSLSRSNVASSAACSSASSLGLGLAYRRPPASDGLDLSQAAARTNEYKIIRTNEKEQLQGLNDRFAVFIEKVHQLETQNRALEAELAALRQRHAEPSRVGELFQRELRDLRAQLEEASSARSQALLERDGLAEEVQRLRARCEEESRGREGAERALKAQQRDVDGATLARLDLEKKVESLLDELAFVRQVHDEEVAELLATLQASSQAAAEVDVTVAKPDLTSALREIRAQYESLAAKNLQSAEEWYKSKFANLNEQAARSTEAIRASREEIHEYRRQLQARTIEIEGLRGANESLERQILELEERHSAEVAGYQDSIGQLENDLRNTKSEMARHLREYQDLLNVKMALDIEIAAYRKLLEGEETRFSTSGLSISGLNPLPNPSYLLPPRILSATTSKVSSTGLSLKKEEEEEEASKVASKKTSQIGESFEEILEETVISTKKTEKSNIEETTISSQKI

SEQ ID NO: 8869 - protein, 2647 aa, Homo sapiens
MSSSHSRAGQSAAGAAPGGGVDTRDAEMPATEKDLAEDAPWKKIQQNTFTRWCNEHLKCVSKRIANLQTDLSDGLRLIALLEVLSQKKMHRKHNQRPTFRQMQLENVSVALEFLDRESIKLVSIDSKAIVDGNLKLILGLIWTLILHYSISMPMWDEEEDEEAKKQTPKQRLLGWIQNKLPQLPITNFSRDWQSGRALGALVDSCAPGLCPDWDSWDASKPVTNAREAMQQADDWLGIPQVITPEEIVDPNVDEHSVMTYLSQFPKAKLKPGAPLRPKLNPKKARAYGPGIEPTGNMVKKRAEFTVETRSAGQGEVLVYVEDPAGHQEEAKVTANNDKNRTFSVWYVPEVTGTHKVTVLFAGQHIAKSPFEVYVDKSQGDASKVTAQGPGLEPSGNIANKTTYFEIFTAGAGTGEVEVVIQDPMGQKGTVEPQLEARGDSTYRCSYQPTMEGVHTVHVTFAGVPIPRSPYTVTVGQACNPSACRAVGRGLQPKGVRVKETADFKVYTKGAGSGELKVTVKGPKGEERVKQKDLGDGVYGFEYYPMVPGTYIVTITWGGQNIGRSPFEVKVGTECGNQKVRAWGPGLEGGVVGKSADFVVEAIGDDVGTLGFSVEGPSQAKIECDDKGDGSCDVRYWPQEAGEYAVHVLCNSEDIRLSPFMADIRDAPQDFHPDRVKARGPGLEKTGVAVNKPAEFTVDAKHGGKAPLRVQVQDNEGCPVEALVKDNGNGTYSCSYVPRKPVKHTAMVSWGGVSIPNSPFRVNVGAGSHPNKVKVYGPGVAKTGLKAHEPTYFTVDCAEAGQGDVSIGIKCAPGVVGPAEADIDFDIIRNDNDTFTVKYTPRGAGSYTIMVLFADQATPTSPIRVKVEPSHDASKVKAEGPGLSRTGVELGKPTHFTVNAKAAGKGKLDVQFSGLTKGDAVRDVDIIDHHDNTYTVKYTPVQQGPVGVNVTYGGDPIPKSPFSVAVSPSLDLSKIKVSGLGEKVDVGKDQEFTVKSKGAGGQGKVASKIVGPSGAAVPCKVEPGLGADNSVVRFLPREEGPYEVEVTYDGVPVPGSPFPLEAVAPTKPSKVKAFGPGLQGGSAGSPARFTIDTKGAGTGGLGLTVEGPCEAQLECLDNGDGTCSVSYVPTEPGDYNINILFADTHIPGSPFKAHVVPCFDASKVKCSGPGLERATAGEVGQFQVDCSSAGSAELTIEICSEAGLPAEVYIQDHGDGTHTITYIPLCPGAYTVTIKYGGQPVPNFPSKLQVEPAVDTSGVQCYGPGIEGQGVFREATTEFSVDARALTQTGGPHVKARVANPSGNLTETYVQDRGDGMYKVEYTPYEEGLHSVDVTYDGSPVPSSPFQVPVTEGCDPSRVRVHGPGIQSGTTNKPNKFTVETRGAGTGGLGLAVEGPSEAKMSCMDNKDGSCSVEYIPYEAGTYSLNVTYGGHQVPGSPFKVPVHDVTDASKVKCSGPGLSPGMVRANLPQSFQVDTSKAGVAPLQVKVQGPKGLVEPVDVVDNADGTQTVNYVPSREGPYSISVLYGDEEVPRSPFKVKVLPTHDASKVKASGPGLNTTGVPASLPVEFTIDAKDAGEGLLAVQITDPEGKPKKTHIQDNHDGTYTVAYVPDVTGRYTILIKYGGDEIPFSPYRVRAVPTGDASKCTVTVSIGGHGLGAGIGPTIQIGEETVITVDTKAAGKGKVTCTVCTPDGSEVDVDVVENEDGTFDIFYTAPQPGKYVICVRFGGEHVPNSPFQVTALAGDQPSVQPPLRSQQLAPQYTYAQGGQQTWAPERPLVGVNGLDVTSLRPFDLVIPFTIKKGEITGEVRMPSGKVAQPTITDNKDGTVTVRYAPSEAGLHEMDIRYDNMHIPGSPLQFYVDYVNCGHVTAYGPGLTHGVVNKPATFTVNTKDAGEGGLSLAIEGPSKAEISCTDNQDGTCSVSYLPVLPGDYSILVKYNEQHVPGSPFTARVTGDDSMRMSHLKVGSAADIPINISETDLSLLTATVVPPSGREEPCLLKRLRNGHVGISFVPKETGEHLVHVKKNGQHVASSPIPVVISQSEIGDASRVRVSGQGLHEGHTFEPAEFIIDTRDAGYGGLSLSIEGPSKVDINTEDLEDGTCRVTYCPTEPGNYIINIKFADQHVPGSPFSVKVTGEGRVKESITRRRRAPSVANVGSHCDLSLKIPEISIQDMTAQVTSPSGKTHEAEIVEGENHTYCIRFVPAEMGTHTVSVKYKGQHVPGSPFQFTVGPLGEGGAHKVRAGGPGLERAEAGVPAEFSIWTREAGAGGLAIAVEGPSKAEISFEDRKDGSCGVAYVVQEPGDYEVSVKFNEEHIPDSPFVVPVASPSGDARRLTVSSLQESGLKVNQPASFAVSLNGAKGAIDAKVHSPSGALEECYVTEIDQDKYAVRFIPRENGVYLIDVKFNGTHIPGSPFKIRVGEPGHGGDPGLVSAYGAGLEGGVTGNPAEFVVNTSNAGAGALSVTIDGPSKVKMDCQECPEGYRVTYTPMAPGSYLISIKYGGPYHIGGSPFKAKVTGPRLVSNHSLHETSSVFVDSLTKATCAPQHGAPGPGPADASKVVAKGLGLSKAYVGQKSSFTVDCSKAGNNMLLVGVHGPRTPCEEILVKHVGSRLYSVSYLLKDKGEYTLVVKWGDEHIPGSPYRVVVP

SEQ ID NO: 8870 - protein, 354 aa, Homo sapiens
MGCTLSAEDKAAVERSKMIDRNLREDGEKAAKEVKLLLLGAGESGKSTIVKQMKIIHEDGYSEDECKQYKVVVYSNTIQSIIAIIRAMGRLKIDFGEAARADDARQLFVLAGSAEEGVMTPELAGVIKRLWRDGGVQACFSRSREYQLNDSASYYLNDLDRISQSNYIPTQQDVLRTRVKTTGIVETHFTFKDLYFKMFDVGGQRSERKKWIHCFEGVTAIIFCVALSDYDLVLAEDEEMNRMHESMKLFDSICNNKWFTETSIILFLNKKDLFEEKIKRSPLTICYPEYTGSNTYEEAAAYIQCQFEDLNRRKDTKEIYTHFTCATDTKNVQFVFDAVTDVIIKNNLKECGLY

SEQ ID NO: 8871 - protein, 2620 aa, Homo sapiens
MPATEKDLAEDAPWKKIQQNTFTRWCNEHLKCVSKRIANLQTDLSDGLRLIALLEVLSQKKMHRKHNQRPTFRQMQLENVSVALEFLDRESIKLVSIDSKAIVDGNLKLILGLIWTLILHYSISMPMWDEEEDEEAKKQTPKQRLLGWIQNKLPQLPITNFSRDWQSGRALGALVDSCAPGLCPDWDSWDASKPVTNAREAMQQADDWLGIPQVITPEEIVDPNVDEHSVMTYLSQFPKAKLKPGAPLRPKLNPKKARAYGPGIEPTGNMVKKRAEFTVETRSAGQGEVLVYVEDPAGHQEEAKVTANNDKNRTFSVWYVPEVTGTHKVTVLFAGQHIAKSPFEVYVDKSQGDASKVTAQGPGLEPSGNIANKTTYFEIFTAGAGTGEVEVVIQDPMGQKGTVEPQLEARGDSTYRCSYQPTMEGVHTVHVTFAGVPIPRSPYTVTVGQACNPSACRAVGRGLQPKGVRVKETADFKVYTKGAGSGELKVTVKGPKGEERVKQKDLGDGVYGFEYYPMVPGTYIVTITWGGQNIGRSPFEVKVGTECGNQKVRAWGPGLEGGVVGKSADFVVEAIGDDVGTLGFSVEGPSQAKIECDDKGDGSCDVRYWPQEAGEYAVHVLCNSEDIRLSPFMADIRDAPQDFHPDRVKARGPGLEKTGVAVNKPAEFTVDAKHGGKAPLRVQVQDNEGCPVEALVKDNGNGTYSCSYVPRKPVKHTAMVSWGGVSIPNSPFRVNVGAGSHPNKVKVYGPGVAKTGLKAHEPTYFTVDCAEAGQGDVSIGIKCAPGVVGPAEADIDFDIIRNDNDTFTVKYTPRGAGSYTIMVLFADQATPTSPIRVKVEPSHDASKVKAEGPGLSRTGVELGKPTHFTVNAKAAGKGKLDVQFSGLTKGDAVRDVDIIDHHDNTYTVKYTPVQQGPVGVNVTYGGDPIPKSPFSVAVSPSLDLSKIKVSGLGEKVDVGKDQEFTVKSKGAGGQGKVASKIVGPSGAAVPCKVEPGLGADNSVVRFLPREEGPYEVEVTYDGVPVPGSPFPLEAVAPTKPSKVKAFGPGLQGGSAGSPARFTIDTKGAGTGGLGLTVEGPCEAQLECLDNGDGTCSVSYVPTEPGDYNINILFADTHIPGSPFKAHVVPCFDASKVKCSGPGLERATAGEVGQFQVDCSSAGSAELTIEICSEAGLPAEVYIQDHGDGTHTITYIPLCPGAYTVTIKYGGQPVPNFPSKLQVEPAVDTSGVQCYGPGIEGQGVFREATTEFSVDARALTQTGGPHVKARVANPSGNLTETYVQDRGDGMYKVEYTPYEEGLHSVDVTYDGSPVPSSPFQVPVTEGCDPSRVRVHGPGIQSGTTNKPNKFTVETRGAGTGGLGLAVEGPSEAKMSCMDNKDGSCSVEYIPYEAGTYSLNVTYGGHQVPGSPFKVPVHDVTDASKVKCSGPGLSPGMVRANLPQSFQVDTSKAGVAPLQVKVQGPKGLVEPVDVVDNADGTQTVNYVPSREGPYSISVLYGDEEVPRSPFKVKVLPTHDASKVKASGPGLNTTGVPASLPVEFTIDAKDAGEGLLAVQITDPEGKPKKTHIQDNHDGTYTVAYVPDVTGRYTILIKYGGDEIPFSPYRVRAVPTGDASKCTVTVSIGGHGLGAGIGPTIQIGEETVITVDTKAAGKGKVTCTVCTPDGSEVDVDVVENEDGTFDIFYTAPQPGKYVICVRFGGEHVPNSPFQVTALAGDQPSVQPPLRSQQLAPQYTYAQGGQQTWAPERPLVGVNGLDVTSLRPFDLVIPFTIKKGEITGEVRMPSGKVAQPTITDNKDGTVTVRYAPSEAGLHEMDIRYDNMHIPGSPLQFYVDYVNCGHVTAYGPGLTHGVVNKPATFTVNTKDAGEGGLSLAIEGPSKAEISCTDNQDGTCSVSYLPVLPGDYSILVKYNEQHVPGSPFTARVTGDDSMRMSHLKVGSAADIPINISETDLSLLTATVVPPSGREEPCLLKRLRNGHVGISFVPKETGEHLVHVKKNGQHVASSPIPVVISQSEIGDASRVRVSGQGLHEGHTFEPAEFIIDTRDAGYGGLSLSIEGPSKVDINTEDLEDGTCRVTYCPTEPGNYIINIKFADQHVPGSPFSVKVTGEGRVKESITRRRRAPSVANVGSHCDLSLKIPEISIQDMTAQVTSPSGKTHEAEIVEGENHTYCIRFVPAEMGTHTVSVKYKGQHVPGSPFQFTVGPLGEGGAHKVRAGGPGLERAEAGVPAEFSIWTREAGAGGLAIAVEGPSKAEISFEDRKDGSCGVAYVVQEPGDYEVSVKFNEEHIPDSPFVVPVASPSGDARRLTVSSLQESGLKVNQPASFAVSLNGAKGAIDAKVHSPSGALEECYVTEIDQDKYAVRFIPRENGVYLIDVKFNGTHIPGSPFKIRVGEPGHGGDPGLVSAYGAGLEGGVTGNPAEFVVNTSNAGAGALSVTIDGPSKVKMDCQECPEGYRVTYTPMAPGSYLISIKYGGPYHIGGSPFKAKVTGPRLVSNHSLHETSSVFVDSLTKATCAPQHGAPGPGPADASKVVAKGLGLSKAYVGQKSSFTVDCSKAGNNMLLVGVHGPRTPCEEILVKHVGSRLYSVSYLLKDKGEYTLVVKWGDEHIPGSPYRVVVP

SEQ ID NO: 8872 - protein, 493 aa, Homo sapiens
MHPHRDPRGLWLLLPSLSLLLFEVARAGRAVVSCPAACLCASNILSCSKQQLPNVPHSLPSYTALLDLSHNNLSRLRAEWTPTRLTQLHSLLLSHNHLNFISSEAFSPVPNLRYLDLSSNQLRTLDEFLFSDLQVLEVLLLYNNHIMAVDRCAFDDMAQLQKLYLSQNQISRFPLELVKEGAKLPKLTLLDLSSNKLKNLPLPDLQKLPAWIKNGLYLHNNPLNCDCELYQLFSHWQYRQLSSVMDFQEDLYCMNSKKLHNVFNLSFLNCGEYKERAWEAHLGDTLIIKCDTKQQGMTKVWVTPSNERVLDEVTNGTVSVSKDGSLLFQQVQVEDGGVYTCYAMGETFNETLSVELKVHNFTLHGHHDTLNTAYTTLVGCILSVVLVLIYLYLTPCRCWCRGVEKPSSHQGDSLSSSMLSTTPNHDPMAGGDKDDGFDRRVAFLEPAGPGQGQNGKLKPGNTLPVPEATGKGQRRMSDPESVSSVFSDTPIVV

SEQ ID NO: 8873 - protein, 272 aa, Homo sapiens
MSSTESAGRTADKSPRQQVDRLLVGLRWRRLEEPLGFIKVLQWLFAIFAFGSCGSYSGETGAMVRCNNEAKDVSSIIVAFGYPFRLHRIQYEMPLCDEESSSKTMHLMGDFSAPAEFFVTLGIFSFFYTMAALVIYLRFHNLYTENKRFPLVDFCVTVSFTFFWLVAAAAWGKGLTDVKGATRPSSLTAAMSVCHGEEAVCSAGATPSMGLANISVLFGFINFFLWAGNCWFVFKETPWHGQGQGQDQDQDQDQGQGPSQESAAEQGAVEKQ

SEQ ID NO: 8874 - protein, 875 aa, Homo sapiens
MIGCGACEPKVKMAGGQAAAALPTWKMAARRSLSARGRGILQAAAGRLLPLLLLSCCCGAGGCAAVGENEETVIIGLRLEDTNDVSFMEGGALRVSERTRVKLRVYGQNINNETWSRIAFTEHERRRHSPGERGLGGPAPPEPDSGPQRCGIRTSDIIILPHIILNRRTSGIIEIEIKPLRKMEKSKSYYLCTSLSTPALGAGGSGSTGGAVGGKGGSGVAGLPPPPWAETTWIYHDGEDTKMIVGEEKKFLLPFWLQVIFISLLLCLSGMFSGLNLGLMALDPMELRIVQNCGTEKEKNYAKRIEPVRRQGNYLLCSLLLGNVLVNTTLTILLDDIAGSGLVAVVVSTIGIVIFGEIVPQAICSRHGLAVGANTIFLTKFFMMMTFPASYPVSKLLDCVLGQEIGTVYNREKLLEMLRVTDPYNDLVKEELNIIQGALELRTKTVEDVMTPLRDCFMITGEAILDFNTMSEIMESGYTRIPVFEGERSNIVDLLFVKDLAFVDPDDCTPLKTITKFYNHPLHFVFNDTKLDAMLEEFKKGKSHLAIVQRVNNEGEGDPFYEVLGIVTLEDVIEEIIKSEILDETDLYTDNRTKKKVAHRERKQDFSAFKQTDSEMKVKISPQLLLAMHRFLATEVEAFSPSQMSEKILLRLLKHPNVIQELKYDEKNKKAPEYYLYQRNKPVDYFVLILQGKVEVEAGKEGMKFEASAFSYYGVMALTASPVPLSLSRTFVVSRTELLAAGSPGENKSPPRPCGLNHSDSLSRSDRIDAVTPTLGSSNNQLNSSLLQVYIPDYSVRALSDLQFVKISRQQYQNALMASRMDKTPQSSDSENTKIELTLTELHDGLPDETANLLNEQNCVTHSKANHSLHNEGAI

SEQ ID NO: 8875 - protein, 892 aa, Homo sapiens
MTDPFCVGGRRLPGSSKSGPGKDGSRKEVRLPMLHDPPKMGMPVVRGGQTVPGQAPLCFDPGSPASDKTEGKKKGRPKAENQALRDIPLSLMNDWKDEFKAHSRVKCPNSGCWLEFPSIYGLKYHYQRCQGGAISDRLAFPCPFCEAAFTSKTQLEKHRIWNHMDRPLPASKPGPISRPVTISRPVGVSKPIGVSKPVTIGKPVGVSKPIGISKPVSVGRPMPVTKAIPVTRPVPVTKPVTVSRPMPVTKAMPVTKPITVTKSVPVTKPVPVTKPITVTKLVTVTKPVPVTKPVTVSRPIVVSKPVTVSRPIAISRHTPPCKMVLLTRSENKAPRATGRNSGKKRAADSLDTCPIPPKQARPENGEYGPSSMGQSSAFQLSADTSSGSLSPGSRPSGGMEALKAAGPASPPEEDPERTKHRRKQKTPKKFTGEQPSISGTFGLKGLVKAEDKARVHRSKKQEGPGPEDARKKVPAAPITVSKEAPAPVAHPAPGGPEEQWQRAIHERGEAVCPTCNVVTRKTLVGLKKHMEVCQKLQDALKCQHCRKQFKSKAGLNYHTMAEHSAKPSDAEASEGGEQEERERLRKVLKQMGRLRCPQEGCGAAFSSLMGYQYHQRRCGKPPCEVDSPSFPCTHCGKTYRSKAGHDYHVRSEHTAPPPEEPTDKSPEAEDPLGVERTPSGRVRRTSAQVAVFHLQEIAEDELARDWTKRRMKDDLVPETARLNYTRPGLPTLNPQLLEAWKNEVKEKGHVNCPNDCCEAIYSSVSGLKAHLASCSKGAHLAGKYRCLLCPKEFSSESGVKYHILKTHAENWFRTSADPPPKHRSQDSLVPKKEKKKNLAGGKKRGRKPKERTPEEPVAKLPPRRDDWPPGCRDKGARGSTGRKVGVSKAPEK

SEQ ID NO: 8876 - protein, 342 aa, Homo sapiens
MPFLLGLRQDKEACVGTNNQSYICDTGHCCGQSQCCNYYYELWWFWLVWTIIIILSCCCVCHHRRAKHRLQAQQRQHEINLIAYREAHNYSALPFYFRFLPNYLLPPYEEVVNRPPTPPPPYSAFQLQQQQLLPPQCGPAGGSPPGIDPTRGSQGAQSSPLSEPSRSSTRPPSIADPDPSDLPVDRAATKAPGMEPSGSVAGLGELDPGAFLDKDAECREELLKDDSSEHGAPDSKEKTPGRHRRFTGDSGIEVCVCNRGHHDDDLKEFNTLIDDALDGPLDFCDSCHVRPPGDEEEGLCQSSEEQAREPGHPHLPRPPACLLLNTINEQDSPNSQSSSSPS

SEQ ID NO: 8877 - protein, 322 aa, Homo sapiens
MEADLSGFNIDAPRWDQRTFLGRVKHFLNITDPRTVFVSERELDWAKVMVEKSRMGVVPPGTQVEQLLYAKKLYDSAFHPDTGEKMNVIGRMSFQLPGGMIITGFMLQFYRTMPAVIFWQWVNQSFNALVNYTNRNAASPTSVRQMALSYFTATTTAVATAVGMNMLTKKAPPLVGRWVPFAAVAAANCVNIPMMRQQELIKGICVKDRNENEIGHSRRAAAIGITQVVISRITMSAPGMILLPVIMERLEKLHFMQKVKVLHAPLQVMLSGCFLIFMVPVACGLFPQKCELPVSYLEPKLQDTIKAKYGELEPYVYFNKGL

SEQ ID NO: 8878 - protein, 533 aa, Homo sapiens
MSSPPAYPGIRISGCRALGAEGSSNAESLDRLLPPVGTGRSPRKRTTSQCKSEPPLLRTSKRTIYTAGRPPWYNEHGTQSKEAFAIGLGGGSASGKTTVARMIIEALDVPWVVLLSMDSFYKVLTEQQQEQAAHNNFNFDHPDAFDFDLIISTLKKLKQGKSVKVPIYDFTTHSRKKDWKTLYGANVIIFEGIMAFADKTLLELLDMKIFVDTDSDIRLVRRLRRDISERGRDIEGVIKQYNKFVKPSFDQYIQPTMRLADIVVPRGSGNTVAIDLIVQHVHSQLEERELSVRAALASAHQCHPLPRTLSVLKSTPQVRGMHTIIRDKETSRDEFIFYSKRLMRLLIEHALSFLPFQDCVVQTPQGQDYAGKCYAGKQITGVSILRAGETMEPALRAVCKDVRIGTILIQTNQLTGEPELHYLRLPKDISDDHVILMDCTVSTGAAAMMAVRVLLDHDVPEDKIFLLSLLMAEMGVHSVAYAFPRVRIITTAVDKRVNDLFRIIPGIGNFGDRYFGTDAVPDGSDEEEVAYTG

SEQ ID NO: 8879 - protein, 469 aa, Homo sapiens
MCVICFVKALVRVFKIYLTASYTYPFRGWPVAFRWDDVRAVGRSSSHRALTCAAAAAGVWLLRDETLGGDALGRPPRGARSQAQCLLQQLRELPGQLASYALAHSLGRWLVYPGSVSLMTRALLPLLQQGQERLVERYHGRRAKLVACDGNEIDTMFMDRRQHPGSHVHGPRLVICCEGNAGFYEMGCLSAPLEAGYSVLGWNHPGFGSSTGVPFPQHDANAMDVVVEYALHRLHFPPAHLVVYGWSVGGFTATWATMTYPELGALVLDATFDDLVPLALKVMPHSWKGLVVRTVREHFNLNVAEQLCCYPGPVLLLRRTQDDVVSTSGRLRPLSPGDVEGNRGNELLLRLLEHRYPVVMAREGRAVVTRWLRAGSLAQEAAFYARYRVDEDWCLALLRSYRARCEEELEGEEALGPHGPAFPWLVGQGLSSRRRRRLALFLARKHLKNVEATHFSPLEPEEFQLPWRL

SEQ ID NO: 8880 - protein, 287 aa, Homo sapiens
MELERIVSAALLAFVQTHLPEADLSGLDEVIFSYVLGVLEDLGPSGPSEENFDMEAFTEMMEAYVPGFAHIPRGTIGDMMQKLSGQLSDARNKENLQPQSSGVQGQVPISPEPLQRPEMLKEETRSSAAAAADTQDEATGAEEELLPGVDVLLEVFPTCSVEQAQWVLAKARGDLEEAVQMLVEGKEEGPAAWEGPNQDLPRRLRGPQKDELKSFILQKYMMVDSAEDQKIHRPMAPKEAPKKLIRYIDNQVVSTKGERFKDVRNPEAEEMKATYINLKPARKYRFH

SEQ ID NO: 8881 - protein, 1013 aa, Homo sapiens
MAEPGHSHHLSARVRGRTERRIPRLWRLLLWAGTAFQVTQGTGPELHACKESEYHYEYTACDSTGSRWRVAVPHTPGLCTSLPDPIKGTECSFSCNAGEFLDMKDQSCKPCAEGRYSLGTGIRFDEWDELPHGFASLSANMELDDSAAESTGNCTSSKWVPRGDYIASNTDECTATLMYAVNLKQSGTVNFEYYYPDSSIIFEFFVQNDQCQPNADDSRWMKTTEKGWEFHSVELNRGNNVLYWRTTAFSVWTKVPKPVLVRNIAITGVAYTSECFPCKPGTYADKQGSSFCKLCPANSYSNKGETSCHQCDPDKYSEKGSSSCNVRPACTDKDYFYTHTACDANGETQLMYKWAKPKICSEDLEGAVKLPASGVKTHCPPCNPGFFKTNNSTCQPCPYGSYSNGSDCTRCPAGTEPAVGFEYKWWNTLPTNMETTVLSGINFEYKGMTGWEVAGDHIYTAAGASDNDFMILTLVVPGFRPPQSVMADTENKEVARITFVFETLCSVNCELYFMVGVNSRTNTPVETWKGSKGKQSYTYIIEENTTTSFTWAFQRTTFHEASRKYTNDVAKIYSINVTNVMNGVASYCRPCALEASDVGSSCTSCPAGYYIDRDSGTCHSCPTNTILKAHQPYGVQACVPCGPGTKNNKIHSLCYNDCTFSRNTPTRTFNYNFSALANTVTLAGGPSFTSKGLKYFHHFTLSLCGNQGRKMSVCTDNVTDLRIPEGESGFSKSITAYVCQAVIIPPEVTGYKAGVSSQPVSLADRLIGVTTDMTLDGITSPAELFHLESLGIPDVIFFYRSNDVTQSCSSGRSTTIRVRCSPQKTVPGSLLLPGTCSDGTCDGCNFHFLWESAAACPLCSVADYHAIVSSCVAGIQKTTYVWREPKLCSGGISLPEQRVTICKTIDFWLKVGISAGTCTAILLTVLTCYFWKKNQKLEYKYSKLVMNATLKDCDLPAADSCAIMEGEDVEDDLIFTSKKSLFGKIKSFTSKRTPDGFDSVPLKTSSGGLDMDL

SEQ ID NO: 8882 - protein, 797 aa, Homo sapiens
MYLETRRAIFVFWIFLQVQGTKDISINIYHSETKDIDNPPRNETTESTEKMYKMSTMRRIFDLAKHRTKRSAFFPTGVKVCPQESMKQILDSLQAYYRLRVCQEAVWEAYRIFLDRIPDTGEYQDWVSICQQETFCLFDIGKNFSNSQEHLDLLQQRIKQRSFPDRKDEISAEKTLGEPGETIVISTDVANVSLGPFPLTPDDTLLNEILDNTLNDTKMPTTERETEFAVLEEQRVELSVSLVNQKFKAELADSQSPYYQELAGKSQLQMQKIFKKLPGFKKIHVLGFRPKKEKDGSSSTEMQLTAIFKRHSAEAKSPASDLLSFDSNKIESEEVYHGTMEEDKQPEIYLTATDLKRLISKALEEEQSLDVGTIQFTDEIAGSLPAFGPDTQSELPTSFAVITEDATLSPELPPVEPQLETVDGAEHGLPDTSWSPPAMASTSLSEAPPFFMASSIFSLTDQGTTDTMATDQTMLVPGLTIPTSDYSAISQLALGISHPPASSDDSRSSAGGEDMVRHLDEMDLSDTPAPSEVPELSEYVSVPDHFLEDTTPVSALQYITTSSMTIAPKGRELVVFFSLRVANMAFSNDLFNKSSLEYRALEQQFTQLLVPYLRSNLTGFKQLEILNFRNGSVIVNSKMKFAKSVPYNLTKAVHGVLEDFRSAAAQQLHLEIDSYSLNIEPADQADPCKFLACGEFAQCVKNERTEEAECRCKPGYDSQGSLDGLEPGLCGPGTKECEVLQGKGAPCRLPDHSENQAYKTSVKKFQNQQNNKVISKRNSELLTVEYEEFNHQDWEGN

SEQ ID NO: 8883 - protein, 919 aa, Homo sapiens
MTAEETVNVKEVEIIKLILDFLNSKKLHISMLALEKESGVINGLFSDDMLFLRQLILDGQWDEVLQFIQPLECMEKFDKKRFRYIILKQKFLEALCVNNAMSAEDEPQHLEFTMQEAVQCLHALEEYCPSKDDYSKLCLLLTLPRLTNHAEFKDWNPSTARVHCFEEACVMVAEFIPADRKLSEAGFKASNNRLFQLVMKGLLYECCVEFCQSKATGEEITESEVLLGIDLLCGNGCDDLDLSLLSWLQNLPSSVFSCAFEQKMLNIHVDKLLKPTKAAYADLLTPLISKLSPYPSSPMRRPQSADAYMTRSLNPALDGLTCGLTSHDKRISDLGNKTSPMSHSFANFHYPGVQNLSRSLMLENTECHSIYEESPERDTPVDAQRPIGSEILGQSSVSEKEPANGAQNPGPAKQEKNELRDSTEQFQEYYRQRLRYQQHLEQKEQQRQIYQQMLLEGGVNQEDGPDQQQNLTEQFLNRSIQKLGELNIGMDGLGNEVSALNQQCNGSKGNGSNGSSVTSFTTPPQDSSQRLTHDASNIHTSTPRNPGSTNHIPFLEESPCGSQISSEHSVIKPPLGDSPGSLSRSKGEEDDKSKKQFVCINILEDTQAVRAVAFHPAGGLYAVGSNSKTLRVCAYPDVIDPSAHETPKQPVVRFKRNKHHKGSIYCVAWSPCGQLLATGSNDKYVKVLPFNAETCNATGPDLEFSMHDGTIRDLAFMEGPESGGAILISAGAGDCNIYTTDCQRGQGLHALSGHTGHILALYTWSGWMIASGSQDKTVRFWDLRVPSCVRVVGTTFHGTGSAVASVAVDPSGRLLATGQEDSSCMLYDIRGGRMVQSYHPHSSDVRSVRFSPGAHYLLTGSYDMKIKVTDLQGDLTKQLPIMVVGEHKDKVIQCRWHTQDLSFLSSSADRTVTLWTYNG

SEQ ID NO: 8884 - protein, 920 aa, Homo sapiens
MTAEETVNVKEVEIIKLILDFLNSKKLHISMLALEKESGVINGLFSDDMLFLRQLILDGQWDEVLQFIQPLECMEKFDKKRFRYIILKQKFLEALCVNNAMSAEDEPQHLEFTMQEAVQCLHALEEYCPSKDDYSKLCLLLTLPRLTNHAEFKDWNPSTARVHCFEEACVMVAEFIPADRKLSEAGFKASNNRLFQLVMKGLLYECCVEFCQSKATGEEITESEVLLGIDLLCGNGCDDLDLSLLSWLQNLPSSVFSCAFEQKMLNIHVDKLLKPTKAAYADLLTPLISKLSPYPSSPMRRPQSADAYMTRSLNPALDGLTCGLTSHDKRISDLGNKTSPMSHSFANFHYPGVQNLSRSLMLENTECHSIYEESPERSDTPVDAQRPIGSEILGQSSVSEKEPANGAQNPGPAKQEKNELRDSTEQFQEYYRQRLRYQQHLEQKEQQRQIYQQMLLEGGVNQEDGPDQQQNLTEQFLNRSIQKLGELNIGMDGLGNEVSALNQQCNGSKGNGSNGSSVTSFTTPPQDSSQRLTHDASNIHTSTPRNPGSTNHIPFLEESPCGSQISSEHSVIKPPLGDSPGSLSRSKGEEDDKSKKQFVCINILEDTQAVRAVAFHPAGGLYAVGSNSKTLRVCAYPDVIDPSAHETPKQPVVRFKRNKHHKGSIYCVAWSPCGQLLATGSNDKYVKVLPFNAETCNATGPDLEFSMHDGTIRDLAFMEGPESGGAILISAGAGDCNIYTTDCQRGQGLHALSGHTGHILALYTWSGWMIASGSQDKTVRFWDLRVPSCVRVVGTTFHGTGSAVASVAVDPSGRLLATGQEDSSCMLYDIRGGRMVQSYHPHSSDVRSVRFSPGAHYLLTGSYDMKIKVTDLQGDLTKQLPIMVVGEHKDKVIQCRWHTQDLSFLSSSADRTVTLWTYNG

SEQ ID NO: 8885 - protein, 900 aa, Homo sapiens
MESCYNPGLDGIIEYDDFKLNSSIVEPKEPAPETADGPYLVIVEQPKQRGFRFRYGCEGPSHGGLPGASSEKGRKTYPTVKICNYEGPAKIEVDLVTHSDPPRAHAHSLVGKQCSELGICAVSVGPKDMTAQFNNLGVLHVTKKNMMGTMIQKLQRQRLRSRPQGLTEAEQRELEQEAKELKKVMDLSIVRLRFSAFLRASDGSFSLPLKPVISQPIHDSKSPGASNLKISRMDKTAGSVRGGDEVYLLCDKVQKDDIEVRFYEDDENGWQAFGDFSPTDVHKQYAIVFRTPPYHKMKIERPVTVFLQLKRKRGGDVSDSKQFTYYPLVEDKEEVQRKRRKALPTFSQPFGGGSHMGGGSGGAAGGYGGAGGGGSLGFFPSSLAYSPYQSGAGPMGCYPGGGGGAQMAATVPSRDSGEEAAEPSAPSRTPQCEPQAPEMLQRAREYNARLFGLAQRSARALLDYGVTADARALLAGQRHLLTAQDENGDTPLHLAIIHGQTSVIEQIVYVIHHAQDLGVVNLTNHLHQTPLHLAVITGQTSVVSFLLRVGADPALLDRHGDSAMHLALRAGAGAPELLRALLQSGAPAVPQLLHMPDFEGLYPVHLAVRARSPECLDLLVDSGAEVEATERQGGRTALHLATEMEELGLVTHLVTKLRANVNARTFAGNTPLHLAAGLGYPTLTRLLLKAGADIHAENEEPLCPLPSPPTSDSDSDSEGPEKDTRSSFRGHTPLDLTCSTKVKTLLLNAAQNTMEPPLTPPSPAGPGLSLGDTALQNLEQLLDGPEAQGSWAELAERLGLRSLVDTYRQTTSPSGSLLRSYELAGGDLAGLLEALSDMGLEEGVRLLRGPETRDKLPSTAEVKEDSAYGSQSVEQEAEKLGPPPEPPGGLCHGHPQPQVH

SEQ ID NO: 8886 - protein, 501 aa, Homo sapiens
MLCSLLLCECLLLVAGYAHDDDWIDPTDMLNYDAASGTMRKSQAKYGISGEKDVSPDLSCADEISECYHKLDSLTYKIDECEKKKREDYESQSNPVFRRYLNKILIEAGKLGLFHDFETWKWRFEDSFGVDPYNVLMVLLCLLCIVVLVATELWTYVRWYTQLRRVLIISFLFSLGWNWMYLYKLAFAQHQAEVAKMEPLNNVCAKKMDWTGSIWEWFRSSWTYKDDPCQKYYELLLVNPIWLVPPTKALAVTFTTFVTEPLKHIGKGTGEFIKALMKEIPALLHLPVLIIMALAILSFCYGAGKSVHVLRHIGGPESEPPQALRPRDRRRQEEIDYRPDGGAGDADFHYRGQMGPTEQGPYAKTYEGRREILRERDVDLRFQTGNKSPEVLRAFDVPDAEAREHPTVVPSHKSPVLDTKPKETGGILGEGTPKESSTESSQSAKPVSGQDTSGNTEGSPAAEKAQLKSEAAGSPDQGSTYSPARGVAGPRGQDPVSSPCG

SEQ ID NO: 8887 - protein, 339 aa, Homo sapiens
MAGGPGPGEPAAPGAQHFLYEVPPWVMCRFYKVMDALEPADWCQFGGWRRAAGGREARGLLAPTPDAPRPAAALIVRDQTELRLCERSGQRTASVLWPWINRNARVADLVHILTHLQLLRARDIITAWHPPAPLPSPGTTAPRPSSIPAPAEAEAWSPRKLPSSASTFLSPAFPGSQTHSGPELGLVPSPASLWPPPPSPAPSSTKPGPESSVSLLQGARPFPFCWPLCEISRGTHNFSEELKIGEGGFGCVYRAVMRNTVYAVKRLKENADLEWTAVKQSFLTEVEQLSRPRPAHLSPGLSDWTSFWVQPGQFSFYIRTAPASSMETSRVPTSFWMRG

SEQ ID NO: 8888 - protein, 633 aa, Homo sapiens
MAGGPGPGEPAAPGAQHFLYEVPPWVMCRFYKVMDALEPADWCQFAALIVRDQTELRLCERSGQRTASVLWPWINRNARVADLVHILTHLQLLRARDIITAWHPPAPLPSPGTTAPRPSSIPAPAEAEAWSPRKLPSSASTFLSPAFPGSQTHSGPELGLVPSPASLWPPPPSPAPSSTKPGPESSVSLLQGARPFPFCWPLCEISRGTHNFSEELKIGEGGFGCVYRAVMRNTVYAVKRLKENADLEWTAVKQSFLTEVEQLSRFRHPNIVDFAGYCAQNGFYCLVYGFLPNGSLEDRLHCQTQACPPLSWPQRLDILLGTARAIQFLHQDSPSLIHGDIKSSNVLLDERLTPKLGDFGLARFSRFAGSSPSQSSMVARTQTVRGTLAYLPEEYIKTGRLAVDTDTFSFGVVVLETLAGQRAVKTHGARTKYLVYERLEKLQAVVAGVPGHSEAASCIPPSPQENSYVSSTGRAHSGAAPWQPLAAPSGASAQAAEQLQRGPNQPVESDESLGGLSAALRSWHLTPSCPLDPAPLREAGCPQGDTAGESSWGSGPGSRPTAVEGLALGSSASSSSEPPQIIINPARQKMVQKLALYEDGALDSLQLLSSSSLPGLGLEQDRQGPEESDEFQS

SEQ ID NO: 8889 - protein, 1253 aa, Homo sapiens
MEDGKPVWAPHPTDGFQMGNIVDIGPDSLTIEPLNQKGKTFLALINQVFPAEEDSKKDVEDNCSLMYLNEATLLHNIKVRYSKDRIYTYVANILIAVNPYFDIPKIYSSEAIKSYQGKSLGTRPPHVFAIADKAFRDMKVLKMSQSIIVSGESGAGKTENTKFVLRYLTESYGTGQDIDDRIVEANPLLEAFGNAKTVRNNNSSRFGKFVEIHFNEKSSVVGGFVSHYLLEKSRICVQGKEERNYHIFYRLCAGASEDIREKLHLSSPDNFRYLNRGCTRYFANKETDKQILQNRKSPEYLKAGSMKDPLLDDHGDFIRMCTAMKKIGLDDEEKLDLFRVVAGVLHLGNIDFEEAGSTSGGCNLKNKSAQSLEYCAELLGLDQDDLRVSLTTRVMLTTAGGTKGTVIKVPLKVEQANNARDALAKTVYSHLFDHVVNRVNQCFPFETSSYFIGVLDIAGFEYFEHNSFEQFCINYCNEKLQQFFNERILKEEQELYQKEGLGVNEVHYVDNQDCIDLIEAKLVGILDILDEENRLPQPSDQHFTSAVHQKHKDHFRLTIPRKSKLAVHRNIRDDEGFIIRHFAGAVCYETTQFVEKNNDALHMSLESLICESRDKFIRELFESSTNNNKDTKQKAGKLSFISVGNKFKTQLNLLLDKLRSTGASFIRCIKPNLKMTSHHFEGAQILSQLQCSGMVSVLDLMQGGYPSRASFHELYNMYKKYMPDKLARLDPRLFCKALFKALGLNENDYKFGLTKVFFRPGKFAEFDQIMKSDPDHLAELVKRVNHWLTCSRWKKVQWCSLSVIKLKNKIKYRAEACIKMQKTIRMWLCKRRHKPRIDGLVKVGTLKKRLDKFNEVVSVLKDGKPEMNKQIKNLEISIDTLMAKIKSTMMTQEQIQKEYDALVKSSEELLSALQKKKQQEEEAERLRRIQEEMEKERKRREEDEKRRRKEEEERRMKLEMEAKRKQEEEERKKREDDEKRIQAEVEAQLARQKEEESQQQAVLEQERRDRELALRIAQSEAELISDEAQADLALRRGPAVLATKAAAGTKKYDLSKWKYAELRDTINTSCDIELLAACREEFHRRLKVYHAWKSKNKKRNTETEQRAPKSVTDYAQQNPAAQIPARQREIEMNRQQRFFRIPFIRPADQYKDPQSKKKGWWYAHFDGPWIARQMELHPDKPPILLVAGKDDMEMCELNLEETGLTRKRGAEILPRQFEEIWERCGGIQYLQNAIESRQARPTYATAMLQSLLK

SEQ ID NO: 8890 - protein, 1285 aa, Homo sapiens
MEDGKPVWAPHPTDGFQMGNIVDIGPDSLTIEPLNQKGKTFLALINQVFPAEEDSKKDVEDNCSLMYLNEATLLHNIKVRYSKDRIYTYVANILIAVNPYFDIPKIYSSEAIKSYQGKSLGTRPPHVFAIADKAFRDMKVLKMSQSIIVSGESGAGKTENTKFVLRYLTESYGTGQDIDDRIVEANPLLEAFGNAKTVRNNNSSRFGKFVEIHFNEKSSVVGGFVSHYLLEKSRICVQGKEERNYHIFYRLCAGASEDIREKLHLSSPDNFRYLNRGCTRYFANKETDKQILQNRKSPEYLKAGSMKDPLLDDHGDFIRMCTAMKKIGLDDEEKLDLFRVVAGVLHLGNIDFEEAGSTSGGCNLKNKSAQSLEYCAELLGLDQDDLRVSLTTRVMLTTAGGTKGTVIKVPLKVEQANNARDALAKTVYSHLFDHVVNRVNQCFPFETSSYFIGVLDIAGFEYFEHNSFEQFCINYCNEKLQQFFNERILKEEQELYQKEGLGVNEVHYVDNQDCIDLIEAKLVGILDILDEENRLPQPSDQHFTSAVHQKHKDHFRLTIPRKSKLAVHRNIRDDEGFIIRHFAGAVCYETTQFVEKNNDALHMSLESLICESRDKFIRELFESSTNNNKDTKQKAGKLSFISVGNKFKTQLNLLLDKLRSTGASFIRCIKPNLKMTSHHFEGAQILSQLQCSGMVSVLDLMQGGYPSRASFHELYNMYKKYMPDKLARLDPRLFCKALFKALGLNENDYKFGLTKVFFRPGKFAEFDQIMKSDPDHLAELVKRVNHWLTCSRWKKVQWCSLSVIKLKNKIKYRAEACIKMQKTIRMWLCKRRHKPRIDGLVKVGTLKKRLDKFNEVVSVLKDGKPEMNKQIKNLEISIDTLMAKIKSTMMTQEQIQKEYDALVKSSEELLSALQKKKQQEEEAERLRRIQEEMEKERKRREEDEKRRRKEEEERRMKLEMEAKRKQEEEERKKREDDEKRIQAEVEAQLARQKEEESQQQAVLEQERRDRELALRIAQSEAELISDEAQADLALRRNDGTRPKMTPEQMAKEMSEFLSRGPAVLATKAAAGTKKYDLSKWKYAELRDTINTSCDIELLAACREEFHRRLKVYHAWKSKNKKRNTETEQRAPKSVTDYDFAPFLNNSPQQNPAAQIPARQREIEMNRQQRFFRIPFIRPADQYKDPQSKKKGWWYAHFDGPWIARQMELHPDKPPILLVAGKDDMEMCELNLEETGLTRKRGAEILPRQFEEIWERCGGIQYLQNAIESRQARPTYATAMLQSLLK

SEQ ID NO: 8891 - protein, 712 aa, Homo sapiens
MAGGPGPGEPAAPGAQHFLYEVPPWVMCRFYKVMDALEPADWCQFAALIVRDQTELRLCERSGQRTASVLWPWINRNARVADLVHILTHLQLLRARDIITAWHPPAPLPSPGTTAPRPSSIPAPAEAEAWSPRKLPSSASTFLSPAFPGSQTHSGPELGLVPSPASLWPPPPSPAPSSTKPGPESSVSLLQGARPFPFCWPLCEISRGTHNFSEELKIGEGGFGCVYRAVMRNTVYAVKRLKENADLEWTAVKQSFLTEVEQLSRFRHPNIVDFAGYCAQNGFYCLVYGFLPNGSLEDRLHCQTQACPPLSWPQRLDILLGTARAIQFLHQDSPSLIHGDIKSSNVLLDERLTPKLGDFGLARFSRFAGSSPSQSSMVARTQTVRGTLAYLPEEYIKTGRLAVDTDTFSFGVVVLETLAGQRAVKTHGARTKYLKDLVEEEAEEAGVALRSTQSTLQAGLAADAWAAPIAMQIYKKHLDPRPGPCPPELGLGLGQLACCCLHRRAKRRPPMTQVYERLEKLQAVVAGVPGHSEAASCIPPSPQENSYVSSTGRAHSGAAPWQPLAAPSGASAQAAEQLQRGPNQPVESDESLGGLSAALRSWHLTPSCPLDPAPLREAGCPQGDTAGESSWGSGPGSRPTAVEGLALGSSASSSSEPPQIIINPARQKMVQKLALYEDGALDSLQLLSSSSLPGLGLEQDRQGPEESDEFQS

SEQ ID NO: 8892 - protein, 1295 aa, Homo sapiens [sequence omitted]

SEQ ID NO: 8893 - protein, 1859 aa, Homo sapiens
MVDKNIYIIQGEINIVVGAIKRNARWSTHTPLDEERDPLLHSFGHLKEVLNSITELSEIEPNVFLRPFLEVIRSEDTTGPITGLALTSVNKFLSYALIDPTHEGTAEGMENMADAVTHARFVGTDPASDEVVLMKILQVLRTLLLTPVGAHLTNESVCEIMQSCFRICFEMRLSELLRKSAEHTLVDMVQLLFTRLPQFKEEPKNYVGTNMKKLKMRAGGMSDSSKWKKQKRSPRPPRHMTKVTPGSELPTPNGTTLSSNLTGGMPFIDVPTPISSASSEAASAVVSPSTDSGLEFSSQTTSKEDLTDLEQPGSPGYSTATEPGSSELGVPEQPDLQEGTHVEKSQSASVESIPEVLEECTSPADHSDSASVHDMDYVNPRGVRFTQSSQKEGTALVPYGLPCIRELFRFLISLTNPHDRHNSEVMIHMGLHLLTVALESAPVAQCQTLLGLIKDEMCRHLFQLLSIERLNLYAASLRVCFLLFESMREHLKFQMEMYIKKLMEIITVENPKMPYEMKEMALEAIVQLWRIPSFVTELYINYDCDYYCSNLFEELTKLLSKNAFPVSGQLYTTHLLSLDALLTVIDSTEAHCQAKVLNSLTQQEKKETARPSCEIVDGTREASNTERTASDGKAVGMASDIPGLHLPGGGRLPPEHGKSGCSDLEEAVDSGADKKFARKPPRFSCLLPDPRELIEIKNKKKLLITGTEQFNQKPKKGIQFLQEKGLLTIPMDNTEVAQWLRENPRLDKKMIGEFVSDRKNIDLLESFVSTFSFQGLRLDEALRLYLEAFRLPGEAPVIQRLLEAFTERWMNCNGSPFANSDACFSLAYAVIMLNTDQHNHNVRKQNAPMTLEEFRKNLKGVNGGKDFEQDILEDMYHAIKNEEIVMPEEQTGLVRENYVWNVLLHRGATPEGIFLRVPTASYDLDLFTMTWGPTIAALSYVFDKSLEETIIQKAISGFRKCAMISAHYGLSDVFDNLIISLCKFTALSSESIENLPSVFGSNPKAHIAAKTVFHLAHRHGDILREGWKNIMEAMLQLFRAQLLPKAMIEVEDFVDPNGKISLQREETPSNRGESTVLSFVSWLTLSGPEQSSVRGPSTENQEAKRVALECIKQCDPEKMITESKFLQLESLQELMKALVSVTPDEETYDEEDAAFCLEMLLRIVLENRDRVGCVWQTVRDHLYHLCVQAQDFCFLVERAVVGLLRLAIRLLRREEISAQVLLSLRILLLMKPSVLSRVSHQVAYGLHELLKTNAANIHSGDDWATLFTLLECIGSGVKPPAALQATARADAPDAGAQSDSELPSYHQNDVSLDRGYTSDSEVYTDHGRPGKIHRSATDADVVNSGWLVVGKDDVDNSKPGPSRPGPSPLINQYSLTVGLDLGPHDTKSLLKCVESLSFIVRDAAHITPDNFELCVKTLRIFVEASLNGGCKSQEKRGKSHKYDSKGNRFKKKSKEGSMLRRPRTSSQHASRGGQSDDDEDEGVPASYHTVSLQVSQDLLDLMHTLHTRAASIYSSWAEEQRHLETGGQKIEADSRTLWAHCWCPLLQGIACLCCDARRQVRMQALTYLQRALLVHDLQKLDALEWESCFNKVLFPLLTKLLENISPADVGGMEETRMRASTLLSKVFLQHLSPLLSLSTFAALWLTILDFMDKYMHAGSSDLLSEAIPESLKNMLLVMDTAEIFHSADARGGGPSALWEITWERIDCFLPHLRDELFKQTVIQDPMPMEPQGQKPLASAHLTSAAGDTRTPGHPPPPEIPSELGACDFEKPESPRAASSSSPGSPVASSPSRLSPTPDGPPPLAQPPLILQPLASPLQVGVPPMTLPIILNPALIEATSPVPLLATPRPTDPIPTSEVN

SEQ ID NO: 8894 - protein, 2080 aa, Homo sapiens
MASAVSPANLPAVLLQPRWKRVVGWSGPVPRPRHGHRAVAIKELIVVFGGGNEGIVDELHVYNTATNQWFIPAVRGDIPPGCAAYGFVCDGTRLLVFGGMVEYGKYSNDLYELQASRWEWKRLKAKTPKNGPPPCPRLGHSFSLVGNKCYLFGGLANDSEDPKNNIPRYLNDLYILELRPGSGVVAWDIPITYGVLPPPRESHTAVVYTEKDNKKSKLVIYGGMSGCRLGDLWTLDIDTLTWNKPSLSGVAPLPRSLHSATTIGNKMYVFGGWVPLVMDDVKVATHEKEWKCTNTLACLNLDTMAWETILMDTLEDNIPRARAGHCAVAINTRLYIWSGRDGYRKAWNNQVCCKDLWYLETEKPPPPARVQLVRANTNSLEVSWGAVATADSYLLQLQKYDIPATAATATSPTPNPVPSVPANPPKSPAPAAAAPAVQPLTQVGITLLPQAAPAPPTTTTIQVLPTVPGSSISVPTAARTQGVPAVLKVTGPQATTGTPLVTMRPASQAGKAPVTVTSLPAGVRMVVPTQSAQGTVIGSSPQMSGMAALAAAAAATQKIPPSSAPTVLSVPAGTTIVKTMAVTPGTTTLPATVKVASSPVMVSNPATRMLKTAAAQVGTSVSSATNTSTRPIITVHKSGTVTVAQQAQVVTTVVGGVTKTITLVKSPISVPGGSALISNLGKVMSVVQTKPVQTSAVTGQASTGPVTQIIQTKGPLPAGTILKLVTSADGKPTTIITTTQASGAGTKPTILGISSVSPSTTKPGTTTIIKTIPMSAIITQAGATGVTSSPGIKSPITIITTKVMTSGTGAPAKIITAVPKIATGHGQQGVTQVVLKGAPGQPGTILRTVPMGGVRLVTPVTVSAVKPAVTTLVVKGTTGVTTLGTVTGTVSTSLAGAGGHSTSASLATPITTLGTIATLSSQVINPTAITVSAAQTTLTAAGGLTTPTITMQPVSQPTQVTLITAPSGVEAQPVHDLPVSILASPTTEQPTATVTIADSGQGDVQPGTVTLVCSNPPCETHETGTTNTATTTVVANLGGHPQPTQVQFVCDRQEAAASLVTSTVGQQNGSVVRVCSNPPCETHETGTTNTATTATSNMAGQHGCSNPPCETHETGTTNTATTAMSSVGANHQRDARRACAAGTPAVIRISVATGALEAAQGSKSQCQTRQTSATSTTMTVMATGAPCSAGPLLGPSMAREPGGRSPAFVQLAPLSSKVRLSSPSIKDLPAGRHSHAVSTAAMTRSSVGAGEPRMAPVCESLQGGSPSTTVTVTALEALLCPSATVTQVCSNPPCETHETGTTNTATTSNAGSAQRVCSNPPCETHETGTTHTATTATSNGGTGQPEGGQQPPAGRPCETHQTTSTGTTMSVSVGALLPDATSSHRTVESGLEVAAAPSVTPQAGTALLAPFPTQRVCSNPPCETHETGTTHTATTVTSNMSSNQDPPPAASDQGEVESTQGDSVNITSSSAITTTVSSTLTRAVTTVTQSTPVPGPSVPKISSMTETAPRALTTEVPIPAKITVTIANTETSDMPFSAVDILQPPEELQVSPGPRQQLPPRQLLQSASTALMGESAEVLSASQTPELPAAVDLSSTGEPSSGQESAGSAVVATVVVQPPPPTQSEVDQLSLPQELMAEAQAGTTTLMVTGLTPEELAVTAAAEAAAQAAATEEAQALAIQAVLQAAQQAVMAGTGEPMDTSEAAATVTQAELGHLSAEGQEGQATTIPIVLTQQELAALVQQQQLQEAQAQQQHHHLPTEALAPADSLNDPAIESNCLNELAGTVPSTVALLPSTATESLAPSNTFVAPQPVVVASPAKLQAAATLTEVANGIESLGVKPDLPPPPSKAPMKKENQWFDVGVIKGTNVMVTHYFLPPDDAVPSDDDLGTVPDYNQLKKQELQPGTAYKFRVAGINACGRGPFSEISAFKTCLPGFPGAPCAIKISKSPDGAHLTWEPPSVTSGKIIEYSVYLAIQSSQAGGELKSSTPAQLAFMRVYCGPSPSCLVQSSSLSNAHIDYTTKPAIIFRIAARNEKGYGPATQVRWLQETSKDSSGTKPANKRPMSSPEMKSAPKKSKADGQ

SEQ ID NO: 8895 - protein, 1262 aa, Homo sapiens
MEDGKPVWAPHPTDGFQMGNIVDIGPDSLTIEPLNQKGKTFLALINQVFPAEEDSKKDVEDNCSLMYLNEATLLHNIKVRYSKDRIYTYVANILIAVNPYFDIPKIYSSEAIKSYQGKSLGTRPPHVFAIADKAFRDMKVLKMSQSIIVSGESGAGKTENTKFVLRYLTESYGTGQDIDDRIVEANPLLEAFGNAKTVRNNNSSRFGKFVEIHFNEKSSVVGGFVSHYLLEKSRICVQGKEERNYHIFYRLCAGASEDIREKLHLSSPDNFRYLNRGCTRYFANKETDKQILQNRKSPEYLKAGSMKDPLLDDHGDFIRMCTAMKKIGLDDEEKLDLFRVVAGVLHLGNIDFEEAGSTSGGCNLKNKSAQSLEYCAELLGLDQDDLRVSLTTRVMLTTAGGTKGTVIKVPLKVEQANNARDALAKTVYSHLFDHVVNRVNQCFPFETSSYFIGVLDIAGFEYFEHNSFEQFCINYCNEKLQQFFNERILKEEQELYQKEGLGVNEVHYVDNQDCIDLIEAKLVGILDILDEENRLPQPSDQHFTSAVHQKHKDHFRLTIPRKSKLAVHRNIRDDEGFIIRHFAGAVCYETTQFVEKNNDALHMSLESLICESRDKFIRELFESSTNNNKDTKQKAGKLSFISVGNKFKTQLNLLLDKLRSTGASFIRCIKPNLKMTSHHFEGAQILSQLQCSGMVSVLDLMQGGYPSRASFHELYNMYKKYMPDKLARLDPRLFCKALFKALGLNENDYKFGLTKVFFRPGKFAEFDQIMKSDPDHLAELVKRVNHWLTCSRWKKVQWCSLSVIKLKNKIKYRAEACIKMQKTIRMWLCKRRHKPRIDGLVKVGTLKKRLDKFNEVVSVLKDGKPEMNKQIKNLEISIDTLMAKIKSTMMTQEQIQKEYDALVKSSEELLSALQKKKQQEEEAERLRRIQEEMEKERKRREEDEKRRRKEEEERRMKLEMEAKRKQEEEERKKREDDEKRIQAEVEAQLARQKEEESQQQAVLEQERRDRELALRIAQSEAELISDEAQADLALRRGPAVLATKAAAGTKKYDLSKWKYAELRDTINTSCDIELLAACREEFHRRLKVYHAWKSKNKKRNTETEQRAPKSVTDYDFAPFLNNSPQQNPAAQIPARQREIEMNRQQRFFRIPFIRPADQYKDPQSKKKGWWYAHFDGPWIARQMELHPDKPPILLVAGKDDMEMCELNLEETGLTRKRGAEILPRQFEEIWERCGGIQYLQNAIESRQARPTYATAMLQSLLK

SEQ ID NO: 8896 - protein, 300 aa, Homo sapiens
MRALEGPGLSLLCLVLALPALLPVPAVRGVAETPTYPWRDAETGERLVCAQCPPGTFVQRPCRRDSPTTCGPCPPRHYTQFWNYLERCRYCNVLCGEREEEARACHATHNRACRCRTGFFAHAGFCLEHASCPPGAGVIAPGTPSQNTQCQPCPPGTFSASSSSSEQCQPHRNCTALGLALNVPGSSSHDTLCTSCTGFPLSTRVPGAEECERAVIDFVAFQDISIKRLQRLLQALEAPEGWGPTPRAGRAALQLKLRRRLTELLGAQDGALLVRLLQALRVARMPGLERSVRERFLPVH

SEQ ID NO: 8897 - protein, 413 aa, Homo sapiens
MSKGLPARQDMEKERETLQAWKERVGQELDRVVAFWMEHSHDQEHGGFFTCLGREGRVWMYCRLYRTFERFRHAQLLDAAKAGGEFLLRYARVAPPGKKCAFVLTRDGRPVKVQRTIFSECFYTMAMNELWRATGEVRYQTEAVEMMDQIVHWVQEDASGLGRPQLQGAPAAEPMAVPMMLLNLVEQLGEADEELAGKYAELGDWCARRILQHVQRDGQAVLENVSEGGKELPGCLGRQQNPGHTLEAGWFLLRHCIRKGDPELRAHVIDKFLLLPFHSGWDPDHGGLFYFQDADNFCPTQLEWAMKLWWPHSEAMIAFLMGYSDSGDPVLLRLFYQVAEYTFRQFRDPEYGEWFGYLSREGKVALSIKGGPFKGCFHVPRCLAMCEEMLGALLSRPAPAPSPAPTPACRGAE

SEQ ID NO: 8898 - protein, 836 aa, Homo sapiens
MDEADFSEHTTYKQEDLPYDGDLSQIKIGNDYSFTSKKDGLEVLNQIIFIADDPQEKAMHSETCGNTAVTIPLGKITENAANKKDEKEKQCTAALHIPANEGDASKSSISDILLHHLSKEPFLRGQGIDCETLPEISNADSFEEEAIIKSIISCYNKNSWPKEQTPELTDQLNPKRDGENSNKPGSATTTEENTSDLEGPVAAGDSSHQENVNVLTKTKGPGDKQKSYQGQSPQKQQTEKANSGNTFKYGQGQVHYQLPDFSKIAPKVKIPKNKIINKPLAIAKQASFSSKSRDKPTLVQDSLETTPESNCVEKQHQEQKGKITEPSQQIQMEPIVHIHQELLTGIESEASLSKLSPTSQKGTSSSSSYIFQKISQGKQMCQKLKEQTDQLKTKVQEFSKRIKQDSPYHLQDKKLVLEKLQGHLELLEQNFLATKDKHLTLQQQVHKHESTIVGDFDPERKVEGEIFKLEMLLEDVKEKMDESKYTSAPSLPVSSPVTLDDLASTFSSLSNEIPKEHPGHPSGPRGSGGSEVTGTPQGGPQEAPNEELCELAPQTYLNGHYGDAAAQNKPDQVAMRLSSNSGEDPNGTPRRQDCAEMTAPSPSCAFCRRLLEWKQNVEKKGHGRINCGRFSIVLHEKAPHSDSTPNSDTGHSFCSDSGTEMQSNKCQDCGTKIPTSRRACRKEPTKEFHYRYNTPGQNYSNHSKRGAFVQPHSLDESKNSSPSFLKPKRICSQRVNSKSFKGEHEPTPGKKKLQAFMTYSSDPATPSPHFYSCRISGSKSLCDFDSTEEIKSEILNSALDHALRTATILKETTDQMIKTIAEDLAKAQRWRNRLKY

SEQ ID NO: 8899 - protein, 707 aa, Homo sapiens
DAGIRRVVPSDLYPLVLGFLRDNQLSEVANKFAKATGATQQDANASSLLDIYSFWLKSAKVPERKLQANGPVAKKAKKKASSSDSEDSSEEEEEVQGPPAKKAAVPAKRVGLPPGKAAAKASESSSSEESSDDDDEEDQKKQPVQKGVKPQAKAAKAPPKKAKSSDSDSDSSSEDEPPKNQKPKITPVTVKAQTKAPPKPARAAPKIANGKAASSSSSSSSSSSSDDSEEEKAAATPKKVWTITSVRAETVPKKQVVAKAPVKAATTPTRKSSSSEDSSSDEEEEQKKPMKNKPGPYSSVPPPSAPPPKKSLGTQPPKKAVEKQQPVESSEDSSDESDSSSEEEKKPPTKAVVSKATTKPPPAKKAAESSSDSSDSDSSEDDEAPSKPAGTTKNSSNKPAVTTKSPAVKPAAAPKQPVGGGQKLLTRKADSSSSEEESSSSEEEKTKKMVATTKPKATAKAALSLPAKQAPQGSRDSSSDSDSSSSEEEEEKTSKSAVKKKPQKVAGGAAPSKPASAKKGKAESSNSSSSDDSSEEEEEKLKGKGSPRPQAPKANGTSALTAQNGKAAKNSEEEEEEKKKAAVVVSKSGSLKKRKQNEAAKEAETPQAKKIKLQTPNTFPKRKKGEKRASSPFRRVREEEIEVDSRVADNSFDAKRGAAGDWGERANQVLKFTKGKSFRHEKTKKKRGSYRGGSISVQVNSIKFDSE

SEQ ID NO: 8900 - protein, 1105 aa, Homo sapiens
MAAGKSGGSAGEITFLEALARSESKRDGGFKNNWSFDHEEESEGDTDKDGTNLLSVDEDEDSETSKGKKLNRRSEIVANSSGEFILKTYVRRNKSESFKTLKGNPIGLNMLSNNKKLSENTQNTSLCSGTVVHGRRFHHAHAQIPVVKTAAQRKEYPPHVQKVEINPVRLSRLQGVERIMKKTEESESQVEPEIKRKVQQKRHCSTYQPTPPLSPASKKCLTHLEDLQRNCRQAITLNESTGPLLRTSIHQNSGGQKSQNTGLTTKKFYGNNVEKVPIDIIVNCDDSKHTYLQTNGKVILPGAKIPKITNLKERKTSLSDLNDPIILSSDDDDDNDRTNRRESISPQPADSACSSPAPSTGKVEAALNENTCRAERELRSIPEDSELNTVTLPRKARMKDQFGNSIINTPLKRRKVFSQEPPDALALSCQSSFDSVILNCRSIRVGTLFRLLIEPVIFCLDFIKIQLDEPDHDPVEIILNTSDLTKCEWCNVRKLPVVFLQAIPAVYQKLSIQLQMNKEDKVWNDCKGVNKLTNLEEQYIILIFQNGLDPPANMVFESIINEIGIKNNISNFFAKIPFEEANGRLVACTRTYEESIKGSCGQKENKIKTVSFESKIQLRSKQEFQFFDEEEETGENHTIFIGPVEKLIVYPPPPAKGGISVTNEDLHCLNEGEFLNDVIIDFYLKYLVLEKLKKEDADRIHIFSSFFYKRLNQRERRNHETTNLSIQQKRHGRVKTWTRHVDIFEKDFIFVPLNEAAHWFLAVVCFPGLEKPKYEPNPHYHENAVIQKCSTVEDSCISSSASEMESCSQNSSAKPVIKKMLNKKHCIAVIDSNPGQEESDPRYKRNICSVKYSVKKINHTASENEEFNKGESTSQKVADRTKSENGLQNESLSSTHHTDGLSKIRLNYSDESPEAGKMLEDELVDFSEDQDNQDDSSDDGFLADDNCSSEIGQWHLKPTICKQPCILLMDSLRGPSRSNVVKILREYLEVEWEVKKGSKRSFSKDVMKGSNPKVPQQNNFSDCGVYVLQYVESFFENPILSFELPMNLANWFPPPRMRTKREEIRNIILKLQEDQSKEKRKHKDTYSTEAPLGEGTEQYVNSISD

SEQ ID NO: 8901 - protein, 925 aa, Homo sapiens
MAAHGKLRRERGLQAEYETQVKEMRWQLSEQLRCLELQGELRRELLQELAEFMRRRAEVELEYSRGLEKLAERFSSRGGRLGSSREHQSFRKEPSLLSPLHCWAVLLQHTRQQSRESAALSEVLAGPLAQRLSHIAEDVGRLVKKAKKTYQAYHMESVNAEAKLREAERQEEKRAGRSVPTTTAGATEAGPLRKSSLKKGGRLVEKRQAKFMEHKLKCTKARNEYLLSLASVNAAVSNYYLHDVLDLMDCCDTGFHLALGQVLRSYTAAESRTQASQVQGLGSLEEAVEALDPPGDKAKVLEVHATVFCPPLRFDYHPHDGDEVAEICVEMELRDEILPRAQNIQSRLDRQTIETEEVNKTLKATLQALLEVVASDDGDVLDSFQTSPSTESLKSTSSDPGSRQAGRRRGQQQETETFYLTKLQEYLSGRSILAKLQAKHEKLQEALQRGDKEEQEVSWTQYTQRKFQKSRQPRPSSQYNQRLFGGDMEKFIQSSGQPVPLVVESCIRFINLNGLQHEGIFRVSGAQLRVSEIRDAFERGEDPLVEGCTAHDLDSVAGVLKLYFRSLEPPLFPPDLFGELLASSELEATAERVEHVSRLLWRLPAPVLVVLRYLFTFLNHLAQYSDENMMDPYNLAVCFGPTLLPVPAGQDPVALQGRVNQLVQTLIVQPDRVFPPLTSLPGPVYEKCMAPPSASCLGDAQLESLGADNEPELEAEMPAQEDDLEGVVEAVACFAYTGRTAQELSFRRGDVLRLHERASSDWWRGEHNGMRGLIPHKYITLPAGTEKQVVGAGLQTAGESGSSPEGLLASELVHRPEPCTSPEAMGPSGHRRRCLVPASPEQHVEVDKAVAQNMDSVFKELLGKTSVRQGLGPASTTSPSPGPRSPKAPPSSRLGRNKGFSRGPGAPASPSASHPQGLDTTPKPH

SEQ ID NO: 8902 - protein, 733 aa, Homo sapiens
MAGGRETCLPLIGFILICLKMVASAKSAPEIPTIDQAYSKLSNSITVEWATVPGATSYLLTAEDGDTVIETTVANSPGTVTGLKAATWYEITIRSISAAGRSQASPPKQAKTVLAAPILEVSSPSSDSILVQWEAVYMAIAFSVSIMRANGLGSIWKENTTNTSLTFTSLEAGTLYTIKAYAWNANRIPGDDSTCNQRTSPRAPANIQVSFDSGALKASFSWARAEGAFNYTVMALSDSSELTCSTTFSSCTISSLQCGTEYLISVLASNDAGSSKSSSAMTLKTVACAPGRVTIQEDPPGHLSVAWSSVDLGDYYVVFVKSDDGLEVHCNTSLTQCNFLSECGFTYFISVFVYNKAGQSPLGDIFNYTTAPCCPSDINPVLVSSDRVEIVWSPVRGAELYETKAVDGYNMVECNDTTPACTLSALECDTKYNITVYSFNEVRGSNMSCTPQFITTAPCSPEIKNVSRDAFSMINVHWRSTNDDATYTVTAQGEKGLYQCSSTGESCTMRGLPCGSVFSVTAVAETQAGRSLPSYSVPLETVPCCPTGLTVTQITQSVINVSWTIGRVAQTHVAVLESHTGQSKCHTHQNHCLLGCITCGINYTVTLKAISATGLTADCSYQSYFSGACCPLGVKLYRLGPNGIRIYWQASRGSANYSTDLYGSKGIFTCTPSAGLSFCDVTEIPCGDVYTVMVSPVAKTGLKLTFCPKKIYSVTCSGSTLGMVIYRGKRNEE

SEQ ID NO: 8903 - protein, 1219 aa, Homo sapiens
MPKIVLNGVTVDFPFQPYKCQQEYMTKVLECLQQKVNGILESPTGTGKTLCLLCTTLAWREHLRDGISARKIAERAQGELFPDRALSSWGNAAAAAGDPIACYTDIPKIIYASRTHSQLTQVINELRNTSYRPKVCVLGSREQLCIHPEVKKQESNHLQIHLCRKKVASRSCHFYNNVEEKSLEQELASPILDIEDLVKSGSKHRVCPYYLSRNLKQQADIIFMPYNYLLDAKSRRAHNIDLKGTVVIFDEAHNVEKMCEESASFDLTPHDLASGLDVIDQVLEEQTKAAQQGEPHPEFSADSPSPGLNMELEDIAKLKMILLRLEGAIDAVELPGDDSGVTKPGSYIFELFAEAQITFQTKGCILDSLDQIIQHLAGRAGVFTNTAGLQKLADIIQIVFSVDPSEGSPGSPAGLGALQSYKVHIHPDAGHRRTAQRSDAWSTTAARKRGKVLSYWCFSPGHSMHELVRQGVRSLILTSGTLAPVSSFALEMQIPFPVCLENPHIIDKHQIWVGVVPRGPDGAQLSSAFDRRFSEECLSSLGKALGNIARVVPYGLLIFFPSYPVMEKSLEFWRARDLARKMEALKPLFVEPRSKGSFSETISAYYARVAAPGSTGATFLAVCRGKASEGLDFSDTNGRGVIVTGLPYPPRMDPRVVLKMQFLDEMKGQGGAGGQFLSGQEWYRQQASRAVNQAIGRVIRHRQDYGAVFLCDHRFAFADARAQLPSWVRPHVRVYDNFGHVIRDVAQFFRVAERTMPAPAPRATAPSVRGEDAVSEAKSPGPFFSTRKAKSLDLHVPSLKQRSSGSPAAGDPESSLCVEYEQEPVPARQRPRGLLAALEHSEQRAGSPGEEQAHSCSTLSLLSEKRPAEEPRGGRKKIRLVSHPEEPVAGAQTDRAKLFMVAVKQELSQANFATFTQALQDYKGSDDFAALAACLGPLFAEDPKKHNLLQGFYQFVRPHHKQQFEEVCIQLTGRGCGYRPEHSIPRRQRAQPVLDPTGRTAPDPKLTVSTAAAQQLDPQEHLNQGRPHLSPRPPPTGDPGSQPQWGSGVPRAGKQGQHAVSAYLADARRALGSAGCSQLLAALTAYKQDDDLDKVLAVLAALTTAKPEDFPLLHRFSMFVRPHHKQRFSQTCTDLTGRPYPGMEPPGPQEERLAVPPVLTHRAPQPGPSRSEKTGKTQSKISSFLRQRPAGTVGAGGEDAGPSQSSGPPHGPAASEWGL

SEQ ID NO: 8904 - protein, 1114 aa, Homo sapiens
MLKTEKTKPEVLEAHYGSAEPEKVLRVLHRDAILAQEKSIGEDVYEKPISELDRLEEKQKETYRRMLEQLLLAEKCHRRTVYELENEKHKHTDYMNKSDDFTNLLEQERERLKKLLEQEKAYQARKEKENAKRLNKLRDELVKLKSFALMLVDERQMHIEQLGLQSQKVQDLTQKLREEEEKLKAITSKSKEDRQKLLKLEVDFEHKASRFSQEHEEMNAKLANQESHNRQLRLKLVGLTQRIEELEETNKNLQKAEEELQELRDKIAKGECGNSSLMAEVENLRKRVLEMEGKDEEITKTESQCRELRKKLQEEEHHSKELRLEVEKLQKRMSELEKLEEAFSKSKSECTQLHLNLEKEKNLTKDLLNELEVVKSRVKELECSESRLEKAELSLKDDLTKLKSFTVMLVDERKNMMEKIKQEERKVDGLNKNFKVEQGKVMDVTEKLIEESKKLLKLKSEMEEKVYNLTRERDELIGKLKSEEEKSSELSCSVDLLKKRLDGIEEVEREITRGRSRKGSELTCPEDNKIKELTLEIERLKKRLQQLEVVEGDLMKTEDEYDQLEQKFRTEQDKANFLSQQLEEIKHQIAKNKAIEKGEVVSQEAELRHRFRLEEAKSRDLKAEVQALKEKIHELMNKEDQLSQLQVDYSVLQQRFMEEENKNKNMGQEVLNLTKELELSKRYSRALRPSVNGRRMVDVPVTSTGVQTDAVSGEAAEEETPAVFIRKSFQEENHIMSNLRQVGLKKPVERSSVLDRYPPAANELTMRKSWIPWMRKRENGPSITQEKGPRTNSSPGHPGEVVLSPKQGQPLHIRVTPDHENSTATLEITSPTSEEFFSSTTVIPTLGNQKPRITIIPSPNVMPQKQKSGDTTLGPERAMSPVTITTFSREKTPESGRGAFADRPTSPIQIMTVSTSAAPAEIAVSPESQEMPMGRTILKVTPEKQTVPTPVRKYNSNANIITTEDNKIHIHLGSQFKRSPGTSGEGVSPVITVRPVNVTAEKEVSTGTVLRSPRNHLSSRPGASKVTSTITITPVTTSSARGTQSVSGQDGSSQRPTPTRIPMSKGMKAGKPVVAAPGAGNLTKFEPRAETQSMKIELKKSAASSTTSLGGGKG

SEQ ID NO: 8905 - protein, 435 aa, Homo sapiens
MCGGVRGVGTGGIVSTAFCLLYKLFTLKLTRKQVMGLITHTDSPYIRALGFMYIRYTQPPTDLWDWFESFLDDEEDLDVKAGGGCVMTIGEMLRSFLTKLEWFSTLFPRIPVPVQKNIDQQIKTRPRKIKKDGKEGAEEIDRHVERRRSRSPRRSLSPRRSPRRSRSRSHHREGHGSSSFDRELEREKERQRLEREAKEREKERRRSRSIDRGLERRRSRSRERHRSRSRSRDRKGDRRDRDREREKENERGRRRDRDYDKERGNEREKERERSRERSKEQRSRGEVEEKKHKEDKDDRRHRDDKRDSKKEKKHSRSRSRERKHRSRSRSRNAGKRSRSRSKEKSSKHKNESKEKSNKRSRSGSQGRTDSVEKSKKREHSPSKEKSRKRSRSKERSHKRDHSDSKDQSDKHDRRRSQSIEQESQEKQHKNKDETV

SEQ ID NO: 8906 - protein, 546 aa, Homo sapiens
MANNSPALTGNSQPQHQAAAAAAQQQQQCGGGGATKPAVSGKQGNVLPLWGNEKTMNLNPMILTNILSSPYFKVQLYELKTYHEVVDEIYFKVTHVEPWEKGSRKTAGQTGMCGGVRGVGTGGIVSTAFCLLYKLFTLKLTRKQVMGLITHTDSPYIRALGFMYIRYTQPPTDLWDWFESFLDDEEDLDVKAGGGCVMTIGEMLRSFLTKLEWFSTLFPRIPVPVQKNIDQQIKTRPRKIKKDGKEGAEEIDRHVERRRSRSPRRSLSPRRSPRRSRSRSHHREGHGSSSFDRELEREKERQRLEREAKEREKERRRSRSIDRGLERRRSRSRERHRSRSRSRDRKGDRRDRDREREKENERGRRRDRDYDKERGNEREKERERSRERSKEQRSRGEVEEKKHKEDKDDRRHRDDKRDSKKEKKHSRSRSRERKHRSRSRSRNAGKRSRSRSKEKSSKHKNESKEKSNKRSRSGSQGRTDSVEKSKKREHSPSKEKSRKRSRSKERSHKRDHSDSKDQSDKHDRRRSQSIEQESQEKQHKNKDETV

SEQ ID NO: 8907 - protein, 986 aa, Homo sapiens
MAAHGKLRRERGLQAEYETQVKEMRWQLSEQLRCLELQGELRRELLQELAEFMRRRAEVELEYSRGLEKLAERFSSRGGRLGSSREHQSFRKEPSLLSPLHCWAVLLQHTRQQSRESAALSEVLAGPLAQRLSHIAEDVGRLVKKSRDLEQQLQDELLEVVSELQTAKKTYQAYHMESVNAEAKLREAERQEEKRAGRSVPTTTAGATEAGPLRKSSLKKGGRLVEKLWPPQRPVAASSCAPVCWLQAGFLVHPPWWGAMCAPSTHQRQAKFMEHKLKCTKARNEYLLSLASVNAAVSNYYLHDVLDLMDCCDTGFHLALGQVLRSYTAAESRTQASQVQGLGSLEEAVEALDPPGDKAKVLEVHATVFCPPLRFDYHPHDGDEVAEICVEMELRDEILPRAQNIQSRLDRQTIETEEVNKTLKATLQALLEVVASDDGDVLDSFQTSPSTESLKSTSSDPGSRQAGRRRGQQQETETFYLTKLQEYLSGRSILAKLQAKHEKLQEALQRGDKEEQEVSWTQYTQRKFQKSRQPRPSSQYNQRLFGGDMEKFIQSSGQPVPLVVESCIRFINLNGLQHEGIFRVSGAQLRVSEIRDAFERGEDPLVEGCTAHDLDSVAGVLKLYFRSLEPPLFPPDLFGELLASSELEATAERVEHVSRLLWRLPAPVLVVLRYLFTFLNHLAQYSDENMMDPYNLAVCFGPTLLPVPAGQDPVALQGRVNQLVQTLIVQPDRVFPPLTSLPGPVYEKCMAPPSASCLGDAQLESLGADNEPELEAEMPAQEDDLEGVVEAVACFAYTGRTAQELSFRRGDVLRLHERASSDWWRGEHNGMRGLIPHKYITLPAGTEKQVVGAGLQTAGESGSSPEGLLASELVHRPEPCTSPEAMGPSGHRRRCLVPASPEQHVEVDKAVAQNMDSVFKELLGKTSVRQGLGPASTTSPSPGPRSPKAPPSSRLGRNKGFSRGPGAPASPSASHPQGLDTTPKPH

SEQ ID NO: 8908 - protein, 242 aa, Homo sapiens
MYYGLSNFYQNHRRYVKSRDDSQLNGDSSALLNPSKECEPYRRNEDKPIAPCGAIANSMFNDTLELFLIGNDSYPIPIALKKKGIAWWTDKNVKFRNPPGGDNLEERFKGTTKPVNWLKPVYMLDSDPDNNGFINEDFIVWMRTAALPTFRKLYRLIERKSDLHPTLPAGRYSLNVTYNYPVHYFDGRKRMILSTISWMGGKNPFLGIAYIAVGSISFLLGVVLLVINHKYRNSSNTADITI

SEQ ID NO: 8909 - protein, 847 aa, Homo sapiens
MEPWKQCAQWLIHCKVLPTNHRVTWDSAQVFDLAQTLRDGVLLCQLLNNLRAHSINLKEINLRPQMSQFLCLKNIRTFLTACCETFGMRKSELFEAFDLFDVRDFGKVIETLSRLSRTPIALATGIRPFPTEESINDEDIYKGLPDLIDETLVEDEEDLYDCVYGEDEGGEVYEDLMKAEEAHQPKCPENDIRSCCLAEIKQTEEKYTETLESIEKYFMAPLKRFLTAAEFDSVFINIPELVKLHRNLMQEIHDSIVNKNDQNLYQVFINYKERLVIYGQYCSGVESAISSLDYISKTKEDVKLKLEECSKRANNGKFTLRDLLVVPMQRVLKYHLLLQELVKHTTDPTEKANLKLALDAMKDLAQYVNEVKRDNETLREIKQFQLSIENLNQPVLLFGRPQGDGEIRITTLDKHTKQERHIFLFDLAVIVCKRKGDNYEMKEIIDLQQYKIANNPTTDKENKKWSYGFYLIHTQGQNGLEFYCKTKDLKKKWLEQFEMALSNIRPDYADSNFHDFKMHTFTRVTSCKVCQMLLRGTFYQGYLCFKCGARAHKECLGRVDNCGRVNSGEQGTLKLPEKRTNGLRRTPKQVDPGLPKMQVIRNYSGTPPPALHEGPPLQLQAGDTVELLKGDAHSLFWQGRNLASGEVGFFPSDAVKPCPCVPKPVDYSCQPWYAGAMERLQAETELINRVNSTYLVRHRTKESGEYAISIKYNNEAKHIKILTRDGFFHIAENRKFKSLMELVEYYKHHSLKEGFRTLDTTLQFPYKEPEHSAGQRGNRAGNSLLSPKVLGIAIARYDFCARDMRELSLLKGDVVKIYTKMSANGWWRGEVNGRVGWFPSTYVEEDE

SEQ ID NO: 8910 - protein, 1257 aa, Homo sapiens
MVVALRYVWPLLLCSPCLLIQIPEEYEGHHVMEPPVITEQSPRRLVVFPTDDISLKCEASGKPEVQFRWTRDGVHFKPKEELGVTVYQSPHSGSFTITGNNSNFAQRFQGIYRCFASNKLGTAMSHEIRLMAEGAPKWPKETVKPVEVEEGESVVLPCNPPPSAEPLRIYWMNSKILHIKQDERVTMGQNGNLYFANVLTSDNHSDYICHAHFPGTRTIIQKEPIDLRVKATNSMIDRKPRLLFPTNSSSHLVALQGQPLVLECIAEGFPTPTIKWLRPSGPMPADRVTYQNHNKTLQLLKVGEEDDGEYRCLAENSLGSARHAYYVTVEAAPYWLHKPQSHLYGPGETARLDCQVQGRPQPEVTWRINGIPVEELAKDQKYRIQRGALILSNVQPSDTMVTQCEARNRHGLLLANAYIYVVQLPAKILTADNQTYMAVQGSTAYLLCKAFGAPVPSVQWLDEDGTTVLQDERFFPYANGTLGIRDLQANDTGRYFCLAANDQNNVTIMANLKVKDATQITQGPRSTIEKKGSRVTFTCQASFDPSLQPSITWRGDGRDLQELGDSDKYFIEDGRLVIHSLDYSDQGNYSCVASTELDVVESRAQLLVVGSPGPVPRLVLSDLHLLTQSQVRVSWSPAEDHNAPIEKYDIEFEDKEMAPEKWYSLGKVPGNQTSTTLKLSPYVHYTFRVTAINKYGPGEPSPVSETVVTPEAAPEKNPVDVKGEGNETTNMVITWKPLRWMDWNAPQVQYRVQWRPQGTRGPWQEQIVSDPFLVVSNTSTFVPYEIKVQAVNSQGKGPEPQVTIGYSGEDYPQAIPELEGIEILNSSAVLVKWRPVDLAQVKGHLRGYNVTYWREGSQRKHSKRHIHKDHVVVPANTTSVILSGLRPYSSYHLEVQAFNGRGSGPASEFTFSTPEGVPGHPEALHLECQSNTSLLLRWQPPLSHNGVLTGYVLSYHPLDEGGKGQLSFNLRDPELRTHNLTDLSPHLRYRFQLQATTKEGPGEAIVREGGTMALSGISDFGNISATAGENYSVVSWVPKEGQCNFRFHILFKALGEEKGGASLSPQYVSYNQSSYTQWDLQPDTDYEIHLFKERMFRHQMAVKTNGTGRVRLPPAGFATEGWFIGFVSAIILLLLVLLILCFIKRSKGGKYSVKDKEDTQVDSEARPMKDETFGEYRSLESDNEEKAFGSSQPSLNGDIKPLGSDDSLADYGGSVDVQFNEDGSFIGQYSGKKEKEAAGGNDSSGATSPINPAVALE

SEQ ID NO: 8911 - protein, 494 aa, Homo sapiens
MYLSRFLSIHALWVTVSSVMQPYPLVWGHYDLCKTQIYTEEGKVWDYMACQPESTDMTKYLKVKLDPPDITCGDPPETFCAMGNPYMCNNECDASTPELAHPPELMFDFEGRHPSTFWQSATWKEYPKPLQVNITLSWSKTIELTDNIVITFESGRPDQMILEKSLDYGRTWQPYQYYATDCLDAFHMDPKSVKDLSQHTVLEIICTEEYSTGYTTNSKIIHFEIKDRFAFFAGPRLRNMASLYGQLDTTKKLRDFFTVTDLRIRLLRPAVGEIFVDELHLARYFYAISDIKVRGRCKCNLHATVCVYDNSKLTCECEHNTTGPDCGKCKKNYQGRPWSPGSYLPIPKGTANTCIPSISSIGNCECFGHSNRCSYIDLLNTVICVSCKHNTRGQHCELCRLGYFRNASAQLDDENVCIANVCDNELLHCQNGGTCHNNVRCLCPAAYTGILCEKLRCEEAGSCGSDSGQGAPPHGSPALLLLTTLLGTASPLVF

SEQ ID NO: 8912 - protein, 480 aa, Homo sapiens
MYLSRFLSIHALWVTVSSVMQPYPLVWGHYDLCKTQIYTEEGKVWDYMACQPESTDMTKYLKVKLDPPDITCGDPPETFCAMGNPYMCNNECDASTPELAHPPELMFDFEGRHPSTFWQSATWKEYPKPLQVNITLSWSKTIELTDNIVITFESGRPDQMILEKSLDYGRTWQPYQYYATDCLDAFHMDPKSVKDLSQHTVLEIICTEEYSTGYTTNSKIIHFEIKDRFAFFAGPRLRNMASLYGQLDTTKKLRDFFTVTDLRIRLLRPAVGEIFVDELHLARYFYAISDIKVRGRCKCNLHATVCVYDNSKLTCECEHNTTGPDCGKCKKNYQGRPWSPGSYLPIPKGTANTCIPSISSIGNPPKFNRIWPNISSLEVSNPKQVAPKLALSTVSSVQVANHKRANVCDNELLHCQNGGTCHNNVRCLCPAAYTGILCEKLRCEEAGSCGSDSGQGAPPHGSPALLLLTTLLGTASPLVF

SEQ ID NO: 8913 - protein, 460 aa, Homo sapiens
MYLSRFLSIHALWVTVSSVMQPYPLVWGHYDLCKTQIYTEEGKVWDYMACQPESTDMTKYLKVKLDPPDITCGDPPETFCAMGNPYMCNNECDASTPELAHPPELMFDFEGRHPSTFWQSATWKEYPKPLQVNITLSWSKTIELTDNIVITFESGRPDQMILEKSLDYGRTWQPYQYYATDCLDAFHMDPKSVKDLSQHTVLEIICTEEYSTGYTTNSKIIHFEIKDRFAFFAGPRLRNMASLYGQLDTTKKLRDFFTVTDLRIRLLRPAVGEIFVDELHLARYFYAISDIKVRGRCKCNLHATVCVYDNSKLTCECEHNTTGPDCGKCKKNYQGRPWSPGSYLPIPKGTANTCIPSISSIGNPPKFNRIWPNISSLEVSNPKQANVCDNELLHCQNGGTCHNNVRCLCPAAYTGILCEKLRCEEAGSCGSDSGQGAPPHGSPALLLLTTLLGTASPLVF

SEQ ID NO: 8914 - protein, 539 aa, Homo sapiens
MYLSRFLSIHALWVTVSSVMQPYPLVWGHYDLCKTQIYTEEGKVWDYMACQPESTDMTKYLKVKLDPPDITCGDPPETFCAMGNPYMCNNECDASTPELAHPPELMFDFEGRHPSTFWQSATWKEYPKPLQVNITLSWSKTIELTDNIVITFESGRPDQMILEKSLDYGRTWQPYQYYATDCLDAFHMDPKSVKDLSQHTVLEIICTEEYSTGYTTNSKIIHFEIKDRFAFFAGPRLRNMASLYGQLDTTKKLRDFFTVTDLRIRLLRPAVGEIFVDELHLARYFYAISDIKVRGRCKCNLHATVCVYDNSKLTCECEHNTTGPDCGKCKKNYQGRPWSPGSYLPIPKGTANTCIPSISSIGNCECFGHSNRCSYIDLLNTVICVSCKHNTRGQHCELCRLGYFRNASAQLDDENVCIECYCNPLGSIHDRCNGSGFCECKTGTTGPKCDECLPGNSWHYGCQPNVCDNELLHCQNGGTCHNNVRCLCPAAYTGILCEKLRCEEAGSCGSDSGQGAPPHGSPALLLLTTLLGTASPLVF

SEQ ID NO: 8915 - protein, 479 aa, Homo sapiens
METENAAAAAAAAFTASSQLKEAVLVKMAEEGENLEAEIVYPITCGDSRANLIWRKFVCPGINVKCVQYDEHVISPKEFVHLAGKSTLKDWKRAIRMNGIMLRKIMDSGELDFYQHDKVCSNTCRSTKIDLSGARVSLSSPTSAEYIPLTPAAADVNGSPATITIETCEDPGDWTAAIGDDTFTFWRGLKDAGLLDEVIQEFHQELVETMRGLQQRVQDPPLQLRDAVLLNNIVQNFGMLDLVKKVLASHKCQMDRSREQYARDLAALEQQCDEHRRRAKELKHKSQHLSNVLMTLTPVSLPPPVKRPRLARATSGPAAMASQVLTQSAQLALGPGVPVPQLTSVPLGKVVSTLPSTVLGKGSLQAPPASSPASPLLGGYTVLASSGSTYPSTVEIHPDASSLTVLSTAAVQDGSTVFKVVSPLQLLTLPGLGPTLQNVAQASPGSSTIVTVPAGAAPGPEEHTATIEVAAMAEDHERK

SEQ ID NO: 8916 - protein, 438 aa, Homo sapiens
MYLSRFLSIHALWVTVSSVMQPYPLVWGHYDLCKTQIYTEEGKVWDYMACQPESTDMTKYLKVKLDPPDITCGDPPETFCAMGNPYMCNNECDASTPELAHPPELMFDFEGRHPSTFWQSATWKEYPKPLQVNITLSWSKTIELTDNIVITFESGRPDQMILEKSLDYGRTWQPYQYYATDCLDAFHMDPKSVKDLSQHTVLEIICTEEYSTGYTTNSKIIHFEIKDRFAFFAGPRLRNMASLYGQLDTTKKLRDFFTVTDLRIRLLRPAVGEIFVDELHLARYFYAISDIKVRGRCKCNLHATVCVYDNSKLTCECEHNTTGPDCGKCKKNYQGRPWSPGSYLPIPKGTANTCIPSISSIGTNVCDNELLHCQNGGTCHNNVRCLCPAAYTGILCEKLRCEEAGSCGSDSGQGAPPHGSPALLLLTTLLGTASPLVF

SEQ ID NO: 8917 - protein, 375 aa, Homo sapiens
MSQPKKRKLESGGGGEGGEGTEEEDGAEREAALERPRRTKRERDQLYYECYSDVSVHEEMIADRVRTDAYRLGILRNWAALRGKTVLDVGAGTGILSIFCAQAGARRVYAVEASAIWQQAREVVRFNGLEDRVHVLPGPVETVELPEQVDAIVSEWMGYGLLHESMLSSVLHARTKWLKEGGLLLPASAELFIAPISDQMLEWRLGFWSQVKQHYGVDMSCLEGFATRCLMGHSEIVVQGLSGEDVLARPQRFAQLELSRAGLEQELEAGVGGRFRCSCYGSAPMHGFAIWFQVTFPGGESEKPLVLSTSPFHPATHWKQALLYLNEPVQVEQDTDVSGEITLLPSRDNPRRLRVLLRYKVGDQEEKTKDFAMED

SEQ ID NO: 8918 - protein, 677 aa, Homo sapiens
MVQKESQATLEERESELSSNPAASAGASLEPPAAPAPGEDNPAGAGGAAVAGAAGGARRFLCGVVEGFYGRPWVMEQRKELFRRLQKWELNTYLYAPKDDYKHRMFWREMYSVEEAEQLMTLISAAREYEIEFIYAISPGLDITFSNPKEVSTLKRKLDQVSQFGCRSFALLFDDIDHNMCAADKEVFSSFAHAQVSITNEIYQYLGEPETFLFCPTEYCGTFCYPNVSQSPYLRTVGEKLLPGIEVLWTGPKVVSKEIPVESIEEVSKIIKRAPVIWDNIHANDYDQKRLFLGPYKGRSTELIPRLKGVLTNPNCEFEANYVAIHTLATWYKSNMNGVRKDVVMTDSEDSTVSIQIKLENEGSDEDIETDVLYSPQMALKLALTEWLQEFGVPHQYSSRQVAHSGAKASVVDGTPLVAAPSLNATTVVTTVYQEPIMSQGAALSGEPTTLTKEEEKKQPDEEPMDMVVEKQEETDHKNDNQILSEIVEAKMAEELKPMDTDKESIAESKSPEMSMQEDCISDIAPMQTDEQTNKEQFVPGPNEKPLYTAEPVTLEDLQLLADLFYLPYEHGPKGAQMLREFQWLRANSSVVSVNCKGKDSEKIEEWRSRAAKFEEMCGLVMGMFTRLSNCANRTILYDMYSYVWDIKSIMSMVKSFVQWLGRCTRNNLFSSNILSL

SEQ ID NO: 8919 - protein, 1806 aa, Homo sapiens
MEPWSSRWKTKRWLWDFTVTTLALTFLFQAREVRGAAPVDVLKALDFHNSPEGISKTTGFCTNRKNSKGSDTAYRVSKQAQLSAPTKQLFPGGTFPEDFSILFTVKPKKGIQSFLLSIYNEHGIQQIGVEVGRSPVFLFEDHTGKPAPEDYPLFRTVNIADGKWHRVAISVEKKTVTMIVDCKKKTTKPLDRSERAIVDTNGITVFGTRILDEEVFEGDIQQFLITGDPKAAYDYCEHYSPDCDSSAPKAAQAQEPQIDEYAPEDIIEYDYEYGEAEYKEAESVTEGPTVTEETIAQTEANIVDDFQEYNYGTMESYQTEAPRHVSGTNEPNPVEEIFTEEYLTGEDYDSQRKNSEDTLYENKEIDGRDSDLLVDGDLGEYDFYEYKEYEDKPTSPPNEEFGPGVPAETDITETSINGHGAYGEKGQKGEPAVVEPGMLVEGPPGPAGPAGIMGPPGLQGPTGPPGDPGDRGPPGRPGLPGADGLPGPPGTMLMLPFRYGGDGSKGPTISAQEAQAQAILQQARIALRGPPGPMGLTGRPGPVGGPGSSGAKGESGDPGPQGPRGVQGPPGPTGKPGKRGRPGADGGRGMPGEPGAKGDRGFDGLPGLPGDKGHRGERGPQGPPGPPGDDGMRGEDGEIGPRGLPGEAGPRGLLGPRGTPGAPGQPGMAGVDGPPGPKGNMGPQGEPGPPGQQGNPGPQGLPGPQGPIGPPGEKGPQGKPGLAGLPGADGPPGHPGKEGQSGEKGALGPPGPQGPIGYPGPRGVKGADGVRGLKGSKGEKGEDGFPGFKGDMGLKGDRGEVGQIGPRGEDGPEGPKGRAGPTGDPGPSGQAGEKGKLGVPGLPGYPGRQGPKGSTGFPGFPGANGEKGARGVAGKPGPRGQRGPTGPRGSRGARGPTGKPGPKGTSGGDGPPGPPGERGPQGPQGPVGFPGPKGPPGPPGKDGLPGHPGQRGETGFQGKTGPPGPGGVVGPQGPTGETGPIGERGHPGPPGPPGEQGLPGAAGKEGAKGDPGPQGISGKDGPAGLRGFPGERGLPGAQGAPGLKGGEGPQGPPGPVGSPGERGSAGTAGPIGLPGRPGPQGPPGPAGEKGAPGEKGPQGPAGRDGVQGPVGLPGPAGPAGSPGEDGDKGEIGEPGQKGSKGDKGENGPPGPPGLQGPVGAPGIAGGDGEPGPRGQQGMFGQKGDEGARGFPGPPGPIGLQGLPGPPGEKGENGDVGPMGPPGPPGPRGPQGPNGADGPQGPPGSVGSVGGVGEKGEPGEAGNPGPPGEAGVGGPKGERGEKGEAGPPGAAGPPGAKGPPGDDGPKGNPGPVGFPGDPGPPGEPGPAGQDGVGGDKGEDGDPGQPGPPGPSGEAGPPGPPGKRGPPGAAGAEGRQGEKGAKGEAGAEGPPGKTGPVGPQGPAGKPGPEGLRGIPGPVGEQGLPGAAGQDGPPGPMGPPGLPGLKGDPGSKGEKGHPGLIGLIGPPGEQGEKGDRGLPGTQGSPGAKGDGGIPGPAGPLGPPGPPGLPGPQGPKGNKGSTGPAGQKGDSGLPGPPGSPGPPGEVIQPLPILSSKKTRRHTEGMQADADDNILDYSDGMEEIFGSLNSLKQDIEHMKFPMGTQTNPARTCKDLQLSHPDFPDGEYWIDPNQGCSGDSFKVYCNFTSGGETCIYPDKKSEGVRISSWPKEKPGSWFSEFKRGKLLSYLDVEGNSINMVQMTFLKLLTASARQNFTYHCHQSAAWYDVSSGSYDKALRFLGSNDEEMSYDNNPFIKTLYDGCASRKGYEKTVIEINTPKIDQVPIVDVMINDFGDQNQKFGFEVGPVCFLG

SEQ ID NO: 8920 - protein, 540 aa, Homo sapiens
MPGKMVVILGASNILWIMFAASQAFKIETTPESRYLAQIGDSVSLTCSTTGCESPFFSWRTQIDSPLNGKVTNEGTTSTLTMNPVSFGNEHSYLCTATCESRKLEKGIQVEIYSFPKDPEIHLSGPLEAGKPITVKCSVADVYPFDRLEIDLLKGDHLMKSQEFLEDADRKSLETKSLEVTFTPVIEDIGKVLVCRAKLHIDEMDSVPTVRQAVKELQVYISPKNTVISVNPSTKLQEGGSVTMTCSSEGLPAPEIFWSKKLDNGNLQHLSGNATLTLIAMRMEDSGIYVCEGVNLIGKNRKEVELIVQVAPRDTTVLVSPSSILEEGSSVNMTCLSQGFPAPKILWSRQLPNGELQPLSENATLTLISTKMEDSGVYLCEGINQAGRSRKEVELIIQVTPKDIKLTAFPSESVKEGDTVIISCTCGNVPETWIILKKKAETGDTVLKSIDGAYTIRKAQLKDAGVYECESKNKVGSQLRSLTLDVQGRENNKDYFSPELLVLYFASSLIIPAIGMIIYFARKANMKGSYSLVEAQKSKV

SEQ ID NO: 8921 - protein, 677 aa, Homo sapiens
MPGKMVVILGASNILWIMFAASQAFKIETTPESRYLAQIGDSVSLTCSTTGSFPKDPEIHLSGPLEAGKPITVKCSVADVYPFDRLEIDLLKGDHLMKSQEFLEDADRKSLETKSLEVTFTPVIEDIGKVLVCRAKLHIDEMDSVPTVRQAVKELQVYISPKNTVISVNPSTKLQEGGSVTMTCSSEGLPAPEIFWSKKLDNGNLQHLSGNATLTLIAMRMEDSGIYVCEGVNLIGKNRKEVELIVQEKPFTVEISPGPRIAAQIGDSVMLTCSVMGCESPSFSWRTQIDSPLSGKVRSEGTNSTLTLSPVSFENEHSYLCTVTCGHKKLEKGIQVELYSFPRDPEIEMSGGLVNGSSVTVSCKVPSVYPLDRLEIELLKGETILENIEFLEDTDMKSLENKSLEMTFIPTIEDTGKALVCQAKLHIDDMEFEPKQRQSTQTLYVNVAPRDTTVLVSPSSILEEGSSVNMTCLSQGFPAPKILWSRQLPNGELQPLSENATLTLISTKMEDSGVYLCEGINQAGRSRKEVELIIQVTPKDIKLTAFPSESVKEGDTVIISCTCGNVPETWIILKKKAETGDTVLKSIDGAYTIRKAQLKDAGVYECESKNKVGSQLRSLTLDVQGRENNKDYFSPELLVLYFASSLIIPAIGMIIYFARKANMKGSYSLVEAQKSKV

SEQ ID NO: 8922 - protein, 383 aa, Homo sapiens
MAAESGELIGACEFMKDRLYFATLRNRPKSTVNTHYFSIDEELVYENFYADFGPLNLAMVYRYCCKLNKKLKSYSLSRKKIVHYTCFDQRKRANAAFLIGAYAVIYLKKTPEEAYRALLSGSNPPYLPFRDASFGNCTYNLTILDCLQGIRKGLQHGFFDFETFDVDEYEHYERVENGDFNWIVPGKFLAFSGPHPKSKIENGYPLHAPEAYFPYFKKHNVTAVVRLNKKIYEAKRFTDAGFEHYDLFFIDGSTPSDNIVRRFLNICENTEGAIAVHCKAGLGRTGTLIACYVMKHYRFTHAEIIAWIRICRPGSIIGPQQHFLEEKQASLWVQGDIFRSKLKNRPSSEGSINKILSGLDDMSIGGNLSKTQNMERFGEVSFP

SEQ ID NO: 8923 - protein, 320 aa, Homo sapiens
MAAVRMLRTWSRNAGKLICVRYFQTCGNVHVLKPNYVCFFGYPSFKYSHPHHFLKTTAALRGQVVQFKLSDIGEGIREVTVKEWYVKEGDTVSQFDSICEVQSDKASVTITSRYDGVIKKLYYNLDDIAYVGKPLVDIETEALKDSEEDVVETPAVSHDEHTHQEIKGRKTLATPAVRRLAMENNIKLSEVVGSGKDGRILKEDILNYLEKQTGAILPPSPKVEIMPPPPKPKDMTVPILVSKPPVFTGKDKTEPIKGFQKAMVKTMSAALKIPHFGYCDEIDLTELVKLREELKPIAFARGIKLSFMPFFLKYYFSWKS

SEQ ID NO: 8924 - protein, 482 aa, Homo sapiens
MAAVRMLRTWSRNAGKLICVRYFQTCGNVHVLKPNYVCFFGYPSFKYSHPHHFLKTTAALRGQVVQFKLSDIGEGIREVTVKEWYVKEGDTVSQFDSICEVQSDKASVTITSRYDGVIKKLYYNLDDIAYVGKPLVDIETEALKDSEEDVVETPAVSHDEHTHQEIKGRKTLATPAVRRLAMENNIKLSEVVGSGKDGRILKEDILNYLEKQTGAILPPSPKVEIMPPPPKPKDMTVPILVSKPPVFTGKDKTEPIKGFQKAMVKTMSAALKIPHFGYCDEIDLTELVKLREELKPIAFARGIKLSFMPFFLKAASLGLLQFPILNASVDENCQNITYKASHNIGIAMDTEQGLIVPNVKNVQICSIFDIATELNRLQKLGSVSQLSTTDLTGGTFTLSNIGSIGGTFAKPVIMPPEVAIGALGSIKAIPRFNQKGEVYKAQIMNVSWSADHRVIDGATMSRFSNLWKSYLENPAFMLLDLK

SEQ ID NO: 8925 - protein, 339 aa, Homo sapiens
MTENVVCTGAVNAVKEVWEKRIKKLNEDLKREKEFQHKLVRIWEERVSLTKLREKVTREDGRVILKIEKEEWKTLPSSLLKLNQLQEWQLHRTGLLKIPEFIGRFQNLIVLDLSRNTISEIPPGIGLLTRLQELILSYNKIKTVPKELSNCASLEKLELAVNRDICDLPQELSNLLKLTHLDLSMNDFTTIPLAVLNMPALEWLDMGSNKLEQLPDTIERMQNLHTLWLQRNEITCLPQTISNMKNLGTLVLSNNKLQDIPVCMEEMANLRFVNFRDNPLKLKVSLPPSEGTDEEEERELFGLQFMHTYIQESRRRAALQFCVCHGQILTIYTCMALEI

SEQ ID NO: 8926 - protein, 481 aa, Homo sapiens
MATSATSPHAPGFPAEGRCGYYVEKKKRFCRMVVAAGKRFCGEHAGAAEEEDARKRILCPLDPKHTVYEDQLAKHLKKCNSREKPKPDFYIQDINAGLRDETEIPEQLVPISSLSEEQLEKLIKKLRKASEGLNSTLKDHIMSHPALHDALNDPKNGDSATKHLKQQASILGNIENLKLLGPRRCFVEFGAGKGKLSHWVDIALKDAEKVHFILVEKVTTRFKVDGKHRKKNSVFERLQIDIQHLCLNKIPVLREEKLPVVGIGKHLCGMATDLALRCLVETYAASFEERNEEPLAKRIKNDKTEKEIYTLAKEGNEKNVPEKWNPVAGIVIALCCHHRCDWRHYVGKEYFRALGLGAVEFHYFQRMSSWATCGMRKTSLETSNSTTKRQDNQNDDSEEHDDGGYRITDDGADCLPGLLSVEEKKKIGHLCKLLIDQGRIQYLQQKGFSPALQYYTDPLVSLENVLLTALPNHSSSPETTA

SEQ ID NO: 8927 - protein, 490 aa, Homo sapiens
MTQGKKKKRAANRSIMLAKKIIIKDGGTPQGIGSPSVYHAVIVIFLEFFAWGLLTAPTLVVLHETFPKHTFLMNGLIQGVKGLLSFLSAPLIGALSDVWGRKSFLLLTVFFTCAPIPLMKISPWWYFAVISVSGVFAVTFSVVFAYVADITQEHERSMAYGLVSATFAASLVTSPAIGAYLGRVYGDSLVVVLATAIALLDICFILVAVPESLPEKMRPASWGAPISWEQADPFASLKKVGQDSIVLLICITVFLSYLPEAGQYSSFFLYLRQIMKFSPESVAAFIAVLGILSIIAQTIVLSLLMRSIGNKNTILLGLGFQILQLAWYGFGSEPWMMWAAGAVAAMSSITFPAVSALVSRTADADQQGVVQGMITGIRGLCNGLGPALYGFIFYIFHVELKELPITGTDLGTNTSPQHHFEQNSIIPGPPFLFGACSVLLALLVALFIPEHTNLSLRSSSWRKHCGSHSHPHNTQAPGEAKEPLLQDTNV

SEQ ID NO: 8928 - protein, 367 aa, Homo sapiens
MSSRSVLSPVVGTDAPDQHLELKKPQELKEMERLPLANEDKTMFANLKYVSLGILVFQTTSLVLTMRYSRTLKEEGPRYLSSTAVVVAELLKIMACILLVYKDSKCSLRALNRVLHDEILNKPMETLKLAIPSGIYTLQNNLLYVALSNLDAATYQVTYQLKILTTALFSVSMLSKKLGVYQWLSLVILMTGVAFVQWPSDSQLDSKELSAGSQFVGLMAVLTACFSSGFAGVYFEKILKETKQSVWIRNIQLGFFGSIFGLMGVYIYDGELVSKNGFFQGYNRLTWIVVVLQALGGLVIAAVIKYADNILKGFATSLSIILSTLISYFWLQDFVPTSVFFLGAILVITATFLYGYDPKPAGNPTKA

SEQ ID NO: 8929 - protein, 1516 aa, Homo sapiens
MAPILSINLFIGYELQFRLGPTLQGKAVTVYTNYPFPGETFNREKFRSLDWENPTEREDDSDKYCKLNLQQSGSFQYYFLQGNEKSGGGYIVVDPILRVGADNHVLPLDCVTLQTFLAKCLGPFDEWESRLRVAKESGYNMIHFTPLQTLGLSRSCYSLANQLELNPDFSRPNRKYTWNDVGQLVEKLKKEWNVICITDVVYNHTAANSKWIQEHPECAYNLVNSPHLKPAWVLDRALWRFSCDVAEGKYKEKGIPALIENDHHMNSIRKIIWEDIFPKLKLWEFFQVDVNKAVEQFRRLLTQENRRVTKSDPNQHLTIIQDPEYRRFGCTVDMNIALTTFIPHDKGPAAIEECCNWFHKRMEELNSEKHRLINYHQEQAVNCLLGNVFYERLAGHGPKLGPVTRKHPLVTRYFTFPFEEIDFSMEESMIHLPNKACFLMAHNGWVMGDDPLRNFAEPGSEVYLRRELICWGDSVKLRYGNKPEDCPYLWAHMKKYTEITATYFQGVRLDNCHSTPLHVAEYMLDAARNLQPNLYVVAELFTGSEDLDNVFVTRLGISSLIREAMSAYNSHEEGRLVYRYGGEPVGSFVQPCLRPLMPAIAHALFMDITHDNECPIVHRSAYDALPSTTIVSMACCASGSTRGYDELVPHQISVVSEERFYTKWNPEALPSNTGEVNFQSGIIAARCAISKLHQELGAKGFIQVYVDQVDEDIVAVTRHSPSIHQSVVAVSRTAFRNPKTSFYSKEVPQMCIPGKIEEVVLEARTIERNTKPYRKDENSINGTPDITVEIREHIQLNESKIVKQAGVATKGPNEYIQEIEFENLSPGSVIIFRVSLDPHAQVAVGILRNHLTQFSPHFKSGSLAVDNADPILKIPFASLASRLTLAELNQILYRCESEEKEDGGGCYDIPNWSALKYAGLQGLMSVLAEIRPKNDLGHPFCNNLRSGDWMIDYVSNRLISRSGTIAEVGKWLQAMFFYLKQIPRYLIPCYFDAILIGAYTTLLDTAWKQMSSFVQNGSTFVKHLSLGSVQLCGVGKFPSLPILSPALMDVPYRLNEITKEKEQCCVSLAAGLPHFSSGIFRCWGRDTFIALRGILLITGRYVEARNIILAFAGTLRHGLIPNLLGEGIYARYNCRDAVWWWLQCIQDYCKMVPNGLDILKCPVSRMYPTDDSAPLPAGTLDQPLFEVIQEAMQKHMQGIQFRERNAGPQIDRNMKDEGFNITAGVDEETGFVYGGNRFNCGTWMDKMGESDRARNRGIPATPRDGSAVEIVGLSKSAVRWLLELSKKNIFPYHEVTVKRHGKAIKVSYDEWNRKIQDNFEKLFHVSEDPSDLNEKHPNLVHKRGIYKDSYGASSPWCDYQLRPNFTIAMVVAPELFTTEKAWKALEIAEKKLLGPLGMKTLDPDDMVYCGIYDNALDNDNYNLAKGFNYHQGPEWLWPIGYFLRAKLYFSRLMGPETTAKTIVLVKNVLSRHYVHLERSPWKGLPELTNENAQYCPFSCETQAWSIATILETLYDL

SEQ ID NO: 8930 - protein, 763 aa, Homo sapiens
MQRAGSSGGRGECDISGAGRLGLEEAARLSCAVHTSPGGGRRPGQAAGMSAKERPKGKVIKDSVTLLPCFYFVELPILASSVVSLYFLELTDVFKPVHSGFSCYDRSLSMPYIEPTQEAIPFLMLLSLAFAGPAITIMVGEGILYCCLSKRRNGVGLEPNINAGGCNFNSFLRRAVRFVGVHVFGLCSTALITDIIQLSTGYQAPYFLTVCKPNYTSLNVSCKENSYIVEDICSGSDLTVINSGRKSFPSQHATLAAFAAVYVSMYFNSTLTDSSKLLKPLLVFTFIICGIICGLTRITQYKNHPVDVYCGFLIGGGIALYLGLYAVGNFLPSDESMFQHRDALRSLTDLNQDPNRLLSAKNGSSSDGIAHTEGILNRNHRDASSLTNLKRANADVEIITPRSPMGKENMVTFSNTLPRANTPSVEDPVRRNASIHASMDSARSKQLLTQWKNKNESRKLSLQVIEPEPGQSPPRSIEMRSSSEPSRVGVNGDHHGPGNQYLKIQPGAVPGCNNSMPGGPRVSIQSRPGSSQLVHIPEETQENISTSPKSSSARAKWLKAAEKTVACNRSNSQPRIMQVIAMSKQQGVLQSSPKNTEGSTVSCTGSIRYKTLTDHEPSGIVRVEAHPENNRPIIQIPSTEGEGSGSWKWKAPEKGSLRQTYELNDLNRDSESCESLKDSFGSGDRKRSNIDSNEHHHHGITTIRVTPVEGSEIGSETLSISSSRDSTLRRKGNIILIPERSNSPENTRNIFYKGTSPTRAYKD

SEQ ID NO: 8931 - protein, 1159 aa, Homo sapiens
MGDMANSSIEFHPKPQQQRDVPQAGGFGCTLAELRTLMELRGAEALQKIEEAYGDVSGLCRRLKTSPTEGLADNTNDLEKRRQIYGQNFIPPKQPKTFLQLVWEALQDVTLIILEVAAIVSLGLSFYAPPGEESEACGNVSGGAEDEGEAEAGWIEGAAILLSVICVVLVTAFNDWSKEKQFRGLQSRIEQEQKFTVIRNGQLLQVPVAALVVGDIAQVKYGDLLPADGVLIQANDLKIDESSLTGESDHVRKSADKDPMLLSGTHVMEGSGRMVVTAVGVNSQTGIIFTLLGAGGEEEEKKDKKAKKQDGAVAMEMQPLKSAEGGEMEEREKKKANAPKKEKSVLQGKLTKLAVQIGKAGLVMSAITVIILVLYFVIETFVVEGRTWLAECTPVYVQYFVKFFIIGVTVLVVAVPEGLPLAVTISLAYSVKKMMKDNNLVRHLDACETMGNATAICSDKTGTLTTNRMTVVQSYLGDTHYKEIPAPSALTPKILDLLVHAISINSAYTTKILPPEKEGALPRQVGNKTECALLGFVLDLKRDFQPVREQIPEDKLYKVYTFNSVRKSMSTVIRMPDGGFRLFSKGASEILLKKCTNILNSNGELRGFRPRDRDDMVRKIIEPMACDGLRTICIAYRDFSAGQEPDWDNENEVVGDLTCIAVVGIEDPVRPEVPEAIRKCQRAGITVRMVTGDNINTARAIAAKCGIIQPGEDFLCLEGKEFNRRIRNEKGEIEQERLDKVWPKLRVLARSSPTDKHTLVKGIIDSTTGEQRQVVAVTGDGTNDGPALKKADVGFAMGIAGTDVAKEASDIILTDDNFTSIVKAVMWGRNVYDSISKFLQFQLTVNVVAVIVAFTGACITQDSPLKAVQMLWVNLIMDTFASLALATEPPTESLLLRKPYGRDKPLISRTMMKNILGHAVYQLAIIFTLLFVGELFFDIDSGRNAPLHSPPSEHYTIIFNTFVMMQLFNEINARKIHGERNVFDGIFSNPIFCTIVLGTFGIQIVIVQFGGKPFSCSPLSTEQWLWCLFVGVGELVWGQVIATIPTSQLKCLKEAGHGPGKDEMTDEELAEGEEEIDHAERELRRGQILWFRGLNRIQTQMEVVSTFKRSGSVQGAVRRRSSVLSQLHDVTNLSTPTHAILSAANPTSAAGNPGGESVP

SEQ ID NO: 8932 - protein, 316 aa, Homo sapiens
MPLLPAALTSSMLYFQMVIMAGTVMLAYYFEYTDTFTVNVQGFFCHDSAYRKPYPGPEDSSAVPPVLLYSLAAGVPVLVIIVGETAVFCLQLATRDFENQEKTILTGDCCYINPLVRRTVRFLGIYTFGLFATDIFVNAGQVVTGNLAPHFLALCKPNYTALGCQQYTQFISGEEACTGNPDLIMRARKTFPSKEAALSVYAAMYLTMYITNTIKAKGTRLAKPVLCLGLMCLAFLTGLNRVAEYRNHWSDVIAGFLVGISIAVFLVVCVVNNFKGRQAENEHIHMDNLAQMPMISIPRVESPLEKNHITAFAEVT

SEQ ID NO: 8933 - protein, 1025 aa, Homo sapiens
MAPVLSKDSADIESILALNPRTQTHATLCSTSAKKLDKKHWKRNPDKNCFNCEKLENNFDDIKHTTLGERGALREAMRCLKCADAPCQKSCPTNLDIKSFITSIANKNYYGAAKMIFSDNPLGLTCGMVCPTSDLCVGGCNLYATEEGPINIGGLQQFATEVFKAMSIPQIRNPSLPPPEKMSEAYSAKIALFGAGPASISCASFLARLGYSDITIFEKQEYVGGLSTSEIPQFRLPYDVVNFEIELMKDLGVKIICGKSLSVNEMTLSTLKEKGYKAAFIGIGLPEPNKDAIFQGLTQDQGFYTSKDFLPLVAKGSKAGMCACHSPLPSIRGVVIVLGAGDTAFDCATSALRCGARRVFIVFRKGFVNIRAVPEEMELAKEEKCEFLPFLSPRKVIVKGGRIVAMQFVRTEQDETGKWNEDEDQMVHLKADVVISAFGSVLSDPKVKEALSPIKFNRWGLPEVDPETMQTSEAWVFAGGDVVGLANTTVESVNDGKQASWYIHKYVQSQYGASVSAKPELPLFYTPIDLVDISVEMAGLKFINPFGLASATPATSTSMIRRAFEAGWGFALTKTFSLDKDIVTNVSPRIIRGTTSGPMYGPGQSSFLNIELISEKTAAYWCQSVTELKADFPDNIVIASIMCSYNKNDWTELAKKSEDSGADALELNLSCPHGMGERGMGLACGQDPELVRNICRWVRQAVQIPFFAKLTPNVTDIVSIARAAKEGGANGVTATNTVSGLMGLKSDGTPWPAVGIAKRTTYGGVSGTAIRPIALRAVTSIARALPGFPILATGGIDSAESGLQFLHSGASVLQVCSAIQNQDFTVIEDYCTGLKALLYLKSIEELQDWDGQSPATVSHQKGKPVPRIAELMDKKLPSFGPYLEQRKKIIAENKIRLKEQNVAFSPLKRNCFIPKRPIPTIKDVIGKALQYLGTFGELSNVEQVVAMIDEEMCINCGKCYMTCNDSGYQAIQFDPETHLPTITDTCTGCTLCLSVCPIVDCIKMVSRTTPYEPKRGVPLSVNPVC

SEQ ID NO: 8934 - protein, 330 aa, Homo sapiens
MEHLGPHHLHPGHAEPISFGIDQILNSPDQGGCMGPASRLQDGEYGLGCLVGGAYTYGGGGSAAATGAGGAGAYGTGGPGGPGGPAGGGGACSMGPLTGSYNVNMALAGGPGPGGGGGSSGGAGALSAAGVIRVPAHRPLAGAVAHPQPLATGLPTVPSVPAMPGVNNLTGLTFPWMESNRRYTKDRFTGHPYQNRTPPKKKKPRTSFTRLQICELEKRFHRQKYLASAERAALAKALKMTDAQVKTWFQNRRTKWRRQTAEEREAERQQANRILLQLQQEAFQKSLAQPLPADPLCVHNSSLFALQNLQPWSDDSTKITSVTSVASACE

SEQ ID NO: 8935 - protein, 537 aa, Homo sapiens
MDGIVTEVAVGVKRGSDELLSGSVLSSPNSNMSSMVVTANGNDSKKFKGEDKMDGAPSRVLHIRKLPGEVTETEVIALGLPFGKVTNILMLKGKNQAFLELATEEAAITMVNYYSAVTPHLRNQPIYIQYSNHKELKTDNTLNQRAQAVLQAVTAVQTANTPLSGTTVSESAVTPAQSPVLRIIIDNMYYPVTLDVLHQIFSKFGAVLKIITFTKNNQFQALLQYGDPVNAQQAKLALDGQNIYNACCTLRIDFSKLVNLNVKYNNDKSRDYTRPDLPSGDGQPALDPAIAAAFAKETSLLGLPVAAVPGALSPLAIPNAAAAAAAAAAGRVGMPGVSAGGNTVLLVSNLNEEMVTPQSLFTLFGVYGDVQRVKILYNKKDSALIQMADGNQSQLAMNHLNGQKMYGKIIRVTLSKHQTVQLPREGLDDQGLTKDFGNSPLHRFKKPGSKNFQNIFPPSATLHLSNIPPSVAEEDLRTLFANTGGTVKAFKFFQRDHKMALLQMATVEEAIQALIDLHNYNLGENHHLRVSFSKSTI

SEQ ID NO: 8936 - protein, 536 aa, Homo sapiens
MDGIVTEVAVGVKRGSDELLSGSVLSSPNSNMSSMVVTANGNDSKKFKGEDKMDGAPSRVLHIRKLPGEVTETEVIALGLPFGKVTNILMLKGKNQAFLELATEEAAITMVNYYSAVTPHLRNQPIYIQYSNHKELKTDNTLNQRAQAVLQAVTAVQTANTPLSGTTVSESAVTPAQSPVLRIIIDNMYYPVTLDVLHQIFSKFGAVLKIITFTKNNQFQALLQYGDPVNAQQAKLALDGQNIYNACCTLRIDFSKLVNLNVKYNNDKSRDYTRPDLPSGDGQPALDPAIAAAFAKETSLLGLPVAAVPGALSPLAIPNAAAAAAAAAAGRVGMPGVSAGGNTVLLVSNLNEEMVTPQSLFTLFGVYGDVQRVKILYNKKDSALIQMADGNQSQLAMNHLNGQKMYGKIIRVTLSKHQTVQLPREGLDDQGLTKDFGNSPLHRFKKPGSKNFQNIFPPSATLHLSNIPPSVAEEDLRTLFANTGGTVKAFKFFQDHKMALLQMATVEEAIQALIDLHNYNLGENHHLRVSFSKSTI

SEQ ID NO: 8937 - protein, 304 aa, Homo sapiens
MLPPPRPAAALALPVLLLLLVVLTPPPTGARPSPGPDYLRRGWMRLLAEGEGCAPCRPEECAAPRGCLAGRVRDACGCCWECANLEGQLCDLDPSAHFYGHCGEQLECRLDTGGDLSRGEVPEPLCACRSQSPLCGSDGHTYSQICRLQEAARARPDANLTVAHPGPCESGPQIVSHPYDTWNVTGQDVIFGCEVFAYPMASIEWRKDGLDIQLPGDDPHISVQFRGGPQRFEVTGWLQIQAVRPSDEGTYRCLGRNALGQVEAPASLTVLTPDQLNSTGIPQLRSLNLVPEEEAESEENDDYY

SEQ ID NO: 8938 - protein, 669 aa, Homo sapiens
MAIVQTLPVPLEPAPEAATAPQAPVMGSVSSLISGRPCPGGPAPPRHHGPPGPTFFRQQDGLLRGGYEAQEPLCPAVPPRKAVPVTSFTYINEDFRTESPPSPSSDVEDAREQRAHNAHLRGPPPKLIPVSGKLEKNMEKILIRPTAFKPVLPKPRGAPSLPSFMGPRATGLSGSQGSLTQLFGGPASSSSSSSSSSAADKPLAFSGWASGCPSGTLSDSGRNSLSSLPTYSTGGAEPTTSSPGGHLPSHGSGRGALPGPARGVPTGPSHSDSGRSSSSKSTGSLGGRVAGGLLGSGTRASPDSSSCGERSPPPPPPPPSDEALLHCVLEGKLRDREAELQQLRDSLDENEATMCQAYEERQRHWQREREALREDCAAQAQRAQRAQQLLQLQVFQLQQEKRQLQDDFAQLLQEREQLERRCATLEREQRELGPRLEETKWEVCQKSGEISLLKQQLKESQAELVQKGSELVALRVALREARATLRVSEGRARGLQEAARARELELEACSQELQRHRQEAEQLREKAGQLDAEAAGLREPPVPPATADPFLLAESDEAKVQRAAAGVGGSLRAQVERLRVELQRERRRGEEQRDSFEGERLAWQAEKEQVIRYQKQLQHNYIQMYRRNRQLEQELQQLSLELEARELADLGLAEQAPCICLEEITATEI

SEQ ID NO: 8939 - protein, 766 aa, Homo sapiens
MVQKSRNGGVYPGPSGEKKLKVGFVGLDPGAPDSTRDGALLIAGSEAPKRGSILSKPRAGGAGAGKPPKRNAFYRKLQNFLYNVLERPRGWAFIYHAYVFLLVFSCLVLSVFSTIKEYEKSSEGALYILEIVTIVVFGVEYFVRIWAAGCCCRYRGWRGRLKFARKPFCVIDIMVLIASIAVLAAGSQGNVFATSALRSLRFLQILRMIRMDRRGGTWKLLGSVVYAHSKELVTAWYIGFLCLILASFLVYLAEKGENDHFDTYADALWWGLITLTTIGYGDKYPQTWNGRLLAATFTLIGVSFFALPAGILGSGFALKVQEQHRQKHFEKRRNPAAGLIQSAWRFYATNLSRTDLHSTWQYYERTVTVPMYRLIPPLNQLELLRNLKSKSGLAFRKDPPPEPSPSQKVSLKDRVFSSPRGVAAKGKGSPQAQTVRRSPSADQSLEDSPSKVPKSWSFGDRSRARQAFRIKGAASRQNSEEASLPGEDIVDDKSCPCEFVTEDLTPGLKVSIRAVCVMRFLVSKRKFKESLRPYDVMDVIEQYSAGHLDMLSRIKSLQSRIDMIVGPPPPSTPRHKKYPTKGPTAPPRESPQYSPRVDQIVGRGPAITDKDRTKGPAEAELPEDPSMMGRLGKVEKQVLSMEKKLDFLVNIYMQRMGIPPTETEAYFGAKEPEPAPPYHSPEDSREHVDRHGCIVKIVRSSSSTGQKNFSAPPAAPPVQCPPSTSWQPQSHPRQGHGTSPVGDHGSLGRAPETRAGQEGSHGGVSH

SEQ ID NO: 8940 - protein, 2273 aa, Homo sapiens [sequence omitted]

SEQ ID NO: 8941 - protein, 734 aa, Homo sapiens
MPKECSAFHALSAALCCFYHRKSFIGVKFSKERHIMDRTPEKLKKELEEELLLSSEDLRSHAWYHGRIPRQVSENLVQRDGDFLVRDSLSSPGNFVLTCQWKNLAQHFKINRTVLRLSEAYSRVQYQFEMESFDSIPGLVRCYVGNRRPISQQSGAIIFQPINRTVPLRCLEEHYGTSPGQAREGSLTKGRPDVAKRLSLTMGGVQAREQNLPRGNLLRNKEKSGSQPACLDHMQDRRALSLKAHQSESYLPIGCKLPPQSSGVDTSPCPNSPVFRTGSEPALSPAVVRRVSSDARAGEALRGSDSQLCPKPPPKPCKVPFLKVPSSPSAWLNSEANYCELNPAFATGCGRGAKLPSCAQGSHTELLTAKQNEAPGPRNSGVNYLILDDDDRERPWEPAAAQMEKGQWDKGEFVTPLLETVSSFRPNEFESKFLPPENKPLETAMLKRAKELFTNNDPKVIAQHVLSMDCRVARILGVSEEMRRNMGVSSGLELITLPHGHQLRLDIIERHNTMAIGIAVDILGCTGTLEDRAATLSKIIQVAVELKDSMGDLYSFSALMKALEMPQITRLEKTWTALRHQYTQTAILYEKQLKPFSKLLHEGRESTCVPPNNVSVPLLMPLVTLMERQAVTFEGTDMWEKNDQSCEIMLNHLATARFMAEAADSYRMNAERILAGFQPDEEMNEICKTEFQMRLLWGSKGAQVNQTERYEKFNQILTALSRKLEPPPVKQAEL

SEQ ID NO: 8942 - protein, 376 aa, Homo sapiens
MKGEDAQPQEMASTSFPRASGPSPEFRQHGDSDGKRGSPQNLPIEHHFACKECGDTFRLKVLLVQHQRVHSEEKGWECGDCGKVFRGVAEFNEHRKSHVAAEPQPGPSRALENAAEKREQMEREAKPFECEECGKRFKKNAGLSQHLRVHSREKPFDCEECGRSFKVNTHLFRHQKLHTSEKPFACKACSRDFLDRQELLKHQRMHTGHLPFDCDDCGKSFRGVNGLAEHQRIHSGAKPYGCPHCGKLFRRSSELTKHRRIHTGEKPYACGQCGKAFRQSSSLLEHARIHSGERPYACGECGKAFRGPSDLIKHRRIHSGLKPYECDKCGKAFRRSSGLSRHRRIHSGARRCECSQCGRVFKRRSALQKHQPTHHE

SEQ ID NO: 8943 - protein, 838 aa, Homo sapiens
MWGRLWPLLLSILTATAVPGPSLRRPSRELDATPRMTIPYEELSGTRHFKGQAQNYSTLLLEEASARLLVGARGALFSLSANDIGDGAHKEIHWEASPEMQSKCHQKGKNNQTECFNHVRFLQRLNSTHLYACGTHAFQPLCAAIDAEAFTLPTSFEEGKEKCPYDPARGFTGLIIDGGLYTATRYEFRSIPDIRRSRHPHSLRTEETPMHWLNDAEFVFSVLVRESKASAVGDDDKVYYFFTERATEEGSGSFTQSRSSHRVARVARVCKGDLGGKKILQKKWTSFLKARLICHIPLYETLRGVCSLDAETSSRTHFYAAFTLSTQWKTLEASAICRYDLAEIQAVFAGPYMEYQDGSRRWGRYEGGVPEPRPGSCITDSLRSQGYNSSQDLPSLVLDFVKLHPLMARPVVPTRGRPLLLKRNIRYTHLTGTPVTTPAGPTYDLLFLGTADGWIHKAVVLGSGMHIIEETQVFRESQSVENLVISLLQHSLYVGAPSGVIQLPLSSCSRYRSCYDCILARDPYCGWDPGTHACAAATTIANRTALIQDIERGNRGCESSRDTGPPPPLKTRSVLRGDDVLLPCDQPSNLARALWLLNGSMGLSDGQGGYRVGVDGLLVTDAQPEHSGNYGCYAEENGLRTLLASYSLTVRPATPAPAPKAPATPGAQLAPDVRLLYVLAIAALGGLCLILASSLLYVACLREGRRGRRRKYSLGRASRAGGSAVQLQTVSGQCPGEEDEGDDEGAGGLEGSCLQIIPGEGAPAPPPPPPPPPPAELTNGLVALPSRLRRMNGNSYVLLRQSNNGVPAGPCSFAEELSRILEKRKHTQLVEQLDESSV

SEQ ID NO: 8944 - protein, 329 aa, Homo sapiens
MMSHPCVSLLGVPVLNPALVPHLAQGQVLLVSDPSPNTDPAKYSESTSATRHQMKGEDAQPQEMASTSFPRASGPSPEFRQHGDSDGKRGSPQNLPIEHHFACKECGDTFRLKVLLVQHQRVHSEEKGWECGDCGKVFRGVAEFNEHRKSHVAAEPQPGPSRALENAAEKREQMEREAKPFECEECGKRFKKNAGLSQHLRVHSREKPFDCEECGRSFKVNTHLFRHQKLHTSEKPFACKACSRDFLDRQELLKHQRMHTGHLPFDCDDCGKSFRGVNGLAEHQRIHSGAKPYGCPHCGKLFRRSSELTKHRRIHTGEKPYACGLPWAL

SEQ ID NO: 8945 - protein, 627 aa, Homo sapiens
MELGGPGAPRLLPPLLLLLGTGLLRASSHVETRAHAEERLLKKLFSGYNKWSRPVANISDVVLVRFGLSIAQLIDVDEKNQMMTTNVWVKQEWHDYKLRWDPADYENVTSIRIPSELIWRPDIVLYNNADGDFAVTHLTKAHLFHDGRVQWTPPAIYKSSCSIDVTFFPFDQQNCTMKFGSWTYDKAKIDLVNMHSRVDQLDFWESGEWVIVDAVGTYNTRKYECCAEIYPDITYAFVIRRLPLFYTINLIIPCLLISCLTVLVFYLPSECGEKITLCISVLLSLTVFLLLITEIIPSTSLVIPLIGEYLLFTMIFVTLSIVITVFVLNVHHRSPRTHTMPTWVRRVFLDIVPRLLLMKRPSVVKDNCRRLIESMHKMASAPRFWPEPEGEPPATSGTQSLHPPSPSFCVPLDVPAEPGPSCKSPSDQLPPQQPLEAEKASPHPSPGPCRPPHGTQAPGLAKARSLSVQHMSSPGEAVEGGVRCRSRSIQYCVPRDDAAPEADGQAAGALASRNTHSAELPPPDQPSPCKCTCKKEPSSVSPSATVKTRSTKAPPPHLPLSPALTRAVEGVQYIADHLKAEDTDFSVKEDWKYVAMVIDRIFLWMFIIVCLLGTVGLFLPPWLAGMI

SEQ ID NO: 8946 - protein, 689 aa, Homo sapiens
MSISALGGRTKGKPLPPGEEERNNVLKQMKVRTTLKGDKSWITKQDESEGRTIELPSGRSRATSFSSAGEVPKPRPPSTRAPTGYIIRGVFTKPIDSSSQPQQQFPKANGTPKSAASLVRTANAGPPRPSSSGYKMTTEDYKKLAPYNIRRSSTSGDTEEEEEEEVVPFSSDEQKRRSEAASGVLRRTAPREHSYVLSAAKKSTGPTQETQAPFIAKRVEVVEEDGPSEKSQDPPALARSTPGSNSADGGRTKASRAIWIECLPSMPSPAGSQELSSRGEEIVRLQILTPRAGLRLVAPDVEGMRSSPGNKDKEAPCSRELQRDLAGEEAFRAPNTDAARSSAQLSDGNVGSGATGSRPEGLAAVDIGSERGSSSATSVSAVPADRKSNSTAAQEDAKADPKGALADYEGKDVATRVGEAWQERPGAPRGGQGDPAVPAQQPADPSTPERQSSPSGSEQLVRRESCGSSVLTDFEGKDVATKVGEAWQDRPGAPRGGQGDPAVPTQQPADPSTPEQQNSPSGSEQFVRRESCTSRVRSPSSCMVTVTVTATSEQPHIYIPAPASELDSSSTTKGILFVKEYVNASEVSSGKPVSARYSNVSSIEDSFAMEKKPPCGSTPYSERTTGGICTYCNREIRDCPKITLEHLGICCHEYCFKCGICSKPMGDLLDQIFIHRDTIHCGKCYEKLF

SEQ ID NO: 8947 - protein, 1186 aa, Homo sapiens
MTRRCMPARPGFPSSPAPGSSPPRCHLRPGSTAHAAAGKRTESPGDRKQSIIDFFKPASKQDRHMLDSPQKSNIKYGGSRLSITGTEQFERKLSSPKESKPKRVPPEKSPIIEAFMKGVKEHHEDHGIHESRRPCLSLASKYLAKGTNIYVPSSYHLPKEMKSLKKKHRSPERRKSLFIHENNEKNDRDRGKTNADSKKQTTVAEADIFNNSSRSLSSRSSLSRHHPEESPLGAKFQLSLASYCRERELKRLRKEQMEQRINSENSFSEASSLSLKSSIERKYKPRQEQRKQNDIIPGKNNLSNVENGHLSRKRSSSDSWEPTSAGSKQNKFPEKRKRNSVDSDLKSTRESMIPKARESFLEKRPDGPHQKEKFIKHIALKTPGDVLRLEDISKEPSDETDGSSAGLAPSNSGNSGHHSTRNSDQIQVAGTKETKMQKPHLPLSQEKSAIKKASNLQKNKTASSTTKEKETKLPLLSRVPSAGSSLVPLNAKNCALPVSKKDKERSSSKECSGHSTESTKHKEHKAKTNKADSNVSSGKISGGPLRSEYGTPTKSPPAALEVVPCIPSPAAPSDKAPSEGESSGNSNAGSSALKRKLRGDFDSDEESLGYNLDSDEEEETLKSLEEIMALNFNQTPAATGKPPALSKGLRSQSSDYTGHVHPGTYTNTLERLVKEMEDTQRLDELQKQLQEDIRQGRGIKSPIRIGEEDSTDDEDGLLEEHKEFLKKFSVTIDAIPDHHPGEEIFNFLNSGKIFNQYTLDLRDSGFIGQSAVEKLILKSGKTDQIFLTTQGFLTSAYHYVQCPVPVLKWLFRMMSVHTDCIVSVQILSTLMEITIRNDTFSDSPVWPWIPSLSDVAAVFFNMGIDFRSLFPLENLQPDFNEDYLVSETQTTSRGKESEDSSYKPIFSTLPETNILNVVKFLGLCTSIHPEGYQDREIMLLILMLFKMSLEKQLKQIPLVDFQSLLINLMKNIRDWNTKVPELCLGINELSSHPHNLLWLVQLVPNWTSRGRQLRQCLSLVIISKLLDEKHEDVPNASNLQVSVLHRYLVQMKPSDLLKKMVLKKKAEQPDGIIDDSLHLELEKQAYYLTYILLHLVGEVSCSHSFSSGQRKHFVLLCGALEKHVKCDIREDARLFYRTKVKDLVARIHGKWQEIIQNCRPTQVSFCYTISCILNSFAEWHSSYCLK

SEQ ID NO: 8948 - protein, 721 aa, Homo sapiens
MSISALGGRTKGKPLPPGEEERNNVLKQMKVRTTLKGDKSWITKQDESEGRTIELPSGRSRATSFSSAGEVPKPRPPSTRAPTGYIIRGVFTKPIDSSSQPQQQFPKANGTPKSAASLVRTANAGPPRPSSSGYKMTTEDYKKLAPYNIRRSSTSGDTEEEEEEEVVPFSSDEQKRRSEAASGVLRRTAPREHSYVLSAAKKSTGPTQETQAPFIAKRVEVVEEDGPSEKSQDPPALARSTPGSNSADGGRTKASRAIWIECLPSMPSPAGSQELSSRGEEIVRLQILTPRAGLRLVAPDVEGMRSSPGNKDKEAPCSRELQRDLAGEEAFRAPNTDAARSSAQLSDGNVGSGATGSRPEGLAAVDIGSERGRLCAAASFASFLEDQDGHSANSQSCKPRPAAISSSATSVSAVPADRKSNSTAAQEDAKADPKGALADYEGKDVATRVGEAWQERPGAPRGGQGDPAVPAQQPADPSTPERQSSPSGSEQLVRRESCGSSVLTDFEGKDVATKVGEAWQDRPGAPRGGQGDPAVPTQQPADPSTPEQQNSPSGSEQFVRRESCTSRVRSPSSCMVTVTVTATSEQPHIYIPAPASELDSSSTTKGILFVKEYVNASEVSSGKPVSARYSNVSSIEDSFAMEKKPPCGSTPYSERTTGGICTYCNREIRDCPKITLEHLGICCHEYCFKCGICSKPMGDLLDQIFIHRDTIHCGKCYEKLF

SEQ ID NO: 8949 - protein, 1507 aa, Homo sapiens
FEFCAAGVRWFSELCPRLPRAGARERVRGFLTQTRVRSAQSPGGSLPSDDLGEMESSSSDYYNKDNEEESLLANVASLRHELKITEWSLQSLGEELSSVSPSENSDYAPNPSRSEKLILDVQPSHPGLLNYSPYENVCKISGSSTDFQKKPRDKMFSSSAPVDQEIKSLREKLNKLRQQNACLVTQNHSLMTKFESIHFELTQSRAKVSMLESAQQQAASVPILEEQIINLEAEVSAQDKVLREAENKLEQSQKMVIEKEQSLQESKEECIKLKVDLLEQTKQGKRAERQRNEALYNAEELSKAFQQYKKKVAEKLEKVQAEEEILERNLTNCEKENKRLQERCGLYKSELEILKEKLRQLKEENNNGKEKLRIMAVKNSEVMAQLTESRQSILKLESELENKDEILRDKFSLMNENRELKVRVAAQNERLDLCQQEIESSRVELRSLEKIISQLPLKRELFGFKSYLSKYQMSSFSNKEDRCIGCCEANKLVISELRIKLAIKEAEIQKLHANLTANQLSQSLITCNDSQESSKLSSLETEPVKLGGHQVESVKDQNQHTMNKQYEKERQRLVTGIEELRTKLIQIEAENSDLKVNMAHRTSQFQLIQEELLEKASNSSKLESEMTKKCSQLLTLEKQLEEKIVAYSSIAAKNAELEQELMEKNEKIRSLETNINTEHEKICLAFEKAKKIHLEQHKEMEKQIERLEAQLEKKDQQFKEQEKTMSMLQQDIICKQHHLESLDRLLTESKGEMKKENMKKDEALKALQNQVSEETIKVRQLDSALEICKEELVLHLNQLEGNKEKFEKQLKKKSEEVYCLQKELKIKNHSLQETSEQNVILQHTLQQQQQMLQQETIRNGELEDTQTKLEKQVSKLEQELQKQRESSAEKLRKMEEKCESAAHEADLKRQKVIELTGTARQVKIEMDQYKEELSKMEKEIMHLKRDGENKAMHLSQLDMILDQTKTELEKKTNAVKELEKLQHSTETELTEALQKREVLETELQNAHGELKSTLRQLQELRDVLQKAQLSLEEKYTTIKDLTAELRECKMEIEDKKQELLEMDQALKERNWELKQRAAQVTHLDMTIREHRGEMEQKIIKLEGTLEKSELELKECNKQIESLNDKLQNAKEQLREKEFIMLQNEQEISQLKKEIERTQQRMKEMESVMKEQEQYIATQYKEAIDLGQELRLTREQVQNSHTELAEARHQQVQAQREIERLSSELEDMKQLSKEKDAHGNHLAEELGASKVREAHLEARMQAEIKKLSAEVESLKEAYHMEMISHQENHAKWKISADSQKSSVQQLNEQLEKAKLELEEAQDTVSNLHQQVQDRNEVIEAANEALLTKESELTRLQAKISGHEKAEDIKFLPAPFTSPTEIMPDVQDPKFAKCFHTSFSKCTKLRRSISASDLTFKIHGDEDLSEELLQDLKKMQLEQPSTLEESHKNLTYTQPDSFKPLTYNLEADSSENNDFNTLSGMLRYINKEVRLLKKSSMQTGAGLNQGENV

SEQ ID NO: 8950 - protein, 593 aa, Homo sapiens
MRDSTGAGNSLVHKRSPLRRNQKTPTSLTKLSLQDGHKAKKPACKFEEGQDVLARWSDGLFYLGTIKKINILKQSCFIIFEDSSKSWVLWKDIQTGATGSGEMVCTICQEEYSEAPNEMVICDKCGQGYHQLCHTPHIDSSVIDSDEKWLCRQCVFATTTKRGGALKKGPNAKALQVMKQTLPYSVADLEWDAGHKTNVQQCYCYCGGPGDWYLKMLQCCKCKQWFHEACVQCLQKPMLFGDRFYTFICSVCSSGPEYLKRLPLQWVDIAHLCLYNLSVIHKKKYFDSELELMTYINENWDRLHPGELADTPKSERYEHVLEALNDYKTMFMSGKEIKKKKHLFGLRIRVPPVPPNVAFKAEKEPEGTSHEFKIKGRKASKPISDSREVSNGIEKKGKKKSVGRPPGPYTRKMIQKTAEPLLDKESISENPTLDLPCSIGRTEGTAHSSNTSDVDFTGASSAKETTSSSISRHYGLSDSRKRTRTGRSWPAAIPHLRRRRGRLPRRALQTQNSEIVKDDEGKEDYQFDELNTEILNNLADQELQLNHLKNSITSYFGAAGRIACGEKYRVLARRVTLDGKVQYLVEWEGATAS

SEQ ID NO: 8951 - protein, 717 aa, Homo sapiens
MFYFRGCGRWVAVSFTKQQFPLARLSSDSAAPRTPHFDVIVIGGGHAGTEAATAAARCGSRTLLLTHRVDTIGQMSCNPSFGGIGKGHLMREVDALDGLCSRICDQSGVHYKVLNRRKGPAVWGLRAQIDRKLYKQNMQKEILNTPLLTVQEGAVEDLILTEPEPEHTGKCRVSGVVLVDGSTVYAESVILTTGTFLRGMIVIGLETHPAGRLGDQPSIGLAQTLEKLGFVVGRLKTGTPPRIAKESINFSILNKHIPDNPSIPFSFTNETVWIKPEDQLPCYLTHTNPRVDEIVLKNLHLNSHVKETTRGPRYCPSIESKVLRFPNRLHQVWLEPEGMDSDLIYPQGLSMTLPAELQEKMITCIRGLEKAKVIQPDGVLLLLPRMECNGAISAHHNLPLPGYGVQYDYLDPRQITPSLETHLVQRLFFAGQINGTTGYEEAAAQGVIAGINASLRVSRKPPFVVSRTEGYIGVLIDDLTTLGTSEPYRMFTSRVEFRLSLRPDNADSRLTLRGYKDAGCVSQQRYERACWMKSSLEEGISVLKSIEFLSSKWKKLIPEASISTSRSLPVRALDVLKYEEVDMDSLAKAVPEPLKKYTKCRELAERLKIEATYESVLFHQLQEIKGVQQDEALQLPKDLDYLTIRDVSLSHEVREKLHFSRPQTIGAASRIPGVTPAAIINLLRFVKTTQRRQSAMNESSKTDQYLCDADRLQEREL

SEQ ID NO: 8952 - protein, 536 aa, Homo sapiens
MRDSTGAGNSLVHKRSPLRRNQKTPTSLTKLSLQDGHKAKKPACKFEEGQDVLARWSDGLFYLGTIKKINILKQSCFIIFEDSSKSWVLWKDIQTGATGSGEMVCTICQEEYSEAPNEMVICDKCGQGYHQLCHTPHIDSSVIDSDEKWLCRQCVFATTTKRGGALKKGPNAKALQVMKQTLPYSVADLEWDAGHKTNVQQCYCYCGGPGDWYLKMLQCCKCKQWFHEACVQCLQKPMLFGDRFYTFICSVCSSGPEYLKRLPLQWVDIAHLCLYNLSVIHKKKYFDSELELMTYINENWDRLHPGELADTPKSERYEHVLEALNDYKTMEVSNGIEKKGKKKSVGRPPGPYTRKMIQKTAEPLLDKESISENPTLDLPCSIGRTEGTAHSSNTSDVDFTGASSAKETTSSSISRHYGLSDSRKRTRTGRSWPAAIPHLRRRRGRLPRRALQTQNSEIVKDDEGKEDYQFDELNTEILNNLADQELQLNHLKNSITSYFGAAGRIACGEKYRVLARRVTLDGKVQYLVEWEGATAS

SEQ ID NO: 8953 - protein, 643 aa, Homo sapiens
MSCNPSFGGIGKGHLMREVDALDGLCSRICDQSGVHYKVLNRRKGPAVWGLRAQIDRKLYKQNMQKEILNTPLLTVQEGAVEDLILTEPEPEHTGKCRVSGVVLVDGSTVYAESVILTTGTFLRGMIVIGLETHPAGRLGDQPSIGLAQTLEKLGFVVGRLKTGTPPRIAKESINFSILNKHIPDNPSIPFSFTNETVWIKPEDQLPCYLTHTNPRVDEIVLKNLHLNSHVKETTRGPRYCPSIESKVLRFPNRLHQVWLEPEGMDSDLIYPQGLSMTLPAELQEKMITCIRGLEKAKVIQPDGVLLLLPRMECNGAISAHHNLPLPGYGVQYDYLDPRQITPSLETHLVQRLFFAGQINGTTGYEEAAAQGVIAGINASLRVSRKPPFVVSRTEGYIGVLIDDLTTLGTSEPYRMFTSRVEFRLSLRPDNADSRLTLRGYKDAGCVSQQRYERACWMKSSLEEGISVLKSIEFLSSKWKKLIPEASISTSRSLPVRALDVLKYEEVDMDSLAKAVPEPLKKYTKCRELAERLKIEATYESVLFHQLQEIKGVQQDEALQLPKDLDYLTIRDVSLSHEVREKLHFSRPQTIGAASRIPGVTPAAIINLLRFVKTTQRRQSAMNESSKTDQYLCDADRLQEREL

SEQ ID NO: 8954 - protein, 492 aa, Homo sapiens
MIITQTSHCYMTSLGILFLINILPGTTGQGESRRQEPGDFVKQDIGGLSPKHAPDIPDDSTDNITIFTRILDRLLDGYDNRLRPGLGDAVTEVKTDIYVTSFGPVSDTDMEYTIDVFFRQTWHDERLKFDGPMKILPLNNLLASKIWTPDTFFHNGKKSVAHNMTTPNKLLRLVDNGTLLYTMRLTIHAECPMHLEDFPMDVHACPLKFGSYAYTTAEVVYSWTLGKNKSVEVAQDGSRLNQYDLLGHVVGTEIIRSSTGEYVVMTTHFHLKRKIGYFVIQTYLPCIMTVILSQVSFWLNRESVPARTVFGVTTVLTMTTLSISARNSLPKVAYATAMDWFIAVCYAFVFSALIEFATVNYFTKRSWAWEGKKVPEALEMKKKTPAAPAKKTSTTFNIVGTTYPINLAKDTEFSTISKGAAPSASSTPTIIASPKATYVQDSPTETKTYNSVSKVDKISRIIFPVLFAIFNLVYWATYVNRESAIKGMIRKQ

SEQ ID NO: 8955 - protein, 522 aa, Homo sapiens
MQPWHGKAMQRASEAGATAPKASARNARGAPMDPTESPAAPEAALPKAGKFGPARKSGSRQKKSAPDTQERPPVRATGARAKKAPQRAQDTQPSDATSAPGAEGLEPPAAREPALSRAGSCRQRGARCSTKPRPPPGPWDVPSPGLPVSAPILVRRDAAPGASKLRAVLEKLKLSRDDISTAAGMVKGVVDHLLLRLKCDSAFRGVGLLNTGSYYEHVKISAPNEFDVMFKLEVPRIQLEEYSNTRAYYFVKFKRNPKENPLSQFLEGEILSASKMLSKFRKIIKEEINDIKDTDVIMKRKRGGSPAVTLLISEKISVDITLALESKSSWPASTQEGLRIQNWLSAKVRKQLRLKPFYLVPKHAKEGNGFQEETWRLSFSHIEKEILNNHGKSKTCCENKEEKCCRKDCLKLMKYLLEQLKERFKDKKHLDKFSSYHVKTAFFHVCTQNPQDSQWDRKDLGLCFDNCVTYFLQCLRTEKLENYFIPEFNLFSSNLIDKRSKEFLTKQIEYERNNEFPVFDEF

SEQ ID NO: 8956 - protein, 506 aa, Homo sapiens
MLSKVLPVLLGILLILQSRVEGPQTESKNEASSRDVVYGPQPQPLENQLLSEETKSTETETGSRVGKLPEASRILNTILSNYDHKLRPGIGEKPTVVTVEISVNSLGPLSILDMEYTIDIIFSQTWYDERLCYNDTFESLVLNGNVVSQLWIPDTFFRNSKRTHEHEITMPNQMVRIYKDGKVLYTIRMTIDAGCSLHMLRFPMDSHSCPLSFSSFSYPENEMIYKWENFKLEINEKNSWKLFQFDFTGVSNKTEIITTPVGDFMVMTIFFNVSRRFGYVAFQNYVPSSVTTMLSWVSFWIKTESAPARTSLGITSVLTMTTLGTFSRKNFPRVSYITALDFYIAICFVFCFCALLEFAVLNFLIYNQTKAHASPKLRHPRINSRAHARTRARSRACARQHQEAFVCQIVTTEGSDGEERPSCSAQQPPSPGSPEGPRSLCSKLACCEWCKRFKKYFCMVPDCEGSTWQQGRLCIHVYRLDNYSRVVFPVTFFFFNVLYWLVCLNL

SEQ ID NO: 8957 - protein, 810 aa, Homo sapiens
MVTNKMTAAFRNPSGKQVATDKVAEKLSSTLSWVKNTVSHTVSQMASQVASPSTSLHTTSSSTTLSTPALSPSSPSQLSPDDLELLAKLEEQNRLLETDSKSLRSVNGSRRNSGSSLVSSSSASSNLSHLEEDSWILWGRIVNEWEDVRKKKEKQVKELVHKGIPHHFRAIVWQLLCSAQSMPIKDQYSELLKMTSPCEKLIRRDIARTYPEHNFFKEKDSLGQEVLFNVMKAYSLVDREVGYCQGSAFIVGLLLMQMPEEEAFCVFVKLMQDYRLRELFKPSMAELGLCMYQFECMIQEHLPELFVHFQSQSFHTSMYASSWFLTIFLTTFPLPIATRIFDIFMSEGLEIVFRVGLALLQMNQAELMQLDMEGMLQHFQKVIPHQFDGVPDKLIQAAYQVKYNSKKMKKLEKEYTTIKTKEMEEQVEIKRLRTENRLLKQRIETLEKHKCSSNYNEDFVLQLEKELVQARLSEAESQCALKEMQDKVLDIEKRNNSLPDENNIARLQEELIAVKLREAEAIMGLKELRQQVKDLEEHWQRHLARTTGRWKDPPKKNAMNELQDELMTIRLREAETQAEIREIKQRMMEMETQNQINSNHLRRAEQEVISLQEKVQYLSAQNKGLLTQLSEAKRKQAEIECKNKEEVMAVRLREADSIAAVAELRQHIAELEIQKEEGKLQGQLNKSDSNQYIGELKDQIAELNHELRCLKGQRGFSGQPPFDGIHIVNHLIGDDESFHSSDEDFIDNSLQETGVGFPLHGKSGSMSLDPAVADGSESETEDSVLETRESNQVVQKERPPRRRESYSTTV

SEQ ID NO: 8958 - protein, 559 aa, Homo sapiens
MSATSVDTQRTKGQDNKVQNGSLHQKDTVHDNDFEPYLTGQSNQSNSYPSMSDPYLSSYYPPSIGFPYSLNEAPWSTAGDPPIPYLTTYGQLSNGDHHFMHDAVFGQPGGLGNNIYQHRFNFFPENPAFSAWGTSGSQGQQTQSSAYGSSYTYPPSSLGGTVVDGQPGFHSDTLSKAPGMNSLEQGMVGLKIGDVSSSAVKTVGSVVSSVALTGVLSGNGGTNVNMPVSKPTSWAAIASKPAKPQPKMKTKSGPVMGGGLPPPPIKHNMDIGTWDNKGPVPKAPVPQQAPSPQAAPQPQQVAQPLPAQPPALAQPQYQSPQQPPQTRWVAPRNRNAAFGQSGGAGSDSNSPGNVQPNSAPSVESHPVLEKLKAAHSYNPKEFEWNLKSGRVFIIKSYSEDDIHRSIKYSIWCSTEHGNKRLDSAFRCMSSKGPVYLLFSVNGSGHFCGVAEMKSPVDYGTSAGVWSQDKWKGKFDVQWIFVKDVPNNQLRHIRLENNDNKPVTNSRDTQEVPLEKAKQVLKIISSYKHTTSIFDDFAHYEKRQEEEEVVRKERQSRNKQ

SEQ ID NO: 8959 - protein, 1179 aa, Homo sapiens
MKLKELERPAVQAWSPASQYPLYLATGTSAQQLDSSFSTNGTLEIFEVDFRDPSLDLKHRGVLSALSRFHKLVWGSFGSGLLESSGVIVGGGDNGMLILYNVTHILSSGKEPVIAQKQKHTGAVRALDLNPFQGNLLASGASDSEIFIWDLNNLNVPMTLGSKSQQPPEDIKALSWNRQAQHILSSAHPSGKAVVWDLRKNEPIIKVSDHSNRMHCSGLAWHPDIATQLVLCSEDDRLPVIQLWDLRFASSPLKVLESHSRGILSVSWSQADAELLLTSAKDSQILCRNLGSSEVVYKLPTQSSWCFDVQWCPRDPSVFSAASFNGWISLYSVMGRSWEVQHMRQADKISSSFSKGQPLPPLQVPEQVAQAPLIPPLKKPPKWIRRPTGVSFAFGGKLVTFGLPSTPAHLVPQPCPRLVFISQVTTESEFLMRSAELQEALGSGNLLNYCQNKSQQALLQSEKMLWQFLKVTLEQDSRMKFLKLLGYSKDELQKKVATWLKSDVGLGESPQPKGNDLNSDRQQAFCSQASKHTTKEASASSAFFDELVPQNMTPWEIPITKDIDGLLSQALLLGELGPAVELCLKEERFADAIILAQAGGTDLLKQTQERYLAKKKTKISSLLACVVQKNWKDVVCTCSLKNWREALALLLTYSGTEKFPELCDMLGTRMEQEGSRALTSEARLCYVCSGSVERLVECWAKCHQALSPMALQDLMEKVMVLNRSLEQLRGPHGVSPGPATTYRVTQYANLLAAQGSLATAMSFLPRDCAQPPVQQLRDRLFHAQGSAVLGQQSPPFPFPRIVVGATLHSKETSSYRLGSQPSHQVPTPSPRPRVFTPQSSPAMPLAPSHPSPYQGPRTQNISDYRAPGPQAIQPLPLSPGVRPASSQPQLLGGQRVQVPNPVGFPGTWPLPGSPLPMACPGIMRPGSTSLPETPRLFPLLPLRPLGPGRMVSHTPAPPASFPVPYLPGDPGAPCSSVLPTTGILTPHPGPQDSWKEAPAPRGNLQRNKLPETFMPPAPITAPVMSLTPELQGILPSQPPVSSVSHAPPGVPGELSLQLQHLPPEKMERKELPPEHQSLKSSFEALLQRCSLSATDLKTKRKLEEAAQRLEYLYEKLCEGTLSPHVVAGLHEVARCVDAGSFEQGLAVHAQVAGCSSFSEVSSFMPILKAVLIIAHKLLV

SEQ ID NO: 8960 - protein, 183 aa, Homo sapiens
MAGGPPNTKAEMEMSLAEELNHGRQGENQEHLVIAEMMELGSRSRGASQKKQKLEQKAAGSASAKRVWNMTATRPKKMGSQLPKPRMLRESGHGDAHLQEYAGNFQGIRFHYDRNPGTDAVAQTSLEEFNVLEMEVMRRQLYAVNRRLRALEEQGATWRHRETLIIAVLVSASIANLWLWMNQ

SEQ ID NO: 8961 - protein, 231 aa, Homo sapiens
MAVFLEAKDAHSVLKRFPRANEFLEELRQGTIERECMEEICSYEEVKEVFENKEKTMEFWKGYPNAVYSVRDPSQSSDAMYVVVPLLGVALLIVIALFIIWRCQLQKATRHHPSYAQNRYLASRAGHTLPRVMVYRGTVHSQGEPSGHREAANSPQVVLGPSRGGRTTVRLESTLYLPELSLSRLSSTTPPPSYEEVTAPQESSSEEASVSYSDPPPKYEEIVAANPGADK

SEQ ID NO: 8962 - protein, 773 aa, Homo sapiens
MKMRGEKRRDKVNPKSSQRKLNWIPSFPTYDYFNQVTLQLLDGFMITLSTDGVIICVAENISSLLGHLPAEIVGKKLLSLLPDEEKDEVYQKIILKFPLLNSETHIEFCCHLKRGNVEHGDSSAYENVKFIVNVRDICNEFPVVFSGLFSSHLCADFAACVPQEDRLYLVGNVCILRTQLLQQLYTSKAVSDEAVLTQDSDEEPFVGELSSSQGQRGHTSMKAVYVEPAAAAAAAAISDDQIDIAEVEQYGPQENVHMFVDSDSTYCSSTVFLDTMPESPALSLQDFRGEPEVNPLYRADPVDLEFSVDQVDSVDQEGPMDQQDPENPVAPLDQAGLMDPVDPEDSVDLGAAGASAQPLQPSSPVAYDIISQELELMKKLKEQLEERTWLLHDAIQNQQNALELMMDHLQKQPNTLRHVVIPDLQSSEAVPKKQQKQHAGQVKRPLPHPKDVKCFCGLSLSNSLKNTGELQEPCVAFNQQQLVQQEQHLKEQQRQLREQLQQLREQRKVQKQKKMQEKKKLQEQKMQEKKKLQEQRRQKKKKLQERKKWQGQMLQKEPEEEQQKQQLQEQPLKHNVIVGNERVQICLQNPRDVSVPLCNHPVRFLQAQPIVPVQRAAEQQPSGFYQDENCGQQEDESQSFYPEAYQGPPVNQLPLIDTSNSEAISSSSIPQFPITSDSTISTLETPQDYIRLWQELSDSLGPVVQVNTWSCDEQGTLHGQPTYHQVQVSEVGVEGPPDPQAFQGPAAYQPDQMRSAEQTRLMPAEQRDSNKPC

SEQ ID NO: 8963 - protein, 594 aa, Homo sapiens
MAVEELQSIIKRCQILEEQDFKEEDFGLFQLAGQRCIEEGHTDQLLEIIQNEKNKVIIKNMGWNLVGPVVRCLLCKDKEDSKRKVYFLIFDLLVKLCNPKELLLGLLELIEEPSGKQISQSILLLLQPLQTVIQKLHNKAYSIGLALSTLWNQLSLLPVPYSKEQIQMDDYGLCQCCKALIEFTKPFVEEVIDNKENSLENEKLKDELLKFCFKSLKCPLLTAQFFEQSEEGGNDPFRYFASEIIGFLSAIGHPFPKMIFNHGRKKRTWNYLEFEEEENKQLADSMASLAYLVFVQGIHIDQLPMVLSPLYLLQFNMGHIEVFLQRTEESVISKGLELLENSLLRIEDNSLLYQYLEIKSFLTVPQGLVKVMTLCPIETLRKKSLAMLQLYINKLDSQGKYTLFRCLLNTSNHSGVEAFIIQNIKNQIDMSLKRTRNNKWFTGPQLISLLDLVLFLPEGAETDLLQNSDRIMASLNLLRYLVIKDNENDNQTGLWTELGNIENNFLKPLHIGLNMSKAHYEAEIKNSQEAQKSKDLCSITVSGEEIPNMPPEMQLKVLHSALFTFDLIESVLARVEELIEIKTKSTSEENIGIK

SEQ ID NO: 8964 - protein, 1409 aa, Homo sapiens
MESDRLIISLPRVKWTEAALTMASQLQEKCIAFIVDNFSKIIQSENFALLLQSQAMSSTADLLDTILKAIEENITTENSCSLLMALDTLLNSDSTKEMGFTCKIQALRDKLWIFLVQSFYAVRHTESWKLMSTDDQQKIQAAAFDKGDDRRLGKKPIFSSSQQRKQVSDSGDIKIKSWRGNNKKECWSYLSTNKKMKSDGLGASGHSSSTNRNSINKTLKQDDVKEKDGTKIASKITKELKTGGKNVSGKPKTVTKSKTENGDKARLENMSPRQVVERSATAAAAATGQKNLLNGKGVRNQEGQISGARPKVLTGNLNVQAKAKPLKKATGKDSPCLSIAGPSSRSTDSSMEFSISTECLDEPKENGSTEEEKPSGHKLSFCDSPGQMMKNSVDSVKNSTVAIKSRPVSRVTNGTSNKKSIHEQDTNVNNSVLKKVSGKGCSEPVPQAILKKRGTSNGCTAAQQRTKSTPSNLTKTQGSQGESPNSVKSSVSSRQSDENVAKLDHNTTTEKQAPKRKMVKQVHTALPKVNAKIVAMPKNLNQSKKGETLNNKDSKQKMPPGQVISKTQPSSQRPLKHETSTVQKSMFHDVRDNNNKDSVSEQKPHKPLINLASEISDAEALQSSCRPDPQKPLNDQEKEKLALECQNISKLDKSLKHELESKQICLDKSETKFPNHKETDDCDAANICCHSVGSDNVNSKFYSTTALKYMVSNPNENSLNSNPVCDLDSTSAGQIHLISDRENQVGRKDTNKQSSIKCVEDVSLCNPERTNGTLNSAQEDKKSKVPVEGLTIPSKLSDESAMDEDKHATADSDVSSKCFSGQLSEKNSPKNMETSESPESHETPETPFVGHWNLSTGVLHQRESPESDTGSATTSSDDIKPRSEDYDAGGSQDDDGSNDRGISKCGTMLCHDFLGRSSSDTSTPEELKIYDSNLRIEVKMKKQSNNDLFQVNSTSDDEIPRKRPEIWSRSAIVHSRERENIPRGSVQFAQEIDQVSSSADETEDERSEAENVAENFSISNPAPQQFQGIINLAFEDATENECREFSATKKFKRSVLLSVDECEELGSDEGEVHTPFQASVDSFSPSDVFDGISHEHHGRTCYSRFSRESEDNILECKQNKGNSVCKNESTVLDLSSIDSSRKNKQSVSATEKKNTIDVLSSRSRQLLREDKKVNNGSNVENDIQQRSKFLDSDVKSQERPCHLDLHQREPNSDIPKNSSTKSLDSFRSQVLPQEGPVKESHSTTTEKANIALSAGDIDDCDTLAQTRMYDHRPSKTLSPIYEMDVIEAFEQKVESETHVTDMDFEDDQHFAKQDWTLLKQLLSEQDSNLDVTNSVPEDLSLAQYLINQTLLLARDSSKPQGITHIDTLNRWSELTSPLDSSASITMASFSSEDCSPQGEWTILELETQH

SEQ ID NO: 8965 - protein, 362 aa, Homo sapiens
MARLRDCLPRLMLTLRSLLFWSLVYCYCGLCASIHLLKLLWSLGKGPAQTFRRPAREHPPACLSDPSLGTHCYVRIKDSGLRFHYVAAGERGKPLMLLLHGFPEFWYSWRYQLREFKSEYRVVALDLRGYGETDAPIHRQNYKLDCLITDIKDILDSLGYSKCVLIGHDWGGMIAWLIAICYPEMVMKLIVINFPHPNVFTEYILRHPAQLLKSSYYYFFQIPWFPEFMFSINDFKVLKHLFTSHSTGIGRKGCQLTTEDLEAYIYVFSQPGALSGPINHYRNIFSCLPLKHHMVTTPTLLLWGENDAFMEVEMAEVTKIYVKNYFRLTILSEASHWLQQDQPDIVNKLIWTFLKEETRKKD

SEQ ID NO: 8966 - protein, 874 aa, Homo sapiens
MDLNTIKKRLENKYYAKASECIEDFNTMFSNCYLYNKPGDDIVLMAQALEKLFMQKLSQMPQEEQVVGVKERIKKGTQQNIAVSSAKEKSSPSATEKVFKQQEIPSVFPKTSISPLNVVQGASVNSSSQTAAQVTKGVKRKADTTTPATSAVKASSEFSPTFTEKSVALPPIKENMPKNVLPDSQQQYNVVKTVKVTEQLRHCSEILKEMLAKKHFSYAWPFYNPVDVNALGLHNYYDVVKNPMDLGTIKEKMDNQEYKDAYKFAADVRLMFMNCYKYNPPDHEVVTMARMLQDVFETHFSKIPIEPVESMPLCYIKTDITETTGRENTNEASSEGNSSDDSEDERVKRLAKLQEQLKAVHQQLQVLSQVPFRKLNKKKEKSKKEKKKEKVNNSNENPRKMCEQMRLKEKSKRNQPKKRKQQFIGLKSEDEDNAKPMNYDEKRQLSLNINKLPGDKLGRVVHIIQSREPSLSNSNPDEIEIDFETLKASTLRELEKYVSACLRKRPLKPPAKKIMMSKEELHSQKKQELEKRLLDVNNQLNSRKRQTKSDKTQPSKAVENVSRLSESSSSSSSSSESESSSSDLSSSDSSDSESEMFPKFTEVKPNDSPSKENVKKMKNECIPPEGRTGVTQIGYCVQDTTSANTTLVHQTTPSHVMPPNHHQLAFNYQELEHLQTVKNISPLQILPPSGDSEQLSNGITVMHPSGDSDTTMLESECQAPVQKDIKIKNADSWKSLGKPVKPSGVMKSSDELFNQFRKAAIEKEVKARTQELIRKHLEQNTKELKASQENQRDLGNGLTVESFSNKIQNKCSGEEQKEHQQSSEAQDKSKLWLLKDRDLARQKEQERRRREAMVGTIDMTLQSDIMTMFENNFD

SEQ ID NO: 8967 - protein, 665 aa, Homo sapiens
MDRPAAAAAAGCEGGGGPNPGPAGGRRPPRAAGGATAGSRQPSVETLDSPTGSHVEWCKQLIAATISSQISGSVTSENVSRDYKALRDGNKLAQMEEAPLFPGESIKAIVKDVMYICPFMGAVSGTLTVTDFKLYFKNVERDPHFILDVPLGVISRVEKIGAQSHGDNSCGIEIVCKDMRNLRLAYKQEEQSKLGIFENLNKHAFPLSNGQALFAFSYKEKFPINGWKVYDPVSEYKRQGLPNESWKISKINSNYEFCDTYPAIIVVPTSVKDDDLSKVAAFRAKGRVPVLSWIHPESQATITRCSQPLVGPNDKRCKEDEKYLQTIMDANAQSHKLIIFDARQNSVADTNKTKGGGYESESAYPNAELVFLEIHNIHVMRESLRKLKEIVYPSIDEARWLSNVDGTHWLEYIRMLLAGAVRIADKIESGKTSVVVHCSDGWDRTAQLTSLAMLMLDSYYRTIKGFETLVEKEWISFGHRFALRVGHGNDNHADADRSPIFLQFVDCVWQMTRQFPSAFEFNELFLITILDHLYSCLFGTFLCNCEQQRFKEDVYTKTISLWSYINSQLDEFSNPFFVNYENHVLYPVASLSHLELWVNYYVRWNPRMRPQMPIHQNLKELLAVRAELQKRVEGLQREVATRAVSSSSERGSSPSHSATSVHTSV

SEQ ID NO: 8968 - protein, 427 aa, Homo sapiens
MPRHHAGGEEGGAAGLWVKSGAAAAAAGGGRLGSGMKDVESGRGRVLLNSAAARGDGLLLLGTRAATLGGGGGGLRESRRGKQGARMSLLGKPLSYTSSQSCRRNVKYRRVQNYLYNVLERPRGWAFIYHAFVFLLVFGCLILSVFSTIPEHTKLASSCLLILEFVMIVVFGLEFIIRIWSAGCCCRYRGWQGRLRFARKPFCVIDTIVLIASIAVVSAKTQGNIFATSALRSLRFLQILRMVRMDRRGGTWKLLGSVVYAHSKELITAWYIGFLVLIFSSFLVYLVEKDANKEFSTYADALWWGTITLTTIGYGDKTPLTWLGRLLSAGFALLGISFFALPAGILGSGFALKVQEQHRQKHFEKRRNPAANLIQCVWRSYAADEKSVSIATWKPHLKALHTCSPTKKEQGEASSRFVISLLLHVCL

SEQ ID NO: 8969 - protein, 603 aa, Homo sapiens
MASASTSKYNSHSLENESIKRTSRDGVNRDLTEAVPRLPGETLITDKEVIYICPFNGPIKGRVYITNYRLYLRSLETDSSLILDVPLGVISRIEKMGGATSRGENSYGLDITCKDMRNLRFALKQEGHSRRDMFEILTRYAFPLAHSLPLFAFLNEEKFNVDGWTVYNPVEEYRRQGLPNHHWRITFINKCYELCDTYPALLVVPYRASDDDLRRVATFRSRNRIPVLSWIHPENKTVIVRCSQPLVGMSGKRNKDDEKYLDVIRETNKQISKLTIYDARPSVNAVANKATGGGYESDDAYHNAELFFLDIHNIHVMRESLKKVKDIVYPNVEESHWLSSLESTHWLEHIKLVLTGAIQVADKVSSGKSSVLVHCSDGWDRTAQLTSLAMLMLDSFYRSIEGFEILVQKEWISFGHKFASRIGHGDKNHTDADRSPIFLQFIDCVWQMSKQFPTAFEFNEQFLIIILDHLYSCRFGTFLFNCESARERQKVTERTVSLWSLINSNKEKFKNPFYTKEINRVLYPVASMRHLELWVNYYIRWNPRIKQQQPNPVEQRYMELLALRDEYIKRLEELQLANSAKLSDPPTSPSSPSQMMPHVQTHF

SEQ ID NO: 8970 - protein, 745 aa, Homo sapiens
MERPPGLRPGAGGPWEMRERLGTGGFGNVCLYQHRELDLKIAIKSCRLELSTKNRERWCHEIQIMKKLNHANVVKACDVPEELNILIHDVPLLAMEYCSGGDLRKLLNKPENCCGLKESQILSLLSDIGSGIRYLHENKIIHRDLKPENIVLQDVGGKIIHKIIDLGYAKDVDQGSLCTSFVGTLQYLAPELFENKPYTATVDYWSFGTMVFECIAGYRPFLHHLQPFTWHEKIKKKDPKCIFACEEMSGEVRFSSHLPQPNSLCSLVVEPMENWLQLMLNWDPQQRGGPVDLTLKQPRCFVLMDHILNLKIVHILNMTSAKIISFLLPPDESLHSLQSRIERETGINTGSQELLSETGISLDPRKPASQCVLDGVRGCDSYMVYLFDKSKTVYEGPFASRSLSDCVNYIVQDSKIQLPIIQLRKVWAEAVHYVSGLKEDYSRLFQGQRAAMLSLLRYNANLTKMKNTLISASQQLKAKLEFFHKSIQLDLERYSEQMTYGISSEKMLKAWKEMEEKAIHYAEVGVIGYLEDQIMSLHAEIMELQKSPYGRRQGDLMESLEQRAIDLYKQLKHRPSDHSYSDSTEMVKIIVHTVQSQDRVLKELFGHLSKLLGCKQKIIDLLPKVEVALSNIKEADNTVMFMQGKRQKEIWHLLKIACTQSSARSLVGSSLEGAVTPQTSAWLPPTSAEHDHSLSCVVTPQDGETSAQMIEENLNCLGHLSTIIHEANEEQGNSMMNLDWSWLTE

SEQ ID NO: 8971 - protein, 932 aa, Homo sapiens
MPRHHAGGEEGGAAGLWVKSGAAAAAAGGGRLGSGMKDVESGRGRVLLNSAAARGDGLLLLGTRAATLGGGGGGLRESRRGKQGARMSLLGKPLSYTSSQSCRRNVKYRRVQNYLYNVLERPRGWAFIYHAFVFLLVFGCLILSVFSTIPEHTKLASSCLLILEFVMIVVFGLEFIIRIWSAGCCCRYRGWQGRLRFARKPFCVIDTIVLIASIAVVSAKTQGNIFATSALRSLRFLQILRMVRMDRRGGTWKLLGSVVYAHSKELITAWYIGFLVLIFSSFLVYLVEKDANKEFSTYADALWWGTITLTTIGYGDKTPLTWLGRLLSAGFALLGISFFALPAGILGSGFALKVQEQHRQKHFEKRRNPAANLIQCVWRSYAADEKSVSIATWKPHLKALHTCSPTKKEQGEASSSQKLSFKERVRMASPRGQSIKSRQASVGDRRSPSTDITAEGSPTKVQKSWSFNDRTRFRPSLRLKSSQPKPVIDADTALGTDDVYDEKGCQCDVSVEDLTPPLKTVIRAIRIMKFHVAKRKFKETLRPYDVKDVIEQYSAGHLDMLCRIKSLQTRVDQILGKGQITSDKKSREKITAEHETTDDLSMLGRVVKVEKQVQSIESKLDCLLDIYQQVLRKGSASALALASFQIPPFECEQTSDYQSPVDSKDLSGSAQNSGCLSRSTSANISRGLQFILTPNEFSAQTFYALSPTMHSQATQVPISQSDGSAVAATNTIANQINTAPKPAAPTTLQIPPPLPAIKHLPRPETLHPNPAGLQESISDVTTCLVASKENVQVAQSNLTKDRSMRKSFDMGGETLLSVCPMVPKDLGKSLSVQNLIRSTEELNIQLSGSESSGSRGSQDFYPKWRESKLFITDEEVGPEETETDTFDAAPQPAREAAFASDSLRTGRSRSSQSICKAGESTDALSLPHVKLK

SEQ ID NO: 8972 - protein, 850 aa, Homo sapiens
MTSHYVIAIFALMSSCLATAGPEPGALCELSPVSASHPVQALMESFTVLSGCASRGTTGLPQEVHVLNLRTAGQGPGQLQREVTLHLNPISSVHIHHKSVVFLLNSPHPLVWHLKTERLATGVSRLFLVSEGSVVQFSSANFSLTAETEERNFPHGNEHLLNWARKEYGAVTSFTELKIARNIYIKVGEDQVFPPKCNIGKNFLSLNYLAEYLQPKAAEGCVMSSQPQNEEVHIIELITPNSNPYSAFQVDITIDIRPSQEDLEVVKNLILILKCKKSVNWVIKSFDVKGSLKIIAPNSIGFGKESERSMTMTKSIRDDIPSTQGNLVKWALDNGYSPITSYTMAPVANRFHLRLENNEEMGDEEVHTIPPELRILLDPGALPALQNPPIRGGEGQNGGLPFPFPDISRRVWNEEGEDGLPRPKDPVIPSIQLFPGLREPEEVQGSVDIALSVKCDNEKMIVAVEKDSFQASGYSGMDVTLLDPTCKAKMNGTHFVLESPLNGCGTRPRWSALDGVVYYNSIVIQVPALGDSSGWPDGYEDLESGDNGFPGDMDEGDASLFTRPEIVVFNCSLQQVRNPSSFQEQPHGNITFNMELYNTDLFLVPSQGVFSVPENGHVYVEVSVTKAEQELGFAIQTCFISPYSNPDRMSHYTIIENICPKDESVKFYSPKRVHFPIPQADMDKKRFSFVFKPVFNTSLLFLQCELTLCTKMEKHPQKLPKCVPPDEACTSLDASIIWAMMQNKKTFTKPLAVIHHEAESKEKGPSMKEPNPISPPIFHGLDTLTVMGIAFAAFVIGALLTGALWYIYSHTGETAGRQQVPTSPPASENSSAAHSIGSTQSTPCSSSSTA

SEQ ID NO: 8973 - protein, 275 aa, Homo sapiens
MNMTQARVLVAAVVGLVAVLLYASIHKIEEGHLAVYYRGGALLTSPSGPGYHIMLPFITTFRSVQTTLQTDEVKNVPCGTSGGVMIYIDRIEVVNMLAPYAVFDIVRNYTADYDKTLIFNKIHHELNQFCSAHTLQEVYIELFDQIDENLKQALQKDLNLMAPGLTIQAVRVTKPKIPEAIRRNFELMEAEKTKLLIAAQKQKVVEKEAETERKKAVIEAEKIAQVAKIRFQQKVMEKETEKRISEIEDAAFLAREKAKADAEYYAAHKYATSNK

SEQ ID NO: 8974 - protein, 740 aa, Homo sapiens
RPRNPYVKMYFLPDRSDKSKRRTKTVKKILEPKWNQTFVYSHVHRRDFRERMLEITVWDQPRVQEEESEFLGEILIELETALLDDEPHWYKLQTHDESSLPLPQPSPFMPRRHIHGESSSKKLQRSQRISDSDISDYEVDDGIGVVPPVGYRSSARESKSTTLTVPEQQRTTHHRSRSVSPHRGNDQGKPRSRLPNVPLQRSLDEIHPTRRSRSPTRHHDASRSPVDHRTRDVDSQYLSEQDSELLMLPRAKRGRSAECLHTTSELQPFLDRARSASTNCLRPDTSLHSPERERMHRQRSPTQSPPADTSFSSRRGRQLPQVPVRSGSIEQASLVVEERTRQMKMKVHRFKQTTGSGSSQELDREQYSKYNIHKDQYRSCDNVSAKSSDSDVSDVSAISRTSSASRLSSTSFMSEQSERPRGRISSFTPKMQGRRMGTSGRSIMKSTSVSGEMYTLEHNDGSQSDTAVGTVGAGGKKRRSSLSAKVVAIVSRRSRSTSQLSQTESGHKKLKSTIQRSTETGMAAEMRKMVRQPSRESTDGSINSYSSEGNLIFPGVRLGADSQFSDFLDGLGPAQLVGRQTLATPAMGDIQIGMEDKKGQLEVEVIRARSLTQKPGSKSTPAPYVKVYLLENGACIAKKKTRIARKTLDPLYQQSLVFDESPQGKVLQVIVWGDYGRMDHKCFMGVAQILLEELDLSSMVIGWYKLFPPSSLVDPTLTPLTRRASQSSLESSTGPPCIRS

SEQ ID NO: 8975 - protein, 1435 aa, Homo sapiens
MLKSNDCLFSLENLFFEKPDEVENHPDNEKSLDWFLPPAPLISEIPDTQELEEELESHKLLGQEKRPKMLTSNLKITNEDTNYISLTQKFQFAFPSDKYEQDDLNLEGVGNNDLSHIAGKLTYASQKYKNHIGTEIAPEKSVPDDTKLVNFAEDKGESTSVFRKRLFKISDNIHGSAYSNDNELDSHIGSVKIVQTEMNKGKSRNYSNSKQKFQYSANVFTANNAFSASEIGEGMFKAPSFSVAFQPHDIQEVTENGLGSLKAVTEIPAKFRSIFKEFPYFNYIQSKAFDDLLYTDRNFVICAPTGSGKTVVFELAITRLLMEVPLPWLNIKIVYMAPIKALCSQRFDDWKEKFGPIGLNCKELTGDTVMDDLFEIQHAHIIMTTPEKWDSMTRKWRDNSLVQLVRLFLIDEVHIVKDENRGPTLEVVVSRMKTVQSVSQTLKNTSTAIPMRFVAVSATIPNAEDIAEWLSDGERPAVCLKMDESHRPVKLQKVVLGFPCSSNQTEFKFDLTLNYKIASVIQMYSDQKPTLVFCATRKGVQQAASVLVKDAKFIMTVEQKQRLQKYAYSVRDSKLRDILKDGAAYHHAGMELSDRKVVEGAFTVGDLPVLFTTSTLAMGVNLPAHLVVIKSTMHYAGGLFEEYSETDILQMIGRAGRPQFDTTATAVIMTRLSTRDKYIQMLACRDTVESSLHRHLIEHLNAEIVLHTITDVNIAVEWIRSTLLYIRALKNPSHYGFASGLNKDGIEAKLQELCLKNLNDLSSLDLIKMDEGVNFKPTEAGRLMAWYYITFETVKKFYTISGKETLSDLVTLIAGCKEFLDIQLRINEKKTLNTLNKDPNRITIRFPMEGRIKTREMKVNCLIQAQLGCIPIQDFALTQDTAKIFRHGSRITRWLSDFVAAQEKKFAVLLNSLILAKCFRCKLWENSLHVSKQLEKIGITLSNAIVNAGLTSFKKIEETDARELELILNRHPPFGTQIKETVMYLPKYELKVEQITRYSDTTAEILVTVILRNFEQLQTKRTASDSHYVTLIIGDADNQVVYLHKITDSVLLKAGSWAKKIAVKRALKSEDLSINLISSEFVGLDIQQKLTVFYLEPKRFGNQITMQRKSETQISHSKHSDISTIAGPNKGTTASKKPGNRECNHLCKSKHTCGHDCCKIGVAQKSEIKESTISSYLSDLRNRNAVSSVPPVKRLKIQMNKSQSVDLKEFGFTPKPSLPSISRSEYLNISELPIMEQWDQPEIYGKVRQEPSEYQDKEVLNVNFELGNEVWDDFDDENLEVTSFSTDTEKTKISGFGNTLSSSTRGSKLPLQESKSKFQREMSNSFVSSHEMSDISLSNSAMPKFSASSMTKLPQQAGNAVIVHFQERKPQNLSPEIEKQCFTFSEKNPNSSNYKKVDFFIRNSECKKEVDFSMYHPDDEADEMKSLLGIFDGIF

SEQ ID NO: 8976 - protein, 451 aa, Homo sapiens
MGNLLGGVSFREPTTVEDCDSTWQTDSEPEPEEPGPGGGSEGPGQESEQPAQPPEQAGGRPGASPAPDEDAEAAGAEQGGDSTEATAKPKRSFYAARDLYKYRHQYPNFKDIRYQNDLSNLRFYKNKIPFKPDGVYIEEVLSKWKGDYEKLEHNHTYIQWLFPLREQGLNFYAKELTTYEIEEFKKTKEAIRRFLLAYKMMLEFFGIKLTDKTGNVARAVNWQERFQHLNESQHNYLRITRILKSLGELGYESFKSPLVKFILHEALVENTIPNIKQSALEYFVYTIRDRRERRKLLRFAQKHYTPSENFIWGPPRKEQSEGSKAQKMSSPLASSHNSQTSMHKKAKDSKNSSSAVHLNSKTAEDKKVAPKEPVEETDRPSPEPSNEAAKPRNTEKDSNAENMNSQPEKTVTTPTEKKESVSPENNEEGGNDNQDNENPGNTNCHDVVLVQ

SEQ ID NO: 8977 - protein, 387 aa, Homo sapiens
MTMEGASGSSFGIDTILSSASSGSPGMMNGDFRPLGEARTADFRSQATPSPCSEIDTVGTAPSSPISVTMEPPEPHLVADATQHHHHLHHSQQPPPPAAAPTQSLQPLPQQQQPLPPQQPPPPPPQQLGSAASAPRTSTSSFLIKDILGDSKPLAACAPYSTSVSSPHHTPKQESNAVHESFRPKLEQEDSKTKLDKREDSQSDIKCHGTKEEGDREITSSRESPPVRAKKPRKARTAFSDHQLNQLERSFERQKYLSVQDRMDLAAALNLTDTQVKTWYQNRRTKWKRQTAVGLELLAEAGNYSALQRMFPSPYFYHPSLLGSMDSTTAAAAAAAMYSSMYRTPPAPHPQLQRPLVPRVLIHGLGPGGQPALNPLSSPIPGTPHPR

SEQ ID NO: 8978 - protein, 493 aa, Homo sapiens
MDFEDDYTHSACRNTYQGFNGMDRDYGPGSYGGMDRDYGHGSYGGQRSMDSYLNQSYGMDNHSGGGGGSSFSSPHMKPAPVGSRGRGTPAYPESTFGSRNYDAFGGPSTGRGRGRGHMGDFGSIHRPGIVVDYQNKSTNVTVAAARGIKRKMMQPFNKPSGTFIKKPKLAKPMEKISLSKSPTKTDPKNEEEEKRRIEARREKQRRRREKNSEKYGDGYRMAFTCSFCKFRTFEEKDIELHLESSSHQETLDHIQKQTKFDKVVMEFLHECMVNKFKKTSIRKQQTNNQTEVVKIIEKDVMEGVTVDDHMMKVETVHCSACSVYIPALHSSVQQHLKSPDHIKGKQAYKEQIKRESVLTATSILNNPIVKARYERFVKGENPFEIQDHSQDQQIEGDEEDEEKIDEPIEEEEDEDEEEEAEEVGEVEEVEEVEEVREGGIEGEGNIQGVGEGGEVGVVGEVEGVGEVEEVEELEEETAKEEPADFPVEQPEEN

SEQ ID NO: 8979 - protein, 633 aa, Homo sapiens
MESGPKMLAPVCLVENNNEQLLVNQQAIQILEKISQPVVVVAIVGLYRTGKSYLMNHLAGQNHGFPLGSTVQSETKGIWMWCVPHPSKPNHTLVLLDTEGLGDVEKGDPKNDSWIFALAVLLCSTFVYNSMSTINHQALEQLHYVTELTELIKAKSSPRPDGVEDSTEFVSFFPDFLWTVRDFTLELKLNGHPITEDEYLENALKLIQGNNPRVQTSNFPRECIRRFFPKRKCFVFDRPTNDKDLLANIEKVSEKQLDPKFQEQTNIFCSYIFTHARTKTLREGITVTGNRLGTLAVTYVEAINSGAVPCLENAVITLAQRENSAAVQRAADYYSQQMAQRVKLPTDTLQELLDMHAACEREAIAIFMEHSFKDENQEFQKKFMETTMNKKGDFLLQNEESSVQYCQAKLNELSKGLMESISAGSFSVPGGHKLYMETKERIEQDYWQVPRKGVKAKEVFQRFLESQMVIEESILQSDKALTDREKAVAVDRAKKEAAEKEQELLKQKLQEQQQQMEAQDKSRKENIAQLKEKLQMEREHLLREQIMMLEHTQKVQNDWLHEGFKKKYEEMNAEISQFKRMIDTTKNDDTPWIARTLDNLADELTAILSAPAKLIGHGVKGVSSLFKKHKLPF

SEQ ID NO: 8980 - protein, 1276 aa, Homo sapiens
MDLFDFFRDWDLEQQCHYEQDRSALKKREWERRNQEVQQEDDLFSSGFDLFGEPYKVAEYTNKGDALANRVQNTLGNYDEMKNLLTNHSNQNHLVGIPKNSVPQNPNNKNEPSFFPEQKNRIIPPHQDNTHPSAPMPPPSVVILNSTLIHSNRKSKPEWSRDSHNPSTVLASQASGQPNKMQTLTQDQSQAKLEDFFVYPAEQPQIGEVEESNPSAKEDSNPNSSGEDAFKEIFQSNSPEESEFAVQAPGSPLVASSLLAPSSGLSVQNFPPGLYCKTSMGQQKPTAYVRPMDGQDQAPDISPTLKPSIEFENSFGNLSFGTLLDGKPSAASSKTKLPKFTILQTSEVSLPSDPSCVEEILRESQHLTPGFTLQKWNDPTTRASTKMLEDDLKLSSDEDDLEPVKTLTTQCTATELYQAVEKAKPRNNPVNPPLATPQPPPAVQASGGSGSSSESESSSESDSDTESSTTDSESNEAPRVATPEPEPPSTNKWQLDKWLNKVTSQNKSFICGQNETPMETISLPPPIIQPMEVQMKVKTNASQVPAEPKERPLLSLIREKARPRPTQKIPETKALKHKLSTTSETVSQRTIGKKQPKKVEKNTSTDEFTWPKPNITSSTPKEKESVELHDPPRGRNKATAHKPAPRKEPRPNIPLAPEKKKYRGPGKIVPKSREFIETDSSTSDSNTDQEETLQIKVLPPCIISGGNTAKSKEICGASLTLSTLMSSSGSNNNLSISNEEPTFSPIPVMQTEILSPLRDHENLKNLWVKIDLDLLSRVPGHSSLHAAPAKPDHKETATKPKRQTAVTAVEKPAPKGKRKHKPIEVAEKIPEKKQRLEEATTICLLPPCISPAPPHKPPNTRENNSSRRANRRKEEKLFPPPLSPLPEDPPRRRNVSGNNGPFGQDKNIAMTGQITSTKPKRTEGKFCATFKGISVNEGDTPKKASSATITVTNTAIATATVTATAIVTTTVTATATATATTTTTTTTISTITSTITTGLMDSSHLEMTSWAALPLLSSSSTNVRRPKLTFDDSVHNADYYMQEAKKLKHKADALFEKFGKAVNYADAALSFTECGNAMERDPLEAKSPYTMYSETVELLRYAMRLKNFASPLASDGDKKLAVLCYRCLSLLYLRMFKLKKDHAMKYSRSLMEYFKQNASKVAQIPSPWVSNGKNTPSPVSLNNVSPINAMGNCNNGPVTIPQRIHHMAASHVNITSNVLRGYEHWDMADKLTRENKEFFGDLDTLMGPLTQHSSMTNLVRYVRQGLCWLRIDAHLL

SEQ ID NO: 8981 - protein, 427 aa, Homo sapiens
MDLFDFFRDWDLEQQCHYEQDRSALKKREWERRNQEVQQEDDLFSSGFDLFGEPYKTNKGDALANRVQNTLGNYDEMKNLLTNHSNQNHLVGIPKNSVPQNPNNKNEPSFFPEQKNRIIPPHQDNTHPSAPMPPPSVVILNSTLIHSNRKSKPEWSRDSHNPSTVLASQASGQPNKMQTLTQDQSQAKLEDFFVYPAEQPQIGEVEESNPSAKEDSNPNSSGEDAFKEIFQSNSPEESEFAVQAPGSPLVASSLLAPSSGLSVQNFPPGLYCKTSMGQQKPTAYVRPMDGQDQAPDISPTLKPSIEFENSFGNLSFGTLLDGKPSAASSKTKLPKFTILQTSEVSLPSDPSCVEEILRESQHLTPGFTLQKWNDPTTRASTKMLEDDLKLSSDEDDLEPVKTLTTQCTATELYQAVEKAKPRNNPVK

SEQ ID NO: 8982 - protein, 586 aa, Homo sapiens
MALEIHMSDPMCLIENFNEQLKVNQEALEILSAITQPVVVVAIVGLYRTGKSYLMNKLAGKNKGFSVASTVQSHTKGIWIWCVPHPNWPNHTLVLLDTEGLGDVEKADNKNDIQIFALALLLSSTFVYNTVNKIDQGAIDLLHNVTELTDLLKARNSPDLDRVEDPADSASFFPDLVWTLRDFCLGLEIDGQLVTPDEYLENSLRPKQGSDQRVQNFNLPRLCIQKFFPKKKCFIFDLPAHQKKLAQLETLPDDELEPEFVQQVTEFCSYIFSHSMTKTLPGGIMVNGSRLKNLVLTYVNAISSGDLPCIENAVLALAQRENSAAVQKAIAHYDQQMGQKVQLPMETLQELLDLHRTSEREAIEVFMKNSFKDVDQSFQKELETLLDAKQNDICKRNLEASSDYCSALLKDIFGPLEEAVKQGIYSKPGGHNLFIQKTEELKAKYYREPRKGIQAEEVLQKYLKSKESVSHAILQTDQALTETEKKKKEAQVKAEAEKAEAQRLAAIQRQNEQMMQERERLHQEQVRQMEIAKQNWLAEQQKMQEQQMQEQAAQLSTTFQAQNRSLLSELQHAQRTVNNDDPCVLL

SEQ ID NO: 8983 - protein, 1311 aa, Homo sapiens
MDLFDFFRDWDLEQQCHYEQDRSALKKREWERRNQEVQQEDDLFSSGFDLFGEPYKVAEYTNKGDALANRVQNTLGNYDEMKNLLTNHSNQNHLVGIPKNSVPQNPNNKNEPSFFPEQKNRIIPPHQDNTHPSAPMPPPSVVILNSTLIHSNRKSKPEWSRDSHNPSTVLASQASGQPNKMQTLTQDQSQAKLEDFFVYPAEQPQIGEVEESNPSAKEDSNPNSSGEDAFKEIFQSNSPEESEFAVQAPGSPLVASSLLAPSSGLSVQNFPPGLYCKTSMGQQKPTAYVRPMDGQDQAPDISPTLKPSIEFENSFGNLSFGTLLDGKPSAASSKTKLPKFTILQTSEVSLPSDPSCVEEILREMTHSWPTPLTSMHTAGHSEQSTFSIPGQESQHLTPGFTLQKWNDPTTRASTKSVSFKSMLEDDLKLSSDEDDLEPVKTLTTQCTATELYQAVEKAKPRNNPVNPPLATPQPPPAVQASGGSGSSSESESSSESDSDTESSTTDSESNEAPRVATPEPEPPSTNKWQLDKWLNKVTSQNKSFICGQNETPMETISLPPPIIQPMEVQMKVKTNASQVPAEPKERPLLSLIREKARPRPTQKIPETKALKHKLSTTSETVSQRTIGKKQPKKVEKNTSTDEFTWPKPNITSSTPKEKESVELHDPPRGRNKATAHKPAPRKEPRPNIPLAPEKKKYRGPGKIVPKSREFIETDSSTSDSNTDQEETLQIKVLPPCIISGGNTAKSKEICGASLTLSTLMSSSGSNNNLSISNEEPTFSPIPVMQTEILSPLRDHENLKNLWVKIDLDLLSRVPGHSSLHAAPAKPDHKETATKPKRQTAVTAVEKPAPKGKRKHKPIEVAEKIPEKKQRLEEATTICLLPPCISPAPPHKPPNTRENNSSRRANRRKEEKLFPPPLSPLPEDPPRRRNVSGNNGPFGQDKNIAMTGQITSTKPKRTEGKFCATFKGISVNEGDTPKKASSATITVTNTAIATATVTATAIVTTTVTATATATATTTTTTTTISTITSTITTGLMDSSHLEMTSWAALPLLSSSSTNVRRPKLTFDDSVHNADYYMQEAKKLKHKADALFEKFGKAVNYADAALSFTECGNAMERDPLEAKSPYTMYSETVELLRYAMRLKNFASPLASDGDKKLAVLCYRCLSLLYLRMFKLKKDHAMKYSRSLMEYFKQNASKVAQIPSPWVSNGKNTPSPVSLNNVSPINAMGNCNNGPVTIPQRIHHMAASHVNITSNVLRGYEHWDMADKLTRENKEFFGDLDTLMGPLTQHSSMTNLVRYVRQGLCWLRIDAHLL

SEQ ID NO: 8984 - protein, 255 aa, Homo sapiens
MSSHRRKAKGRNRRSHRAMRVAHLELATYELAATESNPESSHPGYEAAMADRPQPGWRESLKMRVSKPFGMLMLSIWILLFVCYYLSYYLCSGSSYFVLANGHILPNSENAHGQSLEEDSALEALLNFFFPTTCNLRENQVAKPCNELQDLSESECLRHKCCFSSSGTTSFKCFAPFRDVPKQMMQMFGLGAISLILVCLPIYCRSLFWRSEPADDLQRQDNRVVTGLKKQRRKRKRKSEMLQKAARGREEHGDE

SEQ ID NO: 8985 - protein, 590 aa, Homo sapiens
MEELVVEVRGSNGAFYKAFVKDVHEDSITVAFENNWQPDRQIPFHDVRFPPPVGYNKDINESDEVEVYSRANEKEPCCWWLAKVRMIKGEFYVIEYAACDATYNEIVTIERLRSVNPNKPATKDTFHKIKLDVPEDLRQMCAKEAAHKDFKKAVGAFSVTYDPENYQLVILSINEVTSKRAHMLIDMHFRSLRTKLSLIMRNEEASKQLESSRQLASRFHEQFIVREDLMGLAIGTHGANIQQARKVPGVTAIDLDEDTCTFHIYGEDQDAVKKARSFLEFAEDVIQVPRNLVGKVIGKNGKLIQEIVDKSGVVRVRIEAENEKNVPQEEEIMPPNSLPSNNSRVGPNAPEEKKHLDIKENSTHFSQPNSTKVQRVLVASSVVAGESQKPELKAWQGMVPFVFVGTKDSIANATVLLDYHLNYLKEVDQLRLERLQIDEQLRQIGASSRPPPNRTDKEKSYVTDDGQGMGRGSRPYRNRGHGRRGPGYTSAPTEEERESFLRRGDGRRRGGGGRGQGGRGRGGGFKGNDDHSRTDNRPRNPREAKGRTTDGSLQNTSSEGSRLRTGKDRNQKKEKPDSVDGQQPLVNGVP

SEQ ID NO: 8986 - protein, 537 aa, Homo sapiens
MEELVVEVRGSNGAFYKAFVKDVHEDSITVAFENNWQPDRQIPFHDVRFPPPVGYNKDINESDEVEVYSRANEKEPCCWWLAKVRMIKGEFYVIEYAACDATYNEIVTIERLRSVNPNKPATKDTFHKIKLDVPEDLRQMCAKEAAHKDFKKAVGAFSVTYDPENYQLVILSINEVTSKRAHMLIDMHFRSLRTKLSLIMRNEEASKQLESSRQLASRFHEQFIVREDLMGLAIGTHGANIQQARKVPGVTAIDLDEDTCTFHIYGEDQDAVKKARSFLEFAEDVIQVPRNLVGKVIGKNGKLIQEIVDKSGVVRVRIEAENEKNVPQEEEIMPPNSLPSNNSRVGPNAPEEKKHLDIKENSTHFSQPNSTKVQRVLVASSVVAGESQKPELKAWQGMVPFVFVGTKDSIANATVLLDYHLNYLKLQQRKRGRASCAEETDGGVEGEEEDKEEEDVEEASKETTITPEQIIVHVIQERLKEEQQMDPFRSELTAIMKGVSTLKHYRIPPVKVVGCARVKIVTRRKRSQTAWMVSNHS

SEQ ID NO: 8987 - protein, 592 aa, Homo sapiens
MASEIHMTGPMCLIENTNGRLMANPEALKILSAITQPMVVVAIVGLYRTGKSYLMNKLAGKKKGFSLGSTVQSHTKGIWMWCVPHPKKPGHILVLLDTEGLGDVEKGDNQNDSWIFALAVLLSSTFVYNSIGTINQQAMDQLYYVTELTHRIRSKSSPDENENEVEDSADFVSFFPDFVWTLRDFSLDLEADGQPLTPDEYLTYSLKLKKGTSQKDETFNLPRLCIRKFFPKKKCFVFDRPVHRRKLAQLEKLQDEELDPEFVQQVADFCSYIFSNSKTKTLSGGIQVNGPRLESLVLTYVNAISSGDLPCMENAVLALAQIENSAAVQKAIAHYEQQMGQKVQLPTETLQELLDLHRDSEREAIEVFIRSSFKDVDHLFQKELAAQLEKKRDDFCKQNQEASSDRCSALLQVIFSPLEEEVKAGIYSKPGGYRLFVQKLQDLKKKYYEEPRKGIQAEEILQTYLKSKESMTDAILQTDQTLTEKEKEIEVERVKAESAQASAKMLQEMQRKNEQMMEQKERSYQEHLKQLTEKMENDRVQLLKEQERTLALKLQEQEQLLKEGFQKESRIMKNEIQDLQTKMRRRKACTIS

SEQ ID NO: 8988 - protein, 108 aa, Homo sapiens
MTPSRLPWLLSWVSATAWRAARSPLLCHSLRKTSSSQGGKSELVKQSLKKPKLPEGRFDAPEDSHLEKEPLEKFPDDVNPVTKEKGGPRGPEPTRYGDWERKGRCIDF

SEQ ID NO: 8989 - protein, 632 aa, Homo sapiens [sequence omitted]

SEQ ID NO: 8990 - protein, 582 aa, Homo sapiens
MEELVVEVRGSNGAFYKAFVKDVHEDSITVAFENNWQPDRQIPFHDVRFPPPVGYNKDINESDEVEVYSRANEKEPCCWWLAKVRMIKGEFYVIEYAACDATYNEIVTIERLRSVNPNKPATKDTFHKIKLDVPEDLRQMCAKEAAHKDFKKAVGAFSVTYDPENYQLVILSINEVTSKRAHMLIDMHFRSLRTKLSLIMRNEEASKQLESSRQLASRFHEQFIVREDLMGLAIGTHGANIQQARKVPGVTAIDLDEDTCTFHIYGEDQDAVKKARSFLEFAEDVIQVPRNLVGKVIGKNGKLIQEIVDKSGVVRVRIEAENEKNVPQEEEIMPPNSLPSNNSRVGPNAPEEKKHLDIKENSTHFSQPNSTKVQRGMVPFVFVGTKDSIANATVLLDYHLNYLKEVDQLRLERLQIDEQLRQIGASSRPPPNRTDKEKSYVTDDGQGMGRGSRPYRNRGHGRRGPGYTSESDHRDELSDWSLAPTEEERESFLRRGDGRRRGGGGRGQGGRGRGGGFKGNDDHSRTDNRPRNPREAKGRTTDGSLQNTSSEGSRLRTGKDRNQKKEKPDSVDGQQPLVNGVP

SEQ ID NO: 8991 - protein, 1515 aa, Homo sapiens
MTEVQAMVEFSVELNKFYNVDLFQRGFYQIRASMKIPSRIPHRVEASLLHATGMTLAFPASVHDSLICSKTFQILYKNEEVVLNDVMIFKVKMLLDERKIEETLEEMNFLLSLDLHFTDGDYSADDLNALQLISSRTLKLHFSPHRGLHHHVNVMFDYFHLSVVSVTVHASLVALHQPLISFPRPVKTTWLNRNAPAQNKDSVIPTLESVVFGINYTKQLSPDGCSFIIADSFLHHAYRFHYTLCATLLLAFKGLHSYFITVTEEIPSCQKLELEEMDVEARLTELCEEVKKIENPDELAELINMNLAQLCSLLMALWGQFLEVITLHEELRILLAQEHHTLRVRRFSEAFFCFEHPREAAIAYQELHAQSHLQMCTAIKNTSFCSSLPPLPIECSELDGDLNSLPIIFEDRYLDSVTEDLDAPWMGIQNLQRSESSKMDKYETEESSVAGLSSPELKVRPAGASSIWYTEGEKQLTKSLKGKNEESNKSKVKVTKLMKTMKSENTKKLIKQNSKDSVVLVGYKCLKSTASNDLIKCFEGNPSHSQKEGLDPTICGYNFDPKTYMRQTSQKEASCLPTNTERTEQKSPDIENVQPDQFDPLNSGNLNLCANLSISGKLDISQDDSEITQMEHNLASRRSSDDCHDHQTTPSLGVRTIEIKPSNKDPFSGENITVKLGPWTELRQEEILVDNLLPNFESLESNGKSKSIEITFEKEALQEAKCLSIGESLTKLRSNLPAPSTKEYHVVVSGDTIKLPDISATYASSRFSDSGVESEPSSFATHPNTDLVFETVQGQGPCNSERLFPQLLMKPDYNVKFSLGNHCTESTSAISEIQSSLTSINSLPSDDELSPDENSKKSVVPECHLNDSKTVLNLGTTDLPKCDDTKKSSITLQQQSVVFSGNLDNETVAIHSLNSSIKDPLQFVFSDEETSSDVKSSCSSKPNLDTMCKGFQSPDKSNNSTGTAITLNSKLICLGTPCVISGSISSNTDVSEDRTMKKNSDVLNLTQMYSEIPTVESETHLGTSDPFSASTDIVKQGLVENYFGSQSSTDISDTCAVSYSNALSPQKETSEKEISNLQQEQDKEDEEEEQDQQMVQNGYYEETDYSALDGTINAHYTSRDELMEERLTKSEKINSDYLRDGINMPTVCTSGCLSFPSAPRESPCNVKYSSKSKFDAITKQPSSTSYNFTSSISWYESSPKPQIQAFLQAKEELKLLKLPGFMYSEVPLLASSVPYFSVEEEDGSEDGVHLIVCVHGLDGNSADLRLVKTYIELGLPGGRIDFLMSERNQNDTFADFDSMTDRLLDEIIQYIQIYSLTVSKISFIGHSLGNLIIRSVLTRPRFKYYLNKLHTFLSLSGPHLGTLYNSSALVNTGLWFMQKWKKSGSLLQLTCRDHSDPRQTFLYKLSNKAGLHYFKNVVLVGSLQDRYVPYHSARIEMCKTALKDKQSGQIYSEMIHNLLRPVLQSKDCNLVRYNVINALPNTADSLIGRAAHIAVLDSEIFLEKFFLVAALKYFQ

SEQ ID NO: 8992 - protein, 595 aa, Homo sapiens
MAPEIHMTGPMCLIENTNGELVANPEALKILSAITQPVVVVAIVGLYRTGKSYLMNKLAGKNKGFSLGSTVKSHTKGIWMWCVPHPKKPEHTLVLLDTEGLGDVKKGDNQNDSWIFTLAVLLSSTLVYNSMGTINQQAMDQLYYVTELTHRIRSKSSPDENENEDSADFVSFFPDFVWTLRDFSLDLEADGQPLTPDEYLEYSLKLTQGTSQKDKNFNLPRLCIRKFFPKKKCFVFDLPIHRRKLAQLEKLQDEELDPEFVQQVADFCSYIFSNSKTKTLSGGIKVNGPRLESLVLTYINAISRGDLPCMENAVLALAQIENSAAVQKAIAHYDQQMGQKVQLPAETLQELLDLHRVSEREATEVYMKNSFKDVDHLFQKKLAAQLDKKRDDFCKQNQEASSDRCSALLQVIFSPLEEEVKAGIYSKPGGYCLFIQKLQDLEKKYYEEPRKGIQAEEILQTYLKSKESVTDAILQTDQILTEKEKEIEVECVKAESAQASAKMVEEMQIKYQQMMEEKEKSYQEHVKQLTEKMERERAQLLEEQEKTLTSKLQEQARVLKERCQGESTQLQNEIQKLQKTLKKKTKRYMSHKLKI

SEQ ID NO: 8993 - protein, 204 aa, Homo sapiens
MGEAEVGGGGAAGDKGPGEAATSPAEETVVWSPEVEVCLFHAMLGHKPVGVNRHFHMICIRDKFSQNIGRQVPSKVIWDHLSTMYDMQALHESEILPFPNPERNFVLPEEIIQEVREGKVMIEEEMKEEMKEDVDPHNGADDVFSSSGSLGKASEKSSKDKEKNSSDLGCKEGADKRKRSRVTDKVLTANSNPSSPSAAKRRRT

SEQ ID NO: 8994 - protein, 604 aa, Homo sapiens
MARISFSYLCPASWYFTVPTVSPFLRQRVAFLGLFFISCLLLLMLIIDFRHWSASLPRDRQYERYLARVGELEATDTEDPNLNYGLVVDCGSSGSRIFVYFWPRHNGNPHDLLDIKQMRDRNSQPVVKKIKPGISAMADTPEHASDYLRPLLSFAAAHVPVKKHKETPLYILCTAGMRLLPERKQLAILADLVKDLPLEFDFLFSQSQAEVISGKQEGVYAWIGINFVLGRFDHEDESDAEATQELAAGRRRTVGILDMGGASLQIAYEVPTSTSVLPAKQEEAAKILLAEFNLGCDVQHTEHVYRVYVTTFLGFGGNFARQRYEDLVLNETLNKNRLLGQKTGLSPDNPFLDPCLPVGLTDVVERNSQVLHVRGRGDWVSCGAMLSPLLARSNTSQASLNGIYQSPIDFNNSEFYGFSEFFYCTEDVLRIGGRYHGPTFAKAAQDYCGMAWSVLTQRFKNGLFSSHADEHRLKYQCFKSAWMYQVLHEGFHFPYDYPNLRTAQLVYDREVQWTLGAILYKTRFLPLRDLRQEGVRQAHGSWFRLSFVYNHYLFFACILVVLLAIFLYLLRLRRIHHRQTRASAPLDLLWLEEVVPMMGVQVGP

SEQ ID NO: 8995 - protein, 420 aa, Homo sapiens
MSLKFTNAKRIEGLDSNVWIEFTKLAADPSVVNLGQGFPDISPPTYVKEELSKIAAIDSLNQYTRGFGHPSLVKALSYLYEKLYQKQIDSNKEILVTVGAYGSLFNTIQALIDEGDEVILIVPFYDCYEPMVRMAGATPVFIPLRSKPVYGKRWSSSDWTLDPQELESKFNSKTKAIILNTPHNPLGKVYNREELQVIADLCIKYDTLCISDEVYEWLVYSGNKHLKIATFPGMWERTITIGSAGKTFSVTGWKLGWSIGPNHLIKHLQTVQQNTIYTCATPLQEALAQAFWIDIKRMDDPECYFNSLPKELEVKRDRMVRLLESVGLKPIVPDGGYFIIADVSLLDPDLSDMKNNEPYDYKFVKWMTKHKKLSAIPVSAFCNSETKSQFEKFVRFCFIKKDSTLDAAEEIIKAWSVQKS

SEQ ID NO: 8996 - protein, 328 aa, Homo sapiens
MKTCWKIPVFFFVCSFLEPWASAAVKRRPRFPVNSNSNGGNELCPKIRIGQDDLPGFDLISQFQVDKAASRRAIQRVVGSATLQVAYKLGNNVDFRIPTRNLYPSGLPEEYSFLTTFRMTGSTLKKNWNIWQIQDSSGKEQVGIKINGQTQSVVFSYKGLDGSLQTAAFSNLSSLFDSQWHKIMIGVERSSATLFVDCNRIESLPIKPRGPIDIDGFAVLGKLADNPQVSVPFELQWMLIHCDPLRPRRETCHELPARITPSQTTDERGPPGEQGPPGPPGPPGVPGIDGIDGDRGPKGPPGPPGPAGEPGKPGAPGKPGTPGADTSP

SEQ ID NO: 8997 - protein, 316 aa, Homo sapiens
MASTSRLDALPRVTCPNHPDAILVEDYRAGDMICPECGLVVGDRVIDVGSEWRTFSNDKATKDPSRVGDSQNPLLSDGDLSTMIGKGTGAASFDEFGNSKYQNRRTMSSSDRAMMNAFKEITTMADRINLPRNIVDRTNNLFKQVYEQKSLKGRANDAIASACLYIACRQEGVPRTFKEICAVSRISKKEIGRCFKLILKALETSVDLITTGDFMSRFCSNLCLPKQVQMAATHIARKAVELDLVPGRSPISVAAAAIYMASQASAEKRTQKEIGDIAGVADVTIRQSYRLIYPRAPDLFPTDFKFDTPVDKLPQL

SEQ ID NO: 8998 - protein, 413 aa, Homo sapiens
MAPPSVFAEVPQAQPVLVFKLTADFREDPDPRKVNLGVGAYRTDDCHPWVLPVVKKVEQKIANDNSLNHEYLPILGLAEFRSCASRLALGDDSPALKEKRVGGVQSLGGTGALRIGADFLARWYNGTNNKNTPVYVSSPTWENHNAVFSAAGFKDIRSYRYWDAEKRGLDLQGFLNDLENAPEFSIVVLHACAHNPTGIDPTPEQWKQIASVMKHRFLFPFFDSAYQGFASGNLERDAWAIRYFVSEGFEFFCAQSFSKNFGLYNERVGNLTVVGKEPESILQVLSQMEKIVRITWSNPPAQGARIVASTLSNPELFEEWTGNVKTMADRILTMRSELRARLEALKTPGTWNHITDQIGMFSFTGLNPKQVEYLVNEKHIYLLPSGRINVSGLTTKNLDYVATSIHEAVTKIQ

SEQ ID NO: 8999 - protein, 936 aa, Homo sapiens
MASNPERGEILLTELQGDSRSLPFSENVSAVQKLDFSDTMVQQKLDDIKDRIKREIRKELKIKEGAENLRKVTTDKKSLAYVDNILKKSNKKLEELHHKLQELNAHIVVSDPEDITDCPRTPDTPNNDPRCSTSNNRLKALQKQLDIELKVKQGAENMIQMYSNGSSKDRKLHGTAQQLLQDSKTKIEVIRMQILQAVQTNELAFDNAKPVISPLELRMEELRHHFRIEFAVAEGAKNVMKLLGSGKVTDRKALSEAQARFNESSQKLDLLKYSLEQRLNEVPKNHPKSRIIIEELSLVAASPTLSPRQSMISTQNQYSTLSKPAALTGTLEVRLMGCQDILENVPGRSKATSVALPGWSPSETRSSFMSRTSKSKSGSSRNLLKTDDLSNDVCAVLKLDNTVVGQTSWKPISNQSWDQKFTLELDRVTFFNPVIERRPKLQRQKKIFSKQQGKTFLRAPQMNINIATWGRLVRRAIPTVNHSGTFSPQAPVPTTVPVVDVRIPQLAPPASDSTVTKLDFDLEPEPPPAPPRASSLGEIDESSELRVLDIPGQDSETVFDIQNDRNSILPKSQSEYKPDTPQSGLEYSGIQELEDRRSQQRFQFNLQDFRCCAVLGRGHFGKVLLAEYKNTNEMFAIKALKKGDIVARDEVDSLMCEKRIFETVNSVRHPFLVNLFACFQTKEHVCFVMEYAAGGDLMMHIHTDVFSEPRAVFYAACVVLGLQYLHEHKIVYRDLKLDNLLLDTEGFVKIADFGLCKEGMGYGDRTSTFCGTPEFLAPEVLTETSYTRAVDWWGLGVLIYEMLVGESPFPGDDEEEVFDSIVNDEVRYPRFLSTEAISIMRRLLRRNPERRLGASEKDAEDVKKHPFFRLIDWSALMDKKVKPPFIPTIRGREDVSNFDDEFTSEAPILTPPREPRILSEEEQEMFRDFDYIADWC

SEQ ID NO: 9000 - protein, 97 aa, Homo sapiens
MDKQSSAGGVKRSVPCDSNEANEMMPETSSGYSDPQPAPKKLKTSESSTILVVRYRRNFKRTSPEELVNDHARKNRINPLQMEEEEFMEIMVEIPAK

SEQ ID NO: 9001 - protein, 984 aa, Homo sapiens
MASNPERGEILLTELQGDSRSLPFSENVSAVQKLDFSDTMVQQKLDDIKDRIKREIRKELKIKEGAENLRKVTTDKKSLAYVDNILKKSNKKLEELHHKLQELNAHIVVSDPEDITDCPRTPDTPNNDPRCSTSNNRLKALQKQLDIELKVKQGAENMIQMYSNGSSKDRKLHGTAQQLLQDSKTKIEVIRMQILQAVQTNELAFDNAKPVISPLELRMEELRHHFRIEFAVAEGAKNVMKLLGSGKVTDRKALSEAQARFNESSQKLDLLKYSLEQRLNEVPKNHPKSRIIIEELSLVAASPTLSPRQSMISTQNQYSTLSKPAALTGTLEVRLMGCQDILENVPGRSKATSVALPGWSPSETRSSFMSRTSKSKSGSSRNLLKTDDLSNDVCAVLKLDNTVVGQTSWKPISNQSWDQKFTLELDRSRELEISVYWRDWRSLCAVKFLRLEDFLDNQRHGMCLYLEPQGTLFAEVTFFNPVIERRPKLQRQKKIFSKQQGKTFLRAPQMNINIATWGRLVRRAIPTVNHSGTFSPQAPVPTTVPVVDVRIPQLAPPASDSTVTKLDFDLEPEPPPAPPRASSLGEIDESSELRVLDIPGQDSETVFDIQNDRNSILPKSQSEYKPDTPQSGLEYSGIQELEDRRSQQRFQFNLQDFRCCAVLGRGHFGKVLLAEYKNTNEMFAIKALKKGDIVARDEVDSLMCEKRIFETVNSVRHPFLVNLFACFQTKEHVCFVMEYAAGGDLMMHIHTDVFSEPRAVFYAACVVLGLQYLHEHKIVYRDLKLDNLLLDTEGFVKIADFGLCKEGMGYGDRTSTFCGTPEFLAPEVLTETSYTRAVDWWGLGVLIYEMLVGESPFPGDDEEEVFDSIVNDEVRYPRFLSTEAISIMRRLLRRNPERRLGASEKDAEDVKKHPFFRLIDWSALMDKKVKPPFIPTIRGREDVSNFDDEFTSEAPILTPPREPRILSEEEQEMFRDFDYIADWC

SEQ ID NO: 9002 - protein, 146 aa, Homo sapiens
MVDELVLLLHALLMRHRALSIENSQLMEQLRLLVCERASLLRQVRPPSCPVPFPETFNGESSRLPEFIVQTASYMLVNENRFCNDAMKVAFLISLLTGEAEEWVVPYIEMDSPILGDYRAFLDEMKQCFGWDDDEDDDDEEEEDDY

SEQ ID NO: 9003 - protein, 446 aa, Homo sapiens
MRPVRENSSGARSPRVPADLARSILISLPFPPDSLAHRPPSSAPTESQGLFTVAAPAPGAPSPPATLAHLLPAPAMYSLLETELKNPVGTPTQAAGTGGPAAPGGAGKSSANAAGGANSGGGSSGGASGGGGGTDQDRVKRPMNAFMVWSRGQRRKMALENPKMHNSEISKRLGADWKLLTDAEKRPFIDEAKRLRAVHMKEYPDYKYRPRRKTKTLLKKDKYSLPSGLLPPGAAAAAAAAAAAAAAASSPVGVGQRLDTYTHVNGWANGAYSLVQEQLGYAQPPSMSSPPPPPALPPMHRYDMAGLQYSPMMPPGAQSYMNVAAAAAAASGYGGMAPSATAAAAAAYGQQPATAAAAAAAAAAMSLGPMGSVVKSEPSSPPPAIASHSQRACLGDLRDMISMYLPPGGDAADAASPLPGGRLHGVHQHYQGAGTAVNGTVPLTHI

SEQ ID NO: 9004 - protein, 361 aa, Homo sapiens
MNLVICVLLLSIWKNNCMTTNQTNGSSTTGDKPVESMQTKLNYLRRNLLILVGIIIMVFVFICFCYLHYNCLSDDASKAGMVKKKGIAAKSSKTSFSEAKTASQCSPETQPMLSTADKSSDSSSPERASAQSSTEKLIRPSSLQKPSIPNSAGKLTRPSYPKRSSKSSCSKKLSKSSHLEKAHKKGSLEKLCKLDYACKLASSDKPVRPPQLFKPLYSSHPQNEISPSKPFGPQELAKPPKHFNPKRSVSLGRAALLSNSELAETCQPYKKKHLVAKTYRPLVNDISEAKEKNTQNLHVSSKVKSSSRSFRKLDSRNNAYGDHVNDSDTMKYYSEVDSDKVIIITCDRGYNQVTSEVTLND

SEQ ID NO: 9005 - protein, 548 aa, Homo sapiens
MRVLCAFPEAMPSSNSRPPACLAPGALYLALLLHLSLSSQAGDRRPLPVDRAAGLKEKTLILLDVSTKNPVRTVNENFLSLQLDPSIIHDGWLDFLSSKRLVTLARGLSPAFLRFGGKRTDFLQFQNLRNPAKSRGGPGPDYYLKNYEDDIVRSDVALDKQKGCKIAQHPDVMLELQREKAAQMHLVLLKEQFSNTYSNLILTARSLDKLYNFADCSGLHLIFALNALRRNPNNSWNSSSALSLLKYSASKKYNISWELGNEPNNYRTMHGRAVNGSQLGKDYIQLKSLLQPIRIYSRASLYGPNIGRPRKNVIALLDGFMKVAGSTVDAVTWQHCYIDGRVVKVMDFLKTRLLDTLSDQIRKIQKVVNTYTPGKKIWLEGVVTTSAGGTNNLSDSYAAGFLWLNTLGMLANQGIDVVIRHSFFDHGYNHLVDQNFNPLPDYWLSLLYKRLIGPKVLAVHVAGLQRKPRPGRVIRDKLRIYAHCTNHHNHNYVRGSITLFIINLHRSRKKIKLAGTLRDKLVHQYLLQPYGQEGLKSKTQRCQYCGII

SEQ ID NO: 9006 - protein, 534 aa, Homo sapiens
MRVLCAFPEAMPSSNSRPPACLAPGALYLALLLHLSLSSQAGDRRPLPVDRAAGLKEKTLILLDVSTKNPVRTVNENFLSLQLDPSIIHDGWLDFLSSKRLVTLARGLSPAFLRFGGKRTDFLQFQNLRNPAKSRGGPGPDYYLKNYEDDIVRSDVALDKQKGCKIAQHPDVMLELQREKAAQMHLVLLKEQFSNTYSNLILTEPNNYRTMHGRAVNGSQLGKDYIQLKSLLQPIRIYSRASLYGPNIGRPRKNVIALLDGFMKVAGSTVDAVTWQHCYIDGRVVKVMDFLKTRLLDTLSDQIRKIQKVVNTYTPGKKIWLEGVVTTSAGGTNNLSDSYAAGFLWLNTLGMLANQGIDVVIRHSFFDHGYNHLVDQNFNPLPDYWLSLLYKRLIGPKVLAVHVAGLQRKPRPGRVIRDKLRIYAHCTNHHNHNYVRGSITLFIINLHRSRKKIKLAGTLRDKLVHQYLLQPYGQEGLKSKSVQLNGQPLVMVDDGTLPELKPRPLRAGRTLVIPPVTMGFYVVKNVNALACRYR

SEQ ID NO: 9007 - protein, 592 aa, Homo sapiens
MRVLCAFPEAMPSSNSRPPACLAPGALYLALLLHLSLSSQAGDRRPLPVDRAAGLKEKTLILLDVSTKNPVRTVNENFLSLQLDPSIIHDGWLDFLSSKRLVTLARGLSPAFLRFGGKRTDFLQFQNLRNPAKSRGGPGPDYYLKNYEDDIVRSDVALDKQKGCKIAQHPDVMLELQREKAAQMHLVLLKEQFSNTYSNLILTARSLDKLYNFADCSGLHLIFALNALRRNPNNSWNSSSALSLLKYSASKKYNISWELGNEPNNYRTMHGRAVNGSQLGKDYIQLKSLLQPIRIYSRASLYGPNIGRPRKNVIALLDGFMKVAGSTVDAVTWQHCYIDGRVVKVMDFLKTRLLDTLSDQIRKIQKVVNTYTPGKKIWLEGVVTTSAGGTNNLSDSYAAGFLWLNTLGMLANQGIDVVIRHSFFDHGYNHLVDQNFNPLPDYWLSLLYKRLIGPKVLAVHVAGLQRKPRPGRVIRDKLRIYAHCTNHHNHNYVRGSITLFIINLHRSRKKIKLAGTLRDKLVHQYLLQPYGQEGLKSKSVQLNGQPLVMVDDGTLPELKPRPLRAGRTLVIPPVTMGFYVVKNVNALACRYR

SEQ ID NO: 9008 - protein, 1113 aa, Homo sapiens
MFRRSLNRFCAGEEKRVGTRTVFVGNHPVSETEAYIAQRFCDNRIVSSKYTLWNFLPKNLFEQFRRIANFYFLIIFLVQVTVDTPTSPVTSGLPLFFVITVTAIKQGYEDCLRHRADNEVNKSTVYIIENAKRVRKESEKIKVGDVVEVQADETFPCDLILLSSCTTDGTCYVTTASLDGESNCKTHYAVRDTIALCTAESIDTLRAAIECEQPQPDLYKFVGRINIYSNSLEAVARSLGPENLLLKGATLKNTEKIYGVAVYTGMETKMALNYQGKSQKRSAVEKSINAFLIVYLFILLTKAAVCTTLKYVWQSTPYNDEPWYNQKTQKERETLKVLKMFTDFLSFMVLFNFIIPVSMYVTVEMQKFLGSFFISWDKDFYDEEINEGALVNTSDLNEELGQVDYVFTDKTGTLTENSMEFIECCIDGHKYKGVTQEVDGLSQTDGTLTYFDKVDKNREELFLRALCLCHTVEIKTNDAVDGATESAELTYISSSPDEIALVKGAKRYGFTFLGNRNGYMRVENQRKEIEEYELLHTLNFDAVRRRMSVIVKTQEGDILLFCKGADSAVFPRVQNHEIELTKVHVERNAMDGYRTLCVAFKEIAPDDYERINRQLIEAKMALQDREEKMEKVFDDIETNMNLIGATAVEDKLQDQAAETIEALHAAGLKVWVLTGDKMETAKSTCYACRLFQTNTELLELTTKTIEESERKEDRLHELLIEYRKKLLHEFPKSTRSFKKAWTEHQEYGLIIDGSTLSLILNSSQDSSSNNYKSIFLQICMKCTAVLCCRMAPLQKAQIVRMVKNLKGSPITLSIGDGANDVSMILESHVGIGKEGRQAARNSDYSVPKFKHLKKLLLAHGHLYYVRIAHLVQYFFYKNLCFILPQFLYQFFCGFSQQPLYDAAYLTMYNICFTSLPILAYSLLEQHINIDTLTSDPRLYMKISGNAMLQLGPFLYWTFLAAFEGTVFFFGTYFLFQTASLEENGKVYGNWTFGTIVFTVLVFTVTLKLALDTRFWTWINHFVIWGSLAFYVFFSFFWGGIIWPFLKQQRMYFVFAQMLSSVSTWLAIILLIFISLFPEILLIVLKNVRRRSARNPNLELPMLLSYKHTDSGYS

SEQ ID NO: 9009 - protein, 919 aa, Homo sapiens
MGLFRGFVFLLVLCLLHQSNTSFIKLNNNGFEDIVIVIDPSVPEDEKIIEQIEDMVTTASTYLFEATEKRFFFKNVSILIPENWKENPQYKRPKHENHKHADVIVAPPTLPGRDEPYTKQFTECGEKGEYIHFTPDLLLGKKQNEYGPPGKLFVHEWAHLRWGVFDEYNEDQPFYRAKSKKIEATRCSAGISGRNRVYKCQGGSCLSRACRIDSTTKLYGKDCQFFPDKVQTEKASIMFMQSIDSVVEFCNEKTHNQEAPSLQNIKCNFRSTWEVISNSEDFKNTIPMVTPPPPPVFSLLKISQRIVCLVLDKSGSMGGKDRLNRMNQAAKHFLLQTVENGSWVGMVHFDSTATIVNKLIQIKSSDERNTLMAGLPTYPLGGTSICSGIKYAFQVIGELHSQLDGSEVLLLTDGEDNTASSCIDEVKQSGAIVHFIALGRAADEAVIEMSKITGGSHFYVSDEAQNNGLIDAFGALTSGNTDLSQKSLQLESKGLTLNSNAWMNDTVIIDSTVGKDTFFLITWNSLPPSISLWDPSGTIMENFTVDATSKMAYLSIPGTAKVGTWAYNLQAKANPETLTITVTSRAANSSVPPITVNAKMNKDVNSFPSPMIVYAEILQGYVPVLGANVTAFIESQNGHTEVLELLDNGAGADSFKNDGVYSRYFTAYTENGRYSLKVRAHGGANTARLKLRPPLNRAAYIPGWVVNGEIEANPPRPEIDEDTQTTLEDFSRTASGGAFVVSQVPSLPLPDQYPPSQITDLDATVHEDKIILTWTAPGDNFDVGKVQRYIIRISASILDLRDSFDDALQVNTTDLSPKEANSKESFAFKPENISEENATHIFIAIKSIDKSNLTSKVSNIAQVTLFIPQANPDDIDPTPTPTPTPTPDKSHNSGVNISTLVLSVIGSVVIVNFILSTTI

SEQ ID NO: 9010 - protein, 943 aa, Homo sapiens
MTQRSIAGPICNLKFVTLLVALSSELPFLGAGVQLQDNGYNGLLIAINPQVPENQNLISNIKEMITEASFYLFNATKRRVFFRNIKILIPATWKANNNSKIKQESYEKANVIVTDWYGAHGDDPYTLQYRGCGKEGKYIHFTPNFLLNDNLTAGYGSRGRVFVHEWAHLRWGVFDEYNNDKPFYINGQNQIKVTRCSSDITGIFVCEKGPCPQENCIISKLFKEGCTFIYNSTQNATASIMFMQSLSSVVEFCNASTHNQEAPNLQNQMCSLRSAWDVITDSADFHHSFPMNGTELPPPPTFSLVQAGDKVVCLVLDVSSKMAEADRLLQLQQAAEFYLMQIVEIHTFVGIASFDSKGEIRAQLHQINSNDDRKLLVSYLPTTVSAKTDISICSGLKKGFEVVEKLNGKAYGSVMILVTSGDDKLLGNCLPTVLSSGSTIHSIALGSSAAPNLEELSRLTGGLKFFVPDISNSNSMIDAFSRISSGTGDIFQQHIQLESTGENVKPHHQLKNTVTVDNTVGNDTMFLVTWQASGPPEIILFDPDGRKYYTNNFITNLTFRTASLWIPGTAKPGHWTYTLNNTHHSLQALKVTVTSRASNSAVPPATVEAFVERDSLHFPHPVMIYANVKQGFYPILNATVTATVEPETGDPVTLRLLDDGAGADVIKNDGIYSRYFFSFAANGRYSLKVHVNHSPSISTPAHSIPGSHAMYVPGYTANGNIQMNAPRKSVGRNEEERKWGFSRVSSGGSFSVLGVPAGPHPDVFPPCKIIDLEAVKVEEELTLSWTAPGEDFDQGQATSYEIRMSKSLQNIQDDFNNAILVNTSKRNPQQAGIREIFTFSPQISTNGPEHQPNGETHESHRIYVAIRAMDRNSLQSAVSNIAQAPLFIPPNSDPVPARDYLILKGVLTAMGLIGIICLIIVVTHHTLSRKKRADKKENGTKLL

SEQ ID NO: 9011 - protein, 591 aa, Homo sapiens
MEKAVNDGSHSEELFCHLKTISEKEDLPRCTSESHLSCLKQDILNEKTELEATLKEAELVTHSVELLLPLFKDTIEKINFENANLSALNLKISEQKEILIKELDTFKSVKLALEHLLRKRDYKQTGDNLSSMLLENLTDNESENTNLKKKVFEKEAHIQELSCLFQSEKANTLKANRFSQSVKVVHERLQIQIHKREAENDKLKEYVKSLETKIAKWNLQSRMNKNEAIVMKEASRQKTVALKKASKVYKQRLDHFTGAIEKLTSQIRDQEAKLSETISASNAWKSHYEKIVIEKTELEVQIETMKKQIINLLEDLKKMEDHGKNSCEEILRKVHSIEYENETLNLENTKLKTTLAALKDEVVSVENELSELQEVEKKQKTLIEMYKTQVQKLQEAAEIVKSRCENLLHKNNQITKTKNKNVEKVDGNHNLLTKLSLEEENCLIQLKCENLQQKLEQMDAENKELEKKLANQEECLKHSNLKFKEKSAEYTALARQLEAALEEGRQKVAEEIEKMSSRESALQIKILDLETELRKKNEEQNQLVCKMNSKAQHQEVCLKEVQNSLEKSENQNESIKNYLQFLKTSYVTMFE

SEQ ID NO: 9012 - protein, 467 aa, Homo sapiens
MKNQNGTFKDWANANVSRQIEDTVLYGYYTLYSVILFCVFFWIPFVYFYYEEKDDDDTSKCTQIKTALKYTLGFVVICALLLLVGAFVPLNVPNNKNSTEWEKVKSLFEELGSSHGLAALSFSISSLTLIGMLAAITYTAYGMSALPLNLIKGTRSAAYERLENTEDIEEVEQHIQTIKSKSKDGRPLPARDKRALKQFEERLRTLKKRERHLEFIENSWWTKFCGALRPLKIVWGIFFILVALLFVISLFLSNLDKALHSAGIDSGFIIFGANLSNPLNMLLPLLQTVFPLDYILITIIIMYFIFTSMAGIRNIGIWFFWIRLYKIRRGRTRPQALLFLCMILLLIVLHTSYMIYSLAPQYVMYGSQNYLIETNITSDNHKGNSTLSVPKRCDADAPEDQCTVTRTYLFLHKFWFFSAAYYFGNWAFLGVFLIGLIVSCCKGKKSVIEGVDEDSDISDDEPSVYSA

SEQ ID NO: 9013 - protein, 1714 aa, Homo sapiens
MHLRAHRTRRGKVSPTAKTKSLLHFIVLCVAGVVVHAQEQGIDILHQLGLGGKDVRHSSPATAVPSASTPLPQGVHLTESGVIFKNDAYIETPFVKILPVNLGQPFTILTGLQSHRVNNAFLFSIRNKNRLQLGVQLLPKKLVVHIRGKQPAVFNYSVHDEQWHSFAITIRNQSVSMFVECGKKYFSTETIPEVQTFDSNSVFTLGSMNNNSIHFEGIVCQLDIIPSAEASADYCRYVKQQCRQADKYQPETSIPCTTLIPTKIPEHSPPPKLFAEKVLSEDTFTEGKSIPNIIKNDSETVYKRQEHQISRSQLSSLQSGNVSAVDLTNHGIQAKEMITEEDTQTNFSLSVTTHRISEAKMNTKEKFSSLLNMSDNITQHDDRVTGLSLFKKMPSILPQIKQDTITNLKKAITANLHTNELMEMQPILNTSLHRVTNEPSVDNHLDLRKEGEFYPDATYPIENSYETELYDYYYYEDLNTMLEMEYLRGPKGDTGPPGPPGPAGIPGPSGKRGPRGIPGPHGNPGLPGLPGPKGPKGDPGFSPGQPVPGEKGDQGLSGLMGPPGMQGDKGLKGHPGLPGLPGEQGIPGFAGNIGSPGYPGRQGLAGPEGNPGPKGAQGFIGSPGEAGQLGPEGERGIPGIRGKKGFKGRQGFPGDFGDRGPAGLDGSPGLVGGTGPPGFPGLRGSVGPVGPIGPAGIPGPMGLSGNKGLPGIKGDKGEQGTAGELGEPGYPGDKGAVGLPGPPGMRGKSGPSGQTGDPGLQGPSGPPGPEGFPGDIGIPGQNGPEGPKGLLGNRGPPGPPGLKGTQGEEGPIGAFGELGPRGKPGQKGYAGEPGPEGLKGEVGDQGNIGKIGETGPVGLPGEVGMTGSIGEKGERGSPGPLGPQGEKGVMGYPGPPGVPGPIGPLGLPGHVGARGPPGSQGPKGQRGSRGPDGLLGEQGIQGAKGEKGDQGKRGPHGLIGKTGNPGERGFQGKPGLQGLPGSTGDRGLPGEPGLRGLQGDVGPPGEMGMEGPPGTEGESGLQGEPGAKGDVGTAGSVGGTGEPGLRGEPGAPGEEGLQGKDGLKGVPGGRGLPGEDGEKGEMGLPGIIGPLGRSGQTGLPGPEGIVGIPGQRGRPGKKGDKGQIGPTGEVGSRGPPGKIGKSGPKGARGTRGAVGHLGLMGPDGEPGIPGYRGHQGQPGPSGLPGPKGEKGYPGEDSTVLGPPGPRGEPGPVGDQGERGEPGAEGYKGHVGVPGLRGATGQQGPPGEPGDQGEQGLKGERGSEGNKGKKGAPGPSGKPGIPGLQGLLGPKGIQGYHGADGISGNPGKIGPPGKQGLPGIRGGPGRTGLAGAPGPPGVKGSSGLPGSPGIQGPKGEQGLPGQPGIQGKRGHRGAQGDQGPCGDPGLKGQPGEYGVQGLTGFQGFPGPKGPEGDAGIVGISGPKGPIGHRGNTGPLGREGIIGPTGRTGPRGEKGFRGETGPQGPRGQPGPPGPPGAPGPRKQMDINAAIQALIESNTALQMESYQNTEVTLIDHSEEIFKTLNYLSNLLHSIKNPLGTRDNPARICKDLLNCEQKVSDGKYWIDPNLGCPSDAIEVFCNFSAGGQTCLPPVSVTKLEFGVGKVQMNFLHLLSSEATHIITIHCLNTPRWTSTQTSGPGLPIGFKGWNGQIFKVNTLLEPKVLSDDCKIQDGSWHKATFLFHTQEPNQLPVIEVQKLPHLKTERKYYIDSSSVCFL

SEQ ID NO: 9014 - protein, 860 aa, Homo sapiens
MAEANPRRGKMRFRRNAASFPGNLHLVLVLRPTSFLQRTFTDIGFWFSQEDFMLKLPVVMLSSVSDLLTYIDDKQLTPELGGTLQYCHSEWIIFRNAIENFALTVKEMAQMLQSFGTELAETELPDDIPSIEEILAIRAERYHLLKNDITAVTKEGKILLTNLEVPDTEGAVSSRLECHRQISGDWQTINKLLTQVHDMETAFDGFWEKHQLKMEQYLQLWKFEQDFQQLVTEVEFLLNQQAELADVTGTIAQVKQKIKKLENLDENSQELLSKAQFVILHGHKLAANHHYALDLICQRCNELRYLSDILVNEIKAKRIQLSRTFKMHKLLQQARQCCDEGECLLANQEIDKFQSKEDAQKALQDIENFLEMALPFINYEPETLQYEFDVILSPELKVQMKTIQLKLENIRSIFENQQAGFRNLADKHVRPIQFVVPTPENLVTSGTPFFSSKQGKKTWRQNQSNLKIEVVPDCQEKRSSGPSSSLDNGNSLDVLKNHVLNELIQTERVYVRELYTVLLGYRAEMDNPEMFDLMPPLLRNKKDILFGNMAEIYEFHNDIFLSSLENCAHAPERVGPCFLERKDDFQMYAKYCQNKPRSETIWRKYSECAFFQECQRKLKHRLRLDSYLLKPVQRITKYQLLLKELLKYSKDCEGSALLKKALDAMLDLLKSVNDSMHQIAINGYIGNLNELGKMIMQGGFSVWIGHKKGATKMKDLARFKPMQRHLFLYEKAIVFCKRRVESGEGSDRYPSYSFKHCWKMDEVGITEYVKGDNRKFEIWYGEKEEVYIVQASNVDVKMTWLKEIRNILLKQQELLTVKKRKQQDQLTERDKFQISLQQNDEDLCRRWLSYIDEATMSNGK

SEQ ID NO: 9015 - protein, 470 aa, Homo sapiens
MEFAAENEGKSGGGLHSVAEGVRLSPEPGREGVRDLAGAEEFGGGEEGTGLTGIKEIGDGEEGSGQRPEEIPMDLTVVKQEIIDWPGTEGRLAGQWVEQEVEDRPEVKDENAGVLEVKQETDSSLVVKEAKVGEPEVKEEKVKEEVMDWSEVKEEKDNLEIKQEEKFVGQCIKEELMHGECVKEEKDFLKKEIVDDTKVKEEPPINHPVGCKRKLAMSRCETCGTEEAKYRCPRCMRYSCSLPCVKKHKAELTCNGVRDKTAYISIQQFTEMNLLSDYRFLEDVARTADHISRDAFLKRPISNKYMYFMKNRARRQGINLKLLPNGFTKRKENSTFFDKKKQQFCWHVKLQFPQSQAEYIEKRVPDDKTINEILKPYIDPEKSDPVIRQRLKAYIRSQTGVQILMKIEYMQQNLVRYYELDPYKSLLDNLRNKVIIEYPTLHVVLKGSNNDMKVLHQVKSESTKNVGNEN

SEQ ID NO: 9016 - protein, 581 aa, Homo sapiens
MAASGRGLCKAVAASPFPAWRRDNTEARGGLKPEYDAVVIGAGHNGLVAAAYLQRLGVNTAVFERRHVIGGAAVTEEIIPGFKFSRASYLLSLLRPQIYTDLELKKHGLRLHLRNPYSFTPMLEEGAGSKVPRCLLLGTDMAENQKQIAQFSQKDAQVFPKYEEFMHRLALAIDPLLDAAPVDMAAFQHGSLLQRMRSLSTLKPLLKAGRILGAQLPRYYEVLTAPITKVLDQWFESEPLKATLATDAVIGAMTSPHTPGSGYVLLHHVMGGLEGMQGAWGYVQGGMGALSDAIASSATTHGASIFTEKTVAKVQVNSEGCVQGVVLEDGTEVRSKMVLSNTSPQITFLKLTPQEWLPEEFLERISQLDTRSPVTKINVAVDRLPSFLAAPNAPRGQPLPHHQCSIHLNCEDTLLLHQAFEDAMDGLPSHRPVIELCIPSSLDPTLAPPGCHVVSLFTQYMPYTLAGGKAWDEQERDAYADRVFDCIEVYAPGFKDSVVGRDILTPPDLERIFGLPGGNIFHCAMSLDQLYFARPVPLHSGYRCPLQGLYLCGSGAHPGGGVMGAAGRNAAHVAFRDLKSM

SEQ ID NO: 9017 - protein, 925 aa, Homo sapiens
MAEANPRRGKMRFRRNAASFPGNLHLVLVLRPTSFLQRTFTDIGFWFSQEDFMLKLPVVMLSSVSDLLTYIDDKQLTPELGGTLQYCHSEWIIFRNAIENFALTVKEMAQMLQSFGTELAETELPDDIPSIEEILAIRAERYHLLKNDITAVTKEGKILLTNLEVPDTEGAVSSRLECHRQISGDWQTINKLLTQVHDMETAFDGFWEKHQLKMEQYLQLWKFEQDFQQLVTEVEFLLNQQAELADVTGTIAQVKQKIKKLENLDENSQELLSKAQFVILHGHKLAANHHYALDLICQRCNELRYLSDILVNEIKAKRIQLSRTFKMHKLLQQARQCCDEGECLLANQEIDKFQSKEDAQKALQDIENFLEMALPFINYEPETLQYEFDVILSPELKVQMKTIQLKLENIRSIFENQQAGFRNLADKHVRPIQFVVPTPENLVTSGTPFFSSKQGKKTWRQNQSNLKIEVVPDCQEKRSSGPSSSLDNGNSLDVLKNHVLNELIQTERVYVRELYTVLLGYRAEMDNPEMFDLMPPLLRNKKDILFGNMAEIYEFHNDIFLSSLENCAHAPERVGPCFLERKDDFQMYAKYCQNKPRSETIWRKYSECAFFQECQRKLKHRLRLDSYLLKPVQRITKYQLLLKELLKYSKDCEGSALLKKALDAMLDLLKSVNDSMHQIAINGYIGNLNELGKMIMQGGFSVWIGHKKGATKMKDLARFKPMQRHLFLYEKAIVFCKRRVESGEGSDRYPSYSFKHCWKMDEVGITEYVKGDNRKFEIWYGEKEEVYIVQASNVDVKMTWLKEIRNILLKQQELLTVKKRKQQDQLTERDKFQISLQQNDEKQQGAFISTEETELEHTSTVVEVCEAIASVQAEANTVWTEASQSAEISEEPAEWSSNYFYPTYDENEEENRPLMRPVSEMALLY

SEQ ID NO: 9018 - protein, 553 aa, Homo sapiens
MADPEVVVSSCSSHEEENRCNFNQQTSPSEELLLEDQMRRKLKFFFMNPCEKFWARGRKPWKLAIQILKIAMVTIQLVLFGLSNQMVVAFKEENTIAFKHLFLKGYMDRMDDTYAVYTQSDVYDQLIFAVNQYLQLYNVSVGNHAYENKGTKQSAMAICQHFYKRGNIYPGNDTFDIDPEIETECFFVEPDEPFHIGTPAENKLNLTLDFHRLLTVELQFKLKAINLQTVRHQELPDCYDFTLTITFDNKAHSGRIKISLDNDISIRECKDWHVSGSIQKNTHYMMIFDAFVILTCLVSLILCIRSVIRGLQLQQEFVNFFLLHYKKEVSVSDQMEFVNGWYIMIIISDILTIIGSILKMEIQAKSLTSYDVCSILLGTSTMLVWLGVIRYLGFFAKYNLLILTLQAALPNVIRFCCCAAMIYLGYCFCGWIVLGPYHDKFRSLNMVSECLFSLINGDDMFATFAKMQQKSYLVWLFSRIYLYSFISLFIYMILSLFIALITDTYETIKQYQQDGFPETELRTFISECKDLPNSGKYRLEDDPPVSLFCCCKK

SEQ ID NO: 9019 - protein, 645 aa, Homo sapiens
MAPSADPGMSRMLPFLLLLWFLPITEGSQRAEPMFTAVTNSVLPPDYDSNPTQLNYGVAVTDVDHDGDFEIVVAGYNGPNLVLKYDRAQKRLVNIAVDERSSPYYALRDRQGNAIGVTACDIDGDGREEIYFLNTNNAFSGVATYTDKLFKFRNNRWEDILSDEVNVARGVASLFAGRSVACVDRKGSGRYSIYIANYAYGNVGPDALIEMDPEASDLSRGILALRDVAAEAGVSKYTGGRGVSVGPILSSSASDIFCDNENGPNFLFHNRGDGTFVDAAASAGVDDPHQHGRGVALADFNRDGKVDIVYGNWNGPHRLYLQMSTHGKVRFRDIASPKFSMPSPVRTVITADFDNDQELEIFFNNIAYRSSSANRLFRVIRREHGDPLIEELNPGDALEPEGRGTGGVVTDFDGDGMLDLILSHGESMAQPLSVFRGNQGFNNNWLRVVPRTRFGAFARGAKVVLYTKKSGAHLRIIDGGSGYLCEMEPVAHFGLGKDEASSVEVTWPDGKMVSRNVASGEMNSVLEILYPRDEDTLQDPAPLECGQGFSQQENGHCMDTNECIQFPFVCPRDKPVCVNTYGSYRCRTNKKCSRGYEPNEDGTACVAQVAFLGGYSSAASRISEPLSRASYLSLGLGLCLQLYAL

SEQ ID NO: 9020 - protein, 661 aa, Homo sapiens
MAPSADPGMSRMLPFLLLLWFLPITEGSQRAEPMFTAVTNSVLPPDYDSNPTQLNYGVAVTDVDHDGDFEIVVAGYNGPNLVLKYDRAQKRLVNIAVDERSSPYYALRDRQGNAIGVTACDIDGDGREEIYFLNTNNAFSGVATYTDKLFKFRNNRWEDILSDEVNVARGVASLFAGRSVACVDRKGSGRYSIYIANYAYGNVGPDALIEMDPEASDLSRGILALRDVAAEAGVSKYTGGRGVSVGPILSSSASDIFCDNENGPNFLFHNRGDGTFVDAAASAGVDDPHQHGRGVALADFNRDGKVDIVYGNWNGPHRLYLQMSTHGKVRFRDIASPKFSMPSPVRTVITADFDNDQELEIFFNNIAYRSSSANRLFRVIRREHGDPLIEELNPGDALEPEGRGTGGVVTDFDGDGMLDLILSHGESMAQPLSVFRGNQGFNNNWLRVVPRTRFGAFARGAKVVLYTKKSGAHLRIIDGGSGYLCEMEPVAHFGLGKDEASSVEVTWPDGKMVSRNVASGEMNSVLEILYPRDEDTLQDPAPLECGQGFSQQENGHCMDTNECIQFPFVCPRDKPVCVNTYGSYRCRTNKKCSRGYEPNEDGTACVGTLGQSPGPRPTTPTAAAATAAAAAAAGAATAAPVLVDGDLNLGSVVKESCEPSC

SEQ ID NO: 9021 - protein, 1522 aa, Homo sapiens
MKAVRNLLIYIFSTYLLVMFGFNAAQDFWCSTLVKGVIYGSYSVSEMFPKNFTNCTWTLENPDPTKYSIYLKFSKKDLSCSNFSLLAYQFDHFSHEKIKDLLRKNHSIMQLCNSKNAFVFLQYDKNFIQIRRVFPTNFPGLQKKGEEDQKSFFEFLVLNKVSPSQFGCHVLCTWLESCLKSENGRTESCGIMYTKCTCPQHLGEWGIDDQSLILLNNVVLPLNEQTEGCLTQELQTTQVCNLTREAKRPPKEEFGMMGDHTIKSQRPRSVHEKRVPQEQADAAKFMAQTGESGVEEWSQWSTCSVTCGQGSQVRTRTCVSPYGTHCSGPLRESRVCNNTALCPVHGVWEEWSPWSLCSFTCGRGQRTRTRSCTPPQYGGRPCEGPETHHKPCNIALCPVDGQWQEWSSWSQCSVTCSNGTQQRSRQCTAAAHGGSECRGPWAESRECYNPECTANGQWNQWGHWSGCSKSCDGGWERRIRTCQGAVITGQQCEGTGEEVRRCNEQRCPAPYEICPEDYLMSMVWKRTPAGDLAFNQCPLNATGTTSRRCSLSLHGVAFWEQPSFARCISNEYRHLQHSIKEHLAKGQRMLAGDGMSQVTKTLLDLTQRKNFYAGDLLMSVEILRNVTDTFKRASYIPASDGVQNFFQIVSNLLDEENKEKWEDAQQIYPGSIELMQVIEDFIHIVGMGMMDFQNSYLMTGNVVASIQKLPAASVLTDINFPMKGRKGMVDWARNSEDRVVIPKSIFTPVSSKELDESSVFVLGAVLYKNLDLILPTLRNYTVINSKIIVVTIRPEPKTTDSFLEIELAHLANGTLNPYCVLWDDSKTNESLGTWSTQGCKTVLTDASHTKCLCDRLSTFAILAQQPREIIMESSGTPSVTLIVGSGLSCLALITLAVVYAALWRYIRSERSIILINFCLSIISSNILILVGQTQTHNKSICTTTTAFLHFFFLASFCWVLTEAWQSYMAVTGKIRTRLIRKRFLCLGWGLPALVVATSVGFTRTKGYGTDHYCWLSLEGGLLYAFVGPAAAVVLVNMVIGILVFNKLVSRDGILDKKLKHRAGQMSEPHSGLTLKCAKCGVVSTTALSATTASNAMASLWSSCVVLPLLALTWMSAVLAMTDKRSILFQILFAVFDSLQGFVIVMVHCILRREVQDAFRCRLRNCQDPINADSSSSFPNGHAQIMTDFEKDVDIACRSVLHKDIGPCRAATITGTLSRISLNDDEEEKGTNPEGLSYSTLPGNVISKVIIQQPTGLHMPMSMNELSNPCLKKENSELRRTVYLCTDDNLRGADMDIVHPQERMMESDYIVMPRSSVNNQPSMKEESKMNIGMETLPHERLLHYKVNPEFNMNPPVMDQFNMNLEQHLAPQEHMQNLPFEPRTAVKNFMASELDDNAGLSRSETGSTISMSSLERRKSRYSDLDFEKVMHTRKRHMELFQELNQKFQTLDRFRDIPNTSSMENPAPNKNPWDTFKNPSEYPHYTTINVLDTEAKDALELRPAEWEKCLNLPLDVQEGDFQTEV

SEQ ID NO: 9022 - protein, 566 aa, Homo sapiens
MARQPYRFPQARIPERGSGVFRLTVRNAMAHRDSEMKEECLREDLKFYFMSPCEKYRARRQIPWKLGLQILKIVMVTTQLVRFGLSNQLVVAFKEDNTVAFKHLFLKGYSGTDEDDYSCSVYTQEDAYESIFFAINQYHQLKDITLGTLGYGENEDNRIGLKVCKQHYKKGTMFPSNETLNIDNDVELDCVQLDLQDLSKKPPDWKNSSFFRLEFYRLLQVEISFHLKGIDLQTIHSRELPDCYVFQNTIIFDNKAHSGKIKIYFDSDAKIEECKDLNIFGSTQKNAQYVLVFDAFVIVICLASLILCTRSIVLALRLRKRFLNFFLEKYKRPVCDTDQWEFINGWYVLVIISDLMTIIGSILKMEIKAKNLTNYDLCSIFLGTSTLLVWVGVIRYLGYFQAYNVLILTMQASLPKVLRFCACAGMIYLGYTFCGWIVLGPYHDKFENLNTVAECLFSLVNGDDMFATFAQIQQKSILVWLFSRLYLYSFISLFIYMILSLFIALITDSYDTIKKFQQNGFPETDLQEFLKECSSKEEYQKESSAFLSCICCRRRKRSDDHLIPIS

SEQ ID NO: 9023 - protein, 353 aa, Homo sapiens
MNECHYDKHMDFFYNRSNTDTVDDWTGTKLVIVLCVGTFFCLFIFFSNSLVIAAVIKNRKFHFPFYYLLANLAAADFFAGIAYVFLMFNTGPVSKTLTVNRWFLRQGLLDSSLTASLTNLLVIAVERHMSIMRMRVHSNLTKKRVTLLILLVWAIAIFMGAVPTLGWNCLCNISACSSLAPIYSRSYLVFWTVSNLMAFLIMVVVYLRIYVYVKRKTNVLSPHTSGSISRRRTPMKLMKTVMTVLGAFVVCWTPGLVVLLLDGLNCRQCGVQHVKRWFLLLALLNSVVNPIIYSYKDEDMYGTMKKMICCFSQENPERRPSRIPSTVLSRSDTGSQYIEDSISQGAVCNKSTS

SEQ ID NO: 9024 - protein, 622 aa, Homo sapiens
MTENGSHQLIVKARFNFKQTNEDELSVCKGDIIYVTRVEEGGWWEGTLNGRTGWFPSNYVREIKSSERPLSPKAVKGFETAPLTKNYYTVVLQNILDTEKEYAKELQSLLVTYLRPLQSNNNLSTVEVTSLLGNFEEVCTFQQTLCQALEECSKFPENQHKVGGCLLSLMPHFKSMYLAYCANHPSAVNVLTQHSDELEQFMENQGASSPGILILTTNLSKPFMRLEKYVTLLQELERHMEDTHPDHQDILKAIVAFKTLMGQCQDLRKRKQLELQILSEPIQAWEGEDIKNLGNVIFMSQVMVQYGACEEKEERYLMLFSNVLIMLSASPRMSGFIYQGKIPIAGTVVTRLDEIEGNDCTFEITGNTVERIVVHCNNNQDFQEWLEQLNRLIRGPASCSSLSKTSSSSCSAHSSFSSTGQPRGPLEPPQIIKPWSLSCLRPAPPLRPSAALGYKERMSYILKESSKSPKTMKKFLHKRKTERKPSEEEYVIRKSTAALEEDAQILKVIEAYCTSANFQQGHGSSTRKDSIPQVLLPEEEKLIIEETRSNGQTIMEEKSLVDTVYALKDEVRELKQENKRMKQCLEEELKSRRDLEKLVRRLLKQTDECIRGESSSKTSILP

SEQ ID NO: 9025 - protein, 3165 aa, Homo sapiens
MTDKSIVILSLMVFHSSFINGKTCRRQLVEEWHPQPSSYVVNWTLTENICLDFYRDCWFLGVNTKIDTSGNQAVPQICPLQIQLGDILVISSEPSLQFPEINLMNVSETSFVGCVQNTTTEDQLLFGCRLKGMHTVNSKWLSVGTHYFITVMASGPSPCPLGLRLNVTVKQQFCQESLSSEFCSGHGKCLSEAWSKTYSCHCQPPFSGKYCQELDACSFKPCKNNGSCINKRENWDEQAYECVCHPPFTGKNCSEIIGQCQPHVCFHGNCSNITSNSFICECDEQFSGPFCEVSAKPCVSLLFWKRGICPNSSSAYTYECPKGSSSQNGETDVSEFSLVPCQNGTDCIKISNDVMCICSPIFTDLLCKSIQTSCESFPLRNNATCKKCEKDYPCSCISGFTEKNCEKAIDHCKLLSINCLNEEWCFNIIGRFKYVCIPGCTKNPCWFLKNVYLIHQHLCYCGVTFHGICQDKGPAQFEYVWQLGFAGSEGEKCQGVIDAYFFLAANCTEDATYVNDPEDNNSSCWFPHEGTKEICANGCSCLSEEDSQEYRYLCFLRWAGNMYLENTTDDQENECQHEAVCKDEINRPRCSCSLSYIGRLCVVNVDYCLGNHSISVHGLCLALSHNCNCSGLQRYERNICEIDTEDCKSASCKNGTTSTHLRGYFFRKCVPGFKGTQCEIDIDECASHPCKNGATCIDQPGNYFCQCVPPFKVVDGFSCLCNPGYVGIRCEQDIDDCILNACEHNSTCKDLHLSYQCVCLSDWEGNFCEQESNECKMNPCKNNSTCTDLYKSYRCECTSGWTGQNCSEEINECDSDPCMNGGLCHESTIPGQFVCLCPPLYTGQFCHQRYNLCDLLHNPCRNNSTCLALVDANQHCICREEFEGKNCEIDVKDCLFLSCQDYGDCEDMVNNFRCICRPGFSGSLCEIEINECSSEPCKNNGTCVDLTNRFFCNCEPEYHGPFCELDVNKCKISPCLDEENCVYRTDGYNCLCAPGYTGINCEINLDECLSEPCLHDGVCIDGINHYTCDCKSGFFGTHCETNANDCLSNPCLHGRCTELINEYPCSCDADGTSTQCKIKINDCTSIPCMNEGFCQKSAHGFTCICPRGYTGAYCEKSIDNCAEPELNSVICLNGGICVDGPGHTFDCRCLPGFSGQFCEININECSSSPCLHGADCEDHINGYVCKCQPGWSGHHCENELECIPNSCVHELCMENEPGSTCLCTPGFMTCSIGLLCGDEIRRITCLTPIFQRTDPISTQTYTIPPSETLVSSFPSIKATRIPAIMDTYPVDQGPKQTGIVKHDILPTTGLATLRISTPLESYLLQELIVTRELSAKHSLLSSADVSSSRFLNFGIRDPAQIVQDKTSVSHMPIRTSAATLGFFFPDRRARTPFIMSSLMSDFIFPTQSLLFENCQTVALSATPTTSVIRSIPGADIELNRQSLLSRGFLLIAASISATPVVSRGAQEDIEEYSADSLISRREHWRLLSPSMSPIFPAKVIISKQVTILNSSALHRFSTKAFNPSEYQAITEASSNQRLTNIKSQAADSLRELSQTCATCSMTEIKSSREFSDQVLHSKQSHFYETFWMNSAILASWYALMGAQTITSGHSFSSATEITPSVAFTEVPSLFPSKKSAKRTILSSSLEESITLSSNLDVNLCLDKTCLSIVPSQTISSDLMNSDLTSKMTTDELSVSENILKLLKIRQYGITMGPTEVLNQESLLDMEKSKGSHTLFKLHPSDSSLDFELNLQIYPDVTLKTYSEITHANDFKNNLPPLTGSVPDFSEVTTNVAFYTVSATPALSIQTSSSMSVIRPDWPYFTDYMTSLKKEVKTSSEWSKWELQPSVQYQEFPTASRHLPFTRSLTLSSLESILAPQRLMISDFSCVRYYGDSYLEFQNVALNPQNNISLEFQTFSSYGLLLYVKQDSNLVDGFFIQLFIENGTLKYHFYCPGEAKFKSINTTVRVDNGQKYTLLIRQELDPCNAELTILGRNTQICESINHVLGKPLPKSGSVFIGGFPDLHGKIQMPVPVKNFTGCIEVIEINNWRSFIPSKAVKNYHINNCRSQGFMLSPTASFVDASDVTQGVDTMWTSVSPSVAAPSVCQQDVCHNGGTCHAIFLSSGIVSFQCDCPLHFTGRFCEKDAGLFFPSFNGNSYLELPFLKFVLEKEHNRTVTIYLTIKTNSLNGTILYSNGNNCGKQFLHLFLVEGRPSVKYGCGNSQNILTVSANYSINTNAFTPITIRYTTPVGSPGVVCMIEMTADGKPPVQKKDTEISHASQAYFESMFLGHIPANVQIHKKAGPVYGFRGCILDLQVNNKEFFIIDEARHGKNIENCHVPWCAHHLCRNNGTCISDNENLFCECPRLYSGKLCQFASCENNPCGNGATCVPKSGTDIVCLCPYGRSGPLCTDAINITQPRFSGTDAFGYTSFLAYSRISDISFHYEFHLKFQLANNHSALQNNLIFFTGQKGHGLNGDDFLAVGLLNGSVVYSYNLGSGIASIRSEPLNLSLGVHTVHLGKFFQEGWLKVDDHKNKSIIAPGRLVGLNVFSQFYVGGYSEYTPDLLPNGADFKNGFQGCIFTLQVRTEKDGHFRGLGNPEGHPNAGRSVGQCHASPCSLMKCGNGGTCIESGTSVYCNCTTGWKGSFCTETVSTCDPEHDPPHHCSRGATCISLPHGYTCFCPLGTTGIYCEQALILIVILEKPKPAERKVKKEALSISDPSFRSNELSWMSFASFHVRKKTHIQLQFQPLAADGILFYAAQHLKAQSGDFLCISLVNSSVQLRYNLGDRTIILETLQKVTINGSTWHIIKAGRVGAEGYLDLDGINVTEKASTKMSSLDTNTDFYIGGVSSLNLVNPMAIENEPVGFQGCIRQVIINNQELQLTEFGAKGGSNVGDCDGTACGYNTCRNGGECTVNGTTFSCRCLPDWAGNTCNQSVSCLNNLCLHQSLCIPDQSFSYSCLCTLGWVGRYCENKTSFSTAKFMGNSYIKYIDPNYRMRNLQFTTISLNFSTTKTEGLIVWMGIAQNEENDFLAIGLHNQTLKIAVNLGERISVPMSYNNGTFCCNKWHHVVVIQNQTLIKAYINNSLILSEDIDPHKNFVALNYDGICYLGGFEYGRKVNIVTQEIFKTNFVGKIKDVVFFQEPKNIELIKLEGYNVYDGDEQNEVT

SEQ ID NO: 9026 - protein, 147 aa, Homo sapiens
MGTPASVVSEPPPWQAPIEARGRKQASANIFQDAELLQIQALFQRSGDQLAEERAQIIWECAGDHRVAEALKRLRRKRPPRQKPLGHSLHHCSRLRILEPHSALANPQSATETASSEQYLHSRKKSARIRRNWRKSGPTSYLHQIRH

SEQ ID NO: 9027 - protein, 240 aa, Homo sapiens
MIETYNQTSPRSAATGLPISMKIFMYLLTVFLITQMIGSALFAVYLHRRLDKIEDERNLHEDFVFMKTIQRCNTGERSLSLLNCEEIKSQFEGFVKDIMLNKEETKKENSFEMQKVLQWAEKGYYTMSNNLVTLENGKQLTVKRQGLYYIYAQVTFCSNREASSQAPFIASLCLKSPGRFERILLRAANTHSSAKPCGQQSIHLGGVFELQPGASVFVNVTDPSQVSHGTGFTSFGLLKL

SEQ ID NO: 9028 - protein, 261 aa, Homo sapiens
MIETYNQTSPRSAATGLPISMKIFMYLLTVFLITQMIGSALFAVYLHRRLDKIEDERNLHEDFVFMKTIQRCNTGERSLSLLNCEEIKSQFEGFVKDIMLNKEETKKENSFEMQKGDQNPQIAAHVISEASSKTTSVLQWAEKGYYTMSNNLVTLENGKQLTVKRQGLYYIYAQVTFCSNREASSQAPFIASLCLKSPGRFERILLRAANTHSSAKPCGQQSIHLGGVFELQPGASVFVNVTDPSQVSHGTGFTSFGLLKL

SEQ ID NO: 9029 - protein, 479 aa, Homo sapiens
MDETSPLVSPERAQPPDYTFPSGSGAHFPQVPGGAVRVAAAAGSGPSPPGSPGHDRERQPLLDRARGAAAQGQTQTVAAQAQALAAQAAAAAHAAQAHRERNEFPEDPEFEAVVRQAELAIERCIFPERIYQGSSGSYFVKDPQGRIIAVFKPKNEEPYGHLNPKWTKWLQKLCCPCCFGRDCLVLNQGYLSEAGASLVDQKLELNIVPRTKVVYLASETFNYSAIDRVKSRGKRLALEKVPKVGQRFNRIGLPPKVGSFQLFVEGYKDADYWLRRFEAEPLPENTNRQLLLQFERLVVLDYIIRNTDRGNDNWLIKYDCPMDSSSSRDTDWVVVKEPVIKVAAIDNGLAFPLKHPDSWRAYPFYWAWLPQAKVPFSQEIKDLILPKISDPNFVKDLEEDLYELFKKDPGFDRGQFHKQIAVMRGQILNLTQALKDNKSPLHLVQMPPVIVETARSHQRSSSESYTQSFQSRKPFFSWW

SEQ ID NO: 9030 - protein, 399 aa, Homo sapiens
MAQRQPHSPNQTLISITNDTESSSSVVSNDNTNKGWSGDNSPGIEALCAIYITYAVIISVGILGNAILIKVFFKTKSMQTVPNIFITSLAFGDLLLLLTCVPVDATHYLAEGWLFGRIGCKVLSFIRLTSVGVSVFTLTILSADRYKAVVKPLERQPSNAILKTCVKAGCVWIVSMIFALPEAIFSNVYTFRDPNKNMTFESCTSYPVSKKLLQEIHSLLCFLVFYIIPLSIISVYYSLIARTLYKSTLNIPTEEQSHARKQIESRKRIARTVLVLVALFALCWLPNHLLYLYHSFTSQTYVDPSAMHFIFTIFSRVLAFSNSCVNPFALYWLSKSFQKHFKAQLFCCKAERPEPPVADTSLTTLAVMGTVPGTGSIQMSEISVTSFTGCSVKQAEDRF

SEQ ID NO: 9031 - protein, 449 aa, Homo sapiens
MLGPQVWSSVRQGLSRSLSRNVGVWASGEGKKVDIAGIYPPVTTPFTATAEVDYGKLEENLHKLGTFPFRGAVGGVCALANVLGAQVCQLERLCCTGQWEDAQKLQHRLIEPNAARIIAVFKPKNEEPYGHLNPKWTKWLQKLCCPCCFGRDCLVLNQGYLSEAGASLVDQKLELNIVPRTKVVYLASETFNYSAIDRVKSRGKRLALEKVPKVGQRFNRIGLPPKVGSFQLFVEGYKDADYWLRRFEAEPLPENTNRQLLLQFERLVVLDYIIRNTDRGNDNWLIKYDCPMDSSSSRDTDWVVVKEPVIKVAAIDNGLAFPLKHPDSWRAYPFYWAWLPQAKVPFSQEIKDLILPKISDPNFVKDLEEDLYELFKKDPGFDRGQFHKQIAVMRGQILNLTQALKDNKSPLHLVQMPPVIVETARSHQRSSSESYTQSFQSRKPFFSWW

SEQ ID NO: 9032 - protein, 3080 aa, Homo sapiens
MKEHIIYQKLYGLILMSSFIFLSDTLSLKGKKLDFFGRGDTYVSLIDTIPELSRFTACIDLVFMDDNSRYWMAFSYITNNALLGREDIDLGLAGDHQQLILYRLGKTFSIRHHLASFQWHTICLIWDGVKGKLELFLNKERILEVTDQPHNLTPHGTLFLGHFLKNESSEVKSMMRSFPGSLYYFQLWDHILENEEFMKCLDGNIVSWEEDVWLVNKIIPTVDRTLRCFVPENMTIQEKSTTVSQQIDMTTPSQITGVKPQNTAHSSTLLSQSIPIFATDYTTISYSNTTSPPLETMTAQKILKTLVDETATFAVDVLSTSSAISLPTQSISIDNTTNSMKKTKSPSSESTKTTKMVEAMATEIFQPPTPSNFLSTSRFTKNSVVSTTSAIKSQSAVTKTTSLFSTIESTSMSTTPCLKQKSTNTGALPISTAGQEFIESTAAGTVPWFTVEKTSPASTHVGTASSFPPEPVLISTAAPVDSVFPRNQTAFPLATTDMKIAFTVHSLTLPTRLIETTPAPRTAETELTSTNFQDVSLPRVEDAMSTSMSKETSSKTFSFLTSFSFTGTESVQTVIDAEATRTALTPEITLASTVAETMLSSTITGRVYTQNTPTADGHLLTLMSTRSASTSKAPESGPTSTTDEAAHLFSSNETIWTSRPDQALLASMNTTTILTFVPNENFTSAFHENTTYTEYLSATTNITPLKASPEGKGTTANDATTARYTTAVSKLTSPWFANFSIVSGTTSITNMPEFKLTTLLLKTIPMSTKPANELPLTPRETVVPSVDIISTLACIQPNFSTEESASETTQTEINGAIVFGGTTTPVPKSATTQRLNATVTRKEATSHYLMRKSTIAAVAEVSPFSTMLEVTDESAQRVTASVTVSSFPDIEKLSTPLDNKTATTEVRESWLLTKLVKTTPRSSYNEMTEMFNFNHTYVAHWTSETSEGISAGSPTSGSTHIFGEPLGASTTRISETSFSTTPTDRTATSLSDGILPPQPTAAHSSATPVPVTHMFSLPVNGSSVVAEETEVTMSEPSTLARAFSTSVLSDVSNLSSTTMTTALVPPLDQTASTTIVIVPTHGDLIRTTSEATVISVRKTSMAVPSLTETPFHSLRLSTPVTAKAETTLFSTSVDTVTPSTHTLVCSKPPPDNIPPASSTHVISTTSTPEATQPISQVEETSTYALSFPYTFSGGGVVASLATGTTETSVVDETTPSHISANKLTTSVNSHISSSATYRVHTPVSIQLVTSTSVLSSDKDQMTISLGKTPRTMEVTEMSPSKNSFISYSRGTPSLEMTDTGFPETTKISSHQTHSPSEIPLGTPSDGNLASSPTSGSTQITPTLTSSNTVGVHIPEMSTSLGKTALPSQALTITTFLCPEKESTSALPAYTPRTVEMIVNSTYVTHSVSYGQDTSFVDTTTSSSTRISNPMDINTTFSHLHSLRTQPEVTSVASFISESTQTFPESLSLSTAGLYNDGFTVLSDRITTAFSVPNVPTMLPRESSMATSTPIYQMSSLPVNVTAFTSKKVSDTPPIVITKSSKTMHPGCLKSPCTATSGPMSEMSSIPVNNSAFTPATVSSDTSTRVGLFSTLLSSVTPRTTMTMQTSTLDVTPVIYAGATSKNKMVSSAFTTEMIEAPSRITPTTFLSPTEPTLPFVKTVPTTIMAGIVTPFVGTTAFSPLSSKSTGAISSIPKTTFSPFLSATQQSSQADEATTLGILSGITNRSLSTVNSGTGVALTDTYSRITVPENMLSPTHADSLHTSFNIQVSPSLTSFKSASGPTKNVKTTTNCFSSNTRKMTSLLEKTSLTNYATSLNTPVSYPPWTPSSATLPSLTSFVYSPHSTEAEISTPKTSPPPTSQMVEFPVLGTRMTSSNTQPLLMTSWNIPTAEGSQFPISTTINVPTSNEMETETLHLVPGPLSTFTASQTGLVSKDVMAMSSIPMSGILPNHGLSENPSLSTSLRAITSTLADVKHTFEKMTTSVTPGTTLPSILSGATSGSVISKSPILTWLLSSLPSGSPPATVSNAPHVMTSSTVEVSKSTFLTSDMISAHPFTNLTTLPSATMSTILTRTIPTPTLGGITTGFPTSLPMSINVTDDIVYISTHPEASSRTTITANPRTVSHPSSFSRKTMSPSTTDHTLSVGAMPLPSSTITSSWNRIPTASSPSTLIIPKPTLDSLLNIMTTTSTVPGASFPLISTGVTYPFTATVSSPISSFFETTWLDSTPSFLSTEASTSPTATKSTVSFYNVEMSFSVFVEEPRIPITSVINEFTENSLNSIFQNSEFSLATLETQIKSRDISEEEMVMDRAILEQREGQEMATISYVPYSCVCQVIIKASSSLASSELMRKIKSKIHGNFTHGNFTQDQLTLLVNCEHVAVKKLEPGNCKADETASKYKGTYKWLLTNPTETAQTRCIKNEDGNATRFCSISINTGKSQWEKPKFKQCKLLQELPDKIVDLANITISDENAEDVAEHILNLINESPALGKEETKIIVSKISDISQCDEISMNLTHVMLQIINVVLEKQNNSASDLHEISNEILRIIERTGHKMEFSGQIANLTVAGLALAVLRGDHTFDGMAFSIHSYEEGTDPEIFLGNVPVGGILASIYLPKSLTERIPLSNLQTILFNFFGQTSLFKTKNVTKALTTYVVSASISDDMFIQNLADPVVITLQHIGGNQNYGQVHCAFWDFENNNGLGGWNSSGCKVKETNVNYTICQCDHLTHFGVLMDLSRSTVDSVNEQILALITYTGCGISSIFLGVAVVTYIAFHKLRKDYPAKILINLCTALLMLNLVFLINSWLSSFQKVGVCITAAVALHYFLLVSFTWMGLEAVHMYLALVKVFNIYIPNYILKFCLVGWGIPAIMVAITVSVKKDLYGTLSPTTPFCWIKDDSIFYISVVAYFCLIFLMNLSMFCTVLVQLNSVKSQIQKTRRKMILHDLKGTMSLTFLLGLTWGFAFFAWGPMRNFFLYLFAIFNTLQGFFIFVFHCVMKESVREQWQIHLCCGWLRLDNSSDGSSRCQIKVGYKQEGLKKIFEHKLLTPSLKSTATSSTFKSLGSAQGTPSEISFPNDDFDKDPYCSSP

SEQ ID NO: 9033 - protein, 333 aa, Homo sapiens
MDGTMEDSEAVQRATALIEQRLAQEEENEKLRGDARQKLPMDLLVLEDEKHHGAQSAALQKVKGQERVRKTSLDLRREIIDVGGIQNLIELRKKRKQKKRDALAASHEPPPEPEEITGPVDEETFLKAAVEGKMKVIEKFLADGGSADTCDQFRRTALHRASLEGHMEILEKLLDNGATVDFQDRLDCTAMHWACRGGHLEVVKLLQSHGADTNVRDKLLSTPLHVAVRTGQVEIVEHFLSLGLEINARDREGDTALHDAVRLNRYKIIKLLLLHGADMMTKNLAGKTPTDLVQLWQADTRHALEHPEPGAEHNGLEGPNDSGRETPQPVPAQ

SEQ ID NO: 9034 - protein, 509 aa, Homo sapiens
MNNEEDLLQEDSTRDEGNETEANSMNTLRRTRKKVTKPYVCSTEVGETDMSNSNDCMRDSSQILTPPQLSSRMKHIRQAMAKNRLQFVRFEATDLHGVSRSKTIPAHFFQEKVSHGVCMPRGYLEVIPNPKDNEMNNIRATCFNSDIVLMPELSTFRVLPWADRTARVICDTFTVTGEPLLTSPRYIAKRQLSHLQASGFSLLSAFIYDFCIFGVPEILNSKIISFPALTFLNNHDQPFMQELVDGLYHTGANVESFSSSTRPGQMEISFLPEFGISSADNAFTLRTGVKEVARKYNYIASFFIETGFCDSGILSHSLWDVDRKKNMFCSTSGTEQLTITGKKWLAGLLKHSAALSCLMAPSVSCRKRYSKDRKDLKKSVPTTWGYNDNSCIFNIKCHGEKGTRIENKLGSATANPYLVLAATVAAGLDGLHSSNEVLAGPDESTDFYQVEPSEIPLKLEDALVALEEDQCLRQALGETFIRYFVAMKKYELENEEIAAERNKFLEYFI

SEQ ID NO: 9035 - protein, 208 aa, Homo sapiens
MNNEEDLLQEDSTRDEGNETEANSMNTLRRTRKKVTKPYVCSTEVGETDMSNSNDCMRDSSQILTPPQLSSRMKHIRQAMAKNRLQFVRFEATDLHGVSRSKTIPAHFFQEKVSHGVCMPRGYLEVIPNPKDNEMNNIRATCFNSDIVLMPELSTFRVLPWADRTARVICDTFTVTVSGMSIGRKTCSAALLELSSSRSLGKNGWQDS

SEQ ID NO: 9036 - protein, 701 aa, Homo sapiens
MARRGWRRAPLRRGVGSSPRARRLMRPLWLLLAVGVFDWAGASDGGGGEARAMDEEIVSEKQAEESHRQDSANLLIFILLLTLTILTIWLFKHRRARFLHETGLAMIYGLLVGLVLRYGIHVPSDVNNVTLSCEVQSSPTTLLVNVSGKFYEYMLKGEISSHELNNVQDNEMLRKVTFDPEVFFNILLPPIIFYAGYSLKRRHFFRNLGSILAYAFLGTAISCFVIGSIMYGCVTLMKVTGQLAGDFYFTDCLLFGAIVSATDPVTVLAIFHELQVDVELYALLFGESVLNDAVAIVLSSSIVAYQPAGDNSHTFDVTAMFKSIGIFLGIFSGSFAMGAATGVVTALVTKFTKLREFQLLETGLFFLMSWSTFLLAEAWGFTGVVAVLFCGITQAHYTYNNLSTESQHRTKQLFELLNFLAENFIFSYMGLTLFTFQNHVFNPTFVVGAFVAIFLGRAANIYPLSLLLNLGRRSKIGSNFQHMMMFAGLRGAMAFALAIRDTATYARQMMFSTTLLIVFFTVWVFGGGTTAMLSCLHIRVGVDSDQEHLGVPENERRTTKAESAWLFRMWYNFDHNYLKPLLTHSGPPLTTTLPACCGPIARCLTSPQAYENQEQLKDDDSDLILNDGDISLTYGDSTVNTEPATSSAPRRFMGNSSEDALDRELAFGDHELVIRGTRLVLPMDDSEPPLNLLDNTRHGPA

SEQ ID NO: 9037 - protein, 669 aa, Homo sapiens
MARRGWRRAPLRRGVGSSPRARRLMRPLWLLLAVGVFDWAGASDGGGGEARAMDEEIVSEKQAEESHRQDSANLLIFILLLTLTILTIWLFKHRRARFLHETGLAMIYGLLVGLVLRYGIHVPSDVNNVTLSCEVQSSPTTLLVTFDPEVFFNILLPPIIFYAGYSLKRRHFFRNLGSILAYAFLGTAISCFVIGSIMYGCVTLMKVTGQLAGDFYFTDCLLFGAIVSATDPVTVLAIFHELQVDVELYALLFGESVLNDAVAIVLSSSIVAYQPAGDNSHTFDVTAMFKSIGIFLGIFSGSFAMGAATGVVTALVTKFTKLREFQLLETGLFFLMSWSTFLLAEAWGFTGVVAVLFCGITQAHYTYNNLSTESQHRTKQLFELLNFLAENFIFSYMGLTLFTFQNHVFNPTFVVGAFVAIFLGRAANIYPLSLLLNLGRRSKIGSNFQHMMMFAGLRGAMAFALAIRDTATYARQMMFSTTLLIVFFTVWVFGGGTTAMLSCLHIRVGVDSDQEHLGVPENERRTTKAESAWLFRMWYNFDHNYLKPLLTHSGPPLTTTLPACCGPIARCLTSPQAYENQEQLKDDDSDLILNDGDISLTYGDSTVNTEPATSSAPRRFMGNSSEDALDRELAFGDHELVIRGTRLVLPMDDSEPPLNLLDNTRHGPA

SEQ ID NO: 9038 - protein, 649 aa, Homo sapiens
MDEEIVSEKQAEESHRQDSANLLIFILLLTLTILTIWLFKHRRARFLHETGLAMIYGLLVGLVLRYGIHVPSDVNNVTLSCEVQSSPTTLLVNVSGKFYEYMLKGEISSHELNNVQDNEMLRKVTFDPEVFFNILLPPIIFYAGYSLKRRHFFRNLGSILAYAFLGTAISCFVIGSIMYGCVTLMKVTGQLAGDFYFTDCLLFGAIVSATDPVTVLAIFHELQVDVELYALLFGESVLNDAVAIVLSSSIVAYQPAGDNSHTFDVTAMFKSIGIFLGIFSGSFAMGAATGVVTALVTKFTKLREFQLLETGLFFLMSWSTFLLAEAWGFTGVVAVLFCGITQAHYTYNNLSTESQHRTKQLFELLNFLAENFIFSYMGLTLFTFQNHVFNPTFVVGAFVAIFLGRAANIYPLSLLLNLGRRSKIGSNFQHMMMFAGLRGAMAFALAIRDTATYARQMMFSTTLLIVFFTVWVFGGGTTAMLSCLHIRVGVDSDQEHLGVPENERRTTKAESAWLFRMWYNFDHNYLKPLLTHSGPPLTTTLPACCGPIARCLTSPQAYENQEQLKDDDSDLILNDGDISLTYGDSTVNTEPATSSAPRRFMGNSSEDALDRELAFGDHELVIRGTRLVLPMDDSEPPLNLLDNTRHGPA

SEQ ID NO: 9039 - protein, 1061 aa, Homo sapiens
MGDPGSEIIESVPPAGPEASESTTDENEDDIQFVSEGPLRPVLEYIDLVSSDDEEPSTSYTDENIKRKDHIDYQKDKVALTLARLARHVEVEKQQKEEKNRAFREKIDFQHAHGLQELEFIRGHSDTEAARLCVDQWLKMPGLKTGTINCGTKSSFRRGGHTWVSGKPILCPIMHCNKEFDNGHLLLGHLKRFDHSPCDPTITLHGPFFSSFACVVCYKKFVTQQQYRDHLFDKEATDDGHNNNLLPQIIQCFACPNCFLLFSRKEECSKHMSGKNHFHQSFKLGDNKGIAHPISFPSFAKKLLISLCKDVPFQVKCVACHKTLRSHMELTAHFRVHCRNAGPVAVAEKSITQVAEKFILRGYCPDCNQVFVDETSTQNHKQNSGHKVRVINSVEESVLLYCHSSEGNKDPSSDLHLLLDQSKFSSLKRTMSIKESSSLECIAIPKKKMNLKDKSHEGVACVQKEKSVVKTWFCECNQRFPSEDAVEKHVFSANTMGYKCVVCGKVCDDSGVIRLHMSRIHGGAHLNNFLFWCRTCKKELTRKDTIMAHVTEFHNGHRYFYEMDEVEGETLPSSSTTLDNLTANKPSSAITVIDHSPANSSPRGKWQCRICEDMFDSQEYVKQHCMSLASHKFHRYSCAHCRKPFHKIETLYRHCQDEHDNEIKIKYFCGLCDLIFNVEEAFLSHYEEHHSIDYVFVSEKTETSIKTEDDFPVIETSNQLTCGCRESYICKVNRKEDYSRCLQIMLDKGKLWFRCSLCSATAQNLTDMNTHIHQVHKEKSDEEEQQYVIKCGTCTKAFHDPESAQQHFHRKHCFLQKPSVAHFGSEKSNLYKFTASASHTERKLKQAINYSKSLDMEKGVENDLSYQNIEEEIVELPDLDYLRTMTHIVFVDFDNWSNFFGHLPGHLNQGTFIWGFQGGNTNWKPPLNCKIYNYLNRIGCFFLHPRCSKRKDAADFAICMHAGRLDEQLPKQIPFTILSGDQGFLELENQFKKTQRPAHILNPHHLEGDMMCALLNSISDTTKECDSDDNMGAKNTSIGEEFISTEDVELEEAIRRSLEEM

SEQ ID NO: 9040 - protein, 559 aa, Homo sapiens
MGDPGSEIIESVPPAGPEASESTTDENEDDIQFVSEGPLRPVLEYIDLVSSDDEEPSTSYTDRMPESKVPSSENHRPEMCSSCNVPLPIGDSSSFSGSCSSSPERIVSQTSSVENPLENQKNDQNNSDTKISETETLKSSQNFQTLPSSPLLVPQESLASSEVKENLRIDSSSASQHGRDAILYLQTQVAEMSRVIRDLQSRSCFRFHHSRPSENSSVPWDISTSKEENLSTVEEETDYKSPSADDKGQPSDPSQSSFTGLLKRMEQRGVIKRVTLQSEAESCEGKPDCVTSKKRLVPPLHPLLRIATTEVFKDPADCHPSSFMGHRVYPVAKDTSPFQPNPPAEGPIVEALEHSKRGNTTSPLDSTSKEMEVMGCRFYHAASIAARAASYMAYMTQYQRKLWEDMEDLVHDPEFDRGKARCIISDGMDAGLWQLCTTRDIMDSVVRVMAMAIDYRRQAWLRLTSLTKKTQEKISHLPFDGTSLFGQDVKAVVAEDNNIKENDYKDHKYYNQHRYFYSHDQKAHYHNRGYSKGDWYKPRNHPYRYRKKGDSPERHGYKN

SEQ ID NO: 9041 - protein, 1123 aa, Homo sapiens
MVSSGCRMRSLWFIIVISFLPNTEGFSRAALPFGLVRRELSCEGYSIDLRCPGSDVIMIESANYGRTDDKICDADPFQMENTDCYLPDAFKIMTQRCNNRTQCIVVTGSDVFPDPCPGTYKYLEVQYECVPYIFVCPGTLKAIVDSPCIYEAEQKAGAWCKDPLQAADKIYFMPWTPYRTDTLIEYASLEDFQNSRQTTTYKLPNRVDGTGFVVYDGAVFFNKERTRNIVKFDLRTRIKSGEAIINYANYHDTSPYRWGGKTDIDLAVDENGLWVIYATEQNNGMIVISQLNPYTLRFEATWETVYDKRAASNAFMICGVLYVVRSVYQDNESETGKNSIDYIYNTRLNRGEYVDVPFPNQYQYIAAVDYNPRDNQLYVWNNNFILRYSLEFGPPDPAQVPTTAVTITSSAELFKTIISTTSTTSQKGPMSTTVAGSQEGSKGTKPPPAVSTTKIPPITNIFPLPERFCEALDSKGIKWPQTQRGMMVERPCPKGTRGTASYLCMISTGTWNPKGPDLSNCTSHWVNQLAQKIRSGENAASLANELAKHTKGPVFAGDVSSSVRLMEQLVDILDAQLQELKPSEKDSAGRSYNKAIVDTVDNLLRPEALESWKHMNSSEQAHTATMLLDTLEEGAFVLADNLLEPTRVSMPTENIVLEVAVLSTEGQIQDFKFPLGIKGAGSSIQLSANTVKQNSRNGLAKLVFIIYRSLGQFLSTENATIKLGADFIGRNSTIAVNSHVISVSINKESSRVYLTDPVLFTLPHIDPDNYFNANCSFWNYSERTMMGYWSTQGCKLVDTNKTRTTCACSHLTNFAILMAHREIAYKDGVHELLLTVITWVGIVISLVCLAICIFTFCFFRGLQSDRNTIHKNLCINLFIAEFIFLIGIDKTKYAIACPIFAGLLHFFFLAAFAWMCLEGVQLYLMLVEVFESEYSRKKYYYVAGYLFPATVVGVSAAIDYKSYGTEKACWLHVDNYFIWSFIGPVTFIILLNIIFLVITLCKMVKHSNTLKPDSSRLENIKSWVLGAFALLCLLGLTWSFGLLFINEETIVMAYLFTIFNAFQGVFIFIFHCALQKKVRKEYGKCFRHSYCCGGLPTESPHSSVKASTTRTSARYSSGTQDIH

SEQ ID NO: 9042 - protein, 1177 aa, Homo sapiens
MVSSGCRMRSLWFIIVISFLPNTEGFSRAALPFGLVRRELSCEGYSIDLRCPGSDVIMIESANYGRTDDKICDADPFQMENTDCYLPDAFKIMTQRCNNRTQCIVVTGSDVFPDPCPGTYKYLEVQYECVPYIFVCPGTLKAIVDSPCIYEAEQKAGAWCKDPLQAADKIYFMPWTPYRTDTLIEYASLEDFQNSRQTTTYKLPNRVDGTGFVVYDGAVFFNKERTRNIVKFDLRTRIKSGEAIINYANYHDTSPYRWGGKTDIDLAVDENGLWVIYATEQNNGMIVISQLNPYTLRFEATWETVYDKRAASNAFMICGVLYVVRSVYQDNESETGKNSIDYIYNTRLNRGEYVDVPFPNQYQYIAAVDYNPRDNQLYVWNNNFILRYSLEFGPPDPAQVPTTAVTITSSAELFKTIISTTSTTSQKGPMSTTVAGSQEGSKGTKPPPAVSTTKIPPITNIFPLPERFCEALDSKGIKWPQTQRGMMVERPCPKGTRGTASYLCMISTGTWNPKGPDLSNCTSHWVNQLAQKIRSGENAASLANELAKHTKGPVFAGDVSSSVRLMEQLVDILDAQLQELKPSEKDSAGRSYNKAIVDTVDNLLRPEALESWKHMNSSEQAHTATMLLDTLEEGAFVLADNLLEPTRVSMPTENIVLEVAVLSTEGQIQDFKFPLGIKGAGSSIQLSANTVKQNSRNGLAKLVFIIYRSLGQFLSTENATIKLGADFIGRNSTIAVNSHVISVSINKESSRVYLTDPVLFTLPHIDPDNYFNANCSFWNYSERTMMGYWSTQGCKLVDTNKTRTTCACSHLTNFAILMAHREIAYKDGVHELLLTVITWVGIVISLVCLAICIFTFCFFRGLQSDRNTIHKNLCINLFIAEFIFLIGIDKTKYAIACPIFAGLLHFFFLAAFAWMCLEGVQLYLMLVEVFESEYSRKKYYYVAGYLFPATVVGVSAAIDYKSYGTEKACWLHVDNYFIWSFIGPVTFIILLNIIFLVITLCKMVKHSNTLKPDSSRLENIKSWVLGAFALLCLLGLTWSFGLLFINEETIVMAYLFTIFNAFQGVFIFIFHCALQKKVRKEYGKCFRHSYCCGGLPTESPHSSVKASTTRTSARYSSGTQSRIRRMWNDTVRKQSESSFISGDINSTSTLNQGLTSHGLRAHLQDLYHLELLLGQIA

SEQ ID NO: 9043 - protein, 1459 aa, Homo sapiens
MVSSGCRMRSLWFIIVISFLPNTEGFSRAALPFGLVRRELSCEGYSIDLRCPGSDVIMIESANYGRTDDKICDADPFQMENTDCYLPDAFKIMTQRCNNRTQCIVVTGSDVFPDPCPGTYKYLEVQYECVPYIFVCPGTLKAIVDSPCIYEAEQKAGAWCKDPLQAADKIYFMPWTPYRTDTLIEYASLEDFQNSRQTTTYKLPNRVDGTGFVVYDGAVFFNKERTRNIVKFDLRTRIKSGEAIINYANYHDTSPYRWGGKTDIDLAVDENGLWVIYATEQNNGMIVISQLNPYTLRFEATWETVYDKRAASNAFMICGVLYVVRSVYQDNESETGKNSIDYIYNTRLNRGEYVDVPFPNQYQYIAAVDYNPRDNQLYVWNNNFILRYSLEFGPPDPAQVPTTAVTITSSAELFKTIISTTSTTSQKGPMSTTVAGSQEGSKGTKPPPAVSTTKIPPITNIFPLPERFCEALDSKGIKWPQTQRGMMVERPCPKGTRGTASYLCMISTGTWNPKGPDLSNCTSHWVNQLAQKIRSGENAASLANELAKHTKGPVFAGDVSSSVRLMEQLVDILDAQLQELKPSEKDSAGRSYNKLQKREKTCRAYLKAIVDTVDNLLRPEALESWKHMNSSEQAHTATMLLDTLEEGAFVLADNLLEPTRVSMPTENIVLEVAVLSTEGQIQDFKFPLGIKGAGSSIQLSANTVKQNSRNGLAKLVFIIYRSLGQFLSTENATIKLGADFIGRNSTIAVNSHVISVSINKESSRVYLTDPVLFTLPHIDPDNYFNANCSFWNYSERTMMGYWSTQGCKLVDTNKTRTTCACSHLTNFAILMAHREIAYKDGVHELLLTVITWVGIVISLVCLAICIFTFCFFRGLQSDRNTIHKNLCINLFIAEFIFLIGIDKTKYAIACPIFAGLLHFFFLAAFAWMCLEGVQLYLMLVEVFESEYSRKKYYYVAGYLFPATVVGVSAAIDYKSYGTEKACWLHVDNYFIWSFIGPVTFIILLNIIFLVITLCKMVKHSNTLKPDSSRLENIKSWVLGAFALLCLLGLTWSFGLLFINEETIVMAYLFTIFNAFQGVFIFIFHCALQKKVRKEYGKCFRHSYCCGGLPTESPHSSVKASTTRTSARYSSGTQSRIRRMWNDTVRKQSESSFISGDINSTSTLNQGMTGNYLLTNPLLRPHGTNNPYNTLLAETVVCNAPSAPVFNSPGHSLNNARDTSAMDTLPLNGNFNNSYSLHKGDYNDSVQVVDCGLSLNDTAFEKMIISELVHNNLRGSSKTHNLELTLPVKPVIGGSSSEDDAIVADASSLMHSDNPGLELHHKELEAPLIPQRTHSLLYQPQKKVKSEGTDSYVSQLTAEAEDHLQSPNRDSLYTSMPNLRDSPYPESSPDMEEDLSPSRRSENEDIYYKSMPNLGAGHQLQMCYQISRGNSDGYIIPINKEGCIPEGDVREGQMQLVTSL

SEQ ID NO: 9044 - protein, 1384 aa, Homo sapiens
MVSSGCRMRSLWFIIVISFLPNTEGFSRAALPFGLVRRELSCEGYSIDLRCPGSDVIMIESANYGRTDDKICDADPFQMENTDCYLPDAFKIMTQRCNNRTQCIVVTGSDVFPDPCPGTYKYLEVQYECVPYMEQKVFVCPGTLKAIVDSPCIYEAEQKAGAWCKDPLQAADKIYFMPWTPYRTDTLIEYASLEDFQNSRQTTTYKLPNRVDGTGFVVYDGAVFFNKERTRNIVKFDLRTRIKSGEAIINYANYHDTSPYRWGGKTDIDLAVDENGLWVIYATEQNNGMIVISQLNPYTLRFEATWETVYDKRAASNAFMICGVLYVVRSVYQDNESETGKNSIDYIYNTRLNRGEYVDVPFPNQYQYIAAVDYNPRDNQLYVWNNNFILRYSLEFGPPDPAQERFCEALDSKGIKWPQTQRGMMVERPCPKGTRGTASYLCMISTGTWNPKGPDLSNCTSHWVNQLAQKIRSGENAASLANELAKHTKGPVFAGDVSSSVRLMEQLVDILDAQLQELKPSEKDSAGRSYNKAIVDTVDNLLRPEALESWKHMNSSEQAHTATMLLDTLEEGAFVLADNLLEPTRVSMPTENIVLEVAVLSTEGQIQDFKFPLGIKGAGSSIQLSANTVKQNSRNGLAKLVFIIYRSLGQFLSTENATIKLGADFIGRNSTIAVNSHVISVSINKESSRVYLTDPVLFTLPHIDPDNYFNANCSFWNYSERTMMGYWSTQGCKLVDTNKTRTTCACSHLTNFAILMAHREIAYKDGVHELLLTVITWVGIVISLVCLAICIFTFCFFRGLQSDRNTIHKNLCINLFIAEFIFLIGIDKTKYAIACPIFAGLLHFFFLAAFAWMCLEGVQLYLMLVEVFESEYSRKKYYYVAGYLFPATVVGVSAAIDYKSYGTEKACWLHVDNYFIWSFIGPVTFIILLNIIFLVITLCKMVKHSNTLKPDSSRLENIKSWVLGAFALLCLLGLTWSFGLLFINEETIVMAYLFTIFNAFQGVFIFIFHCALQKKVRKEYGKCFRHSYCCGGLPTESPHSSVKASTTRTSARYSSGTQSRIRRMWNDTVRKQSESSFISGDINSTSTLNQGMTGNYLLTNPLLRPHGTNNPYNTLLAETVVCNAPSAPVFNSPGHSLNNARDTSAMDTLPLNGNFNNSYSLHKGDYNDSVQVVDCGLSLNDTAFEKMIISELVHNNLRGSSKTHNLELTLPVKPVIGGSSSEDDAIVADASSLMHSDNPGLELHHKELEAPLIPQRTHSLLYQPQKKVKSEGTDSYVSQLTAEAEDHLQSPNRDSLYTSMPNLRDSPYPESSPDMEEDLSPSRRSENEDIYYKSMPNLGAGHQLQMCYQISRGNSDGYIIPINKEGCIPEGDVREGQMQLVTSL

SEQ ID NO: 9045 - protein, 1461 aa, Homo sapiens
MVSSGCRMRSLWFIIVISFLPNTEGFSRAALPFGLVRRELSCEGYSIDLRCPGSDVIMIESANYGRTDDKICDADPFQMENTDCYLPDAFKIMTQRCNNRTQCIVVTGSDVFPDPCPGTYKYLEVQYECVPYIFVCPGTLKAIVDSPCIYEAEQKAGAWCKDPLQAADKIYFMPWTPYRTDTLIEYASLEDFQNSRQTTTYKLPNRVDGTGFVVYDGAVFFNKERTRNIVKFDLRTRIKSGEAIINYANYHDTSPYRWGGKTDIDLAVDENGLWVIYATEQNNGMIVISQLNPYTLRFEATWETVYDKRAASNAFMICGVLYVVRSVYQDNESETGKNSIDYIYNTRLNRGEYVDVPFPNQYQYIAAVDYNPRDNQLYVWNNNFILRYSLEFGPPDPAQVPTTAVTITSSAELFKTIISTTSTTSQKGPMSTTVAGSQEGSKGTKPPPAVSTTKIPPITNIFPLPERFCEALDSKGIKWPQTQRGMMVERPCPKGTRGTASYLCMISTGTWNPKGPDLSNCTSHWVNQLAQKIRSGENAASLANELAKHTKGPVFAGDVSSSVRLMEQLVDILDAQLQELKPSEKDSAGRSYNKAIVDTVDNLLRPEALESWKHMNSSEQAHTATMLLDTLEEGAFVLADNLLEPTRVSMPTENIVLEVAVLSTEGQIQDFKFPLGIKGAGSSIQLSANTVKQNSRNGLAKLVFIIYRSLGQFLSTENATIKLGADFIGRNSTIAVNSHVISVSINKESSRVYLTDPVLFTLPHIDPDNYFNANCSFWNYSERTMMGYWSTQGCKLVDTNKTRTTCACSHLTNFAILMAHREIAYKDGVHELLLTVITWVGIVISLVCLAICIFTFCFFRGLQSDRNTIHKNLCINLFIAEFIFLIGIDKTKYAIACPIFAGLLHFFFLAAFAWMCLEGVQLYLMLVEVFESEYSRKKYYYVAGYLFPATVVGVSAAIDYKSYGTEKACWLHVDNYFIWSFIGPVTFIILLNIIFLVITLCKMVKHSNTLKPDSSRLENINNYRVCDGYYNTDLPGSWVLGAFALLCLLGLTWSFGLLFINEETIVMAYLFTIFNAFQGVFIFIFHCALQKKVRKEYGKCFRHSYCCGGLPTESPHSSVKASTTRTSARYSSGTQSRIRRMWNDTVRKQSESSFISGDINSTSTLNQGMTGNYLLTNPLLRPHGTNNPYNTLLAETVVCNAPSAPVFNSPGHSLNNARDTSAMDTLPLNGNFNNSYSLHKGDYNDSVQVVDCGLSLNDTAFEKMIISELVHNNLRGSSKTHNLELTLPVKPVIGGSSSEDDAIVADASSLMHSDNPGLELHHKELEAPLIPQRTHSLLYQPQKKVKSEGTDSYVSQLTAEAEDHLQSPNRDSLYTSMPNLRDSPYPESSPDMEEDLSPSRRSENEDIYYKSMPNLGAGHQLQMCYQISRGNSDGYIIPINKEGCIPEGDVREGQMQLVTSL

SEQ ID NO: 9046 - protein, 1474 aa, Homo sapiens
MVSSGCRMRSLWFIIVISFLPNTEGFSRAALPFGLVRRELSCEGYSIDLRCPGSDVIMIESANYGRTDDKICDADPFQMENTDCYLPDAFKIMTQRCNNRTQCIVVTGSDVFPDPCPGTYKYLEVQYECVPYIFVCPGTLKAIVDSPCIYEAEQKAGAWCKDPLQAADKIYFMPWTPYRTDTLIEYASLEDFQNSRQTTTYKLPNRVDGTGFVVYDGAVFFNKERTRNIVKFDLRTRIKSGEAIINYANYHDTSPYRWGGKTDIDLAVDENGLWVIYATEQNNGMIVISQLNPYTLRFEATWETVYDKRAASNAFMICGVLYVVRSVYQDNESETGKNSIDYIYNTRLNRGEYVDVPFPNQYQYIAAVDYNPRDNQLYVWNNNFILRYSLEFGPPDPAQVPTTAVTITSSAELFKTIISTTSTTSQKGPMSTTVAGSQEGSKGTKPPPAVSTTKIPPITNIFPLPERFCEALDSKGIKWPQTQRGMMVERPCPKGTRGTASYLCMISTGTWNPKGPDLSNCTSHWVNQLAQKIRSGENAASLANELAKHTKGPVFAGDVSSSVRLMEQLVDILDAQLQELKPSEKDSAGRSYNKLQKREKTCRAYLKAIVDTVDNLLRPEALESWKHMNSSEQAHTATMLLDTLEEGAFVLADNLLEPTRVSMPTENIVLEVAVLSTEGQIQDFKFPLGIKGAGSSIQLSANTVKQNSRNGLAKLVFIIYRSLGQFLSTENATIKLGADFIGRNSTIAVNSHVISVSINKESSRVYLTDPVLFTLPHIDPDNYFNANCSFWNYSERTMMGYWSTQGCKLVDTNKTRTTCACSHLTNFAILMAHREIAYKDGVHELLLTVITWVGIVISLVCLAICIFTFCFFRGLQSDRNTIHKNLCINLFIAEFIFLIGIDKTKYAIACPIFAGLLHFFFLAAFAWMCLEGVQLYLMLVEVFESEYSRKKYYYVAGYLFPATVVGVSAAIDYKSYGTEKACWLHVDNYFIWSFIGPVTFIILLNIIFLVITLCKMVKHSNTLKPDSSRLENINNYRVCDGYYNTDLPGSWVLGAFALLCLLGLTWSFGLLFINEETIVMAYLFTIFNAFQGVFIFIFHCALQKKVRKEYGKCFRHSYCCGGLPTESPHSSVKASTTRTSARYSSGTQSRIRRMWNDTVRKQSESSFISGDINSTSTLNQGMTGNYLLTNPLLRPHGTNNPYNTLLAETVVCNAPSAPVFNSPGHSLNNARDTSAMDTLPLNGNFNNSYSLHKGDYNDSVQVVDCGLSLNDTAFEKMIISELVHNNLRGSSKTHNLELTLPVKPVIGGSSSEDDAIVADASSLMHSDNPGLELHHKELEAPLIPQRTHSLLYQPQKKVKSEGTDSYVSQLTAEAEDHLQSPNRDSLYTSMPNLRDSPYPESSPDMEEDLSPSRRSENEDIYYKSMPNLGAGHQLQMCYQISRGNSDGYIIPINKEGCIPEGDVREGQMQLVTSL

SEQ ID NO: 9047 - protein, 1431 aa, Homo sapiens
MVSSGCRMRSLWFIIVISFLPNTEGFSRAALPFGLVRRELSCEGYSIDLRCPGSDVIMIESANYGRTDDKICDADPFQMENTDCYLPDAFKIMTQRCNNRTQCIVVTGSDVFPDPCPGTYKYLEVQYECVPYIFVCPGTLKAIVDSPCIYEAEQKAGAWCKDPLQAADKIYFMPWTPYRTDTLIEYASLEDFQNSRQTTTYKLPNRVDGTGFVVYDGAVFFNKERTRNIVKFDLRTRIKSGEAIINYANYHDTSPYRWGGKTDIDLAVDENGLWVIYATEQNNGMIVISQLNPYTLRFEATWETVYDKRAASNAFMICGVLYVVRSVYQDNESETGKNSIDYIYNTRLNRGEYVDVPFPNQYQYIAAVDYNPRDNQLYVWNNNFILRYSLEFGPPDPAQVPTTAVTITSSAELFKTIISTTSTTSQKGPMSTTVAGSQEGSKGTKPPPAVSTTKIPPITNIFPLPERFCEALDSKGIKWPQTQRGMMVERPCPKGTRGTASYLCMISTGTWNPKGPDLSNCTSHWVNQLAQKIRSGENAASLANELAKHTKGPVFAGDVSSSVRLMEQLVDILDAQLQELKPSEKDSAGRSYNKLQKREKTCRAYLKAIVDTVDNLLRPEALESWKHMNSSEQAHTATMLLDTLEEGAFVLADNLLEPTRVSMPTENIVLEVAVLSTEGQIQDFKFPLGIKGAGSSIQLSANTVKQNSRNGLAKLVFIIYRSLGQFLSTENATIKLGADFIGRNSTIAVNSHVISVSINKESSRVYLTDPVLFTLPHIDPDNYFNANCSFWNYSERTMMGYWSTQGCKLVDTNKTRTTCACSHLTNFAILMAHREIAYKDGVHELLLTVITWVGIVISLVCLAICIFTFCFFRGLQSDRNTIHKNLCINLFIAEFIFLIGIDKTKYAIACPIFAGLLHFFFLAAFAWMCLEGVQLYLMLVEVFESEYSRKKYYYVAGYLFPATVVGVSAAIDYKSYGTEKACWLHVDNYFIWSFIGPVTFIILLNIIFLVITLCKMVKHSNTLKPDSSRLENINNYRVCDGYYNTDLPGSWVLGAFALLCLLGLTWSFGLLFINEETIVMAYLFTIFNAFQGVFIFIFHCALQKKVRKEYGKCFRHSYCCGGLPTESPHSSVKASTTRTSARYSSGTQSRIRRMWNDTVRKQSESSFISGDINSTSTLNQGHSLNNARDTSAMDTLPLNGNFNNSYSLHKGDYNDSVQVVDCGLSLNDTAFEKMIISELVHNNLRGSSKTHNLELTLPVKPVIGGSSSEDDAIVADASSLMHSDNPGLELHHKELEAPLIPQRTHSLLYQPQKKVKSEGTDSYVSQLTAEAEDHLQSPNRDSLYTSMPNLRDSPYPESSPDMEEDLSPSRRSENEDIYYKSMPNLGAGHQLQMCYQISRGNSDGYIIPINKEGCIPEGDVREGQMQLVTSL

SEQ ID NO: 9048 - protein, 1416 aa, Homo sapiens
MVSSGCRMRSLWFIIVISFLPNTEGFSRAALPFGLVRRELSCEGYSIDLRCPGSDVIMIESANYGRTDDKICDADPFQMENTDCYLPDAFKIMTQRCNNRTQCIVVTGSDVFPDPCPGTYKYLEVQYECVPYIFVCPGTLKAIVDSPCIYEAEQKAGAWCKDPLQAADKIYFMPWTPYRTDTLIEYASLEDFQNSRQTTTYKLPNRVDGTGFVVYDGAVFFNKERTRNIVKFDLRTRIKSGEAIINYANYHDTSPYRWGGKTDIDLAVDENGLWVIYATEQNNGMIVISQLNPYTLRFEATWETVYDKRAASNAFMICGVLYVVRSVYQDNESETGKNSIDYIYNTRLNRGEYVDVPFPNQYQYIAAVDYNPRDNQLYVWNNNFILRYSLEFGPPDPAQVPTTAVTITSSAELFKTIISTTSTTSQKGPMSTTVAGSQEGSKGTKPPPAVSTTKIPPITNIFPLPERFCEALDSKGIKWPQTQRGMMVERPCPKGTRGTASYLCMISTGTWNPKGPDLSNCTSHWVNQLAQKIRSGENAASLANELAKHTKGPVFAGDVSSSVRLMEQLVDILDAQLQELKPSEKDSAGRSYNKLQKREKTCRAYLKAIVDTVDNLLRPEALESWKHMNSSEQAHTATMLLDTLEEGAFVLADNLLEPTRVSMPTENIVLEVAVLSTEGQIQDFKFPLGIKGAGSSIQLSANTVKQNSRNGLAKLVFIIYRSLGQFLSTENATIKLGADFIGRNSTIAVNSHVISVSINKESSRVYLTDPVLFTLPHIDPDNYFNANCSFWNYSERTMMGYWSTQGCKLVDTNKTRTTCACSHLTNFAILMAHREIAYKDGVHELLLTVITWVGIVISLVCLAICIFTFCFFRGLQSDRNTIHKNLCINLFIAEFIFLIGIDKTKYAIACPIFAGLLHFFFLAAFAWMCLEGVQLYLMLVEVFESEYSRKKYYYVAGYLFPATVVGVSAAIDYKSYGTEKACWLHVDNYFIWSFIGPVTFIILLNIIFLVITLCKMVKHSNTLKPDSSRLENIKSWVLGAFALLCLLGLTWSFGLLFINEETIVMAYLFTIFNAFQGVFIFIFHCALQKKVRKEYGKCFRHSYCCGGLPTESPHSSVKASTTRTSARYSSGTQSRIRRMWNDTVRKQSESSFISGDINSTSTLNQGHSLNNARDTSAMDTLPLNGNFNNSYSLHKGDYNDSVQVVDCGLSLNDTAFEKMIISELVHNNLRGSSKTHNLELTLPVKPVIGGSSSEDDAIVADASSLMHSDNPGLELHHKELEAPLIPQRTHSLLYQPQKKVKSEGTDSYVSQLTAEAEDHLQSPNRDSLYTSMPNLRDSPYPESSPDMEEDLSPSRRSENEDIYYKSMPNLGAGHQLQMCYQISRGNSDGYIIPINKEGCIPEGDVREGQMQLVTSL

SEQ ID NO: 9049 - protein, 787 aa, Homo sapiens
MGDPGSEIIESVPPAGPEASESTTDENEDDIQFVSEGPSRPVLEYIDLVCGDDENPSAYYSDILFPKMPKRQGDFLHFLNVKKVKTDTENNEVSKNHCRLSKAKEPHFEYIEQPIIEEKPSLSSKKEIDNLVLPDCWNEKQAFMFTEQYKWLEIKEGKLGCKDCSAVRHLGSKAEKHVHVSKEWIAYLVTPNGSNKTTRQASLRKKIREHDVSKAHGKIQDLLKESTNDSICNLVHKQNNKNIDATVKVFNTVYSLVKHNRPLSDIEGARELQEKNGEVNCLNTRYSATRIAEHIAKEMKMKIFKNIIEENAKICIIIDEASTVSKKTTLVIYLQCTIQSAPAPVMLFVALKELVSTIAECIVNTLLTTLNDCGFTNEYLKANLIAFCSDGANTILGRKSGVATKLLENFPEIIIWNCLNHRLQLSLDDSISEIKQINHLKIFIDKIYSIYHQPNKNQTKLLGTVAKELETEIIKIGRVMGPRWAACSLQAATAVWHAYPILYMHFSHSYSGLAKRLANINFLQDLALMIDILEEFSVLSTALQSRSTNIKKAQKLIKRTIRALENLKIGTGKYESQIEDLIKSDKFKDIPFNKNNKFNALPRSILLDNIIQHMNLRLLSDRNHEDIFNYFDLLEPSTWPYEEITSPWIAGEKTLFHLCKILKYEVDLNDFREFVNNNIKSNNVSIPTTIYKAKKIVSTIAINSAEAERGFNLMNIICTRVRNSLTIDHVSDLMTINLLGKELADWDATPFVKSWSNCNHRLATDTRVRQKSTKVFHENQLAIWNLK

SEQ ID NO: 9050 - protein, 690 aa, Homo sapiens
MKRLPLLVVFSTLLNCSYTQNCTKTPCLPNAKCEIRNGIEACYCNMGFSGNGVTICEDDNECGNLTQSCGENANCTNTEGSYYCMCVPGFRSSSNQDRFITNDGTVCIENVNANCHLDNVCIAANINKTLTKIRSIKEPVALLQEVYRNSVTDLSPTDIITYIEILAESSSLLGYKNNTISAKDTLSNSTLTEFVKTVNNFVQRDTFVVWDKLSVNHRRTHLTKLMHTVEQATLRISQSFQKTTEFDTNSTDIALKVFFFDSYNMKHIHPHMNMDGDYINIFPKRKAAYDSNGNVAVAFVYYKSIGPLLSSSDNFLLKPQNYDNSEEEERVISSVISVSMSSNPPTLYELEKITFTLSHRKVTDRYRSLCAFWNYSPDTMNGSWSSEGCELTYSNETHTSCRCNHLTHFAILMSSGPSIGIKDYNILTRITQLGIIISLICLAICIFTFWFFSEIQSTRTTIHKNLCCSLFLAELVFLVGINTNTNKLFCSIIAGLLHYFFLAAFAWMCIEGIHLYLIVVGVIYNKGFLHKNFYIFGYLSPAVVVGFSAALGYRYYGTTKVCWLSTENNFIWSFIGPACLIILVNLLAFGVIIYKVFRHTAGLKPEVSCFENIRSCARGALALLFLLGTTWIFGVLHVVHASVVTAYLFTVSNAFQGMFIFLFLCVLSRKIQEEYYRLFKNVPCCFGCLR

SEQ ID NO: 9051 - protein, 452 aa, Homo sapiens
MEVTTRLTWNDENHLRKLLGNVSLSLLYKSSVHGGSIEDMVERCSRQGCTITMAYIDYNMIVAFMLGNYINLHESSTEPNDSLWFSLQKKNDTTEIETLLLNTAPKIIDEQLVCRLSKTDIFIICRDNKIYLDKMITRNLKLRFYGHRQYLECEVFRVEGIKDNLDDIKRIIKAREHRNRLLADIRDYRPYADLVSEIRILLVGPVGSGKSSFFNSVKSIFHGHVTGQAVVGSDITSITERYRIYSVKDGKNGKSLPFMLCDTMGLDGAEGAGLCMDDIPHILKGCMPDRYQFNSRKPITPEHSTFITSPSLKDRIHCVAYVLDINSIDNLYSKMLAKVKQVHKEVLNCGIAYVALLTKVDDCSEVLQDNFLNMSRSMTSQSRVMNVHKMLGIPISNILMVGNYASDLELDPMKDILILSALRQMLRAADDFLEDLPLEETGAIERALQPCI

SEQ ID NO: 9052 - protein, 861 aa, Homo sapiens
MPILLFLIDTSASMNQRTDLGTSYLDIAKGAVELFLKLRARDPASRGDRYMLVTYDEPPYCIKAGWKENHATFMSELKNLQASGLTTLGQALRSSFDLLNLNRLISGIDNYGQGRNPFFLEPSILITITDGNKLTSTAGVQEELHLPLNSPLPGSELTKEPFRWDQRLFALVLRLPGVASTEPEQLGSVPTDESAITQMCEVTGGRSYCVRTQRMLNQCLESLVQKVQSGVVINFEKTGPDPLPIGEDGLMDSSRPSNSFAAQPWHSCHKLIYVRPNSKTGVPVGHWPIPESFWPDQNLPSLPPRTSHPVVRFSCVDCEPMVIDKLPFDKYELEPSPLTQYILERKSPHTCWQVFVTSSGKYNELGYPFGYLKASTTLTCVNLFVMPYNYPVLLPLLDDLFKVHKLKPNLKWRQAFDSYLKTLPPYYLLTKLESERILASVGKKPPQEIGIKVKNHSGGGMSLTHNKNFRKLLKEITGETALRLTELNTKEFAGFQIGLLNKDLKPQTYRNAYDIPRRGLLDQLTRMRSNLLKTHKFIVGQDEDSLHSVPVAQMGNYQEYLKTLASPLREIDPDQPKRLHTFGNPFKQDKKGMMIDEADEFVAGPQNKVKRPGEPNSPMSSKRRRSMSLLLRKPQTPPTVTNHVGGKGPPSASWFPSYPNLIKPTLVHTDATIIHDGHEEKMENGQITPDGFLSKSAPSELINMTGDLMPPNQVDSLSDDFTSLSKDGLIQKPGSNAFVGGAKNCSLSVDDQKDPVASTLGAMPNTLQITPAMAQGINADIKHQLMKEVRKFGRKYERIFILLEEVQGPLEMKKQFVEFTIKEAARFKRRVLIQYLEKVLEKINSHHLHNNISHINSRSSC

SEQ ID NO: 9053 - protein, 315 aa, Homo sapiens
MPLKLRGKKKAKSKETAGLVEGEPTGAGGGSLSASRAPARRLVFHAQLAHGSATGRVEGFSSIQELYAQIAGAFEISPSEILYCTLNTPKIDMERLLGGQLGLEDFIFAHVKGIEKEVNVYKSEDSLGLTITDNGVGYAFIKRIKDGGVIDSVKTICVGDHIESINGENIVGWRHYDVAKKLKELKKEELFTMKLIEPKKAFEIELRSKAGKSSGEKIGCGRATLRLRSKGPATVEEMPSETKAKAIEKIDDVLELYMGIRDIDLATTMFEAGKDKVNPDEFAVALDETLGDFAFPDEFVFDVWGVIGDAKRRGL

SEQ ID NO: 9054 - protein, 2649 aa, Homo sapiens
MHSSSYSYRSSDSVFSNTTSTRTSLDSNENLLLVHCGPTLINSCISFGSESFDGHRLEMLQQIANRVQRDSVICEDKLILAGNALQSDSKRLESGVQFQNEAEIAGYILECENLLRQHVIDVQILIDGKYYQADQLVQRVAKLRDEIMALRNECSSVYSKGRILTTEQTKLMISGITQSLNSGFAQTLHPSLTSGLTQSLTPSLTSSSMTSGLSSGMTSRLTPSVTPAYTPGFPSGLVPNFSSGVEPNSLQTLKLMQIRKPLLKSSLLDQNLTEEEINMKFVQDLLNWVDEMQVQLDRTEWGSDLPSVESHLENHKNVHRAIEEFESSLKEAKISEIQMTAPLKLTYAEKLHRLESQYAKLLNTSRNQERHLDTLHNFVSRATNELIWLNEKEEEEVAYDWSERNTNIARKKDYHAELMRELDQKEENIKSVQEIAEQLLLENHPARLTIEAYRAAMQTQWSWILQLCQCVEQHIKENTAYFEFFNDAKEATDYLRNLKDAIQRKYSCDRSSSIHKLEDLVQESMEEKEELLQYKSTIANLMGKAKTIIQLKPRNSDCPLKTSIPIKAICDYRQIEITIYKDDECVLANNSHRAKWKVISPTGNEAMVPSVCFTVPPPNKEAVDLANRIEQQYQNVLTLWHESHINMKSVVSWHYLINEIDRIRASNVASIKTMLPGEHQQVLSNLQSRFEDFLEDSQESQVFSGSDITQLEKEVNVCKQYYQELLKSAEREEQEESVYNLYISEVRNIRLRLENCEDRLIRQIRTPLERDDLHESVFRITEQEKLKKELERLKDDLGTITNKCEEFFSQAAASSSVPTLRSELNVVLQNMNQVYSMSSTYIDKLKTVNLVLKNTQAAEALVKLYETKLCEEEAVIADKNNIENLISTLKQWRSEVDEKRQVFHALEDELQKAKAISDEMFKTYKERDLDFDWHKEKADQLVERWQNVHVQIDNRLRDLEGIGKSLKYYRDTYHPLDDWIQQVETTQRKIQENQPENSKTLATQLNQQKMLVSEIEMKQSKMDECQKYAEQYSATVKDYELQTMTYRAMVDSQQKSPVKRRRMQSSADLIIQEFMDLRTRYTALVTLMTQYIKFAGDSLKRLEEEEIKRCKETSEHGAYSDLLQRQKATVLENSKLTGKISELERMVAELKKQKSRVEEELPKVREAAENELRKQQRNVEDISLQKIRAESEAKQYRRELETIVREKEAAERELERVRQLTIEAEAKRAAVEENLLNFRNQLEENTFTRRTLEDHLKRKDLSLNDLEQQKNKLMEELRRKRDNEEELLKLIKQMEKDLAFQKQVAEKQLKEKQKIELEARRKITEIQYTCRENALPVCPITQATSCRAVTGLQQEHDKQKAEELKQQVDELTAANRKAEQDMRELTYELNALQLEKTSSEEKARLLKDKLDETNNTLRCLKLELERKDQAEKGYSQQLRELGRQLNQTTGKAEEAMQEASDLKKIKRNYQLELESLNHEKGKLQREVDRITRAHAVAEKNIQHLNSQIHSFRDEKELERLQICQRKSDHLKEQFEKSHEQLLQNIKAEKENNDKIQRLNEELEKSNECAEMLKQKVEELTRQNNETKLMMQRIQAESENIVLEKQTIQQRCEALKIQADGFKDQLRSTNEHLHKQTKTEQDFQRKIKCLEEDLAKSQNLVSEFKQKCDQQNIIIQNTKKEVRNLNAELNASKEEKRRGEQKVQLQQAQVQELNNRLKKVQDELHLKTIEEQMTHRKMVLFQEESGKFKQSAEEFRKKMEKLMESKVITENDISGIRLDFVSLQQENSRAQENAKLCETNIKELERQLQQYREQMQQGQHMEANHYQKCQKLEDELIAQKREVENLKQKMDQQIKEHEHQLVLLQCEIQKKSTAKDCTFKPDFEMTVKECQHSGELSSRNTGHLHPTPRSPLLRWTQEPQPLEEKWQHRVVEQIPKEVQFQPPGAPLEKEKSQQCYSEYFSQTSTELQITFDETNPITRLSEIEKIRDQALNNSRPPVRYQDNACEMELVKVLTPLEIAKNKQYDMHTEVTTLKQEKNPVPSAEEWMLEGCRASGGLKKGDFLKKGLEPETFQNFDGDHACSVRDDEFKFQGLRHTVTARQLVEAKLLDMRTIEQLRLGLKTVEEVQKTLNKFLTKATSIAGLYLESTKEKISFASAAERIIIDKMVALAFLEAQAATGFIIDPISGQTYSVEDAVLKGVVDPEFRIRLLEAEKAAVGYSYSSKTLSVFQAMENRMLDRQKGKHILEAQIASGGVIDPVRGIRVPPEIALQQGLLNNAILQFLHEPSSNTRVFPNPNNKQALYYSELLRMCVFDVESQCFLFPFGERNISNLNVKKTHRISVVDTKTGSELTVYEAFQRNLIEKSIYLELSGQQYQWKEAMFFESYGHSSHMLTDTKTGLHFNINEAIEQGTIDKALVKKYQEGLITLTELADSLLSRLVPKKDLHSPVAGYWLTASGERISVLKASRRNLVDRITALRCLEAQVSTGGIIDPLTGKKYRVAEALHRGLVDEGFAQQLRQCELVITGIGHPITNKMMSVVEAVNANIINKEMGIRCLEFQYLTGGLIEPQVHSRLSIEEALQVGIIDVLIATKLKDQKSYVRNIICPQTKRKLTYKEALEKADFDFHTGLKLLEVSEPLMTGISSLYYSS

SEQ ID NO: 9055 - protein, 655 aa, Homo sapiens
MADYSTVPPPSSGSAGGGGGGGGGGGVNDAFKDALQRARQIAAKIGGDAGTSLNSNDYGYGGQKRPLEDGDQPDAKKVAPQNDSFGTQLPPMHQQQSRSVMTEEYKVPDGMVGFIIGRGGEQISRIQQESGCKIQIAPDSGGLPERSCMLTGTPESVQSAKRLLDQIVEKGRPAPGFHHGDGPGNAVQEIMIPASKAGLVIGKGGETIKQLQERAGVKMVMIQDGPQNTGADKPLRITGDPYKVQQAKEMVLELIRDQGGFREVRNEYGSRIGGNEGIDVPIPRFAVGIVIGRNGEMIKKIQNDAGVRIQFKPDDGTTPERIAQITGPPDRCQHAAEIITDLLRSVQAGNPGGPGPGGRGRGRGQGNWNMGPPGGLQEFNFIVPTGKTGLIIGKGGETIKSISQQSGARIELQRNPPPNADPNMKLFTIRGTPQQIDYARQLIEEKIGGPVNPLGPPVPHGPHGVPGPHGPPGPPGPGTPMGPYNPAPYNPGPPGPAPHGPPAPYAPQGWGNAYPHWQQQAPPDPAKAGTDPNSAAWAAYYAHYYQQQAQPPPAAPAGAPTTTQTNGQGDQQNPAPAGQVDYTKAWEEYYKKMGQAVPAPTGAPPGGQPDYSAAWAEYYRQQAAYYAQTSPQGMPQHPPAPQGFANHARSHHHLY

SEQ ID NO: 9056 - protein, 644 aa, Homo sapiens
MADYSTVPPPSSGSAGGGGGGGGGGGVNDAFKDALQRARQIAAKIGGDAGTSLNSNDYGYGGQKRPLEDGDQPDAKKVAPQNDSFGTQLPPMHQQQSRSVMTEEYKVPDGMVGFIIGRGGEQISRIQQESGCKIQIAPDSGGLPERSCMLTGTPESVQSAKRLLDQIVEKGRPAPGFHHGDGPGNAVQEIMIPASKAGLVIGKGGETIKQLQERAGVKMVMIQDGPQNTGADKPLRITGDPYKVQQAKEMVLELIRDQGGFREVRNEYGSRIGGNEGIDVPIPRFAVGIVIGRNGEMIKKIQNDAGVRIQFKPDDGTTPERIAQITGPPDRCQHAAEIITDLLRSVQAGNPGGPGPGGRGRGRGQGNWNMGPPGGLQEFNFIVPTGKTGLIIGKGGETIKSISQQSGARIELQRNPPPNADPNMKLFTIRGTPQQIDYARQLIEEKIGGPVNPLGPPVPHGPHGVPGPHGPPGPPGPGTPMGPYNPAPYNPGPPGPAPHGPPAPYAPQGWGNAYPHWQQQAPPDPAKAGTDPNSAAWAAYYAHYYQQQAQPPPAAPAGAPTTTQTNGQGDQQNPAPAGQVDYTKAWEEYYKKMGQAVPAPTGAPPGGQPDYSAAWAEYYRQQAAYYAQTSPQGMPQHPPAPQGQ

SEQ ID NO: 9057 - protein, 1030 aa, Homo sapiens
MAAAAAVEAAAPMGALWGLVHDFVVGQQEGPADQVAADVKSGNYTVLQVVEALGSSLENPEPRTRARAIQLLSQVLLHCHTLLLEKEVVHLILFYENRLKDHHLVIPSVLQGLKALSLCVALPPGLAVSVLKAIFQEVHVQSLPQVDRHTVYNIITNFMRTREEELKSLGADFTFGFIQVMDGEKDPRNLLVAFRIVHDLISRDYSLGPFVEELFEVTSCYFPIDFTPPPNDPHGIQREDLILSLRAVLASTPRFAEFLLPLLIEKVDSEVLSAKLDSLQTLNACCAVYGQKELKDFLPSLWASIRREVFQTASERVEAEGLAALHSLTACLSRSVLRADAEDLLDSFLSNILQDCRHHLCEPDMKLVWPSAKLLQAAAGASARACDSVTSNVLPLLLEQFHKHSQSSQRRTILEMLLGFLKLQQKWSYEDKDQRPLNGFKDQLCSLVFMALTDPSTQLQLVGIRTLTVLGAQPDLLSYEDLELAVGHLYRLSFLKEDSQSCRVAALEASGTLAALYPVAFSSHLVPKLAEELRVGESNLTNGDEPTQCSRHLCCLQALSAVSTHPSIVKETLPLLLQHLWQVNRGNMVAQSSDVIAVCQSLRQMAEKCQQDPESCWYFHQTAIPCLLALAVQASMPEKEPSVLRKVLLEDEVLAAMVSVIGTATTHLSPELAAQSVTHIVPLFLDGNVSFLPENSFPSRFQPFQDGSSGQRRLIALLMAFVCSLPRNVEIPQLNQLMRELLELSCCHSCPFSSTAAAKCFAGLLNKHPAGQQLDEFLQLAVDKVEAGLGSGPCRSQAFTLLLWVTKALVLRYHPLSSCLTARLMGLLSDPELGPAAADGFSLLMSDCTDVLTRAGHAEVRIMFRQRFFTDNVPALVQGFHAAPQDVKPNYLKGLSHVLNRLPKPVLLPELPTLLSLLLEALSCPDCVVQLSTLSCLQPLLLEAPQVMSLHVDTLVTKFLNLSSSPSMAVRIAALQCMHALTRLPTPVLLPYKPQVIRALAKPLDDKKRLVRKEAVSARGEWFLLGSPGS

SEQ ID NO: 9058 - protein, 5375 aa, Homo sapiens
MAGYLSPAAYLYVEEQEYLQAYEDVLERYKDERDKVQKKTFTKWINQHLMKVRKHVNDLYEDLRDGHNLISLLEVLSGDTLPREKGRMRFHRLQNVQIALDYLKRRQVKLVNIRNDDITDGNPKLTLGLIWTIILHFQISDIHVTGESEDMSAKERLLLWTQQATEGYAGIRCENFTTCWRDGKLFNAIIHKYRPDLIDMNTVAVQSNLANLEHAFYVAEKIGVIRLLDPEDVDVSSPDEKSVITYVSSLYDAFPKVPEGGEGIGANDVEVKWIEYQNMVNYLIQWIRHHVTTMSERTFPNNPVELKALYNQYLQFKETEIPPKETEKSKIKRLYKLLEIWIEFGRIKLLQGYHPNDIEKEWGKLIIAMLEREKALRPEVERLEMLQQIANRVQRDSVICEDKLILAGNALQSDSKRLESGVQFQNEAEIAGYILECENLLRQHVIDVQILIDGKYYQADQLVQRVAKLRDEIMALRNECSSVYSKGRILTTEQTKLMISGITQSLNSGFAQTLHPSLTSGLTQSLTPSLTSSSMTSGLSSGMTSRLTPSVTPAYTPGFPSGLVPNFSSGVEPNSLQTLKLMQIRKPLLKSSLLDQNLTEEEINMKFVQDLLNWVDEMQVQLDRTEWGSDLPSVESHLENHKNVHRAIEEFESSLKEAKISEIQMTAPLKLTYAEKLHRLESQYAKLLNTSRNQERHLDTLHNFVSRATNELIWLNEKEEEEVAYDWSERNTNIARKKDYHAELMRELDQKEENIKSVQEIAEQLLLENHPARLTIEAYRAAMQTQWSWILQLCQCVEQHIKENTAYFEFFNDAKEATDYLRNLKDAIQRKYSCDRSSSIHKLEDLVQESMEEKEELLQYKSTIANLMGKAKTIIQLKPRNSDCPLKTSIPIKAICDYRQIEITIYKDDECVLANNSHRAKWKVISPTGNEAMVPSVCFTVPPPNKEAVDLANRIEQQYQNVLTLWHESHINMKSVVSWHYLINEIDRIRASNVASIKTMLPGEHQQVLSNLQSRFEDFLEDSQESQVFSGSDITQLEKEVNVCKQYYQELLKSAEREEQEESVYNLYISEVRNIRLRLENCEDRLIRQIRTPLERDDLHESVFRITEQEKLKKELERLKDDLGTITNKCEEFFSQAAASSSVPTLRSELNVVLQNMNQVYSMSSTYIDKLKTVNLVLKNTQAAEALVKLYETKLCEEEAVIADKNNIENLISTLKQWRSEVDEKRQVFHALEDELQKAKAISDEMFKTYKERDLDFDWHKEKADQLVERWQNVHVQIDNRLRDLEGIGKSLKYYRDTYHPLDDWIQQVETTQRKIQENQPENSKTLATQLNQQKMLVSEIEMKQSKMDECQKYAEQYSATVKDYELQTMTYRAMVDSQQKSPVKRRRMQSSADLIIQEFMDLRTRYTALVTLMTQYIKFAGDSLKRLEEEEKSLEEEKKEHVEKAKELQKWVSNISKTLKDAEKAGKPPFSKQKISSEEISTKKEQLSEALQTIQLFLAKHGDKMTDEERNELEKQVKTLQESYNLLFSESLKQLQESQTSGDVKVEEKIVAERQQEYKEKLQGICDLLTQTENRLIGHQEAFMIGDGTVELKKYQSKQEELQKDMQGSAQALAEVVKNTENFLKENGEKLSQEDKALIEQKLNEAKIKCEQLNLKAEQSKKELDKVVTTAIKEETEKVAAVKQLEESKTKIENLLDWLSNVDKDSERAGTKHKQVIEQNGTHFQEGDGKSAIGEEDEVNGNLLETDVDGQVGTTQENLNQQYQKVKAQHEKIISQHQAVIIATQSAQVLLEKQGQYLSPEEKEKLQKNMKELKVHYETALAESEKKMKLTHSLQEELEKFDADYTEFEHWLQQSEQELENLEAGADDINGLMTKLKRQKSFSEDVISHKGDLRYITISGNRVLEAAKSCSKRDGGKVDTSATHREVQRKLDHATDRFRSLYSKCNVLGNNLKDLVDKYQHYEDASCGLLAGLQACEATASKHLSEPIAVDPKNLQRQLEETKALQGQISSQQVAVEKLKKTAEVLLDARGSLLPAKNDIQKTLDDIVGRYEDLSKSVNERNEKLQITLTRSLSVQDGLDEMLDWMGNVESSLKEQGQVPLNSTALQDIISKNIMLEQDIAGRQSSINAMNEKVKKFMETTDPSTASSLQAKMKDLSARFSEASHKHKETLAKMEELKTKVELFENLSEKLQTFLETKTQALTEVDVPGKDVTELSQYMQESTSEFLEHKKHLEVLHSLLKEISSHGLPSDKALVLEKTNNLSKKFKEMEDTIKEKKEAVTSCQEQLDAFQVLVKSLKSWIKETTKKVPIVQPSFGAEDLGKSLEDTKKLQEKWSLKTPEIQKVNNSGISLCNLISAVTTPAKAIAAVKSGGAVLNGEGTATNTEEFWANKGLTSIKKDMTDISHGYEDLGLLLKDKIAELNTKLSKLQKAQEESSAMMQWLQKMNKTATKWQQTPAPTDTEAVKTQVEQNKSFEAELKQNVNKVQELKDKLTELLEENPDTPEAPRWKQMLTEIDSKWQELNQLTIDRQQKLEESSNNLTQFQTVEAQLKQWLVEKELMVSVLGPLSIDPNMLNTQRQQVQILLQEFATRKPQYEQLTAAGQGILSRPGEDPSLRGIVKEQLAAVTQKWDSLTGQLSDRCDWIDQAIVKSTQYQSLLRSLSDKLSDLDNKLSSSLAVSTHPDAMNQQLETAQKMKQEIQQEKKQIKVAQALCEDLSALVKEEYLKAELSRQLEGILKSFKDVEQKAENHVQHLQSACASSHQFQQMSRDFQAWLDTKKEEQNKSHPISAKLDVLESLIKDHKDFSKTLTAQSHMYEKTIAEGENLLLKTQGSEKAALQLQLNTIKTNWDTFNKQVKERENKLKESLEKALKYKEQVETLWPWIDKCQNNLEEIKFCLDPAEGENSIAKLKSLQKEMDQHFGMVELLNNTANSLLSVCEIDKEVVTDENKSLIQKVDMVTEQLHSKKFCLENMTQKFKEFQEVSKESKRQLQCAKEQLDIHDSLGSQAYSNKYLTMLQTQQKSLQALKHQVDLAKRLAQDLVVEASDSKGTSDVLLQVETIAQEHSTLSQQVDEKCSFLETKLQGIGHFQNTIREMFSQFAEFDDELDSMAPVGRDAETLQKQKETIKAFLKKLEALMASNDNANKTCKMMLATEETSPDLVGIKRDLEALSKQCNKLLDRAQAREEQVEGTIKRLEEFYSKLKEFSILLQKAEEHEESQGPVGMETETINQQLNMFKVFQKEEIEPLQGKQQDVNWLGQGLIQSAAKSTSTQGLEHDLDDVNARWKTLNKKVAQRAAQLQEALLHCGRFQDALESLLSWMVDTEELVANQKPPSAEFKVVKAQIQEQKLLQRLLDDRKSTVEVIKREGEKIATTAEPADKVKILKQLSLLDSRWEALLNKAETRNRQLEGISVVAQQFHETLEPLNEWLTTIEKRLVNCEPIGTQASKLEEQIAQHKVLQEDILLRKQNVDQALLNGLELLKQTTGDEVLIIQDKLEAIKARYKDITKLSTDVAKTLEQALQLARRLHSTHEELCTWLDKVEVELLSYETQVLKGEEASQAQMRPKELKKEAKNNKALLDSLNEVSSALLELVPWRAREGLEKMVAEDNERYRLVSDTITQKVEEIDAAILRSQQFDQAADAELSWITETEKKLMSLGDIRLEQDQTSAQLQVQKTFTMEILRHKDIIDDLVKSGHKIMTACSEEEKQSMKKKLDKVLKNYDTICQINSERYLQLERAQSLVNQFWETYEELWPWLTETQSIISQLPAPALEYETLRQQQEEHRQLRELIAEHKPHIDKMNKTGPQLLELSPGEGFSIQEKYVAADTLYSQIKEDVKKRAVALDEAISQSTQFHDKIDQILESLERIVERLRQPPSISAEVEKIKEQISENKNVSVDMEKLQPLYETLKQRGEEMIARSGGTDKDISAKAVQDKLDQMVFIWENIHTLVEEREAKLLDVMELAEKFWCDHMSLIVTIKDTQDFIRDLEDPGIDPSVVKQQQEAAETIREEIDGLQEELDIVINLGSELIAACGEPDKPIVKKSIDELNSAWDSLNKAWKDRIDKLEEAMQAAVQYQDGLQAVFDWVDIAGGKLASMSPIGTDLETVKQQIEELKQFKSEAYQQQIEMERLNHQAELLLKKVTEESDKHTVQDPLMELKLIWDSLEERIINRQHKLEGALLALGQFQHALDELLAWLTHTEGLLSEQKPVGGDPKAIEIELAKHHVLQNDVLAHQSTVEAVNKAGNDLIESSAGEEASNLQNKLEVLNQRWQNVLEKTEQRKQQLDGALRQAKGFHGEIEDLQQWLTDTERHLLASKPLGGLPETAKEQLNVHMEVCAAFEAKEETYKSLMQKGQQMLARCPKSAETNIDQDINNLKEKWESVETKLNERKTKLEEALNLAMEFHNSLQDFINWLTQAEQTLNVASRPSLILDTVLFQIDEHKVFANEVNSHREQIIELDKTGTHLKYFSQKQDVVLIKNLLISVQSRWEKVVQRLVERGRSLDDARKRAKQFHEAWSKLMEWLEESEKSLDSELEIANDPDKIKTQLAQHKEFQKSLGAKHSVYDTTNRTGRSLKEKTSLADDNLKLDDMLSELRDKWDTICGKSVERQNKLEEALLFSGQFTDALQALIDWLYRVEPQLAEDQPVHGDIDLVMNLIDNHKAFQKELGKRTSSVQALKRSARELIEGSRDDSSWVKVQMQELSTRWETVCALSISKQTRLEAALRQAEEFHSVVHALLEWLAEAEQTLRFHGVLPDDEDALRTLIDQHKEFMKKLEEKRAELNKATTMGDTVLAICHPDSITTIKHWITIIRARFEEVLAWAKQHQQRLASALAGLIAKQELLEALLAWLQWAETTLTDKDKEVIPQEIEEVKALIAEHQTFMEEMTRKQPDVDKVTKTYKRRAADPSSLQSHIPVLDKGRAGRKRFPASSLYPSGSQTQIETKNPRVNLLVSKWQQVWLLALERRRKLNDALDRLEELREFANFDFDIWRKKYMRWMNHKKSRVMDFFRRIDKDQDGKITRQEFIDGILSSKFPTSRLEMSAVADIFDRDGDGYIDYYEFVAALHPNKDAYKPITDADKIEDEVTRQVAKCKCAKRFQVEQIGDNKYRFFLGNQFGDSQQLRLVRILRSTVMVRVGGGWMALDEFLVKNDPCRVHHHGSKMLRSESNSSITTTQPTIAKGRTNMELREKFILADGASQGMAAFRPRGRRSRPSSRGASPNRSTSVSSQAAQAASPQVPATTTPKGTPIQGSKLRLPGYLSGKGFHSGEDSGLITTAAARVRTQFADSKKTPSRPGSRAGSKAGSRASSRRGSDASDFDISEIQSVCSDVETVPQTHRPTPRAGSRPSTAKPSKIPTPQRKSPASKLDKSSKR

SEQ ID NO: 9059 - protein, 632 aa, Homo sapiens
MSDCCSAPGISWEAGVGRPAVPGLELQIRRGAMSEETVSESQFSLKTAALRVFDLPLTWYYSLSQIKFSPVAKKLFVVTAVSAISVIFLAHHFKRKRGKKKGKILPWEPEHLILEYTKRAASDKGSSCSSSRQNLTLSLSSTKDKGSQVCNYANGGLFSKYSGSAQSLASVQSVNSCHSCACGNSNSWDKADEDDIKLVNIPVTTPENLYLMGMELFEEALRRWEQALTFRNRQAEDEACGSIKLGAGDAIAEENVDDIISTEFIHKLEALLQRAYRLQEEFEATLGASDPNSLADDIDKDTDITMKGNVEDFGLRDTLSIASTDSFASAAELAEHREVRHTYSLESLCHCPFYEEAMHLVEEGKIYSRVLRTEMLECLGDSDFLAKLHCIRQAFQVILSESANRIFLAESGRKILSALIVKARKNPKKFEDVFDEMIYFLEQTDHWGSTEMELAARGVKNLNFYDVVLDFILMDSFEDLENPPTSIQNVVNNRWLNSSFKETAVASSCWSVLKQKRQQMKIPDGFFAHFYAICEHISPVLAWGFLGPRNSLYDLCCFFKNQVLLFLKDIFDFEKVRYSSTETLAEDLMQLLIRRTELLMAYLEADALRHTSSCLSSHGHVMSTGLLEAKVQ

SEQ ID NO: 9060 - protein, 828 aa, Homo sapiens
MTGSNSHITILTLKVLPHFESLGKQEKIPNKMSAFRNHCPHLDSVGEITKEDLIQKSLGTCQDCKVQGPNLWACLENRCSYVGCGESQVDHSTIHSQETKHYLTVNLTTLRVWCYACSKEVFLDRKLGTQPSLPHVRQPHQIQENSVQDFKIPSNTTLKTPLVAVFDDLDIEADEEDELRARGLTGLKNIGNTCYMNAALQALSNCPPLTQFFLDCGGLARTDKKPAICKSYLKLMTELWHKSRPGSVVPTTLFQGIKTVNPTFRGYSQQDAQEFLRCLMDLLHEELKEQVMEVEEDPQTITTEETMEEDKSQSDVDFQSCESCSNSDRAENENGSRCFSEDNNETTMLIQDDENNSEMSKDWQKEKMCNKINKVNSEGEFDKDRDSISETVDLNNQETVKVQIHSRASEYITDVHSNDLSTPQILPSNEGVNPRLSASPPKSGNLWPGLAPPHKKAQSASPKRKKQHKKYRSVISDIFDGTIISSVQCLTCDRVSVTLETFQDLSLPIPGKEDLAKLHSSSHPTSIVKAGSCGEAYAPQGWIAFFMEYVKSWFWGPVVTLQDCLAAFFARDELKGDNMYSCEKCKKLRNGVKFCKVQNFPEILCIHLKRFRHELMFSTKISTHVSFPLEGLDLQPFLAKDSPAQIVTYDLLSVICHHGTASSGHYIAYCRNNLNNLWYEFDDQSVTEVSESTVQNAEAYVLFYRKSSEEAQKERRRISNLLNIMEPSLLQFYISRQWLNKFKTFAEPGPISNNDFLCIHGGVPPRKAGYIEDLVLMLPQNIWDNLYSRYGGGPAVNHLYICHTCQIEAEKIEKRRKTELEIFIRVKK

SEQ ID NO: 9061 - protein, 911 aa, Homo sapiens
MSAFRNHCPHLDSVGEITKEDLIQKSLGTCQDCKVQGPNLWACLENRCSYVGCGESQVDHSTIHSQETKHYLTVNLTTLRVWCYACSKEVFLDRKLGTQPSLPHVRQPHQIQENSVQDFKIPSNTTLKTPLVAVFDDLDIEADEEDELRARGLTGLKNIGNTCYMNAALQALSNCPPLTQFFLDCGGLARTDKKPAICKSYLKLMTELWHKSRPGSVVPTTLFQGIKTVNPTFRGYSQQDAQEFLRCLMDLLHEELKEQVMEVEEDPQTITTEETMEEDKSQSDVDFQSCESCSNSDRAENENGSRCFSEDNNETTMLIQDDENNSEMSKDWQKEKMCNKINKVNSEGEFDKDRDSISETVDLNNQETVKVQIHSRASEYITDVHSNDLSTPQILPSNEGVNPRLSASPPKSGNLWPGLAPPHKKAQSASPKRKKQHKKYRSVISDIFDGTIISSVQCLTCDRVSVTLETFQDLSLPIPGKEDLAKLHSSSHPTSIVKAGSCGEAYAPQGWIAFFMEYVKRFVVSCVPSWFWGPVVTLQDCLAAFFARDELKGDNMYSCEKCKKLRNGVKFCKVQNFPEILCIHLKRFRHELMFSTKISTHVSFPLEGLDLQPFLAKDSPAQIVTYDLLSVICHHGTASSGHYIAYCRNNLNNLWYEFDDQSVTEVSESTVQNAEAYVLFYRKSSEEAQKERRRISNLLNIMEPSLLQFYISRQWLNKFKTFAEPGPISNNDFLCIHGGVPPRKAGYIEDLVLMLPQNIWDNLYSRYGGGPAVNHLYICHTCQIEAEKIEKRRKTELEIFIRLNRAFQKEDSPATFYCISMQWFREWESFVKGKDGDPPGPIDNTKIAVTKCGNVMLRQGADSGQISEETWNFLQSIYGGGPEVILRPPVVHVDPDILQAEEKIEVETRSL

SEQ ID NO: 9062 - protein, 324 aa, Homo sapiens
MSSSVEQKKGPTRQRKCGFCKSNRDKECGQLLISENQKVAAHHKCMLFSSALVSSHSDNESLGGFSIEDVQKEIKRGTKLMCSLCHCPGATIGCDVKTCHRTYHYHCALHDKAQIREKPSQGIYMVYCRKHKKTAHNSEAADLEESFNEHELEPSSPKSKKKSRKGRPRKTNFKGLSEDTRSTSSHGTDEMESSSYRDRSPHRSSPSDTRPKCGFCHVGEEENEARGKLHIFNAKKAAAHYKCMLFSSGTVQLTTTSRAEFGDFDIKTVLQEIKRGKRMKCTLCSQPGATIGCEIKACVKTYHYHCGVQDKAKYIENMSRGIYK

SEQ ID NO: 9063 - protein, 312 aa, Homo sapiens
MSSSVEQKKGPTRQRKCGFCKSNRDKECGQLLISENQKVAAHHKCMLFSSALVSSHSDNESLGGFSIEDVQKEIKRGTKLMCSLCHCPGATIGCDVKTCHRTYHYHCALHDKAQIREKPSQGIYMVYCRKHKKTAHNSEAADLEESFNEHELEPSSPKSKKKSRKGRPRKTNFKGLSEDTRSTSSHGTDEMESSSYRDRSPHRSSPSDTRPKCGFCHVGEEENEARGKLHIFNAKKAAAHYKCMLFSSGTVQLTTTSRAEFGDFDIKTVLQEIKRGKRMVCSFYICYATLHLICCFKFRVHPKFIQSSENLK

SEQ ID NO: 9064 - protein, 903 aa, Homo sapiens
MAASRSTRVTRSTVGLNGLDESFCGRTLRNRSIAHPEEISSNSQVRSRSPKKRPEPVPIQKGNNNGRTTDLKQQSTRESWVSPRKRGLSSSEKDNIERQAIENCERRQTEPVSPVLKRIKRCLRSEAPNSSEEDSPIKSDKESVEQRSTVVDNDADFQGTKRACRCLILDDCEKREIKKVNVSEEGPLNSAVVEEITGYLAVNGVDDSDSAVINCDDCQPDGNTKQNSIGSYVLQEKSVAENGDTDTQTSMFLDSRKEDSYIDHKVPCTDSQVQVKLEDHKIVTACLPVEHVNQLTTEPATGPFSETQSSLRDSEEEVDVVGDSSASKEQCKENTNNELDTSLESMPASGEPEPSPVLDCVSAQMMSLSEPQEHRYTLRTSPRRAAPTRGSPTKNSSPYRENGQFEENNLSPNETNATVSDNVSQSPTNPGEISQNEKGICCDSQNNGSEGVSKPPSEARLNIGHLPSAKESASQHITEEEDDDPDVYYFESDHVALKHNKDYQRLLQTIAVLEAQRSQAVQDLESLGRHQREALKNPIGFVEKLQKKADIGLPYPQRVVQLPEIVWDQYTHSLGNFEREFKNRKRHTRRVKLVFDKVGLPARPKSPLDPKKDGESLSYSMLPLSDGPEGSSSRPQMIRGRLCDDTKPETFNQLWTVEEQKKLEQLLIKYPPEEVESRRWQKIADELGNRTAKQVASRVQKYFIKLTKAGIPVPGRTPNLYIYSKKSSTSRRQHPLNKHLFKPSTFMTSHEPPVYMDEDDDRSCFHSHMNTAVEDASDDESIPIMYRNLPEYKELLQFKKLKKQKLQQMQAESGFVQHVGFKCDNCGIEPIQGVRWHCQDCPPEMSLDFCDSCSDCLHETDIHKEDHQLEPIYRSETFLDRDYCVSQGTSYNYLDPNYFPANR

SEQ ID NO: 9065 - protein, 395 aa, Homo sapiens
MAVTDSLSRAATVLATVLLLSFGSVAASHIEDQAEQFFRSGHTNNWAVLVCTSRFWFNYRHVANTLSVYRSVKRLGIPDSHIVLMLADDMACNPRNPKPATVFSHKNMELNVYGDDVEVDYRSYEVTVENFLRVLTGRIPPSTPRSKRLLSDDRSNILIYMTGHGGNGFLKFQDSEEITNIELADAFEQMWQKRRYNELLFIIDTCQGASMYERFYSPNIMALASSQVGEDSLSHQPDPAIGVHLMDRYTFYVLEFLEEINPASQTNMNDLFQVCPKSLCVSTPGHRTDLFQRDPKNVLITDFFGSVRKVEITTETIKLQQDSEIMESSYKEDQMDEKLMEPLKYAEQLPVAQIIHQKPKLKDWHPPGGFILGLWALIIMVFFKTYGIKHMKFIF

SEQ ID NO: 9066 - protein, 136 aa, Homo sapiens
MAHYITFLCMVLVLLLQNSVLAEDGEVRSSCRTAPTDLVFILDGSYSVGPENFEIVKKWLVNITKNFDIGPKFIQVGVVQYSDYPVLEIPLGSYDSGEHLTAAVESILYLGGNTKTGKAIQFALDYLFAKSSRFLT

SEQ ID NO: 9067 - protein, 954 aa, Homo sapiens
MAHYITFLCMVLVLLLQNSVLAEDGEVRSSCRTAPTDLVFILDGSYSVGPENFEIVKKWLVNITKNFDIGPKFIQVGVVQYSDYPVLEIPLGSYDSGEHLTAAVESILYLGGNTKTGKAIQFALDYLFAKSSRFLTKIAVVLTDGKSQDDVKDAAQAARDSKITLFAIGVGSETEDAELRAIANKPSSTYVFYVEDYIAISKIREVMKQKLCEESVCPTRIPVAARDERGFDILLGLDVNKKVKKRIQLSPKKIKGYEVTSKVDLSELTSNVFPEGLPPSYVFVSTQRFKVKKIWDLWRILTIDGRPQIAVTLNGVDKILLFTTTSVINGSQVVTFANPQVKTLFDEGWHQIRLLVTEQDVTLYIDDQQIENKPLHPVLGILINGQTQIGKYSGKEETVQFDVQKLRIYCDPEQNNRETACEIPGFCLNGPSDVGSTPAPCICPPGKPGLQGPKGDPGLPGNPGYPGQPGQDGKPGYQGIAGTPGVPGSPGIQGARGLPGYKGEPGRDGDKGDRGLPGFPGLHGMPGSKGEMGAKGDKGSPGFYGKKGAKGEKGNAGFPGLPGPAGEPGRHGKDGLMGSPGFKGEAGSPGAPGQDGTRGEPGIPGFPGNRGLMGQKGEIGPPGQQGKKGAPGMPGLMGSNGSPGQPGTPGSKGSKGEPGIQGMPGASGLKGEPGATGSPGEPGYMGLPGIQGKKGDKGNQGEKGIQGQKGENGRQGIPGQQGIQGHHGAKGERGEKGEPGVRGAIGSKGESGVDGLMGPAGPKGQPGDPGPQGPPGLDGKPGREFSEQFIRQVCTDVIRAQLPVLLQSGRIRNCDHCLSQHGSPGIPGPPGPIGPEGPRGLPGLPGRDGVPGLVGVPGRPGVRGLKGLPGRNGEKGSQGFGYPGEQGPPGPPGPEGPPGISKEGPPGDPGLPGKDGDHGKPGIQGQPGPPGICDPSLCFSVIARRDPFRKGPNY

SEQ ID NO: 9068 - protein, 454 aa, Homo sapiens
MHLTVFLLKGIVGFLWSCWVLVGYAKGGLGDNHVHSSFIYRRLRNHERREIQREILSILGLPHRPRPFSPGKQASSAPLFMLDLYNAMTNEENPEESEYSVRASLAEETRGARKGYPASPNGYPRRIQLSRTTPLTTQSPPLASLHDTNFLNDADMVMSFVNLVERDKDFSHQRRHYKEFRFDLTQIPHGEAVTAAEFRIYKDRSNNRFENETIKISIYQIIKEYTNRDADLFLLDTRKAQALDVGWLVFDITVTSNHWVINPQNNLGLQLCAETGDGRSINVKSAGLVGRQGPQSKQPFMVAFFKASEVLLRSVRAANKRKNQNRNKSSSHQDSSRMSSVGDYNTSEQKQACKKHELYVSFRDLGWQDWIIAPEGYAAFYCDGECSFPLNAHMNATNHAIVQTLVHLMFPDHVPKPCCAPTKLNAISVLYFDDSSNVILKKYRNMVVRSCGCH

SEQ ID NO: 9069 - protein, 913 aa, Homo sapiens
MAALFLRGFVQIGNCKTGISKSKEAFIEAVERKKKDRLVLYFKSGKYSTFRLSDNIQNVVLKSYRGNQNHLHLTLQNNNGLFIEGLSSTDAEQLKIFLDRVHQNEVQPPVRPGKGGSVFSSTTQKEINKTSFHKVDEKSSSKSFEIAKGSGTGVLQRMPLLTSKLTLTCGELSENQHKKRKRMLSSSSEMNEEFLKENNSVEYKKSKADCSRCVSYNREKQLKLKELEENKKLECESSCIMNATGNPYLDDIGLLQALTEKMVLVFLLQQGYSDGYTKWDKLKLFFELFPEKICHGLPNLGNTCYMNAVLQSLLSIPSFADDLLNQSFPWGKIPLNALTMCLARLLFFKDTYNIEIKEMLLLNLKKAISAAAEIFHGNAQNDAHEFLAHCLDQLKDNMEKLNTIWKPKSEFGEDNFPKQVFADDPDTSGFSCPVITNFELELLHSIACKACGQVILKTELNNYLSINLPQRIKAHPSSIQSTFDLFFGAEELEYKCAKCEHKTSVGVHSFSRLPRILIVHLKRYSLNEFCALKKNDQEVIISKYLKVSSHCNEGTRPPLPLSEDGEITDFQLLKVIRKMTSGNISVSWPATKESKDILAPHIGSDKESEQKKGQTVFKGASRRQQQKYLGKNSKPNELESVYSGDRAFIEKEPLAHLMTYLEDTSLCQFHKAGGKPASSPGTPLSKVDFQTVPENPKRKKYVKTSKFVAFDRIINPTKDLYEDKNIRIPERFQKVSEQTQQCDGMRICEQAPQQALPQSFPKPGTQGHTKNLLRPTKLNLQKSNRNSLLALGSNKNPRNKDILDKIKSKAKETKRNDDKGDHTYRLISVVSHLGKTLKSGHYICDAYDFEKQIWFTYDDMRVLGIQEAQMQEDRRCTGYIFFYMHNEIFEEMLKREENAQLNSKEVEETLQKE

SEQ ID NO: 9070 - protein, 645 aa, Homo sapiens
MALPACAVREFEPPRQPERGAPVRTTCPRRHSRVEAELAASRPGSVAASVRAGPPRGVSHGFHTRPLLDKPRKASSSLAGAACAPLFALLSRGRRRRMHVLRRRWDLGSLCRALLTRGLAALGHSLKHVLGAIFSKIFGPMASVGNMDEKSNKLLLALVMLFLFAVIVLQYVCPGTECQLLRLQAFSSPVPDPYRSEDESSARFVPRYNFTRGDLLRKVDFDIKGDDLIVFLHIQKTGGTTFGRHLVRNIQLEQPCECRVGQKKCTCHRPGKRETWLFSRFSTGWSCGLHADWTELTSCVPSVVDGKRDARLRPSRWRIFQILDAASKDKRGSPNTNAGANSPSSTKTRNTSKSGKNFHYITILRDPVSRYLSEWRHVQRGATWKASLHVCDGRPPTSEELPSCYTGDDWSGCPLKEFMDCPYNLANNRQVRMLSDLTLVGCYNLSVMPEKQRNKVLLESAKSNLKHMAFFGLTEFQRKTQYLFEKTFNMNFISPFTQYNTTRASSVEINEEIQKRIEGLNFLDMELYSYAKDLFLQRYQFMRQKEHQEARRKRQEQRKFLKGRLLQTHFQSQGQGQSQNPNQNQSQNPNPNANQNLTQNLMQNLTQSLSQKENRESPKQNSGKEQNDNTSNGTNDYIGSVEKWR

SEQ ID NO: 9071 - protein, 605 aa, Homo sapiens
MALPACAVREFEPPRQPERGAPVRTTCPRRHSRVEAELAASRPGSVAASVRAGPPRGVSHGFHTRPLLDKPRKASSSLAGAACAPLFALLSRGRRRRMHVLRRRWDLGSLCRALLTRGLAALGHSLKHVLGAIFSKIFGPMASVGNMDEKSNKLLLALVMLFLFAVIVLQYVCPGTECQLLRLQAFSSPVPDPYRSEDESSARFVPRYNFTRGDLLRKVDFDIKGDDLIVFLHIQKTGGTTFGRHLVRNIQLEQPCECRVGQKKCTCHRPGKRETWLFSRFSTGWSCGLHADWTELTSCVPSVVDGKRDARLRPSRNFHYITILRDPVSRYLSEWRHVQRGATWKASLHVCDGRPPTSEELPSCYTGDDWSGCPLKEFMDCPYNLANNRQVRMLSDLTLVGCYNLSVMPEKQRNKVLLESAKSNLKHMAFFGLTEFQRKTQYLFEKTFNMNFISPFTQYNTTRASSVEINEEIQKRIEGLNFLDMELYSYAKDLFLQRYQFMRQKEHQEARRKRQEQRKFLKGRLLQTHFQSQGQGQSQNPNQNQSQNPNPNANQNLTQNLMQNLTQSLSQKENRESPKQNSGKEQNDNTSNGTNDYIGSVEKWR

SEQ ID NO: 9072 - protein, 237 aa, Homo sapiens
MGNVPSAVKHCLSYQQLLREHLWIGDSVAGALDPAQETSQLSGLPEFVKIVEVGPRDGLQNEKVIVPTDIKIEFINRLSQTGLSVIEVTSFVSSRWVPQVSKRLYGMGCYEISLGDTIGVGTPGSMKRMLESVMKEIPPGALAVHCHDTYGQALANILTALQMGINVVDSAVSGLGGCPYAKGASGNVATEDLIYMLNGLGLNTGVNLYKVMEAGDFICKAVNKTTNSKVAQASFNA

SEQ ID NO: 9073 - protein, 719 aa, Homo sapiens
MNDTEKPADTPSEEEDFGDPRTYDPDFKGPVANRSCTDVLCCMIFLLCIIGYIVLGLVAWVHGDPRRAAYPTDSQGHFCGQKGTPNENKTILFYFNLLRCTSPSVLLNLQCPTTQICVSKCPEKFLTYVEMQLLYTKDKSYWEDYRQFCKTTAKPVKSLTQLLLDDDCPTAIFPSKPFLQRCFPDFSTKNGTLTIGSKMMFQDGNGGTRSVVELGIAANGINKLLDAKSLGLKVFEDYARTWYWILIGLTIAMVLSWIFLILLRFIAGCLFWVFMIGVIGIIGYGIWHCYQQYTNLQERPSSVLTIYDIGIQTNISMYFELQQTWFTFMIILCIIEVIVILMLIFLRNRIRVAIILLKEGSKAIGYVPSTLVYPALTFILLSICICYWVVTAVFLATSGVPVYKVIAPGGHCIHENQTCDPEIFNTTEIAKACPGALCNFAFYGGKSLYHQYIPTFHVYNLFVFLWLINFVIALGQCALAGAFATYYWAMKKPDDIPRYPLFTAFGRAIRYHTGSLAFGSLIIALIQMFKIVLEYLDHRLKRTQNTLSKFLQCCLRCCFWCLENAIKFLNRNAYIMIAIYGRNFCRSAKDAFNLLMRNVLKVAVTDEVTYFVLFLGKLLVAGSIGVLAFLFFTQRLPVIAQGPASLNYYWVPLLTVIFGSYLIAHGFFSVYAMCVETIFICFCEDLERNDGSTEKPYFVTPNLHGILIKKQLVPQKQKE

SEQ ID NO: 9074 - protein, 717 aa, Homo sapiens
MNDTEKPADTPSEEEDFGDPRTYDPDFKGPVANRSCTDVLCCMIFLLCIIGYIVLGLVAWVHGDPRRAAYPTDSQGHFCGQKGTPNENKTILFYFNLLRCTSPSVLLNLQCPTTQICVSKCPEKFLTYVEMQLLYTKDKSYWEDYRQFCKTTAKPVKSLTQLLLDDDCPTAIFPSKPFLQRCFPDFSTKNGTLTIGSKMMFQDGNGGTRSVVELGIAANGINKLLDAKSLGLKVFEDYARTWYWILIGLTIAMVLSWIFLILLRFIAGCLFWVFMIGVIGIIGYGIWHCYQQYTNLQERPSSVLTIYDIGIQTNISMYFELQQTWFTFMIILCIIEVIVILMLIFLRNRIRVAIILLKEGSKAIGYVPSTLVYPALTFILLSICICYWVVTAVFLATSGVPVYKVIAPGGHCIHENQTCDPEIFNTTEIAKACPGALCNFAFYGGKSLYHQYIPTFHVYNLFVFLWLINFVIALGQCALAGAFATYYWAMKKPDDIPRYPLFTAFGRAIRYHTGSLAFGSLIIALIQMFKIVLEYLDHRLKRTQNTLSKFLQCCLRCCFWCLENAIKFLNRNAYIMIAIYGRNFCRSAKDAFNLLMRNVLKVAVTDEVTYFVLFLGKLLVAGSIGVLAFLFFTQRLPVIAQGPASLNYYWVPLLTVIFGSYLIAHGFFSVYAMCVETIFICFLEDLERNDGSTARPYYVSQPLLKIFQEENPQTRKQ

SEQ ID NO: 9075 - protein, 444 aa, Homo sapiens
MSGTKLEDSPPCRNWSSASELNETQEPFLNPTDYDDEEFLRYLWREYLHPKEYEWVLIAGYIIVFVVALIGNVLVCVAVWKNHHMRTVTNYFIVNLSLADVLVTITCLPATLVVDITETWFFGQSLCKVIPYLQTVSVSVSVLTLSCIALDRWYAICHPLMFKSTAKRARNSIVIIWIVSCIIMIPQAIVMECSTVFPGLANKTTLFTVCDERWGGEIYPKMYHICFFLVTYMAPLCLMVLAYLQIFRKLWCRQIPGTSSVVQRKWKPLQPVSQPRGPGQPTKSRMSAVAAEIKQIRARRKTARMLMIVLLVFAICYLPISILNVLKRVFGMFAHTEDRETVYAWFTFSHWLVYANSAANPIIYNFLSGKFREEFKAAFSCCCLGVHHRQEDRLTRGRTSTESRKSLTTQISNFDNISKLSEQVVLTSISTLPAANGAGPLQNW

SEQ ID NO: 9076 - protein, 259 aa, Homo sapiens
MDRSAEFRKWKAQCLSKADLSRKGSVDEDVVELVQFLNMRDQFFTTSSCAGRILLLDRGINGFEVQKQNCCWLLVTHKLCVKDDVIVALKKANGDATLKFEPFVLHVQCRQLQDAQILHSMAIDSGFRNSGITVGKRGKTMLAVRSTHGLEVPLSHKGKLMVTEEYIDFLLNVANQKMEENKKRIERFYNCLQHALERETMTNLHPKIKEKNNSSYIHKKKRNPEKTRAQCITKESDEELENDDDDDLGINVTIFPEDY

SEQ ID NO: 9077 - protein, 594 aa, Homo sapiens
MVSHILQSELGDFHEETDRKHLAQTRYLPNQDCLEGKIMHFHQKHIGRSPAESDILLLDIARKLDMYGIRPHPASDGEGMQIHLAVAHMGVLVLRGNTKINTFNWAKIRKLSFKRKHFLIKLHANILVLCKDTLEFTMASRDACKAFWKTCVEYHAFFRLSEEPKSKPKTLLCSKGSSFRYSGRTQRQLLEYGRKGRLKSLPFERKHYPSQYHERQCRSSPDLLSDVSKQVEDLRLAYGGGYYQNVNGVHASEPVLESRRRNSALEVTFATELEHSKPEADPTLLHQSQSSSSFPFIYMDPVFNTEPNPNPDPRDIFSERSSLSSFQTSCKFSGNHMSIYSGLTSKVRPAKQLTYTDVPYIPCTGQQVGIMPPQVFFYVDKPPQVPRWSPIRAEERTSPHSYVEPTAMKPAERSPRNIRMKSFQQDLQVLQEAIARTSGRSNINVGLEEEDPNLEDAFVCNIQEQTPKRSQSQSDMKTIRFPFGSEFRPLGPCPALSHKADLFTDMFAEQELPAVLMDQSTAERYVASESSDSESEILKPDYYALYGKEIRSPMARIRLSSGSLQLDEEDEDAYFNTPTAEDRTSLKPCNYFLA

SEQ ID NO: 9078 - protein, 524 aa, Homo sapiens
MFHCIPLWRCNRHVESIDKRHCSLVYVPEEIYRYARSLEELLLDANQLRELPEQFFQLVKLRKLGLSDNEIQRLPPEIANFMQLVELDVSRNEIPEIPESISFCKALQVADFSGNPLTRLPESFPELQNLTCLSVNDISLQSLPENIGNLYNLASLELRENLLTYLPDSLTQLRRLEELDLGNNEIYNLPESIGALLHLKDLWLDGNQLSELPQEIGNLKNLLCLDVSENRLERLPEEISGLTSLTDLVISQNLLETIPDGIGKLKKLSILKVDQNRLTQLPEAVGECESLTELVLTENQLLTLPKSIGKLKKLSNLNADRNKLVSLPKEIGGCCSLTVFCVRDNRLTRIPAEVSQATELHVLDVAGNRLLHLPLSLTALKLKALWLSDNQSQPLLTFQTDTDYTTGEKILTCVLLPQLPSEPTCQENLPRCGALENLVNDVSDEAWNERAVNRVSAIRFVEDEKDEEDNETRTLLRRATPHPGELKHMKKTVENLRNDMNAAKGLDSNKNEVNHAIDRVTTSV

SEQ ID NO: 9079 - protein, 697 aa, Homo sapiens
MAAARDPPEVSLREATQRKLRRFSELRGKLVARGEFWDIVAITAADEKQELAYNQQLSEKLKRKELPLGVQYHVFVDPAGAKIGNGGSTLCALQCLEKLYGDKWNSFTILLIHSDEWKKKVSESYVITIERLEDDLQIKEKELTELRNIFGSDEAFSKVNLNYRTENGLSLLHLCCICGGKKSHIRTLMLKGLRPSRLTRNGFTALHLAVYKDNAELITSLLHSGADIQQVGYGGLTALHIATIAGHLEAADVLLQHGANVNIQDAVFFTPLHIAAYYGHEQVTRLLLKFGADVNVSGEVGDRPLHLASAKGFLNIAKLLMEEGSKADVNAQDNEDHVPLHFCSRFGHHDIVKYLLQSDLEVQPHVVNIYGDTPLHLACYNGKFEVAKEIIQISGTESLTKENIFSETAFHSACTYGKSIDLVKFLLDQNVININHQGRDGHTGLHSACYHGHIRLVQFLLDNGADMNLVACDPSRSSGEKDEQTCLMWAYEKGHDAIVTLLKHYKRPQDELPCNEYSQPGGDGSYVSVPSPLGKIKSMTKEKADILLLRAGLPSHFHLQLSEIEFHEIIGSGSFGKVYKGRCRNKIVAIKRYRANTYCSKSDVDMFCREVSILCQLNHPCVIQFVGACLNDPSQFAIVTQYISGGSLFSLLHEQKRILDLQSKLIIAVDVAKGMEYLHNLTQPIIHRDLNRYFFPK

SEQ ID NO: 9080 - protein, 843 aa, Homo sapiens
MAAARDPPEVSLREATQRKLRRFSELRGKLVARGEFWDIVAITAADEKQELAYNQQLSEKLKRKELPLGVQYHVFVDPAGAKIGNGGSTLCALQCLEKLYGDKWNSFTILLIHSDEWKKKVSESYVITIERLEDDLQIKEKELTELRNIFGSDEAFSKVNLNYRTENGLSLLHLCCICGGKKSHIRTLMLKGLRPSRLTRNGFTALHLAVYKDNAELITSLLHSGADIQQVGYGGLTALHIATIAGHLEAADVLLQHGANVNIQDAVFFTPLHIAAYYGHEQVTRLLLKFGADVNVSGEVGDRPLHLASAKGFLNIAKLLMEEGSKADVNAQDNEDHVPLHFCSRFGHHDIVKYLLQSDLEVQPHVVNIYGDTPLHLACYNGKFEVAKEIIQISGTESLTKENIFSETAFHSACTYGKSIDLVKFLLDQNVININHQGRDGHTGLHSACYHGHIRLVQFLLDNGADMNLVACDPSRSSGEKDEQTCLMWAYEKGHDAIVTLLKHYKRPQDELPCNEYSQPGGDGSYVSVPSPLGKIKSMTKEKADILLLRAGLPSHFHLQLSEIEFHEIIGSGSFGKVYKGRCRNKIVAIKRYRANTYCSKSDVDMFCREVSILCQLNHPCVIQFVGACLNDPSQFAIVTQYISGGSLFSLLHEQKRILDLQSKLIIAVDVAKGMEYLHNLTQPIIHRDLNSHNILLYEDGHAVVADFGESRFLQSLDEDNMTKQPGNLRWMAPEVFTQCTRYTIKADVFSYALCLWEILTGEIPFAHLKPAAAAADMAYHHIRPPIGYSIPKPISSLLIRGWNACPEAKSRPSHYPVSSVYTETLKKKNEDRFGMWIEYLRR

SEQ ID NO: 9081 - protein, 1341 aa, Homo sapiens
MTLDRPGEGATMLKTFTVLLFCIRMSLGMTSIVMDPQPELWIESNYPQAPWENITLWCRSPSRISSKFLLLKDKTQMTWIRPSHKTFQVSFLIGALTESNAGLYRCCYWKETGWSKPSKVLELEAPGQLPKPIFWIQAETPALPGCNVNILCHGWLQDLVFMLFKEGYAEPVDYQVPTGTMAIFSIDNLTPEDEGVYICRTHIQMLPTLWSEPSNPLKLVVAGLYPKPTLTAHPGPIMAPGESLNLRCQGPIYGMTFALMRVEDLEKSFYHKKTIKNEANFFFQSLKIQDTGHYLCFYYDASYRGSLLSDVLKIWVTDTFPKTWLLARPSAVVQMGQNVSLRCRGPVDGVGLALYKKGEDKPLQFLDATSIDDNTSFFLNNVTYSDTGIYSCHYLLTWKTSIRMPSHNTVELMVVDKPPKPSLSAWPSTVFKLGKAITLQCRVSHPVLEFSLEWEERETFQKFSVNGDFIISNVDGKGTGTYSCSYRVETHPNIWSHRSEPLKLMGPAGYLTWNYVLNEAIRLSLIMQLVALLLVVLWIRWKCRRLRIREAWLLGTAQGVTMLFIVTALLCCAISFAGLCNGVLIEETEIVMPTPKPELWAETNFPLAPWKNLTLWCRSPSGSTKEFVLLKDGTGWIATRPASEQVRAAFPLGALTQSHTGSYHCHSWEEMAVSEPSEALELVGTDILPKPVISASPTIRGQELQLRCKGWLAGMGFALYKEGEQEPVQQLGAVGREAFFTIQRMEDKDEGNYSCRTHTEKRPFKWSEPSEPLELVIKEMYPKPFFKTWASPVVTPGARVTFNCSTPHQHMSFILYKDGSEIASSDRSWASPGASAAHFLIISVGIGDGGNYSCRYYDFSIWSEPSDPVELVVTEFYPKPTLLAQPGPVVFPGKSVILRCQGTFQGMRFALLQEGAHVPLQFRSVSGNSADFLLHTVGAEDSGNYSCIYYETTMSNRGSYLSMPLMIWVTDTFPKPWLFAEPSSVVPMGQNVTLWCRGPVHGVGYILHKEGEATSMQLWGSTSNDGAFPITNISGTSMGRYSCCYHPDWTSSIKIQPSNTLELLVTGLLPKPSLLAQPGPMVAPGENMTLQCQGELPDSTFVLLKEGAQEPLEQQRPSGYRADFWMPAVRGEDSGIYSCVYYLDSTPFAASNHSDSLEIWVTDKPPKPSLSAWPSTMFKLGKDITLQCRGPLPGVEFVLEHDGEEAPQQFSEDGDFVINNVEGKGIGNYSCSYRLQAYPDIWSEPSDPLELVGAAGPVAQECTVGNIVRSSLIVVVVVALGVVLAIEWKKWPRLRTRGSETDGRDQTIALEECNQEGEPGTPANSPSSTSQRISVELPVPI

SEQ ID NO: 9082 - protein, 1327 aa, Homo sapiens
MTLDRPGEGATMLKTFTVLLFCILMDPQPELWIESNYPQAPWENITLWCRSPSRISSKFLLLKDKTQMTWIRPSHKTFQVSFLIGALTESNAGLYRCCYWKETGWSKPSKVLELEAPGQLPKPIFWIQAETPALPGCNVNILCHGWLQDLVFMLFKEGYAEPVDYQVPTGTMAIFSIDNLTPEDEGVYICRTHIQMLPTLWSEPSNPLKLVVAGLYPKPTLTAHPGPIMAPGESLNLRCQGPIYGMTFALMRVEDLEKSFYHKKTIKNEANFFFQSLKIQDTGHYLCFYYDASYRGSLLSDVLKIWVTDTFPKTWLLARPSAVVQMGQNVSLRCRGPVDGVGLALYKKGEDKPLQFLDATSIDDNTSFFLNNVTYSDTGIYSCHYLLTWKTSIRMPSHNTVELMVVDKPPKPSLSAWPSTVFKLGKAITLQCRVSHPVLEFSLEWEERETFQKFSVNGDFIISNVDGKGTGTYSCSYRVETHPNIWSHRSEPLKLMGPAGYLTWNYVLNEAIRLSLIMQLVALLLVVLWIRWKCRRLRIREAWLLGTAQGVTMLFIVTALLCCGLCNGVLIEETEIVMPTPKPELWAETNFPLAPWKNLTLWCRSPSGSTKEFVLLKDGTGWIATRPASEQVRAAFPLGALTQSHTGSYHCHSWEEMAVSEPSEALELVGTDILPKPVISASPTIRGQELQLRCKGWLAGMGFALYKEGEQEPVQQLGAVGREAFFTIQRMEDKDEGNYSCRTHTEKRPFKWSEPSEPLELVIKEMYPKPFFKTWASPVVTPGARVTFNCSTPHQHMSFILYKDGSEIASSDRSWASPGASAAHFLIISVGIGDGGNYSCRYYDFSIWSEPSDPVELVVTEFYPKPTLLAQPGPVVFPGKSVILRCQGTFQGMRFALLQEGAHVPLQFRSVSGNSADFLLHTVGAEDSGNYSCIYYETTMSNRGSYLSMPLMIWVTDTFPKPWLFAEPSSVVPMGQNVTLWCRGPVHGVGYILHKEGEATSMQLWGSTSNDGAFPITNISGTSMGRYSCCYHPDWTSSIKIQPSNTLELLVTGLLPKPSLLAQPGPMVAPGENMTLQCQGELPDSTFVLLKEGAQEPLEQQRPSGYRADFWMPAVRGEDSGIYSCVYYLDSTPFAASNHSDSLEIWVTDKPPKPSLSAWPSTMFKLGKDITLQCRGPLPGVEFVLEHDGEEAPQQFSEDGDFVINNVEGKGIGNYSCSYRLQAYPDIWSEPSDPLELVGAAGPVAQECTVGNIVRSSLIVVVVVALGVVLAIEWKKWPRLRTRGSETDGRDQTIALEECNQEGEPGTPANSPSSTSQRISVELPVPI

SEQ ID NO: 9083 - protein, 634 aa, Homo sapiens
MAPKKKIVKKNKGDINEMTIIVEDSPLNKLNALNGLLEGGNGLSCISSELTDASYGPNLLEGLSKMRQENFLCDLVIGTKTKSFDVHKSVMASCSEYFYNILKKDPSIQRVDLNDISPLGLATVIAYAYTGKLTLSLYTIGSIISAAVYLQIHTLVKMCSDFLIREMSVENCMYVVNIAETYSLKNAKAAAQKFIRDNFLEFAESDQFMKLTFEQINELLIDDDLQLPSEIVAFQIAMKWLEFDQKRVKYAADLLSNIRFGTISAQDLVNYVQSVPRMMQDADCHRLLVDAMNYHLLPYHQNTLQSRRTRIRGGCRVLVTVGGRPGLTEKSLSRDILYRDPENGWSKLTEMPAKSFNQCVAVMDGFLYVAGGEDQNDARNQAKHAVSNFCRYDPRFNTWIHLASMNQKRTHFSLSVFNGLVYAAGGRNAEGSLASLECYVPSTNQWQPKTPLEVARCCHASAVADGRVLVTGGYIANAYSRSVCAYDPASDSWQELPNLSTPRGWHCAVTLSDRVYVMGGSQLGPRGERVDVLTVECYSPATGQWSYAAPLQVGVSTAGVSALHGRAYLVGGWNEGEKKYKKCIQCFSPELNEWTEDDELPEATVGVSCCTLSMPNNVTRESRASSVSSVPVSI

SEQ ID NO: 9084 - protein, 191 aa, Homo sapiens
MFHGTVTEELTSHEEWSHYNENIREGQKDFVFVKFNGLHLKSMENLQSCISLRVCIFSNNFITDIHPLQSCIKLIKLDLHGNQGTTYEEEINNIKHITSKINAILAHNSPVLIVQRWIRGFLVRKNLSPVFFHKKKQQEKIIRGYEAKWIYITKGYEDKLLKDLFFKPETNIKGKLAYWKHDKKKLWVNFH

SEQ ID NO: 9085 - protein, 330 aa, Homo sapiens
MSTKNFRVSDGDWICPDKKCGNVNFARRTSCNRCGREKTTEAKMMKAGGTEIGKTLAEKSRGLFSANDWQCKTCSNVNWARRSECNMCNTPKYAKLEERTGYGGGFNERENVEYIEREESDGEYDEFGRKKKKYRGKAVGPASILKEVEDKESEGEEEDEDEDLSKYKLDEDEDEDDADLSKYNLDASEEEDSNKKKSNRRSRSKSRSSHSRSSSRSSSPSSSRSRSRSRSRSSSSSQSRSRSSSRERSRSRGSKSRSSSRSHRGSSSPRKRSYSSSSSSPERNRKRSRSRSSSSGDRKKRRTRSRSPERRHRSSSGSSHSGSRSSSKKK

SEQ ID NO: 9086 - protein, 411 aa, Homo sapiens
MQVEEATGQAAGRRRGNVVRRVFGRIRRFFSRRRNEPTLPREFTRRGRRGAVSVDSLAELEDGALLLQTLQLSKISFPIGQRLLGSKRKMSLNPIAKQIPQVVEACCQFIEKHGLSAVGIFTLEYSVQRVRQLREEFDQGLDVVLDDNQNVHDVAALLKEFFRDMKDSLLPDDLYMSFLLTATLKPQDQLSALQLLVYLMPPCHSDTLERLLKALHKITENCEDSIGIDGQLVPGNRMTSTNLALVFGSALLKKGKFGKRESRKTKLGIDHYVASVNVVRAMIDNWDVLFQVPPHIQRQVAKRVWKSSPEALDFIRRRNLRKIQSARIKMEEDALLSDPVETSAEARAAVLAQSKPSDEGSSEEPAVPSGTARSHDDEEGAGNPPIPEQDRPLLRVPREKEAKTGVSYFFP

SEQ ID NO: 9087 - protein, 535 aa, Homo sapiens
MAWILDCLFASAFEPRPRRVSVLGGAPGHNPDRRTKMVSIHSLSELERLKLQETAYHELVARHFLSEFKPDRALPIDRPNTLDKWFLILRGQQRAVSHKTFGISLEEVLVNEFTRRKHLELTATMQVEEATGQAAGRRRGNVVRRVFGRIRRFFSRRRNEPTLPREFTRRGRRGAVSVDSLAELEDGALLLQTLQLSKISFPIGQRLLGSKRKMSLNPIAKQIPQVVEACCQFIEKHGLSAVGIFTLEYSVQRVRQLREEFDQGLDVVLDDNQNVHDVAALLKEFFRDMKDSLLPDDLYMSFLLTATLKPQDQLSALQLLVYLMPPCHSDTLERLLKALHKITENCEDSIGIDGQLVPGNRMTSTNLALVFGSALLKKGKFGKRESRKTKLGIDHYVASVNVVRAMIDNWDVLFQVPPHIQRQVAKRVWKSSPEALDFIRRRNLRKIQSARIKMEEDALLSDPVETSAEARAAVLAQSKPSDEGSSEEPAVPSGTARSHDDEEGAGNPPIPEQDRPLLRVPREKEAKTGVSYFFP

SEQ ID NO: 9088 - protein, 388 aa, Homo sapiens
MKETRGYGGDAPFCTRLNHSYTGMWAPERSAEARGNLTRPPGSGEDCGSVSVAFPITMLLTGFVGNALAMLLVSRSYRRRESKRKKSFLLCIGWLALTDLVGQLLTTPVVIVVYLSKQRWEHIDPSGRLCTFFGLTMTVFGLSSLFIASAMAVERALAIRAPHWYASHMKTRATRAVLLGVWLAVLAFALLPVLGVGQYTVQWPGTWCFISTGRGGNGTSSSHNWGNLFFASAFAFLGLLALTVTFSCNLATIKALVSRCRAKATASQSSAQWGRITTETAIQLMGIMCVLSVCWSPLLIMMLKMIFNQTSVEHCKTHTEKQKECNFFLIAVRLASLNQILDPWVYLLLRKILLRKFCQVANAVSSCSNDGQKGQPISLSNEIIQTEA

SEQ ID NO: 9089 - protein, 581 aa, Homo sapiens
MTLPMSDPTAWATAMNNLGMAPLGIAGQPILPDFDPALGMMTGIPPITPMMPGLGIVPPPIPPDMPVVKEIIHCKSCTLFPPNPNLPPPATRERPPGCKTVFVGGLPENGTEQIIVEVFEQCGEIIAIRKSKKNFCHIRFAEEYMVDKALYLSGYRIRLGSSTDKKDTGRLHVDFAQARDDLYEWECKQRMLAREERHRRRMEEERLRPPSPPPVVHYSDHECSIVAEKLKDDSKFSEAVQTLLTWIERGEVNRRSANNFYSMIQSANSHVRRLVNEKAAHEKDMEEAKEKFKQALSGILIQFEQIVAVYHSASKQKAWDHFTKAQRKNISVWCKQAEEIRNIHNDELMGIRREEEMEMSDDEIEEMTETKETEESALVSQAEALKEENDSLRWQLDAYRNEVELLKQEQGKVHREDDPNKEQQLKLLQQALQGMQQHLLKVQEEYKKKEAELEKLKDDKLQVEKMLENLKEKESCASRLCASNQDSEYPLEKTMNSSPIKSEREALLVGIISTFLHVHPFGASIEYICSYLHRLDNKICTSDVECLMGRLQHTFKQEMTGVGASLEKRWKFCGFEGLKLT

SEQ ID NO: 9090 - protein, 405 aa, Homo sapiens
MQEKDASSQGFLPHFQHFATQAIHVGQDPEQWTSRAVVPPISLSTTFKQGAPGQHSGFEYSRSGNPTRNCLEKAVAALDGAKYCLAFASGLAATVTITHLLKAGDQIICMDDVYGGTNRYFRQVASEFGLKISFVDCSKIKLLEAAITPETKLVWIETPTNPTQKVIDIEGCAHIVHKHGDIILVVDNTFMSPYFQRPLALGADISMYSATKYMNGHSDVVMGLVSVNCESLHNRLRFLQNSLGAVPSPIDCYLCNRGLKTLHVRMEKHFKNGMAVAQFLESNPWVEKVIYPGLPSHPQHELVKRQCTGCTGMVTFYIKGTLQHAEIFLKNLKLFTLAESLGGFESLAELPAIMTHASVLKNDRDVLGISDTLIRLSVGLEDEEDLLEDLDQALKAAHPPSGSHS

SEQ ID NO: 9091 - protein, 424 aa, Homo sapiens
MINNHRNQALYFSEHKYFQQTQVVYQGDIFWVFLCVFCLRKECVLMQGCFSAGVIPDEAKALSLLAPANAVAGLLPGGGLLPTPNPLTQIGAVPLAALGAPTLDPALAALGLPGANLNSQSLAADQLLKLMSTVDPKLNHVAAGLVSPSLKSDTSSKEIEEAMKRVREAQSLISAAIEPDKKEEKRRHSRSRSRSRRRRTPSSSRHRRSRSRSRRRSHSKSRSRRRSKSPRRRRSHSRERGRRSRSTSKTRDKKKEDKEKKRSKTPPKSYSTARRSRSASRERRRRRSRSGTRSPKKPRSPKRKLSRSPSPRRHKKEKKKDKDKERSRDERERSTSKKKKSKDKEKDRERKSESDKDVKQVTRDYDEEEQGYDSEKEKKEEKKPIETGSPKTKECSVEKGTGDSLRESKVNGDDHHEEDMDMSD

SEQ ID NO: 9092 - protein, 484 aa, Homo sapiens
MSNTTVVPSTAGPGPSGGPGGGGGGGGGGGGTEVIQVTNVSPSASSEQMRTLFGFLGKIDELRLFPPDDSPLPVSSRVCFVKFHDPDSAVVAQHLTNTVFVDRALIVVPYAEGVIPDEAKALSLLAPANAVAGLLPGGGLLPTPNPLTQIGAVPLAALGAPTLDPALAALGLPGANLNSQSLAADQLLKLMSTVDPKLNHVAAGLVSPSLKSDTSSKEIEEAMKRVREAQSLISAAIEPDKKEEKRRHSRSRSRSRRRRTPSSSRHRRSRSRSRRRSHSKSRSRRRSKSPRRRRSHSRERGRRSRSTSKTRDKKKEDKEKKRSKTPPKSYSTARRSRSASRERRRRRSRSGTRSPKKPRSPKRKLSRSPSPRRHKKEKKKDKDKERSRDERERSTSKKKKSKDKEKDRERKSESDKDVKQVTRDYDEEEQGYDSEKEKKEEKKPIETGSPKTKECSVEKGTGDSLRESKVNGDDHHEEDMDMSD

SEQ ID NO: 9093 - protein, 483 aa, Homo sapiens
MSNTTVVPSTAGPGPSGGPGGGGGGGGGGGGTEVIQVTNVSPSASSEQMRTLFGFLGKIDELRLFPPDDSPLPVSSRVCFVKFHDPDSAVVAQHLTNTVFVDRALIVVPYAEGVIPDEAKALSLLAPANAVAGLLPGGGLLPTPNPLTQIGAVPLAALGAPTLDPALAALGLPGANLNSQSLAADQLLKLMSTVDPKLNHVAAGLVSPSLKSDTSSKEIEEAMKRVREAQSLISAAIEPDKKEEKRRHSRSRSRSRRRRTPSSSRHRRSRSRSRRRSHSKSRSRRRSKSPRRRRSHSRERGRRSRSTSKTRDKKKEDKEKKRSKTPPKSYSTARRSRSASRERRRRRSRSGTRSPKKPRSPKRKLSRSPSPRRHKKEKKKDKDKERSRDERERSTSKKKKSKDKEKDRERKSESDKDVKVTRDYDEEEQGYDSEKEKKEEKKPIETGSPKTKECSVEKGTGDSLRESKVNGDDHHEEDMDMSD

SEQ ID NO: 9094 - protein, 602 aa, Homo sapiens
MSRLKRIAGQDLRAGFKAGGRDCGTSVPQGLLKAARKSGQLNLSGRNLSEVPQCVWRINVDIPEEANQNLSFGATERWWEQTDLTKLIISNNKLQSLTDDLRLLPALTVLDIHDNQLTSLPSAIRELENLQKLNVSHNKLKILPEEITNLRNLKCLYLQHNELTCISEGFEQLSNLEDLDLSNNHLTTVPASFSSLSSLVRLNLSSNELKSLPAEINRMKRLKHLDCNSNLLETIPPELAGMESLELLYLRRNKLRFLPEFPSCSLLKELHVGENQIEMLEAEHLKHLNSILVLDLRDNKLKSVPDEIILLRSLERLDLSNNDISSLPYSLGNLHLKFLALEGNPLRTIRREIISKGTQEVLKYLRSKIKDDGPSQSESATETAMTLPSESRVNIHAIITLKILDYSDKQATLIPDEVFDAVKSNIVTSINFSKNQLCEIPKRMVELKEMVSDVDLSFNKLSFISLELCVLQKLTFLDLRNNFLNSLPEEMESLVRLQTINLSFNRFKMLPEVLYRIFTLETILISNNQVGSVDPQKMKMMENLTTLDLQNNDLLQIPPELGNCVNLRTLLLDGNPFRVPRAAILMKGTAAILEYLRDRIPT

SEQ ID NO: 9095 - protein, 254 aa, Homo sapiens
MAAYKLVLIRHGESAWNLENRFSGWYDADLSPAGHEEAKRGGQALRDAGYEFDICFTSVQKRAIRTLWTVLDAIDQMWLPVVRTWRLNERHYGGLTGLNKAETAAKHGEAQVKIWRRSYDVPPPPMEPDHPFYSNISKDRRYADLTEDQLPSCESLKDTIARALPFWNEEIVPQIKEGKRVLIAAHGNSLRGIVKHLEGLSEEAIMELNLPTGIPIVYELDKNLKPIKPMQFLGDEETVRKAMEAVAAQGKAKK

SEQ ID NO: 9096 - protein, 217 aa, Homo sapiens
MMENLIRGRNPPQYQRSPCKEVRAALRKRPEEELQCLEMTTKRKIIGRLVPCRCFRGEEEIISVLDYSHCSLQQVPKEVFNFERTLEELYLDANQIEELPKQLFNCQALRKLSIPDNDLSNLPTTIASLVNLKELDISKNGVQEFPENIKCCKCLTIIEASVNPISKLPDGFTQLLNLTQLYLNDAFLEFLPANFGRLVKLRILELRENHLKTLPNI

SEQ ID NO: 9097 - protein, 527 aa, Homo sapiens
MESQGVPPGPYRATKLWNEVTTSFRAGMPLRKHRQHFKKYGNCFTAGEAVDWLYDLLRNNSNFGPEVTRQQTIQLLRKFLKNHVIEDIKGRWGSENVDDNNQLFRFPATSPLKTLPRRYPELRKNNIENFSKDKDSIFKLRNLSRRTPKRHGLHLSQENGEKIKHEIINEDQENAIDNRELSQEDVEEVWRYVILIYLQTILGVPSLEEVINPKQVIPQYIMYNMANTSKRGVVILQNKSDDLPHWVLSAMKCLANWPRSNDMNNPTYVGFERDVFRTIADYFLDLPEPLLTFEYYELFVNILGLLQPHLERVAIDALQLCCLLLPPPNRRKLQLLMRMISRMSQNVDMPKLHDAMGTRSLMIHTFSRCVLCCAEEVDLDELLAGRLVSFLMDHHQEILQVPSYLQTAVEKHLDYLKKGHIENPGDGLFAPLPTYSYCKQISAQEFDEQKVSTSQAAIAELLENIIKNRSLPLKEKRKKLKQFQKEYPLIYQKRFPTTESEAALFGDKPTIKQPMLILRKPKFRSLR

SEQ ID NO: 9098 - protein, 737 aa, Homo sapiens
MDDDKPFQPKNISKMAELFMECEEEELEPWQKKVEETQDEDDDELIFVGEISSSKPAISNILNRGHSSSSSKGIKSEPHSPGIPEIFRTASQRCRDPPSNPVAASPRFHLVSKSSQSSVTVENASKPDFTKNSQVGSDNSSILLFDSTQESLPPSQDIPAIFREGMKNTSYVLKHPSTSKVNSVTPKKPKTSEDVPQINPSTSLPLIGSPPVTSSQVMLSKGTNTSSPYDAGADYLRACPKCNVQFNLLDPLKYHMKHCCPDMITKFLGVIVKSERPCDEDKTDSETGKLIMLVNEFYYGRHEGVTEKEPKTYTTFKCFSCSKVLKNNIRFMNHMKHHLELEKQNNESWENHTTCQHCYRQYPTPFQLQCHIESTHTPHEFSTICKICELSFETEHILLQHMKDTHKPGEMPYVCQVCQFRSSTFSDVEAHFRAAHENTKNLLCPFCLKVSKMATPYMNHYMKHQKKGVHRCPKCRLQFLTSKEKAEHKAQHRTFIKPKELEGLPPGAKVTIRASLGPLQSKLPTAPFGCAPGTSFLQVTPPTSQNTTARNPRKSNASRSKTSKLHATTSTASKVNTSKPRGRIAKSKAKPSYKQKRQRNRKNKMSLALKNIRCRRGIHKCIECHSKIKDFASHFSIYIHCSFCKYNTNCNKAFVNHMMSSHSNHPGKRFCIFKKHSGTLRGITLVCLKCDFLADSSGLDRMAKHLSQRKTHTCQVIIENVSKSTSTSEPTTGCSLK

SEQ ID NO: 9099 - protein, 72 aa, Homo sapiens
MSSKTASTNNIAQARRTVQQLRLEASIERIKVSKASADLMSYCEEHARSDPLLIGIPTSENPFKDKKTCIIL

SEQ ID NO: 9100 - protein, 443 aa, Homo sapiens
RPGTLLGTFNAMDPDSQIRYELVHDPANWVSVDKNSGVVITVEPIDRESPHVNNSFYVIIIHAVDDGFPPQTATGTLMLFLSDINDNVPTLRPRSRYMEVCESAVHEPLHIEAEDPDLEPFSDPFTFELDNTWGNAEDTWKLGRNWGQSVELLTLRSLPRGNYLVPLFIGDKQGLSQKQTVHVRICPCASGLTCVELADAEVGLHVGALFPVCAAFVALAVALLFLLRCYFVLEPKRHGCSVSNDEGHQTLVMYNAESKGTSAQTWSDVEGQRPALLICTAAAGPTQGVKAYPDATMHRQLLAPVEGRMAETLNQSKERNRFSLSRGCIIPQGRATAGRGLPQDIYKEMMPRRLTQTGKRKHGALARTPSFKKVVYDHKEDEENKAGRKQRSHLFKVMQLRNEQGGVRVQSAHSPSPLNKKACFPGDYRGESAGGHNCRAVSG

SEQ ID NO: 9101 - protein, 1297 aa, Homo sapiens
MGRSGKLPSGVSAKLKRWKKGHSSDSNPAICRHRQAARSRFFSRPSGRSDLTVDAVKLHNELQSGSLRLGKSEAPETPMEEEAELVLTEKSSGTFLSGLSDCTNVTFSKVQRFWESNSAAHKEICAVLAAVTEVIRSQGGKETETEYFAALMTTMEAVESPESLAAVAYLLNLVLKRVPSPVLIKKFSDTSKAFMDIMSAQASSGSTSVLRWVLSCLATLLRKQDLEAWGYPVTLQVYHGLLSFTVHPKPKIRKAAQHGVCSVLKGSEFMFEKAPAHHPAAISTAKFCIQEIEKSGGSKEATTTLHMLTLLKDLLPCFPEGLVKSCSETLLRVMTLSHVLVTACAMQAFHSLFHARPGLSTLSAELNAQIITALYDYVPSENDLQPLLAWLKVMEKAHINLVRLQWDLGLGHLPRFFGTAVTCLLSPHSQVLTAATQSLKEILKECVAPHMADIGSVTSSASGPAQSVAKMFRAVEEGLTYKFHAAWSSVLQLLCVFFEACGRQAHPVMRKCLQSLCDLRLSPHFPHTAALDQAVGAAVTSMGPEVVLQAVPLEIDGSEETLDFPRSWLLPVIRDHVQETRLGFFTTYFLPLANTLKSKAMDLAQAGSTVESKIYDTLQWQMWTLLPGFCTRPTDVAISFKGLARTLGMAISERPDLRVTVCQALRTLITKGCQAEADRAEVSRFAKNFLPILFNLYGQPVAAGDTPAPRRAVLETIRTYLTITDTQLVNSLLEKASEKVLDPASSDFTRLSVLDLVVALAPCADEAAISKLYSTIRPYLESKAHGVQKKAYRVLEEVCASPQGPGALFVQSHLEDLKKTLLDSLRSTSSPAKRPRLKCLLHIVRKLSAEHKEFITALIPEVILCTKEVSVGARKNAFALLVEMGHAFLRFGSNQEEALQCYLVLIYPGLVGAVTMVSCSILALTHLLFEFKGLMGTSTVEQLLENVCLLLASRTRDVVKSALGFIKVAVTVMDVAHLAKHVQLVMEAIGKLSDDMRRHFRMKLRNLFTKFIRKFGFELVKRLLPEEYHRVLVNIRKAEARAKRHRALSQAAVEEEEEEEEEEEPAQGKGDSIEEILADSEDEEDNEEEERSRGKEQRKLARQRSRAWLKEGGGDEPLNFLDPKVAQRVLATQPGPGRGRKKDHGFKVSADGRLIIREEADGNKMEEEEGAKGEDEEMADPMEDVIIRNKKHQKLKHQKEAEEEELEIPPQYQAGGSGIHRPVAKKAMPGAEYKAKKAKGDVKKKGRPDPYAYIPLNRSKLNRRKKMKLQGQFKGLVKAARRGSQVGHKNRRKDRRP

SEQ ID NO: 9102 - protein, 400 aa, Homo sapiens
MAEKILEKLDVLDKQAEIILARRTKINRLQSEGRKTTMAIPLTFDFQLEFEEALATSASKAISKIKEDKSCSITKSKMHVSFKCEPEPRKSNFEKSNLRPFFIQTNVKNKESESTAQIEKKPRKPLDSVGLLEGDRNKRKKSPQMNDFNIKENKSVRNYQLSKYRSVRKKSLLPLCFEDELKNPHAKIVNVSPTKTVTSHMEQKDTNPIIFHDTEYVRMLLLTKNRFSSHPLENENIYPHKRTNFILERNCEILKSIIGNQSISLFKPQKTMPTVQRKDIQIPMSFKAGHTTVDDKLKKKTNKQTLENRSWNTLYNFSQNFSSLTKQFVGYLDKAVIHEMSAQTGKFERMFSAGKPTSIPTSSALPVKCYSKPFKYIYELNNVTPLDNLLNLSNEILNAS

SEQ ID NO: 9103 - protein, 559 aa, Homo sapiens
MAASEDGSGCLVSRGRSQSDPSVLTDSSATSSADAGENPDEMDQTPPARPEYLVSGIRTPPVRRNSKLATLGRIFKPWKWRKKKNEKLKQTTSALEKKMAGRQGREELIKKGLLEMMEQDAESKTCNPDGGPRSVQSEPPTPKSETLTSEDAQPGSPLATGTDQVSLDKPLSSAAHLDDAAKMPSASSGEEADAGSLLPTTNELSQALAGADSLDSPPRPLERSVGQLPSPPLLPTPPPKASSKTTKNVTGQATLFQASSMKSADPSLRGQLSTPTGSPHLTTVHRPLPPSRVIEELHRALATKHRQDSFQGRESKGSPKKRLDVRLSRTSSVERGKEREEAWSFDGALENKRTAAKESEENKENLIINSELKDDLLLYQDEEALNDSIISGTLPRKCKKELLAVKLRNRPSKQELEDRNIFPRRTDEERQEIRQQIEMKLSKRLSQRPAVEELERRNILKQRNDQTEQEERREIKQRLTRKLNQRPTVDELRDRKILIRFSDYVEVAKAQDYDRRADKPWTRLSAADKAAIRKELNEYKSNEMEVHASSKHLTRFHRP

SEQ ID NO: 9104 - protein, 320 aa, Homo sapiens
MTPGKHSGASARAANGGAWGYRDFRGGQKKGWCTTPQLVATMPVSPAGSHKQQNFGLNNATQPKKSISFFATMKATSVKGYTGANQSRMAVSKTVLIPPELKTVEKPNPNIKTTQVFDINGTDVTPRPLYHPDPLTGTAKPSKLLTSQEGSLGSEFISSYSLYQNTINPSTLGQFTRSVLGSSTVSKSSVSASESIAEDLEEPSYKRERLTSFTDLQVIRAAPEKIVTKEDLEKNIEIILTETETLRFFDLPTVMVSVESEEAEKVTQRNKNYEVLCRNRLGNDLYVERMMQTFNGAPKNKDVQCDKIIMEDKGNFYHSA

SEQ ID NO: 9105 - protein, 545 aa, Homo sapiens
MTPGKHSGASARAANGGAWGYRDFRGGQKKGWCTTPQLVATMPVSPAGSHKQQNFGLNNATQPKKSISFFATMKATSVKGYTGANQSRMAVSKTVLIPPELKTVEKPNPNIKTTQVFDINGTDVTPRPLYHPDPLTGTAKPSKLLTSQEGSLGSEFISSYSLYQNTINPSTLGQFTRSVLGSSTVSKSSVSASESIAEDLEEPSYKRERLTSFTDLQVIRAAPEKIVTKEDLEKNIEIILTETETLRFFDLPTVMVSVESEEAEKVTQRNKNYEVLCRNRLGNDLYVERMMQTFNGAPKNKDVQCDKIIMEDKGIMSTAWDLYDSYNAMELVSLSVKQSVVESSSKANVLPKDQDQRLPGSTTEKNSETSSLMDIENVILAKIHEDEEDHSDAILKSDKFHQDLFFMERVLMENIFQPKLAAYRQLPVLKEPEPEEPEDVLESAKHEEVEEESKKEEEEEIHAEESTIPANLERLWSFSCDLTKGLNVSSLAWNKTNPDLLAVGYGHFGFKEQKRGLACCWSIKNPMVTQTRIRSIFIWLLTKFS

SEQ ID NO: 9106 - protein, 192 aa, Homo sapiens
MEPGLWLLFGLTVTSAAGFVPCSQSGDAGRRGVSQAPTAARSEGDCEETVAGPGEETVAGPGEGTVAPTALQGPSPGSPGQEQAAEGAPEHHRSRRCTCFTYKDKECVYYCHLDIIWINTPEQTVPYGLSNYRGSFRGKRSAGPLPGNLQLSHRPHLRCACVGRYDKACLHFCTQTLDVSRLKSRTNKASRL

SEQ ID NO: 9107 - protein, 848 aa, Homo sapiens
MTPGKHSGASARAANGGAWGYRDFRGGQKKGWCTTPQLVATMPVSPAGSHKQQNFGLNNATQPKKSISFFATMKATSVKGYTGANQSRMAVSKTVLIPPELKTVEKPNPNIKTTQVFDINGTDVTPRPLYHPDPLTGTAKPSKLLTSQEGSLGSEFISSYSLYQNTINPSTLGQFTRSVLGSSTVSKSSVSASESIAEDLEEPSYKRERLTSFTDLQVIRAAPEKIVTKEDLEKNIEIILTETETLRFFDLPTVMVSVESEEAEKVTQRNKNYEVLCRNRLGNDLYVERMMQTFNGAPKNKDVQCDKIIMEDKGIMSTAWDLYDSYNAMELVSLSVKQSVVESSSKANVLPKDQDQRLPGSTTEKNSETSSLMDIENVILAKIHEDEEDHSDAILKSDKFHQDLFFMERVLMENIFQPKLAAYRQLPVLKEPEPEEPEDVLESAKHEEVEEESKKEEEEEIHAEESTIPANLERLWSFSCDLTKGLNVSSLAWNKTNPDLLAVGYGHFGFKEQKRGLACCWSIKNPMWPERIYQSPYGVTAVDFSIGAPNLLAVGYHNGTIAIYNVRSNSNVPVLDSSESPQKHLGPVWQLQWIEQDRGTTGDGKREILVSISADGRISKWVIRKGLDCYDLMRLKRTTAASNKKGGEKEKKDEALISRQAPGMCFAFHPKDTNIYLAGTEEGHIHKCSCSYNEQYLDTYRGHKGPVYKVTWNPFCHDVFLSCSADWGVIIWQQENVKPSLSFYPATSVVYDVAWSPKSSYIFAAANENRVEIWDLHISTLDPLIVNTANPGIKFTTILFAKQTDCLLVGDSDGQVSVYELRNMPTVLETGRGDIMDTLLGSKSNQSA

SEQ ID NO: 9108 - protein, 485 aa, Homo sapiens
MPHQKLSALIDAICSFVICNDSSLRGQPIIFNPDFFVEKLRHEKPEIFTELVVSNITRLIDLPGTELAQLMGEVDLKLPGGAGPASGFFRSLMSLKRKEKGVIFGSPLTEEGIAQIYQLIEYLHKNLRVEGLFRVPGNSVRQQILRDALNNGTDIDLESGEFHSNDVATLLKMFLGELPEPLLTHKHFNAHLKIADLMQFDDKGNKTNIPDKDRQIEALQLLFLILPPPNRNLLKLLLDLLYQTAKKQDKNKMSAYNLALMFAPHVLWPKNVTANDLQENITKLNSGMAFMIKHSQKLFKAPAYIRECARLHYLGSRTQASKDDLDLIASCHTKSFQLAKSQKRNRVDSCPHQEETQHHTEEALRELFQHVHDMPESAKKKQLIRQFNKQSLTQTPGREPSTSQVQKRARSRSFSGLIKRKVLGNQMMSEKKKKNPTPESVAIGELKGTSKENRNLLFSGSPAVTMTPTRLKWSEGKKEGKKGFL

SEQ ID NO: 9109 - protein, 1677 aa, Homo sapiens
MEVPEPTCPAPPARDQPAPTPGPPGAPGGQASPHLTLGPVLLPPEQGLAPPTVFLKALPIPLYHTVPPGGLQPRAPLVTGSLDGGNVPFILSPVLQPEGPGPTQVGKPAAPTLTVNIVGTLPVLSPGLGPTLGSPGKVRNAGKYLCPHCGRDCLKPSVLEKHIRSHTGERPFPCATCGIAFKTQSNLYKHRRTQTHLNNSRLSSESEGAGGGLLEEGDKAGEPPRPEGRGESRCQGMHEGASERPLSPGAHVPLLAKNLDVRTEAAPCPGSAFADREAPWDSAPMASPGLPAASTQPWRKLPEQKSPTAGKPCALQRQQATAAEKPWDAKAPEGRLRKCESTDSGYLSRSDSAEQPHAPCSPLHSLSEHSAESEGEGGPGPGPGVAGAEPGAREAGLELEKKRLEERIAQLISHNQAVVDDAQLDNVRPRKTGLSKQGSIDLPTPYTYKDSFHFDIRALEPGRRRAPGPVRSTWTPPDKSRPLFFHSVPTQLSTTVECVPVTRSNSLPFVEGSRTWLEPREPRDPWSRTQKPLSPRPGPARLGCRSGLSSTDVPSGHPRALVRQAAVEDLPGTPIGDALVPAEDTDAKRTAAREAMAGKGRAGGRKCGQRRLKMFSQEKWQVYGDETFKRIYQKMKASPHGGKKAREVGMGSGAELGFPLQKEAAGSSGTVPTQDRRTPVHEDISAGATPEPWGNPPALEASLVTEPTKHGETVARRGDSDRPRVEEAVSSPALGGRDSPCSGSRSPLVSPNGRLELGWQMPPAPGPLKGGDVEAPRPVWPDPKLEGGARGVGDVQETCLWAQTVLRWPSRGSGEDKLPSERKKLKVEDLHSWKQPEPVSAETPGGPTQPASLSSQKQDADPGEVPGGSKESARQVGEPLESSGASLAAASVALKRVGPRDKATPLHPAAPAPAEHPSLATPPQAPRVLSALADNAFSPKYLLRLPQAETPLPLPIPWGPRHSQDSLCSSGWPEERASFVGSGLGTPLSPSPASGPSPGEADSILEDPSCSRPQDGRKGAQLGGDKGDRMATSRPAARELPISAPGAPREATSSPPTPTCEAHLVQDMEGDSHRIHRLCMGSTLARARLSGDVLNPWVPNWELGEPPGNAPEDPSSGPLVGPDPCSPLQPGSFLTALTRPQGVPPGWPELALSSHSGTSRSHSTRSPHSTQNPFPSLKAEPRLTWCCLSRSVPLPAEQKAKAASVYLAVHFPGSSLRDEGPNGPPGSNGGWTWTSPGEGGPAQMSKFSYPTVPGVMPQHQVSEPEWKKGLPWRAKMSRGNSKQRKLKINPKRYKGNFLQSCVQLRASRLRTPTWVRRRSRHPPALEGLKPCRTPGQTSSEIAGLNLQEEPSCATSESPPCCGKEEKKEGDCRQTLGTLSLGTSSRIVREMDKRTVKDISPSAGEHGDCTTHSTAATSGLSLQSDTCLAVVNDVPLPPGKGLDLGLLETQLLASQDSVSTDPKPYIFSDAQRPSSFGSKGTFPHHDIATSVAAVCISLPVRTDHIAQEIHSAESRDHSQTAGRTLTSSSPDSKVTEEGRAQTLLPGRPSSGQRISDSVPLESTEKTHLEIPASGPSSASSHHKEGRHKTFFPSRGQYGCGEMTVPCPSLGSDGRKRQVSGLITRKDSVVPSKPEQPIEIPEAPSKSLKKRSLEGMRKQTRVEFSDTSSDDEDRLVIEI

SEQ ID NO: 9110 - protein, 828 aa, Homo sapiens
MMEGLKKRTRKAFGIRKKEKDTDSTGSPDRDGIQPSPHEPPYNSKAECAREGGKKVSKKSNGAPNGFYAEIDWERYNSPELDEEGYSIRPEEPGSTKGKHFYSSSESEEEEESHKKFNIKIKPLQSKDILKNAATVDELKASIGNIALSPSPVRKSPRRSPGAIKRNLSSEEVARPRRSTPTPELISKKPPDDTTALAPLFGPPLESAFDEQKTEVLLDQPEIWGSGQPINPSMESPKLTRPFPTGTPPPLPPKNVPATPPRTGSPLTIGPGNDQSATEVKIEKLPSINDLDSIFGPVLSPKSVAVNAEEKWVHFSDTSPEHVTPELTPREKVVSPPATPDNPADSPAPGPLGPPGPTGPPGPPGPPRNVLSPLNLEEVQKKVAEQTFIKDDYLETISSPKDFGLGQRATPPPPPPPTYRTVVSSPGPGSGPGPGTTSGASSPARPATPLVPCRSTTPPPPPPRPPSRPKLPPGKPGVGDVSRPFSPPIHSSSPPPIAPLARAESTSSISSTNSLSAATTPTVENEQPSLVWFDRGKFYLTFEGSSRGPSPLTMGAQDTLPVAAAFTETVNAYFKGADPSKCIVKITGEMVLSFPAGITRHFANNPSPAALTFRVINFSRLEHVLPNPQLLCCDNTQNDANTKEFWVNMPNLMTHLKKVSEQKPQATYYNVDMLKYQVSAQGIQSTPLNLAVNWRCEPSSTDLRIDYKYNTDAMTTAVALNNVQFLVPIDGGVTKLQAVLPPAVWNAEQQRILWKIPDISQKSENGGVGSLLARFQLSEGPSKPSPLVVQFTSEGSTLSGCDIELVGAGYRFSLIKKRFAAGKYLADN

SEQ ID NO: 9111 - protein, 631 aa, Homo sapiens
MMEGLKKRTRKAFGIRKKEKDTDSTGSPDRDGIKKSNGAPNGFYAEIDWERYNSPELDEEGYSIRPEEPGSTKGKHFYSSSESEEEEESHKKFNIKIKPLQSKDILKNAATVDELKASIGNIALSPSPVGAIKRNLSSEEVARPRRSTPTPELISKKPPDDTTALAPLFGPPLESAFDEQKTEVLLDQPEIWGSGQPINPSMESPKLTRPFPTGTPPPLPPKNVPATPPRTGSPLTIGPGASSPARPATPLVPCRSTTPPPPPPRPPSRPKLPPGKPGVGDVSRPFSPPIHSSSPPPIAPLARAESTSSISSTNSLSAATTPTVVSEDDVFYDKLPSFERRCETPAGSSRGPSPLTMGAQDTLPVAAAFTETVNAYFKGADPSKCIVKITGEMVLSFPAGITRHFANNPSPAALTFRVINFSRLEHVLPNPQLLCCDNTQNDANTKEFWVNMPNLMTHLKKVSEQKPQATYYNVDMLKYQVSAQGIQSTPLNLAVNWRCEPSSTDLRIDYKYNTDAMTTAVALNNVQFLVPIDGGVTKLQAVLPPAVWNAEQQRILWKIPDISQKSENGGVGSLLARFQLSEGPSKPSPLVVQFTSEGSTLSGCDIELVGAGYRFSLIKKRFAAGKYLADN

SEQ ID NO: 9112 - protein, 958 aa, Homo sapiens
MICQKFCVVLLHWEFIYVITAFNLSYPITPWRFKLSCMPPNSTYDYFLLPAGLSKNTSNSNGHYETAVEPKFNSSGTHFSNLSKTTFHCCFRSEQDRNCSLCADNIEGKTFVSTVNSLVFQQIDANWNIQCWLKGDLKLFICYVESLFKNLFRNYNYKVHLLYVLPEVLEDSPLVPQKGSFQMVHCNCSVHECCECLVPVPTAKLNDTLLMCLKITSGGVIFQSPLMSVQPINMVKPDPPLGLHMEITDDGNLKISWSSPPLVPFPLQYQVKYSENSTTVIREADKIVSATSLLVDSILPGSSYEVQVRGKRLDGPGIWSDWSTPRVFTTQDVIYFPPKILTSVGSNVSFHCIYKKENKIVPSKEIVWWMNLAEKIPQSQYDVVSDHVSKVTFFNLNETKPRGKFTYDAVYCCNEHECHHRYAELYVIDVNINISCETDGYLTKMTCRWSTSTIQSLAESTLQLRYHRSSLYCSDIPSIHPISEPKDCYLQSDGFYECIFQPIFLLSGYTMWIRINHSLGSLDSPPTCVLPDSVVKPLPPSSVKAEITINIGLLKISWEKPVFPENNLQFQIRYGLSGKEVQWKMYEVYDAKSKSVSLPVPDLCAVYAVQVRCKRLDGLGYWSNWSNPAYTVVMDIKVPMRGPEFWRIINGDTMKKEKNVTLLWKPLMKNDSLCSVQRYVINHHTSCNGTWSEDVGNHTKFTFLWTEQAHTVTVLAINSIGASVANFNLTFSWPMSKVNIVQSLSAYPLNSSCVIVSWILSPSDYKLMYFIIEWKNLNEDGEIKWLRISSSVKKYYIHDHFIPIEKYQFSLYPIFMEGVGKPKIINSFTQDDIEKHQSDAGLYVIVPVIISSSILLLGTLLISHQRMKKLFWEDVPNPKNCSWAQGLNFQKMLEGSMFVKSHHHSLISSTQGHKHCGRPQGPLHRKTRDLCSLVYLLTLPPLLSYDPAKSPSVRNTQE

SEQ ID NO: 9113 - protein, 896 aa, Homo sapiens
MICQKFCVVLLHWEFIYVITAFNLSYPITPWRFKLSCMPPNSTYDYFLLPAGLSKNTSNSNGHYETAVEPKFNSSGTHFSNLSKTTFHCCFRSEQDRNCSLCADNIEGKTFVSTVNSLVFQQIDANWNIQCWLKGDLKLFICYVESLFKNLFRNYNYKVHLLYVLPEVLEDSPLVPQKGSFQMVHCNCSVHECCECLVPVPTAKLNDTLLMCLKITSGGVIFQSPLMSVQPINMVKPDPPLGLHMEITDDGNLKISWSSPPLVPFPLQYQVKYSENSTTVIREADKIVSATSLLVDSILPGSSYEVQVRGKRLDGPGIWSDWSTPRVFTTQDVIYFPPKILTSVGSNVSFHCIYKKENKIVPSKEIVWWMNLAEKIPQSQYDVVSDHVSKVTFFNLNETKPRGKFTYDAVYCCNEHECHHRYAELYVIDVNINISCETDGYLTKMTCRWSTSTIQSLAESTLQLRYHRSSLYCSDIPSIHPISEPKDCYLQSDGFYECIFQPIFLLSGYTMWIRINHSLGSLDSPPTCVLPDSVVKPLPPSSVKAEITINIGLLKISWEKPVFPENNLQFQIRYGLSGKEVQWKMYEVYDAKSKSVSLPVPDLCAVYAVQVRCKRLDGLGYWSNWSNPAYTVVMDIKVPMRGPEFWRIINGDTMKKEKNVTLLWKPLMKNDSLCSVQRYVINHHTSCNGTWSEDVGNHTKFTFLWTEQAHTVTVLAINSIGASVANFNLTFSWPMSKVNIVQSLSAYPLNSSCVIVSWILSPSDYKLMYFIIEWKNLNEDGEIKWLRISSSVKKYYIHDHFIPIEKYQFSLYPIFMEGVGKPKIINSFTQDDIEKHQSDAGLYVIVPVIISSSILLLGTLLISHQRMKKLFWEDVPNPKNCSWAQGLNFQKRTDIL

SEQ ID NO: 9114 - protein, 640 aa, Homo sapiens
MVSNPVHGLPFLPGTSFKDSTKTAFHRSQTLSYRNGYAIVRRPTVGIGGDRLQFNQLSQAELDELASKAPVLTYGQPKQAPPADFIPAHVAFDKKVLKFDAYFQEDVPMSTEEQYRIRQVNIYYYLEDDSMSVIEPVVENSGILQGKLIKRQRLAKNDRGDHYHWKDLNRGINITIYGKTFRVVDCDQFTQVFLESQGIELNPPEKMALDPYTELRKQPLRKYVTPSDFDQLKQFLTFDKQVLRFYAIWDDTDSMYGECRTYIIHYYLMDDTVEIREVHERNDGRDPFPLLMNRQRVPKVLVENAKNFPQCVLEISDQEVLEWYTAKDFIVGKSLTILGRTFFIYDCDPFTRRYYKEKFGITDLPRIDVSKREPPPVKQELPPYNGFGLVEDSAQNCFALIPKAPKKDVIKMLVNDNKVLRYLAVLESPIPEDKDRRFVFSYFLATDMISIFEPPVRNSGIIGGKYLGRTKVVKPYSTVDNPVYYGPSDFFIGAVIEVFGHRFIILDTDEYVLKYMESNAAQYSPEALASIQNHVRKREAPAPEAESKQTEKDPGVQELEALIDTIQKQLKDHSCKDNIREAFQIYDKEASGYVDRDMFFKICESLNVPVDDSLVKELIRMCSHGEGKINYYNFVRAFSN

SEQ ID NO: 9115 - protein, 970 aa, Homo sapiens
MSLLGSYRKKTSNDGYESLQLVDSNGDLSAGSGGVGGKQRVNAGAAARSPARQPPDRASTMDSSGASSPDMEPSYGGGLFDMVKGGAGRLFSNLKDNLKDTLKDTSSRVIQSVTSYTKGDLDFTYVTSRIIVMSFPLDNVDIGFRNQVDDIRSFLDSRHLDHYTVYNLSPKSYRTAKFHSRVSECSWPIRQAPSLHNLFAVCRNMYNWLLQNPKNVCVVHCLDGRAASSILVGAMFIFCNLYSTPGPAIRLLYAKRPGIGLSPSHRRYLGYMCDLLADKPYRPHFKPLTIKSITVSPIPFFNKQRNGCRPYCDVLIGETKIYSTCTDFERMKEYRVQDGKIFIPLNITVQGDVVVSMYHLRSTIGSRLQAKVTNTQIFQLQFHTGFIPLDTTVLKFTKPELDACDVPEKYPQLFQVTLDVELQPHDKVIDLTPPWEHYCTKDVNPSILFSSHQEHQDTLALGGQAPIDIPPDNPRHYGQSGFFASLCWQDQKSEKSFCEEDHAALVNQESEQSDDELLTLSSPHGNANGDKPHGVKKPSKKQQEPAAPPPPEDVDLLGLEGSAMSNSFSPPAAPPTNSELLSDLFGGGGAAGPTQAGQSGVEDVFHPSGPASTQSTPRRSATSTSASPTLRVGEGATFDPFGAPSKPSGQDLLGSFLNTSSASSDPFLQPTRSPSPTVHASSTPAVNIQPDVSGGWDWHAKPGGFGMGSKSAATSPTGSSHGTPTHQSKPQTLDPFADLGTLGSSSFASKPTTPTGLGGGFPPLSSPQKASPQPMGGGWQQGGAYNWQQPQPKPQPSMPHSSPQNRPNYNVSFSAMPGGQNERGKGSSNLEGKQKAADFEDLLSGQGFNAHKDKKGPRTIAEMRKEEMAKEMDPEKLKILEWIEGKERNIRALLSTMHTVLWAGETKWKPVGMADLVTPEQVKKVYRKAVLVVHPDKATGQPYEQYAKMIFMELNDAWSEFENQGQKPLY

SEQ ID NO: 9116 - protein, 1461 aa, Homo sapiens
MALTPGWGSSAGPVRPELWLLLWAAAWRLGASACPALCTCTGTTVDCHGTGLQAIPKNIPRNTERLELNGNNITRIHKNDFAGLKQLRVLQLMENQIGAVERGAFDDMKELERLRLNRNQLHMLPELLFQNNQALSRLDLSENAIQAIPRKAFRGATDLKNLQLDKNQISCIEEGAFRALRGLEVLTLNNNNITTIPVSSFNHMPKLRTFRLHSNHLFCDCHLAWLSQWLRQRPTIGLFTQCSGPASLRGLNVAEVQKSEFSCSGQGEAGRVPTCTLSSGSCPAMCTCSNGIVDCRGKGLTAIPANLPETMTEIRLELNGIKSIPPGAFSPYRKLRRIDLSNNQIAEIAPDAFQGLRSLNSLVLYGNKITDLPRGVFGGLYTLQLLLLNANKINCIRPDAFQDLQNLSLLSLYDNKIQSLAKGTFTSLRAIQTLHLAQNPFICDCNLKWLADFLRTNPIETSGARCASPRRLANKRIGQIKSKKFRCSAKEQYFIPGTEDYQLNSECNSDVVCPHKCRCEANVVECSSLKLTKIPERIPQSTAELRLNNNEISILEATGMFKKLTHLKKINLSNNKVSEIEDGAFEGAASVSELHLTANQLESIRSGMFRGLDGLRTLMLRNNRISCIHNDSFTGLRNVRLLSLYDNQITTVSPGAFDTLQSLSTLNLLANPFNCNCQLAWLGGWLRKRKIVTGNPRCQNPDFLRQIPLQDVAFPDFRCEEGQEEGGCLPRPQCPQECACLDTVVRCSNKHLRALPKGIPKNVTELYLDGNQFTLVPGQLSTFKYLQLVDLSNNKISSLSNSSFTNMSQLTTLILSYNALQCIPPLAFQGLRSLRLLSLHGNDISTLQEGIFADVTSLSHLAIGANPLYCDCHLRWLSSWVKTGYKEPGIARCAGPQDMEGKLLLTTPAKKFECQGPPTLAVQAKCDLCLSSPCQNQGTCHNDPLEVYRCACPSGYKGRDCEVSLDSCSSGPCENGGTCHAQEGEDAPFTCSCPTGFEGPTCGVNTDDCVDHACANGGVCVDGVGNYTCQCPLQYEGKACEQLVDLCSPDLNPCQHEAQCVGTPDGPRCECMPGYAGDNCSENQDDCRDHRCQNGAQCMDEVNSYSCLCAEGYSGQLCEIPPHLPAPKSPCEGTECQNGANCVDQGNRPVCQCLPGFGGPECEKLLSVNFVDRDTYLQFTDLQNWPRANITLQVSTAEDNGILLYNGDNDHIAVELYQGHVRVSYDPGSYPSSAIYSAETINDGQFHTVELVAFDQMVNLSIDGGSPMTMDNFGKHYTLNSEAPLYVGGMPVDVNSAAFRLWQILNGTGFHGCIRNLYINNELQDFTKTQMKPGVVPGCEPCRKLYCLHGICQPNATPGPMCHCEAGWVGLHCDQPADGPCHGHKCVHGQCVPLDALSYSCQCQDGYSGALCNQSPSAGGTLSGTFTRSRGAMPSARPRAPCHGWSAGARAQARAAARAFG

SEQ ID NO: 9117 - protein, 678 aa, Homo sapiens
MAAAAGDGGGEGGAGLGSAAGLGPGPGLRGQGPSAEAHEGAPDPMPAALHPEEVAARLQRMQRELSNRRKILVKNLPQDSNCQEVHDLLKDYDLKYCYVDRNKRTAFVTLLNGEQAQNAIQMFHQYSFRGKDLIVQLQPTDALLCITNVPISFTSEEFEELVRAYGNIERCFLVYSEVTGHSKGYGFVEYMKKDFAAKARLELLGRQLGASALFAQWMDVNLLASELIHSKCLCIDKLPSDYRDSEELLQIFSSVHKPVFCQLAQDEGSYVGGFAVVEYSTAEQAEEVQQAADGMTIKGSKVQVSFCAPGAPGRSTLAALIAAQRVMHSNQKGLLPEPNPVQIMKSLNNPAMLQVLLQPQLCGRAVKPAVLGTPHSLPHLMNPSISPAFLHLNKAHQNLSHIPLAQQQLMKFENIHTNNKPGLLGEPPAVVLQTALGIGSVLPLKKELGHHHGEAHKTSSLIPTQTTITAGMGMLPFFPNQHIAGQAGPGHSNTQEKQPATVGMAEGNFSGSQPYLQSFPNLAAGSLLVGHHKQQQSQPKGTEISSGAASKNQTSLLGEPPKEIRLSKNPYLNLASVLPSVCLSSPASKTTLHKTGIASSILDAISQGSESQHALEKCIAYSPPFGDYAQVSSLRNEKRGSSYLISAPEGGSVECVDQHSQGTGAYYMETYLKKKRVY

SEQ ID NO: 9118 - protein, 937 aa, Homo sapiens
MHRPRRRGTRPPLLALLAALLLAARGAAAQETELSVSAELVPTSSWNISSELNKDSYLTLDEPMNNITTSLGQTAELHCKVSGNPPPTIRWFKNDAPVVQEPRRLSFRSTIYGSRLRIRNLDTTDTGYFQCVATNGKEVVSSTGVLFVKFGPPPTASPGYSDEYEEDGFCQPYRGIACARFIGNRTVYMESLHMQGEIENQITAAFTMIGTSSHLSDKCSQFAIPSLCHYAFPYCDETSSVPKPRDLCRDECEILENVLCQTEYIFARSNPMILMRLKLPNCEDLPQPESPEAANCIRIGIPMADPINKNHKCYNSTGVDYRGTVSVTKSGRQCQPWNSQYPHTHTFTALRFPELNGGHSYCRNPGNQKEAPWCFTLDENFKSDLCDIPACDSKDSKEKNKMEILYILVPSVAIPLAIALLFFFICVCRNNQKSSSAPVQRQPKHVRGQNVEMSMLNAYKPKSKAKELPLSAVRFMEELGECAFGKIYKGHLYLPGMDHAQLVAIKTLKDYNNPQQWTEFQQEASLMAELHHPNIVCLLGAVTQEQPVCMLFEYINQGDLHEFLIMRSPHSDVGCSSDEDGTVKSSLDHGDFLHIAIQIAAGMEYLSSHFFVHKDLAARNILIGEQLHVKISDLGLSREIYSADYYRVQSKSLLPIRWMPPEAIMYGKFSSDSDIWSFGVVLWEIFSFGLQPYYGFSNQEVIEMVRKRQLLPCSEDCPPRMYSLMTECWNEIPSRRPRFKDIHVRLRSWEGLSSHTSSTTPSGGNATTQTTSLSASPVSNLSNPRYPNYMFPSQGITPQGQIAGFIGPPIPQNQRFIPINGYPIPPGYAAFPAAHYQPTGPPRVIQHCPPPKSRSPSSASGSTSTGHVTSLPSSGSNQEANIPLLPHMSIPNHPGGMGITVFGNKSQKPYKIDSKQASLLGDANIHGHTESMISAEL

SEQ ID NO: 9119 - protein, 394 aa, Homo sapiens
MGCLGNSKTEDQRNEEKAQREANKKIEKQLQKDKQVYRATHRLLLLGAGESGKSTIVKQMRILHVNGFNGEGGEEDPQAARSNSDGEKATKVQDIKNNLKEAIETIVAAMSNLVPPVELANPENQFRVDYILSVMNVPDFDFPPEFYEHAKALWEDEGVRACYERSNEYQLIDCAQYFLDKIDVIKQADYVPSDQDLLRCRVLTSGIFETKFQVDKVNFHMFDVGGQRDERRKWIQCFNDVTAIIFVVASSSYNMVIREDNQTNRLQEALNLFKSIWNNRWLRTISVILFLNKQDLLAEKVLAGKSKIEDYFPEFARYTTPEDATPEPGEDPRVTRAKYFIRDEFLRISTASGDGRHYCYPHFTCAVDTENIRRVFNDCRDIIQRMHLRQYELL

SEQ ID NO: 9120 - protein, 380 aa, Homo sapiens
MGCLGNSKTEDQRNEEKAQREANKKIEKQLQKDKQVYRATHRLLLLGAGESGKSTIVKQMRILHVNGFNGDSEKATKVQDIKNNLKEAIETIVAAMSNLVPPVELANPENQFRVDYILSVMNVPDFDFPPEFYEHAKALWEDEGVRACYERSNEYQLIDCAQYFLDKIDVIKQADYVPSDQDLLRCRVLTSGIFETKFQVDKVNFHMFDVGGQRDERRKWIQCFNDVTAIIFVVASSSYNMVIREDNQTNRLQEALNLFKSIWNNRWLRTISVILFLNKQDLLAEKVLAGKSKIEDYFPEFARYTTPEDATPEPGEDPRVTRAKYFIRDEFLRISTASGDGRHYCYPHFTCAVDTENIRRVFNDCRDIIQRMHLRQYELL

SEQ ID NO: 9121 - protein, 720 aa, Homo sapiens [sequence omitted]

SEQ ID NO: 9122 - protein, 1037 aa, Homo sapiens
MGVRNCLYGNNMSGQRDIPPEIGEQPEQPPLEAPGAAAPGAGPSPAEEMETEPPHNEPIPVENDGEACGPPEVSRPNFQVLNPAFREAGAHGSYSPPPEEAMPFEAEQPSLGGFWPTLEQPGFPSGVHAGLEAFGPALMEPGAFSGARPGLGGYSPPPEEAMPFEFDQPAQRGCSQLLLQVPDLAPGGPGAAGVPGAPPEEPQALRPAKAGSRGGYSPPPEETMPFELDGEGFGDDSPPPGLSRVIAQVDGSSQFAAVAASSAVRLTPAANAPPLWVPGAIGSPSQEAVRPPSNFTGSSPWMEISGPPFEIGSAPAGVDDTPVNMDSPPIALDGPPIKVSGAPDKRERAERPPVEEEAAEMEGAADAAEGGKVPSPGYGSPAAGAASADTAARAAPAAPADPDSGATPEDPDSGTAPADPDSGAFAADPDSGAAPAAPADPDSGAAPDAPADPDSGAAPDAPADPDAGAAPEAPAAPAAAETRAAHVAPAAPDAGAPTAPAASATRAAQVRRAASAAPASGARRKIHLRPPSPEIQAADPPTPRPTRASAWRGKSESSRGRRVYYDEGVASSDDDSSGDESDDGTSGCLRWFQHRRNRRRRKPQRNLLRNFLVQAFGGCFGRSESPQPKASRSLKVKKVPLAEKRRQMRKEALEKRAQKRAEKKRSKLIDKQLQDEKMGYMCTHRLLLLGAGESGKSTIVKQMRILHVNGFNGEGGEEDPQAARSNSDGEKATKVQDIKNNLKEAIETIVAAMSNLVPPVELANPENQFRVDYILSVMNVPDFDFPPEFYEHAKALWEDEGVRACYERSNEYQLIDCAQYFLDKIDVIKQADYVPSDQDLLRCRVLTSGIFETKFQVDKVNFHMFDVGGQRDERRKWIQCFNDVTAIIFVVASSSYNMVIREDNQTNRLQEALNLFKSIWNNRWLRTISVILFLNKQDLLAEKVLAGKSKIEDYFPEFARYTTPEDATPEPGEDPRVTRAKYFIRDEFLRISTASGDGRHYCYPHFTCAVDTENIRRVFNDCRDIIQRMHLRQYELL

SEQ ID NO: 9123 - protein, 1023 aa, Homo sapiens
MGVRNCLYGNNMSGQRDIPPEIGEQPEQPPLEAPGAAAPGAGPSPAEEMETEPPHNEPIPVENDGEACGPPEVSRPNFQVLNPAFREAGAHGSYSPPPEEAMPFEAEQPSLGGFWPTLEQPGFPSGVHAGLEAFGPALMEPGAFSGARPGLGGYSPPPEEAMPFEFDQPAQRGCSQLLLQVPDLAPGGPGAAGVPGAPPEEPQALRPAKAGSRGGYSPPPEETMPFELDGEGFGDDSPPPGLSRVIAQVDGSSQFAAVAASSAVRLTPAANAPPLWVPGAIGSPSQEAVRPPSNFTGSSPWMEISGPPFEIGSAPAGVDDTPVNMDSPPIALDGPPIKVSGAPDKRERAERPPVEEEAAEMEGAADAAEGGKVPSPGYGSPAAGAASADTAARAAPAAPADPDSGATPEDPDSGTAPADPDSGAFAADPDSGAAPAAPADPDSGAAPDAPADPDSGAAPDAPADPDAGAAPEAPAAPAAAETRAAHVAPAAPDAGAPTAPAASATRAAQVRRAASAAPASGARRKIHLRPPSPEIQAADPPTPRPTRASAWRGKSESSRGRRVYYDEGVASSDDDSSGDESDDGTSGCLRWFQHRRNRRRRKPQRNLLRNFLVQAFGGCFGRSESPQPKASRSLKVKKVPLAEKRRQMRKEALEKRAQKRAEKKRSKLIDKQLQDEKMGYMCTHRLLLLGAGESGKSTIVKQMRILHVNGFNGDSEKATKVQDIKNNLKEAIETIVAAMSNLVPPVELANPENQFRVDYILSVMNVPDFDFPPEFYEHAKALWEDEGVRACYERSNEYQLIDCAQYFLDKIDVIKQADYVPSDQDLLRCRVLTSGIFETKFQVDKVNFHMFDVGGQRDERRKWIQCFNDVTAIIFVVASSSYNMVIREDNQTNRLQEALNLFKSIWNNRWLRTISVILFLNKQDLLAEKVLAGKSKIEDYFPEFARYTTPEDATPEPGEDPRVTRAKYFIRDEFLRISTASGDGRHYCYPHFTCAVDTENIRRVFNDCRDIIQRMHLRQYELL

SEQ ID NO: 9124 - protein, 183 aa, Homo sapiens
MARAHWGCCPWLVLLCACAWGHTKPVDLGGQDVRNCSTNPPYLPVTVVNTTMSLTALRQQMQTQNLSAYIIPGTDAHMNEYIGQHDERRAWITGFTGSAGTAVVTMKKAAVWTDSRYWTQAERQMDCNWELHKEVGTTPIVTWLLTEIPAGGRVGFDPFLLSIGMLFLQSLNLSMLTRVTQLP

SEQ ID NO: 9125 - protein, 674 aa, Homo sapiens
MARAHWGCCPWLVLLCACAWGHTKPVDLGGQDVRNCSTNPPYLPVTVVNTTMSLTALRQQMQTQNLSAYIIPGTDAHMNEYIGQHDERRAWITGFTGSAGTAVVTMKKAAVWTDSRYWTQAERQMDCNWELHKEVGTTPIVTWLLTEIPAGGRVGFDPFLLSIDTWESYDLALQGSNRQLVSITTNLVDLVWGSERPPVPNQPIYALQEAFTGSTWQEKVSGVRSQMQKHQKVPTAVLLSALEETAWLFNLRASDIPYNPFFYSYTLLTDSSIRLFANKSRFSSETLSYLNSSCTGPMCVQIEDYSQVRDSIQAYSLGDVRIWIGTSYTMYGIYEMIPKEKLVTDTYSPVMMTKAVKNSKEQALLKASHVRDAVAVIRYLVWLEKNVPKGTVDEFSGAEIVDKFRGEEQFSSGPSFETISASGLNAALAHYSPTKELNRKLSSDEMYLLDSGGQYWDGTTDITRTVHWGTPSAFQKEAYTRVLIGNIDLSRLIFPAATSGRMVEAFARRALWDAGLNYGHGTGHGIGNFLCVHEWPVGFQSNNIAMAKGMFTSIEPGYYKDGEFGIRLEDVALVVEAKTKYPGSYLTFEVVSFVPYDRNLIDVSLLSPEHLQYLNRYYQTIREKVGPELQRRQLLEEFEWLQQHTEPLAARAPDTASWASVLVVSTLAILGWSV

SEQ ID NO: 9126 - protein, 627 aa, Homo sapiens
MVVQPDRIRCGAETTVYVIVRCKLDDRVATEAEFSPEDSPSVRMEAKVENEYTISVKAPNLSSGNVSLKIYSGDLVVCETVISYYTDMEEIGNLLSNAANPVEFMCQAFKIVPYNTETLDKLLTESLKNNIPASGLHLFGINQLEEEDMMTNQRDEELPTLLHFAAKYGLKNLTALLLTCPGALQAYSVANKHGHYPNTIAEKHGFRDLRQFIDEYVETVDMLKSHIKEELMHGEEADAVYESMAHLSTDLLMKCSLNPGCDEDLYESMAAFVPAATEDLYVEMLQASTSNPIPGDGFSRATKDSMIRKFLEGNSMGMTNLERDQCHLGQEEDVYHTVDDDEAFSVDLASRPPVPVPRPETTAPGAHQLPDNEPYIFKVFAEKSQERPGNFYVSSESIRKGPPVRPWRDRPQSSIYDPFAGMKTPGQRQLITLQEQVKLGIVNVDEAVLHFKEWQLNQKKRSESFRFQQENLKRLRDSITRRQREKQKSGKQTDLEITVPIRHSQHLPAKVEFGVYESGPRKSVIPPRTELRRGDWKTDSTSSTASSTSNRSSTRSLLSVSSGMEGDNEDNEVPEVTRSRSPGPPQVDGTPTMSLERPPRVPPRAASQRPPTRETFHPPPPVPPRGR

SEQ ID NO: 9127 - protein, 901 aa, Homo sapiens
MEPPLPVGAQPLATVEGMEMKGPLREPCALTLAQRNGQYELIIQLHEKEQHVQDIIPINSHFRCVQEAEETLLIDIASNSGCKIRVQGDWIRERRFEIPDEEHCLKFLSAVLAAQKAQSQLLVPEQKDSSSWYQKLDTKDKPSVFSGLLGFEDNFSSMNLDKKINSQNQPTGIHREPPPPPFSVNKMLPREKEASNKEQPKVTNTMRKLFVPNTQSGQREGLIKHILAKREKEYVNIQTFRFFVGTWNVNGQSPDSGLEPWLNCDPNPPDIYCIGFQELDLSTEAFFYFESVKEQEWSMAVERGLHSKAKYKKVQLVRLVGMMLLIFARKDQCRYIRDIATETVGTGIMGKMGNKGGVAVRFVFHNTTFCIVNSHLAAHVEDFERRNQDYKDICARMSFVVPNQTLPQLNIMKHEVVIWLGDLNYRLCMPDANEVKSLINKKDLQRLLKFDQLNIQRTQKKAFVDFNEGEIKFIPTYKYDSKTDRWDSSGKCRVPAWCDRILWRGTNVNQLNYRSHMELKTSDHKPVSALFHIGVKVVDERRYRKVFEDSVRIMDRMENDFLPSLELSRREFVFENVKFRQLQKEKFQISNNGQVPCHFSFIPKLNDSQYCKPWLRAEPFEGYLEPNETVDISLDVYVSKDSVTILNSGEDKIEDILVLHLDRGKDYFLTISGNYLPSCFGTSLEALCRMKRPIREVPVTKLIDLEEDSFLEKEKSLLQMVPLDEGASERPLQVPKEIWLLVDHLFKYACHQEDLFQTPGMQEELQQIIDCLDTSIPETIPGSNHSVAEALLIFLEALPEPVICYELYQRCLDSAYDPRICRQVISQLPRCHRNVFRYLMAFLRELLKFSEYNSVNANMIATLFTSLLLRPPPNLMARQTPSDRQRAIQFLLGFLLGSEED

SEQ ID NO: 9128 - protein, 4074 aa, Homo sapiens
MTAWLISLMSIEVLLLAVRHLSLHIEPEEGSLAGGTWITVIFDGLELGVLYPNNGSQLEIHLVNVNMVVPALRSVPCDVFPVFLDLPVVTCRTRSVLSEAHEGLYFLEAYFGGQLVSSPNPGPRDSCTFKFSKAQTPIVHQVYPPSGVPGKLIHVYGWIITGRLETFDFDAEYIDSPVILEAQGDKWVTPCSLINRQMGSCYPIQEDHGLGTLQCHVEGDYIGSQNVSFSVFNKGKSMVHKKAWLISAKQDLFLYQTHSEILSVFPETGSLGGRTNITITGDFFDNSAQVTIAGIPCDIRHVSPRKIECTTRAPGKDVRLTTPQPGNRGLLFEVGDAVEGLELTEATPGYRWQIVPNASSPFGFWSQEGQPFRARLSGFFVAPETNNYTFWIQADSQASLHFSWSEEPRTKVKVASISVGTADWFDSWEQNRDEGTWQQKTPKLELLGGAMYYLEAEHHGIAPSRGMRIGVQIHNTWLNPDVVTTYLREKHQIRVRAQRLPEVQVLNVSGRGNFFLTWDNVSSQPIPANATAHLIQTTIEELLAVKCKLEPLWSNILLRLGFERGPEVSNSDGDLTSGTEPFCGRFSLRQPRHLVLTPPAAQKGYRLDQYTHLCLAYKGHMNKILKMIVSFTIGFQNMVKNTTCDWSLTRTSPESWQFDCTDLWETCVRCFGDLQPPPANSPVLVHQINLLPLAQETGLFYVDEIIIADTNVTVSQADSGTARPGGNLVESVSVVGSPPVYSVTSWLAGCGTELPLITARSVPTEGTEEGSGLVLVTTQRRQRTSPPLGGHFRIQLPNTVISDVPVQISAHHLHQLLQNNADDFTSRYLNASDFTVKEDLYTCYEHVWTLSWSTQIGDLPNFIRVSDENLTGVNPAAATRVVYDGGVFLGPIFGDMLATANQHTQVVVRVNDVPAHCPGSCSFQYLQGSTPCVHSVWYSIDGDINLMIYITGTGFSGDSQFLQVTVNKTSCKVIFSNQTNVVCQTDLLPVGMHRILMLVRPSGLAISATGEDLFLNVKPRLDMVEPSRAADIGGLWATIRGSSLEGVSLILFGSYSCAINVATSNSSRIQCKVPPRGKDGRIVNVTVIRGDYSAVLPRAFTYVSSLNPVIVTLSRNISNIAGGETLVIGVARLMNYTDLDVEVHVQDALAPVHTQSAWGLEVALPPLPAGLHRISVSINGVSIHSQGVDLHIQYLTEVFSIEPCCGSLLGGTILSISGIGFSRDPALVWVLVGNRSCDIVNLTEASIWCETLPAPQIPDAGAPTVPAAVEVWAGNRFFARGPSPSLVGKGFTFMYEAAATPVVTAMQGEITNSSLSLHVGGSNLSNSVILLGNLNCDVETQSFQGNVSLSGCSIPLHSLEAGIYPLQVRQKQMGFANMSVVLQQFAVMPRIMAIFPSQGSACGGTILTVRGLLLNSRRRSVRVDLSGPFTCVILSLGDHTILCQVSLEGDPLPGASFSLNVTVLVNGLTSECQGNCTLFIREEASPVMDALSTNTSGSLTTVLIRGQRLATTADEPMVFVDDQLPCNVTFFNASHVVCQTRDLAPGPHYLSVFYTRNGYACSGNVSRHFYIMPQVFHYFPKNFSLHGGSLLTIEGTGLRGQNTTSVYIDQQTCLTVNIGAELIRCIVPTGNGSVALEIEVDGLWYHIGVIGYNKAFTPELISISQSDDILTFAVAQISGAANIDIFIGMSPCVGVSGNHTVLQCVVPSLPAGEYHVRGYDCIRGWASSALVFTSRVIITAVTENFGCLGGRLVHVFGAGFSPGNVSAAVCGAPCRVLANATVSAFSCLVLPLDVSLAFLCGLKREEDSCEAARHTYVQCDLTVAMATEQLLESWPYLYICEESSQCLFVPDHWAESMFPSFSGLFISPKLERDEVLIYNSSCNITMETEAEMECETPNQPITVKITEIRKRWGQNTQGNFSLQFCRRWSRTHSWFPERLPQDGDNVTVENGQLLLLDTNTSILNLLHIKGGKLIFMAPGPIELRAHAILVSDGGELRIGSEDKPFQGRAQITLYGSSYSTPFFPYGVKFLAVRNGTLSLHGSLPEVIVTCLRATAHALDTVLALEDAVDWNPGDEVVIISGTGVKGAKPMEEIVTVETVQDTDLYLKSPLRYSHNFTENWVAGEHHILKATVALLSRSITIQGNLTNEREKLLVSCQEANAPEGNLQHCLYSMSEKMLGSRDMGARVIVQSFPEEPSQVQLKGVQFQVLGQAFHKHLSSLTLVGAMRESFIQGCTVRNSFSRGLSMCGTLGLKVDSNVFYNILGHALLVGTCTEMRYISWEAIHGRKDDWSGHGNIIRNNVIIQVSGAEGLSNPEMLTPSGIYICSPTNVIEGNRVCGAGYGYFFHLMTNQTSQAPLLSFTQNIAHSCTRYGLFVYPKFQPPWDNVTGTTLFQSFTVWESAGGAQIFRSSNLRLKNFKVYSCRDFGIDVLESDANTSVTDSLLLGHFAHKGSLCMSSGIKTPKRWELMVSNTTFVNFDLINCVAIRTCSDCSQGQGGFTVKTSQLKFTNSSNLVAFPFPHAAILEDLDGSLSGKNRSHILASMETLSASCLVNSSFGRVVHGSACGGGVLFHRMSIGLANTPEVSYDLTMTDSRNKTTTVNYVRDTLSNPRGWMALLLDQETYSLQSENLWINRSLQYSATFDNFAPGNYLLLVHTDLPPYPDILLRCGSRVGLSFPFLPSPGQNQGCDWFFNSQLRQLTYLVSGEGQVQVILRVKEGMPPTISASTSAPESALKWSLPETWQGVEEGWGGYNNTIPGPGDDVLILPNRTVLVDTDLPFFKGLYVMGTLDFPVDRSNVLSVACMVIAGGELKVGTLENPLEKEQKLLILLRASEGVFCDRMNGIHIDPGTIGVYGKVHLYSAYPKNSWTHLGADIASGNERIIVEDAVDWRPHDKIVLSSSSYEPHEAEVLTVKEVKGHHVRIYERLKHRHIGSVHVTEDGRHIRLAAEVGLLTRNIQIQPDVSCRGRLFVGSFRKSSREEFSGVLQLLNVEIQNFGSPLYSSVEFSNVSAGSWIISSTLHQSCGGGIHAAASHGVLLNDNIVFGTAGHGIDLEGQAYTVTNNLVVLMTQPAWSTIWVAGIKVNQVKDINLHGNVVAGSERLGFHIRGHKCSSCELLWSDNVAHSSLHGLHLYKESGLDNCTRISGFLAFKNFDYGAMLHVENSVEIENITLVDNTIGLLAVVYVFSAPQNSVKKVQIVLRNSVIVATSSSFDCIQDKVKPHSANLTSTDRAPSNPRGGRIGILWPVFTSEPNQWPQEPWHKVRNDHSISGIMKLQDVTFSSFVKSCYSDDLDVCILPNAENSGIMHPITAERTRMLKIKDKNKFYFPSLQPRKDLGKVVCPELDCASPRKYLFKDLDGRALGLPPPVSVFPKTEAEWTASFFNAGTFREEQKCTYQFLMQGFICKQTDQVVLILDSADAIWAIQKLYPVVSVTSGFVDVFSSVNANIPCSTSGSVSTFYSILPIRQITKVCFMDQTPQVLRFFLLGNKSTSKLLLAVFYHELQSPHVFLGESFIPPTLVQSASLLLNESIGANYFNIMDNLLYVVLQGEEPIEIRSGVSIHLALTVMVSVLEKGWEIVILERLTNFLQIGQNQIRFIHEMPGHEETLKAIADSRAKRKRNCPTVTCTSHYRRVGQRRPLMMEMNSHRASPPMTVETISKVIVIEIGDSPTVRSTGMISSLSSNKLQNLAHRVITAQQTGVLENVLNMTIGALLVTQSKGVIGYGNTSSFKTGNLIYIRPYALSILVQPSDGEVGNELPVQPQLVFLDEQNRRVESLGPPSEPWTISASLEGASDSVLKGCTQAETQDGYVSFYNLAVLISGSNWHFIFTVTSPPGVNFTARSKPFAVLPVTRKEKSTIILAASLSSVASWLALSCLVCCWLKRSKSRKTKPEEIPESQTNNQNIHIHISSKRRESQGPKKEDTVVGEDMRMKVMLGKVNQCPHQLMNGVSRRKVSRHIVREEEAAVPAPGTTGITSHGHICAPGAPAQQVYLQETGNWKEGQEQLLRYQLAGQNQLLLLCPDFRQERQQLPGQSRLSKQSGSLGLSQEKKASCGATEAFCLHSVHPETIQEQL

SEQ ID NO: 9129 - protein, 1070 aa, Homo sapiens
MEQDTAAVAATVAAADATATIVVIEDEQPGPSTSQEEGAAAAATEATAATEKGEKKKEKNVSSFQLKLAAKAPKSEKEMDPEYEEKMKADRAKRFEFLLKQTELFAHFIQPSAQKSPTSPLNMKLGRPRIKKDEKQSLISAGDYRHRRTEQEEDEELLSESRKTSNVCIRFEVSPSYVKGGPLRDYQIRGLNWLISLYENGVNGILADEMGLGKTLQTIALLGYLKHYRNIPGPHMVLVPKSTLHNWMNEFKRWVPSLRVICFVGDKDARAAFIRDEMMPGEWDVCVTSYEMVIKEKSVFKKFHWRYLVIDEAHRIKNEKSKLSEIVREFKSTNRLLLTGTPLQNNLHELWALLNFLLPDVFNSADDFDSWFDTKNCLGDQKLVERLHAVLKPFLLRRIKTDVEKSLPPKKEIKIYLGLSKMQREWYTKILMKDIDVLNSSGKMDKMRLLNILMQLRKCCNHPYLFDGAEPGPPYTTDEHIVSNSGKMVVLDKLLAKLKEQGSRVLIFSQMTRLLDILEDYCMWRGYEYCRLDGQTPHEEREDKFLEVEFLGQREAIEAFNAPNSSKFIFMLSTRAGGLGINLASADVVILYDSDWNPQVDLQAMDRAHRIGQKKPVRVFRLITDNTVEERIVERAEIKLRLDSIVIQQGRLIDQQSNKLAKEEMLQMIRHGATHVFASKESELTDEDITTILERGEKKTAEMNERLQKMGESSLRNFRMDIEQSLYKFEGEDYREKQKLGMVEWIEPPKRERKANYAVDAYFREALRVSEPKIPKAPRPPKQPNVQDFQFFPPRLFELLEKEILYYRKTIGYKVPRNPDIPNPALAQREEQKKIDGAEPLTPEETEEKEKLLTQGFTNWTKRDFNQFIKANEKYGRDDIDNIAREVEGKSPEEVMEYSAVFWERCNELQDIEKIMAQIERGEARIQRRISIKKALDAKIARYKAPFHQLRIQYGTSKGKNYTEEEDRFLICMLHKMGFDRENVYEELRQCVRNAPQFRFDWFIKSRTAMEFQRRCNTLISLIEKENMEIEERERAEKKKRATKTPMSQKRKAESATESSGKKDVKKVKS

SEQ ID NO: 9130 - protein, 1054 aa, Homo sapiens
MEQDTAAVAATVAAADATATIVVIEDEQPGPSTSQEEGAAAAATEATAATEKGEKKKEKNVSSFQLKLAAKAPKSEKEMDPEYEEKMKADRAKRFEFLLKQTELFAHFIQPSAQKSPTSPLNMKLGRPRIKKDEKQSLISAGDYRHRRTEQEEDEELLSESRKTSNVCIRFEVSPSYVKGGPLRDYQIRGLNWLISLYENGVNGILADEMGLGKTLQTIALLGYLKHYRNIPGPHMVLVPKSTLHNWMNEFKRWVPSLRVICFVGDKDARAAFIRDEMMPGEWDVCVTSYEMVIKEKSVFKKFHWRYLVIDEAHRIKNEKSKLSEIVREFKSTNRLLLTGTPLQNNLHELWALLNFLLPDVFNSADDFDSWFDTKNCLGDQKLVERLHAVLKPFLLRRIKTDVEKSLPPKKEIKIYLGLSKMQREWYTKILMKDIDVLNSSGKMDKMRLLNILMQLRKCCNHPYLFDGAEPGPPYTTDEHIVSNSGKMVVLDKLLAKLKEQGSRVLIFSQMTRLLDILEDYCMWRGYEYCRLDGQTPHEEREDKFLEVEFLGQREAIEAFNAPNSSKFIFMLSTRAGGLGINLASADVVILYDSDWNPQVDLQAMDRAHRIGQKKPVRVFRLITDNTVEERIVERAEIKLRLDSIVIQQGRLIDQQSNKLAKEEMLQMIRHGATHVFASKESELTDEDITTILERGEKKTAEMNERLQKMGESSLRNFRMDIEQSLYKFEGEDYREKQKLGMVEWIEPPKRERKANYAVDAYFREALRVSEPKIPKAPRPPKQPNVQDFQFFPPRLFELLEKEILYYRKTIGYKVPRNPDIPNPALAQREEQKKIDGAEPLTPEETEEKEKLLTQGFTNWTKRDFNQFIKANEKYGRDDIDNIAREVEGKSPEEVMEYSAVFWERCNELQDIEKIMAQIERGEARIQRRISIKKALDAKIARYKAPFHQLRIQYGTSKGKNYTEEEDRFLICMLHKMGFDRENVYEELRQCVRNAPQFRFDWFIKSRTAMEFQRRCNTLISLIEKENMEIEERERAEKKKRATKTPMVKFSAFS

SEQ ID NO: 9131 - protein, 1058 aa, Homo sapiens
MEQDTAAVAATVAAADATATIVVIEDEQPGPSTSQEEGAAAAATEATAATEKGEKKKEKNVSSFQLKLAAKAPKSEKEMDPEYEEKMKADRAKRFEFLLKQTELFAHFIQPSAQKSPTSPLNMKLGRPRIKKDEKQSLISAGDYRHRRTEQEEDEELLSESRKTSNVCIRFEVSPSYVKGGPLRDYQIRGLNWLISLYENGVNGILADEMGLGKTLQTIALLGYLKHYRNIPGPHMVLVPKSTLHNWMNEFKRWVPSLRVICFVGDKDARAAFIRDEMMPGEWDVCVTSYEMVIKEKSVFKKFHWRYLVIDEAHRIKNEKSKLSEIVREFKSTNRLLLTGTPLQNNLHELWALLNFLLPDVFNSADDFDSWFDTKNCLGDQKLVERLHAVLKPFLLRRIKTDVEKSLPPKKEIKIYLGLSKMQREWYTKILMKDIDVLNSSGKMDKMRLLNILMQLRKCCNHPYLFDGAEPGPPYTTDEHIVSNSGKMVVLDKLLAKLKEQGSRVLIFSQMTRLLDILEDYCMWRGYEYCRLDGQTPHEEREEAIEAFNAPNSSKFIFMLSTRAGGLGINLASADVVILYDSDWNPQVDLQAMDRAHRIGQKKPVRVFRLITDNTVEERIVERAEIKLRLDSIVIQQGRLIDQQSNKLAKEEMLQMIRHGATHVFASKESELTDEDITTILERGEKKTAEMNERLQKMGESSLRNFRMDIEQSLYKFEGEDYREKQKLGMVEWIEPPKRERKANYAVDAYFREALRVSEPKIPKAPRPPKQPNVQDFQFFPPRLFELLEKEILYYRKTIGYKVPRNPDIPNPALAQREEQKKIDGAEPLTPEETEEKEKLLTQGFTNWTKRDFNQFIKANEKYGRDDIDNIAREVEGKSPEEVMEYSAVFWERCNELQDIEKIMAQIERGEARIQRRISIKKALDAKIARYKAPFHQLRIQYGTSKGKNYTEEEDRFLICMLHKMGFDRENVYEELRQCVRNAPQFRFDWFIKSRTAMEFQRRCNTLISLIEKENMEIEERERAEKKKRATKTPMSQKRKAESATESSGKKDVKKVKS

SEQ ID NO: 9132 - protein, 298 aa, Homo sapiens
MACIENVLGGHAPSPLVVSVDKNGNQELHHDMPLQCLSSKPEDDAEPWGQPQVPLRPSVNVLTDLDSKQLEWPSERTGSCIPLHSLRAHRHPYGPPPAVAEESLATAEVNSSDALAGWRQEGQDAINVSWEVSGGPPALIVGGTKVNNGGTERGSNNARLHVALPQGKGFFPPRGPQVRGPSHIPTLRSGIVMEVPPGNTRIACRGKLAHVSFPLRGPCHPMHNWPRPIPLSSSTPGLPSCSTVHCFIPPRPPIFNPFLTMPLPFAPPPIFGPPLPSYFAHFHSGGMPAPASPNREHS

SEQ ID NO: 9133 - protein, 463 aa, Homo sapiens
MAQQQTGSRKRKAPAVEADAESSPSQGLAAADGEGPLLLKRQRRPATYRSMAHYLKVREVGGWGPARLQGFDGELRGYAVQRLPELLTERQLELGTVNKVFASQWLNSRQVVCGTKCNTLFVVDVESGHIARIPLLRDSEARLAQDQQGCGIHAIELNPSKTLLATGGENPNSLAIYQLPSLDPLCLGDRHGHKDWIFAVAWLSDTVAVSGSRDGTVALWRMDPDKFDDTVAWHSEVGLPVYAHIRPRDVEAIPRAIINPSNRKVRALACGGKNQELGAVSLDGYFHLWKAGSALSRLLSIRLPYFRDNVCLTYCDDMSVYAVGSHSHVSFLDLRQDQQNIRPLCSREGGTGVRSLSFYRHIITVGTGQGSLLFYDVRAQKFLEERASATLESSSGPARRKLRLACGRGWLNHNDFWVNYFGGMEVFPNALYTHCYNWPEMKLFVAGGPLPAGLHGNYAGLWS

SEQ ID NO: 9134 - protein, 460 aa, Homo sapiens
MFTIKLLLFIVPLVISSRIDQDNSSFDSLSPEPKSRFAMLDDVKILANGLLQLGHGLKDFVHKTKGQINDIFQKLNIFDQSFYDLSLQTSEIKEEEKELRRTTYKLQVKNEEVKNMSLELNSKLESLLEEKILLQQKVKYLEEQLTNLIQNQPETPEHPEVTSLKTFVEKQDNSIKDLLQTVEDQYKQLNQQHSQIKEIENQLRRTSIQEPTEISLSSKPRAPRTTPFLQLNEIRNVKHDGIPAECTTIYNRGEHTSGMYAIRPSNSQVFHVYCDVISGSPWTLIQHRIDGSQNFNETWENYKYGFGRLDGEFWLGLEKIYSIVKQSNYVLRIELEDWKDNKHYIEYSFYLGNHETNYTLHLVAITGNVPNAIPENKDLVFSTWDHKAKGHFNCPEGYSGGWWWHDECGENNLNGKYNKPRAKSKPERRRGLSWKSQNGRLYSIKSTKMLIHPTDSESFE

SEQ ID NO: 9135 - protein, 2725 aa, Homo sapiens
MEQTDCKPYQPLPKVKHEMDLAYTSSSDESEDGRKPRQSYNSRETLHEYNQELRMNYNSQSRKRKEVEKSTQEMEFCETSHTLCSGYQTDMHSVSRHGYQLEMGSDVDTETEGAASPDHALRMWIRGMKSEHSSCLSSRANSALSLTDTDHERKSDGENGFKFSPVCCDMEAQAGSTQDVQSSPHNQFTFRPLPPPPPPPHACTCARKPPPAADSLQRRSMTTRSQPSPAAPAPPTSTQDSVHLHNSWVLNSNIPLETRHFLFKHGSGSSAIFSAASQNYPLTSNTVYSPPPRPLPRSTFSRPAFTFNKPYRCCNWKCTALSATAITVTLALLLAYVIAVHLFGLTWQLQPVEGELYANGVSKGNRGTESMDTTYSPIGGKVSDKSEKKVFQKGRAIDTGEVDIGAQVMQTIPPGLFWRFQITIHHPIYLKFNISLAKDSLLGIYGRRNIPPTHTQFDFVKLMDGKQLVKQDSKGSDDTQHSPRNLILTSLQETGFIEYMDQGPWYLAFYNDGKKMEQVFVLTTAIEIMDDCSTNCNGNGECISGHCHCFPGFLGPDCARDSCPVLCGGNGEYEKGHCVCRHGWKGPECDVPEEQCIDPTCFGHGTCIMGVCICVPGYKGEICEEEDCLDPMCSNHGICVKGECHCSTGWGGVNCETPLPVCQEQCSGHGTFLLDAGVCSCDPKWTGSDCSTELCTMECGSHGVCSRGICQCEEGWVGPTCEERSCHSHCTEHGQCKDGKCECSPGWEGDHCTIAHYLDAVRDGCPGLCFGNGRCTLDQNGWHCVCQVGWSGTGCNVVMEMLCGDNLDNDGDGLTDCVDPDCCQQSNCYISPLCQGSPDPLDLIQQSQTLFSQHTSRLFYDRIKFLIGKDSTHVIPPEVSFDSRRACVIRGQVVAIDGTPLVGVNVSFLHHSDYGFTISRQDGSFDLVAIGGISVILIFDRSPFLPEKRTLWLPWNQFIVVEKVTMQRVVSDPPSCDISNFISPNPIVLPSPLTSFGGSCPERGTIVPELQVVQEEIPIPSSFVRLSYLSSRTPGYKTLLRILLTHSTIPVGMIKVHLTVAVEGRLTQKWFPAAINLVYTFAWNKTDIYGQKVWGLAEALVSVGYEYETCPDFILWEQRTVVLQGFEMDASNLGGWSLNKHHILNPQSGIIHKGNGENMFISQQPPVISTIMGNGHQRSVACTNCNGPAHNNKLFAPVALASGPDGSVYVGDFNFVRRIFPSGNSVSILELSTSPAHKYYLAMDPVSESLYLSDTNTRKVYKLKSLVETKDLSKNFEVVAGTGDQCLPFDQSHCGDGGRASEASLNSPRGITVDRHGFIYFVDGTMIRKIDENAVITTVIGSNGLTSTQPLSCDSGMDITQVRLEWPTDLAVNPMDNSLYVLDNNIVLQISENRRVRIIAGRPIHCQVPGIDHFLVSKVAIHSTLESARAISVSHSGLLFIAETDERKVNRIQQVTTNGEIYIIAGAPTDCDCKIDPNCDCFSGDGGYAKDAKMKAPSSLAVSPDGTLYVADLGNVRIRTISRNQAHLNDMNIYEIASPADQELYQFTVNGTHLHTLNLITRDYVYNFTYNSEGDLGAITSSNGNSVHIRRDAGGMPLWLVVPGGQVYWLTISSNGVLKRVSAQGYNLALMTYPGNTGLLATKSNENGWTTVYEYDPEGHLTNATFPTGEVSSFHSDLEKLTKVELDTSNRENVLMSTNLTATSTIYILKQENTQSTYRVNPDGSLRVTFASGMEIGLSSEPHILAGAVNPTLGKCNISLPGEHNANLIEWRQRKEQNKGNVSAFERRLRAHNRNLLSIDFDHITRTGKIYDDHRKFTLRILYDQTGRPILWSPVSRYNEVNITYSPSGLVTFIQRGTWNEKMEYDQSGKIISRTWADGKIWSYTYLEKSVMLLLHSQRRYIFEYDQPDCLLSVTMPSMVRHSLQTMLSVGYYRNIYTPPDSSTSFIQDYSRDGRLLQTLHLGTGRRVLYKYTKQARLSEVLYDTTQVTLTYEESSGVIKTIHLMHDGFICTIRYRQTGPLIGRQIFRFSEEGLVNARFDYSYNNFRVTSMQAVINETPLPIDLYRYVDVSGRTEQFGKFSVINYDLNQVITTTVMKHTKIFSANGQVIEVQYEILKAIAYWMTIQYDNVGRMVICDIRVGVDANITRYFYEYDADGQLQTVSVNDKTQWRYSYDLNGNINLLSHGKSARLTPLRYDLRDRITRLGEIQYKMDEDGFLRQRGNDIFEYNSNGLLQKAYNKASGWTVQYYYDGLGRRVASKSSLGQHLQFFYADLTNPIRVTHLYNHTSSEITSLYYDLQGHLIAMELSSGEEYYVACDNTGTPLAVFSSRGQVIKEILYTPYGDIYHDTYPDFQVIIGFHGGLYDFLTKLVHLGQRDYDVVAGRWTTPNHHIWKQLNLLPKPFNLYSFENNYPVGKIQDVAKYTTDIRSWLELFGFQLHNVLPGFPKPELENLELTYELLRLQTKTQEWDPGKTILGIQCELQKQLRNFISLDQLPMTPRYNDGRCLEGGKQPRFAAVPSVFGKGIKFAIKDGIVTADIIGVANEDSRRLAAILNNAHYLENLHFTIEGRDTHYFIKLGSLEEDLVLIGNTGGRRILENGVNVTVSQMTSVLNGRTRRFADIQLQHGALCFNIRYGTTVEEEKNHVLEIARQRAVAQAWTKEQRRLQEGEEGIRAWTEGEKQQLLSTGRVQGYDGYFVLSVEQYLELSDSANNIHFMRQSEIGRR

SEQ ID NO: 9136 - protein, 304 aa, Homo sapiens
MATRRLTDAFLLLRNNSIQNRQLLAEQLADDRMALVSGISLDPEAAIGVTKRPPPKWVDGVDEIQYDVGRIKQKMKELASLHDKHLNRPTLDDSSEEEHAIEITTQEITQLFHRCQRAVQALPSRARACSEQEGRLLGNVVASLAQALQELSTSFRHAQSGYLKRMKNREERSQHFFDTSVPLMDDGDDNTLYHRGFTEDQLVLVEQNTLMVEEREREIRQIVQSISDLNEIFRDLGAMIVEQGTVLDRIDYNVEQSCIKTEDGLKQLHKAEQYQKKNRKMLVILILFVIIIVLIVVLVGVKSR

SEQ ID NO: 9137 - protein, 325 aa, Homo sapiens
MATRRLTDAFLLLRNNSIQNRQLLAEQVSSHITSSPLHSRSIAAELDELADDRMALVSGISLDPEAAIGVTKRPPPKWVDGVDEIQYDVGRIKQKMKELASLHDKHLNRPTLDDSSEEEHAIEITTQEITQLFHRCQRAVQALPSRARACSEQEGRLLGNVVASLAQALQELSTSFRHAQSGYLKRMKNREERSQHFFDTSVPLMDDGDDNTLYHRGFTEDQLVLVEQNTLMVEEREREIRQIVQSISDLNEIFRDLGAMIVEQGTVLDRIDYNVEQSCIKTEDGLKQLHKAEQYQKKNRKMLVILILFVIIIVLIVVLVGVKSR

SEQ ID NO: 9138 - protein, 589 aa, Homo sapiens
MRPLPGALGVAAAAALWLLLLLLPRTRADEHEHTYQDKEEVVLWMNTVGPYHNRQETYKYFSLPFCVGSKKSISHYHETLGEALQGVELEFSGLDIKFKDDVMPATYCEIDLDKEKRDAFVYAIKNHYWYQMYIDDLPIWGIVGEADENGEDYYLWTYKKLEIGFNGNRIVDVNLTSEGKVKLVPNTKIQMSYSVKWKKSDVKFEDRFDKYLDPSFFQHRIHWFSIFNSFMMVIFLVGLVSMILMRTLRKDYARYSKEEEMDDMDRDLGDEYGWKQVHGDVFRPSSHPLIFSSLIGSGCQIFAVSLIVIIVAMIEDLYTERGSMLSTAIFVYAATSPVNGYFGGSLYARQGGRRWIKQMFIGAFLIPAMVCGTAFFINFIAIYYHASRAIPFGTMVAVCCICFFVILPLNLVGTILGRNLSGQPNFPCRVNAVPRPIPEKKWFMEPAVIVCLGGILPFGSIFIEMYFIFTSFWAYKIYYVYGFMMLVLVILCIVTVCVTIVCTYFLLNAEDYRWQWTSFLSAASTAIYVYMYSFYYYFFKTKMYGLFQTSFYFGYMAVFSTALGIMCGAIGYMGTSAFVRKIYTNVKID

SEQ ID NO: 9139 - protein, 1231 aa, Homo sapiens
MIAAPEIPTDFNLLQESETHFSSDTDFEDIEGKNQKQGKGKTCKKGKKGPAEKGKGGNGGGKPPSGPNRMNGHHQQNGVENMMLFEVVKMGKSAMQSVVDDWIESYKHDRDIALLDLINFFIQCSGCKGVVTAEMFRHMQNSEIIRKMTEEFDEDSGDYPLTMAGPQWKKFKSSFCEFIGVLVRQCQYSIIYDEYMMDTVISLLTGLSDSQVRAFRHTSTLAAMKLMTALVNVALNLSINMDNTQRQYEAERNKMIGKRANERLELLLQKRKELQENQDEIENMMNAIFKGVFVHRYRDAIAEIRAICIEEIGIWMKMYSDAFLNDSYLKYVGWTMHDKQGEVRLKCLTALQGLYYNKELNSKLELFTSRFKDRIVSMTLDKEYDVAVQAIKLLTLVLQSSEEVLTAEDCENVYHLVYSAHRPVAVAAGEFLYKKLFSRRDPEEDGMMKRRGRQGPNANLVKTLVFFFLESELHEHAAYLVDSMWDCATELLKDWECMNSLLLEEPLSGEEALTDRQESALIEIMLCTIRQAAECHPPVGRGTGKRVLTAKEKKTQLDDRTKITELFAVALPQLLAKYSVDAEKVTNLLQLPQYFDLEIYTTGRLEKHLDALLRQIRNIVEKHTDTDVLEACSKTYHALCNEEFTIFNRVDISRSQLIDELADKFNRLLEDFLQEGEEPDEDDAYQVLSTLKRITAFHNAHDLSKWDLFACNYKLLKTGIENGDMPEQIVIHALQCTHYVILWQLAKITESSSTKEDLLRLKKQMRVFCQICQHYLTNVNTTVKEQAFTILCDILMIFSHQIMSGGRDMLEPLVYTPDSSLQSELLSFILDHVFIEQDDDNNSADGQQEDEASKIEALHKRRNLLAAFCKLIVYTVVEMNTAADIFKQYMKYYNDYGDIIKETMSKTRQIDKIQCAKTLILSLQQLFNEMIQENGYNFDRSSSTFSGIKELARRFALTFGLDQLKTREAIAMLHKDGIEFAFKEPNPQGESHPPLNLAFLDILSEFSSKLLRQDKRTVYVYLEKFMTFQMSLRREDVWLPLMSYRNSLLAGGDDDTMSVISGISSRGSTVRSKKSKPSTGKRKVVEGMQLSLTEESSSSDSMWLSREQTLHTPVMMQTPQLTSTIMREPKRLRPEDSFMSVYPMQTEHHQTPLDYNRRGTSLMEDDEEPIVEDVMMSSEGRIEDLNEGMDFDTMDIDLPPSKNRRERTELKPDFFDPASIMDESVLGVSMF

SEQ ID NO: 9140 - protein, 995 aa, Homo sapiens
MEKTDAKDQSSQGDEEKDPPKSHPYSVETPYGFHLDLDFLKYVDDIEKGNTIKRIPIHRRAKQAKFSTLPRNFSLPDSGARPPAAPPLQNWSPVVPREASLGTQEQNQSPPLGNAPQASTSRSEVSYHRKALLAEATRQLEAAEPEDAELTFGSGRPQLLRASSMPATLLHSRASEEPGLSLGPPAPPALPPLQGEGSVCDGTFEPAEGLAGFHSSSPRASTRIPELVQEGAEPPEGVVKVPNHLPLPGPPFSFQNVLVVLEDKEDEHNAREAEVLFTPGSPTPSPPPLPSPIPENELLLEEIELNISEIPPPPPVEVDMRSIGIRVTEESLGLARVDPGSISSLKQQVSALEGELSGRTEELAQVRTALQQQEEEIKAREQRIRELEFTVAQLEGQFHQENAKDTQGQTDVMVNTDPVHGLLTRESCDKGIEVNLLGSMESESWGHRGEENGLLWGPDGHKQGNQSPAERVLLPQLSLPQGPEQVLTSSVHSFLSTELRIEEAGTEQEGGPQGGTRGAGGFLWGSDRKTPPAGREETSSNLPGKEHPGRPPSSPTDATIGQYVKKIQELLQEQWNCLEHGYPELASAIKQPASKLSSIQSQLLSSLNLLLSAYSAQAHPPKEPPASSSSPPVEISPSTSLKSIMKKKDYGFRAGGNGTKKNLQFVGVNGGYETTSSEETSGEDSTPEDLSDSEAEKKCDGPDHKHVKDAHLTCEAGQGIPEGTCHAAQESGPGEEVPHSKAERYKPSEEFLNACRALSQHLPETGTTTDQLLRQSLNTISQEWFRVSSRKSSSPAVVASYLHEVQPHSPHFLKLLVNLADHNGNTALHYSVSHSNFSIVKLLLETGVCNVDHQNKAGYTAVMITPLASAETNEDMAVVWKLLREGNVNIQATQGGQTALMLGVSHDREDMVQALLSCQADVNLQDHDGSSALMVACHHGNVDLVRLLLAHPACDSSLTDKAGRTALSIALKSPTHMEIAGLLRAHAEQGRSLGL

SEQ ID NO: 9141 - protein, 1801 aa, Homo sapiens
MPENPATDKLQVLQVLDRLKMKLQEKGDTSQNEKLSMFYETLKSPLFNQILTLQQSIKQLKGQLNHIPSDCSANFDFSRKGLLVFTDGSITNGNVHRPSNNSTVSGLFPWTPKLGNEDFNSVIQQMAQGRQIEYIDIERPSTGGLGFSVVALRSQNLGKVDIFVKDVQPGSVADRDQRLKENDQILAINHTPLDQNISHQQAIALLQQTTGSLRLIVAREPVHTKSSTSSSLNDTTLPETVCWGHVEEVELINDGSGLGFGIVGGKTSGVVVRTIVPGGLADRDGRLQTGDHILKIGGTNVQGMTSEQVAQVLRNCGNSVRMLVARDPAGDISVTPPAPAALPVALPTVASKGPGSDSSLFETYNVELVRKDGQSLGIRIVGYVGTSHTGEASGIYVKSIIPGSAAYHNGHIQVNDKIVAVDGVNIQGFANHDVVEVLRNAGQVVHLTLVRRKTSSSTSPLEPPSDRGTVVEPLKPPALFLTGAVETETNVDGEDEEIKERIDTLKNDNIQALEKLEKVPDSPENELKSRWENLLGPDYEVMVATLDTQIADDAELQKYSKLLPIHTLRLGVEVDSFDGHHYISSIVSGGPVDTLGLLQPEDELLEVNGMQLYGKSRREAVSFLKEVPPPFTLVCCRRLFDDEASVDEPRRTETSLPETEVDHNMDVNTEEDDDGELALWSPEVKIVELVKDCKGLGFSILDYQDPLDPTRSVIVIRSLVADGVAERSGGLLPGDRLVSVNEYCLDNTSLAEAVEILKAVPPGLVHLGICKPLVEDNEEESCYILHSSSNEDKTEFSGTIHDINSSLILEAPKGFRDEPYFKEELVDEPFLDLGKSFHSQQKEIEQSKEAWEMHEFLTPRLQEMDEEREILVDEEYELYQDPSPSMELYPLSHIQEATPVPSVNELHFGTQWLHDNEPSESQEARTGRTVYSQEAQPYGYCPENVMKENFVMESLPSVPSTEGNSQQGRFDDLENLNSLAKTSLDLGMIPNDVQGPSLLIDLPVVAQRREQEDLPLYQHQATRVISKASAYTGMLSSRYATDTCELPEREEGEGEETPNFSHWGPPRIVEIFREPNVSLGISIVGGQTVIKRLKNGEELKGIFIKQVLEDSPAGKTNALKTGDKILEVSGVDLQNASHSEAVEAIKNAGNPVVFIVQSLSSTPRVIPNVHNKANKITGNQNQDTQEKKEKRQGTAPPPMKLPPPYKALTDDSDENEEEDAFTDQKIRQRYADLPGELHIIELEKDKNGLGLSLAGNKDRSRMSIFVVGINPEGPAAADGRMRIGDELLEINNQILYGRSHQNASAIIKTAPSKVKLVFIRNEDAVNQMAVTPFPVPSSSPSSIEDQSGTEPISSEEDGSVEVGIKQLPESESFKLAVSQMKQQKYPTKVSFSSQEIPLAPASSYHSTDADFTGYGGFQAPLSVDPATCPIVPGQEMIIEISKGRSGLGLSIVGGKDTPLNAIVIHEVYEEGAAARDGRLWAGDQILEVNGVDLRNSSHEEAITALRQTPQKVRLVVYRDEAHYRDEENLEIFPVDLQKKAGRGLGLSIVGKRNGSGVFISDIVKGGAADLDGRLIQGDQILSVNGEDMRNASQETVATILKCAQGLVQLEIGRLRAGSWTSARTTSQNSQGSQQSAHSSCHPSFAPVITGLQNLVGTKRVSDPSQKNSGTDMEPRTVEINRELSDALGISIAGGRGSPLGDIPVFIAMIQASGVAARTQKLKVGDRIVSINGQPLDGLSHADVVNLLKNAYGRIILQVVADTNISAIAAQLENMSTGYHLGSPTAEHHPEDTEEQLQMTAD

SEQ ID NO: 9142 - protein, 276 aa, Homo sapiens
MKQILHPALETTACTNHFNADPCSTGFVFPAMTLFPVLLFLVAGLLPSFPANEDKDPAFTALLTTQTQVQREIVNKHNELRRAVSPPARNMLKMEWNKEAAANAQKWANQCNYRHSNPKDRMTSLKCGENLYMSSASSSWSQAIQSWFDEYNDFDFGVGPKTPNAVVGHYTQVVWYSSYLVGCGNAYCPNQKVLKYYYVCQYCPAGNWANRLYVPYEQGAPCASCPDNCDDGLCTNGCKYEDLYSNCKSLKLTLTCKHQLVRDSCKASCNCSNSIY

SEQ ID NO: 9143 - protein, 429 aa, Homo sapiens
MAQAPADPGREGHLEQRILQVLTEAGSPVKLAQLVKECQAPKRELNQVLYRMKKELKVSLTSPATWCLGGTDPEGEGPAELALSSPAERPQQHAATIPETPGPQFSQQREEDIYRFLKDNGPQRALVIAQALGMRTAKDVNRDLYRMKSRHLLDMDEQSKAWTIYRPEDSGRRAKSASIIYQHNPINMICQNGPNSWISIANSEAIQIGHGNIITRQTVSREDGSAGPRHLPSMAPGDSSTWGTLVDPWGPQDIHMEQSILRRVQLGHSNEMRLHGVPSEGPAHIPPGSPPVSATAAGPEASFEARIPSPGTHPEGEAAQRIHMKSCFLEDATIGNSNKMSISPGVAGPGGVAGSGEGEPGEDAGRRPADTQSRSHFPRDIGQPITPSHSKLTPKLETMTLGNRSHKAAEGSHYVDEASHEGSWWGGGI

SEQ ID NO: 9144 - protein, 409 aa, Homo sapiens
MRFTFPLMAIVLEIAMIVLFGLFVEYETDQTVLEQLNITKPTDMGIFFELYPLFQDVHVMIFVGFGFLMTFLKKYGFSSVGINLLVAALGLQWGTIVQGILQSQGQKFNIGIKNMINADFSAATVLISFGAVLGKTSPTQMLIMTILEIVFFAHNEYLVSEIFKASDIGASMTIHAFGAYFGLAVAGILYRSGLRKGHENEESAYYSDLFAMIGTLFLWMFWPSFNSAIAEPGDKQCRAIVNTYFSLAACVLTAFAFSSLVEHRGKLNMVHIQNATLAGGVAVGTCADMAIHPFGSMIIGSIAGMVSVLGYKFLTPLFTTKLRIHDTCGVHNLHGLPGVVGGLAGIVAVAMGASNTSMAMQAAALGSSIGTAVVGGLMTGLILKLPLWGQPSDQNCYDDSVYWKVPKTR

SEQ ID NO: 9145 - protein, 380 aa, Homo sapiens
MYSPLCLTQDEFHPFIEALLPHVRAFAYTWFNLQARKRKYFKKHEKRMSKEEERAVKDELLSEKPEVKQKWASRLLAKLRKDIRPEYREDFVLTVTGKKPPCCVLSNPDQKGKMRRIDCLRQADKVWRLDLVMVILFKGIPLESTDGERLVKSPQCSNPGLCVQPHHIGVSVKELDLYLAYFVHAAGMPSPTTLKKSEKSGFSSPSPSQTSSLGTAFTQHHRPVITGPRASPHATPSTLHFPTSPIIQQPGPYFSHPAIRYHPQETLKEFVQLVCPDAGQQAGQVGFLNPNGSSQGKVHNPFLPTPMLPPPPPPPMARPVPLPVPDTKPPTTSTEGGAASPTSPTYSTPSTSPANRFVSVGPRDPSFVNIPQQTQSWYLG

SEQ ID NO: 9146 - protein, 487 aa, Homo sapiens
MYSPLCLTQDEFHPFIEALLPHVRAFAYTWFNLQARKRKYFKKHEKRMSKEEERAVKDELLSEKPEVKQKWASRLLAKLRKDIRPEYREDFVLTVTGKKPPCCVLSNPDQKGKMRRIDCLRQADKVWRLDLVMVILFKGIPLESTDGERLVKSPQCSNPGLCVQPHHIGVSVKELDLYLAYFVHAAGHLGFQDSFVTSGVFSVTELVRVSQTPIAAGTGPNFSLSDLESSSYYSMSPGAMRRSLPSTSSTSSTKRLKSVEDEMDSPGEEPFYTGQGRSPGSGSQSSGWHEVEPGMPSPTTLKKSEKSGFSSPSPSQTSSLGTAFTQHHRPVITGPRASPHATPSTLHFPTSPIIQQPGPYFSHPAIRYHPQETLKEFVQLVCPDAGQQAGQVGFLNPNGSSQGKVHNPFLPTPMLPPPPPPPMARPVPLPVPDTKPPTTSTEGGAASPTSPTYSTPSTSPANRFVSVGPRDPSFVNIPQQTQSWYLG

SEQ ID NO: 9147 - protein, 498 aa, Homo sapiens
MYSPLCLTQDEFHPFIEALLPHVRAFAYTWFNLQARKRKYFKKHEKRMSKEEERAVKDELLSEKPEVKQKWASRLLAKLRKDIRPEYREDFVLTVTGKKPPCCVLSNPDQKGKMRRIDCLRQADKVWRLDLVMVILFKGIPLESTDGERLVKSPQCSNPGLCVQPHHIGVSVKELDLYLAYFVHAADSSQSESPSQPSDADIKDQPENGHLGFQDSFVTSGVFSVTELVRVSQTPIAAGTGPNFSLSDLESSSYYSMSPGAMRRSLPSTSSTSSTKRLKSVEDEMDSPGEEPFYTGQGRSPGSGSQSSGWHEVEPGMPSPTTLKKSEKSGFSSPSPSQTSSLGTAFTQHHRPVITGPRASPHATPSTLHFPTSPIIQQPGPYFSHPAIRYHPQETLKEFVQLVCPDAGQQAGQVGFLNPNGSSQGKVHNPFLPTPMLPPPPPPPMARPVPLPVPDTKPPTTSTEGGAASPTSPILVPGIKVAASHHPPDRPPDPFSTL

SEQ ID NO: 9148 - protein, 554 aa, Homo sapiens
MQMCRPASSSVLYVPTRWPGGCGATWQSCPSPPPRRTRIPQRPAVMYSPLCLTQDEFHPFIEALLPHVRAFAYTWFNLQARKRKYFKKHEKRMSKEEERAVKDELLSEKPEVKQKWASRLLAKLRKDIRPEYREDFVLTVTGKKPPCCVLSNPDQKGKMRRIDCLRQADKVWRLDLVMVILFKGIPLESTDGERLVKSPQCSNPGLCVQPHHIGVSVKELDLYLAYFVHAADSSQSESPSQPSDADIKDQPENGHLGFQDSFVTSGVFSVTELVRVSQTPIAAGTGPNFSLSDLESSSYYSMSPGAMRRSLPSTSSTSSTKRLKSVEDEMDSPGEEPFYTGQGRSPGSGSQSSGWHEVEPGMPSPTTLKKSEKSGFSSPSPSQTSSLGTAFTQHHRPVITGPRASPHATPSTLHFPTSPIIQQPGPYFSHPAIRYHPQETLKEFVQLVCPDAGQQAGQVGFLNPNGSSQGKVHNPFLPTPMLPPPPPPPMARPVPLPVPDTKPPTTSTEGGAASPTSPTYSTPSTSPANRFVSVGPRDPSFVNIPQQTQSWYLG

SEQ ID NO: 9149 - protein, 532 aa, Homo sapiens
MKLADSVMAGKASDGSIKWQLCYDISARTWWMDEFHPFIEALLPHVRAFAYTWFNLQARKRKYFKKHEKRMSKEEERAVKDELLSEKPEVKQKWASRLLAKLRKDIRPEYREDFVLTVTGKKPPCCVLSNPDQKGKMRRIDCLRQADKVWRLDLVMVILFKGIPLESTDGERLVKSPQCSNPGLCVQPHHIGVSVKELDLYLAYFVHAADSSQSESPSQPSDADIKDQPENGHLGFQDSFVTSGVFSVTELVRVSQTPIAAGTGPNFSLSDLESSSYYSMSPGAMRRSLPSTSSTSSTKRLKSVEDEMDSPGEEPFYTGQGRSPGSGSQSSGWHEVEPGMPSPTTLKKSEKSGFSSPSPSQTSSLGTAFTQHHRPVITGPRASPHATPSTLHFPTSPIIQQPGPYFSHPAIRYHPQETLKEFVQLVCPDAGQQAGQVGFLNPNGSSQGKVHNPFLPTPMLPPPPPPPMARPVPLPVPDTKPPTTSTEGGAASPTSPTYSTPSTSPANRFVSVGPRDPSFVNIPQQTQSWYLG

SEQ ID NO: 9150 - protein, 546 aa, Homo sapiens
MSSAWKTPRGSDAMPEIMVKIIGSKHFQYLVEKPKIKENDSLKTETQTMHQKPMTDNARQMSRDTPVPINFTDQQTTDNPDDVKEKKHPENNQKSENNQKLLTGANSSRFLDGNIPSQANVHCSSVPTGDQSLSYVHGIPRRKLRDWSLEQMVRGSSDQPEDIGQSPSGTTNEDAFLLALVRRELKSRPLSSNLLEKLQKELKILDPISSGFLLQSQLSRLFLKHEVPLQLPTVKILCQRFSKRGSPEMVNYEKLLWFLNSAASDYPQQNKAAADLRKTESHGTHSQSTPPQHSSSQPEVNRSLLEILKMALRTTNGRLNIDNLNLSFRKEDRSFSGCLPLPKVRAICGKHGLYLTLSLLETLLNHQDLGYQNEIKWQNFVEMLTRASSDLLSDLPTGKNEKKAPAPPMEPEVPEMSQSKTEHMKTPEEELQPESSPAETSACKDPLKPLKIRPVSQPFVNPAVKNKAEECETWIDRFRKLENALYLCDLSNTGVLEKERARRLIHNYNLIYNLSLSPQKIDQALRRFRSGENMLLEPALRYLKEL

SEQ ID NO: 9151 - protein, 728 aa, Homo sapiens
MEETQPPPQPKLPLCDSLMIWLQTFNTASPCQDVKQLTSGVAMAQVLHQIDAAWFNESWLSRIKEDVGDNWRIKASNVKKVLQGIMSYYHEFLGQQISEALIPDLNQITECSDPVELGRLLQLILGCAINCEKKQEHIQNIMTLEESVQHVVMTAIQELMSKEILSSPPNDAVGELEQQLKRALEELQEALAEKEELRQRCEELDMQVTTLQDEKNSLVSENEMMNEKLDQLDGSFDDPNTVVAKKYFHAQLQLEQLQEENFRLEAAKDDYRVHCEELEKQLIEFQHRNDELTSLAEETRALKDEIDVLRATSDKANKLESTVEIYRQKLQDLNDLRKQVKTLQETNMMYMHNTVSLEEELKKANAARTQLETYKRQVQDLHVKLSSESKRADTLAFEMKRLEEKHEALLKEKERLIEQRDTLKETNEELRCSQVQQDHLNQTDASATKSYENLAAEIMPVEYREVFIRLQHENKMLRLQQEGSENERIEELQEQLEQKHRKMNELETEQRLSKERIRELQQQIEDLQKSLQEQGSKSEGESSSKLKQKLEAHMEKLTEVHEELQKKQELIEDLQPDINQNVQKINELEAALQKKDEDMKAMEERYKMYLEKARNVIKTLDPKLNPASAEIMLLRKQLAEKERRIEILESECKVAKFRDYEEKLIVSAWYNKSLAFQKLGMESRLVSGGGACSDTGACTPARSFLAQQRHITNTRRNLSVKVPATTSD

SEQ ID NO: 9152 - protein, 354 aa, Homo sapiens
MALNHTALPQDERLPHYLRDGDPFASKLSWEADLVAGFYLTIIGILSTFGNGYVLYMSSRRKKKLRPAEIMTINLAVCDLGISVVGKPFTIISCFCHRWVFGWIGCRWYGWAGFFFGCGSLITMTAVSLDRYLKICYLSYGVWLKRKHAYICLAAIWAYASFWTTMPLVGLGDYVPEPFGTSCTLDWWLAQASVGGQVFILNILFFCLLLPTAVIVFSYVKIIAKVKSSSKEVAHFDSRIHSSHVLEMKLTKVAMLICAGFLIAWIPYAVVSVWSAFGRPDSIPIQLSVVPTLLAKSAAMYNPIIYQVIDYKFACCQTGGLKATKKKSLEGFRLHTVTTVRKSSAVLEIHEEWE

SEQ ID NO: 9153 - protein, 607 aa, Homo sapiens
MRTPQLALLQVFFLVFPDGVRPQPSSSPSGAVPTSLELQRGTDGGTLQSPSEATATRPAVPGLPTVVPTLVTPSAPGNRTVDLFPVLPICVCDLTPGACDINCCCDRDCYLLHPRTVFSFCLPGSVRSSSWVCVDNSVIFRSNSPFPSRVFMDSNGIRQFCVHVNNSNLNYFQKLQKVNATNFQALAAEFGGESFTSTFQTQSPPSFYRAGDPILTYFPKWSVISLLRQPAGVGAGGLCAESNPAGFLESKSTTCTRFFKNLASSCTLDSALNAASYYNFTVLKVPRSMTDPQNMEFQVPVILTSQANAPLLAGNTCQNVVSQVTYEIETNGTFGIQKVSVSLGQTNLTVEPGASLQQHFILRFRAFQQSTAASLTSPRSGNPGYIVGKPLLALTDDISYSMTLLQSQGNGSCSVKRHEVQFGVNAISGCKLRLKKADCSHLQQEIYQTLHGRPRPEYVAIFGNADPAQKGGWTRILNRHCSISAINCTSCCLIPVSLEIQVLWAYVGLLSNPQAHVSGVRFLYQCQSIQDSQQVTEVSLTTLVNFVDITQKPQPPRGQPKMDWKWPFDFFPFKVAFSRGVFSQKCSVSPILILCLLLLGVLNLETM

SEQ ID NO: 9154 - protein, 575 aa, Homo sapiens
MSGGEQKPERYYVGVDVGTGSVRAALVDQSGVLLAFADQPIKNWEPQFNHHEQSSEDIWAACCVVTKKVVQGIDLNQIRGLGFDATCSLVVLDKQFHPLPVNQEGDSHRNVIMWLDHRAVSQVNRINETKHSVLQYVGGVMSVEMQAPKLLWLKENLREICWDKAGHFFDLPDFLSWKATGVTARSLCSLVCKWTYSAEKGWDDSFWKMIGLEDFVADNYSKIGNQVLPPGASLGNGLTPEAARDLGLLPGIAVAASLIDAHAGGLGVIGADVRGHGLICEGQPVTSRLAVICGTSSCHMGISKDPIFVPGVWGPYFSAMVPGFWLNEGGQSVTGKLIDHMVQGHAAFPELQVKATARCQSIYAYLNSHLDLIKKAQPVGFLTVDLHVWPDFHGNRSPLADLTLKGMRTTGYLYIPALAALHSPSSLLSPQVTGLKLSQDLDDLAILYLATVQAIALGTRFIIEAMEAAGHSISTLFLCGGLSKNPLFVQMHADITGMPVVLSQEVESVLVGAAVLGACASGDFASVQEAMAKMSKVGKVVFPRLQDKKYYDKKYQVFLKLVEHQKEYLAIMNDD

SEQ ID NO: 9155 - protein, 752 aa, Homo sapiens
MYTGPCKVLHLSSGLLPNSGRFGIVLSDEYQVVTSLWCQLYTTHAPQQASGMLLLNYLVIPSKAQVNKPGYIPNLGECSHYRSKIHLKAGDKLQSPEGKPKTGRIQEKCEGPCISSSNCSQPCAKDFHGEIGFTCNQKKWQKSAETCTSLSVEKLFKDSTGASRLSVAAPSIPLHILDFRAPETIESVAQGIRKNCPFDYACITDMVKSSETTSGNIAFIVELLKNISTDLSDNVTREKMKSYSEVANHILDTAAISNWAFIPNKNASSDLLQSVNLFARQLHIHNNSENIVNELFIQTKGFHINHNTSEKSLNFSMSMNNTTEDILGMVQIPRQELRKLWPNASQAISIAFPTLGAILREAHLQNVSLPRQVNGLVLSVVLPERLQEIILTFEKINKTRNARAQCVGWHSKKRRWDEKACQMMLDIRNEVKCRCNYTSVVMSFSILMSSKSMTDKVLDYITCIGLSVSILSLVLCLIIEATVWSRVVVTEISYMRHVCIVNIAVSLLTANVWFIIGSHFNIKAQDYNMCVAVTFFSHFFYLSLFFWMLFKALLIIYGILVIFRRMMKSRMMVIGFAIGYGCPLIIAVTTVAITEPEKGYMRPEACWLNWDNTKALLAFAIPAFVIVAVNLIVVLVVAVNTQRPSIGSSKSQDVVIIMRISKNVAILTPLLGLTWGFGIATLIEGTSLTFHIIFALLNAFQGFFILLFGTIMDHKIRDALRMRMSSLKGKSRAAENASLGPTNGSKLMNRQG

SEQ ID NO: 9156 - protein, 793 aa, Homo sapiens
MLSQVYRCGFQPFNQHLLPWVKCTTVFRSHCIQPSVIRHVRSWSNIPFITVPLSRTHGKSFAHRSELKHAKRIVVKLGSAVVTRGDECGLALGRLASIVEQVSVLQNQGREMMLVTSGAVAFGKQRLRHEILLSQSVRQALHSGQNQLKEMAIPVLEARACAAAGQSGLMALYEAMFTQYSICAAQILVTNLDFHDEQKRRNLNGTLHELLRMNIVPIVNTNDAVVPPAEPNSDLQGVISVKDNDSLAARLAVEMKTDLLIVLSDVEGLFDSPPGSDDAKLIDIFYPGDQQSVTFGTKSRVGMGGMEAKVKAALWALQGGTSVVIANGTHPKVSGHVITDIVEGKKVGTFFSEVKPAGPTVEQQGEMARSGGRMLATLEPEQRAEIIHHLADLLTDQRDEILLANKKDLEEAEGRLAAPLLKRLSLSTSKLNSLAIGLRQIAASSQDSVGRVLRRTRIAKNLELEQVTVPIGVLLVIFESRPDCLPQVAALAIASGNGLLLKGGKEAAHSNRILHLLTQEALSIHGVKEAVQLVNTREEVEDLCRLDKMIDLIIPRGSSQLVRDIQKAAKGIPVMGHSEGICHMYVDSEASVDKVTRLVRDSKCEYPAACNALETLLIHRDLLRTPLFDQIIDMLRVEQVKIHAGPKFASYLTFSPSEVKSLRTEYGDLELCIEVVDNVQDAIDHIHKYGSSHTDVIVTEDENTAEFFLQHVDSACVFWNASTRFSDGYRFGLGAEVGISTSRIHARGPVGLEGLLTTKWLLRGKDHVVSDFSEHGSLKYLHENLPIPQRNTN

SEQ ID NO: 9157 - protein, 795 aa, Homo sapiens [sequence omitted]

SEQ ID NO: 9158 - protein, 323 aa, Homo sapiens
MARGPGLAPPPLRLPLLLLVLAAVTGHTAAQDNCTCPTNKMTVCSPDGPGGRCQCRALGSGMAVDCSTLTSKCLLLKARMSAPKNARTLVRPSEHALVDNDGLYDPDCDPEGRFKARQCNQTSVCWCVNSVGVRRTDKGDLSLRCDELVRTHHILIDLRHRPTAGAFNHSDLDAELRRLFRERYRLHPKFVAAVHYEQPTIQIELRQNTSQKAAGDVDIGDAAYYFERDIKGESLFQGRGGLDLRVRGEPLQVERTLIYYLDEIPPKFSMKRLTAGLIAVIVVVVVALVAGMAVLVITNRRKSGKYKKVEIKELGELRKEPSL

SEQ ID NO: 9159 - protein, 524 aa, Homo sapiens
MSFICGLQSAARNHVFFRFNSLSNWRKCNTLASTSRGCHQVQVNHIVNKYQGLGVNQCDRWSFLPGNFHFYSTFNNKRTGGLSSTKSKEIWRITSKCTVWNDAFSRQLLIKEVTAVPSLSVLHPLSPASIRAIRNFHTSPRFQAAPVPLLLMILKPVQKLFAIIVGRGIRKWWQALPPNKKEVVKENIRKNKWKLFLGLSSFGLLFVVFYFTHLEVSPITGRSKLLLLGKEQFRLLSELEYEAWMEEFKNDMLTEKDARYLAVKEVLCHLIECNKDVPGISQINWVIHVVDSPIINAFVLPNGQMFVFTGFLNSVTDIHQLSFLLGHEIAHAVLGHAAEKAGMVHLLDFLGMIFLTMIWAICPRDSLALLCQWIQSKLQEYMFNRPYSRKLEAEADKIGLLLAAKACADIRASSVFWQQMEFVDSLHGQPKMPEWLSTHPSHGNRVEYLDRLIPQALKIREMCNCPPLSNPDPRLLFKLSTKHFLEESEKEDLNITKKQKMDTLPIQKQEQIPLTYIVEKRTGS

SEQ ID NO: 9160 - protein, 1266 aa, Homo sapiens
MSSECDGGSKAVMNGLAPGSNGQDKATADPLRARSISAVKIIPVKTVKNASGLVLPTDMDLTKICTGKGAVTLRASSSYRETPSSSPASPQETRQHESKPGLEPEPSSADEWRLSSSADANGNAQPSSLAAKGYRSVHPNLPSDKSQDATSSSAAQPEVIVVPLYLVNTDRGQEGTARPPTPLGPLGCVPTIPATASAASPLTFPTLDDFIPPHLQRWPHHSQPARASGSFAPISQTPPSFSPPPPLVPPAPEDLRRVSEPDLTGAVSSTDSSPLLNEVSSSLIGTDSQAFPSVSKPSSAYPSTTIVNPTIVLLQHNREQQKRLSSLSDPVSERRVGEQDSAPTQEKPTSPGKAIEKRAKDDSRRVVKSTQDLSDVSMDEVGIPLRNTERSKDWYKTMFKQIHKLNRDDDSDLYSPRYSFSEDTKSPLSVPRSKSEMSYIDGEKVVKRSATLPLPARSSSLKSSSERNDWEPPDKKVDTRKYRAEPKSIYEYQPGKSSVLTNEKMSRDISPEEIDLKNEPWYKFFSELEFGKPPPKKIWDYTPGDCSILPREDRKTNLDKDLSLCQTELEADLEKMETLNKAPSANVPQSSAISPTPEISSETPGYIYSSNFHAVKRESDGAPGDLTSLENERQIYKSVLEGGDIPLQGLSGLKRPSSSASTKDSESPRHFIPADYLESTEEFIRRRHDDKEKLLADQRRLKREQEEADIAARRHTGVIPTHHQFITNERFGDLLNIDDTAKRKSGSEMRPARAKFDFKAQTLKELPLQKGDIVYIYKQIDQNWYEGEHHGRVGIFPRTYIELLPPAEKAQPKKLTPVQVLEYGEAIAKFNFNGDTQVEMSFRKGERITLLRQVDENWYEGRIPGTSRQGIFPITYVDVIKRPLVKNPVDYMDLPFSSSPSRSATASPQFSSHSKLITPAPSSLPHSRRALSPEMHAVTSEWISLTVGVPGRRSLALTPPLPPLPEASIYNTDHLALSPRASPSLSLSLPHLSWSDRPTPRSVASPLALPSPHKTYSLAPTSQASLHMNGDGGVHTPSSGIHQDSFLQLPLGSSDSVISQLSDAFSSQSKRQPWREESGQYERKAERGAGERGPGGPKISKKSCLKPSDVVRCLSTEQRLSDLNTPEESRPGKPLGSAFPGSEAEQTERHRGGEQAGRKAARRGGSQLSHHSLRAGPDLTESEKSYVQPQAQQRRVTPDRSQTSQDLFSYQALYSYIPQNDDELELRDGDIVDVMEKCDDGWFVGTSRRTKQFGTFPGNYVKPLYL

SEQ ID NO: 9161 - protein, 213 aa, Homo sapiens
MSTETELQVAVKTSAKKDSRKKGQDRSEATLIKRFKGEGVRYKAKLIGIDEVSAARGDKLCQDSMMKLKGVVAGARSKGEHKQKIFLTISFGGIKIFDEKTGALQHHHAVHEISYIAKDITDHRAFGYVCGKEGNHRFVAIKTAQAAEPVILDLRDLFQLIYELKQREELEKKAQKDKQCEQAVYQTILEEDVEDPVYQVISETSRGFRFKSD

SEQ ID NO: 9162 - protein, 588 aa, Homo sapiens
MSTETELQVAVKTSAKKDSRKKGQDRSEATLIKRFKGEGVRYKAKLIGIDEVSAARGDKLCQDSMMKLKGVVAGARSKGEHKQKIFLTISFGGIKIFDEKTGALQHHHAVHEISYIAKDITDHRAFGYVCGKEGNHRFVAIKTAQAAEPVILDLRDLFQLIYELKQREELEKKAQKDKQCEQAVYQTILEEDVEDPVYQYIVFEAGHEPIRDPETEENIYQVPTSQKKEGVYDVPKSQPVSNGYSFEDFEERFAAATPNRNLPTDFDEIFEATKAVTQLELFGDMSTPPDITSPPTPATPGDAFIPSSSQTLPASADVFSSVPFGTAAVPSGYVAMGAVLPSFWGQQPLVQQQMVMGAQPPVAQVMPGAQPIAWGQPGLFPATQQPWPTVAGQFPPAAFMPTQTVMPLPAAMFQGPLTPLATVPGTSDSTRSSPQTDKPRQKMGKETFKDFQMAQPPPVPSRKPDQPSLTCTSEAFSSYFNKVGVAQDTDDCDDFDISQLNLTPVTSTTPSTNSPPTPAPRQSSPSKSSASHASDPTTDDIFEEGFESPSKSEEQEAPDGSQASSNSDPFGEPSGEPSGDNISPQAGS

SEQ ID NO: 9163 - protein, 239 aa, Homo sapiens
MSTETELQVAVKTSAKKDSRKKGQDRSEATLIKRFKGEGVRYKAKLIGIDEVSAARGDKLCQDSMMKLKGVVAGARSKGEHKQKIFLTISFGGIKIFDEKTGVPTSQKKEGVYDVPKSQPVSNGYSFEDFEERFAAATPNRNLPTDFDEIFEATKAVTQLELFGDMSTPPDITSPPTPATPGDAFIPSSSQTLPASADVFSSVPFGTAAVPSGYVAMGAVLPSFWGQQPLVQQQMVMGA

SEQ ID NO: 9164 - protein, 555 aa, Homo sapiens
MSTETELQVAVKTSAKKDSRKKGQDRSEATLIKRFKGEGVRYKAKLIGIDEVSAARGDKLCQDSMMKLKGVVAGARSKGEHKQKIFLTISFGGIKIFDEKTGALQHHHAVHEISYIAKDITDHRAFGYVCGKEGNHRFVAIKTAQAAEPVILDLRDLFQLIYELKQREELEKKAQKDKQCEQAVYQTILEEDVEDPVYQYIVFEAGHEPIRDPETEENIYQVPTSQKKEGVYDVPKSQPVSAVTQLELFGDMSTPPDITSPPTPATPGDAFIPSSSQTLPASADVFSSVPFGTAAVPSGYVAMGAVLPSFWGQQPLVQQQMVMGAQPPVAQVMPGAQPIAWGQPGLFPATQQPWPTVAGQFPPAAFMPTQTVMPLPAAMFQGPLTPLATVPGTSDSTRSSPQTDKPRQKMGKETFKDFQMAQPPPVPSRKPDQPSLTCTSEAFSSYFNKVGVAQDTDDCDDFDISQLNLTPVTSTTPSTNSPPTPAPRQSSPSKSSASHASDPTTDDIFEEGFESPSKSEEQEAPDGSQASSNSDPFGEPSGEPSGDNISPQAGS

SEQ ID NO: 9165 - protein, 591 aa, Homo sapiens
MKNSRTWAWRAPVELFLLCAALGCLSLPGSRGERPHSFGSNAVNKSFAKSRQMRSVDVTLMPIDCELSSWSSWTTCDPCQKKRYRYAYLLQPSQFHGEPCNFSDKEVEDCVTNRPCGSQVRCEGFVCAQTGRCVNRRLLCNGDNDCGDQSDEANCRRIYKKCQHEMDQYWGIGSLASGINLFTNSFEGPVLDHRYYAGGCSPHYILNTRFRKPYNVESYTPQTQGKYEFILKEYESYSDFERNVTEKMASKSGFSFGFKIPGIFELGISSQSDRGKHYIRRTKRFSHTKSVFLHARSDLEVAHYKLKPRSLMLHYEFLQRVKRLPLEYSYGEYRDLFRDFGTHYITEAVLGGIYEYTLVMNKEAMERGDYTLNNVHACAKNDFKIGGAIEEVYVSLGVSVGKCRGILNEIKDRNKRDTMVEDLVVLVRGGASEHITTLAYQELPTADLMQEWGDAVQYNPAIIKVKVEPLYELVTATDFAYSSTVRQNMKQALEEFQKEVSSCHCAPCQGNGVPVLKGSRCDCICPVGSQGLACEVSYRKNTPIDGKWNCWSNWSSCSGRRKTRQRQCNNPPPQNGGSPCSGPASETLDCS

SEQ ID NO: 9166 - protein, 811 aa, Homo sapiens
MSSECDGGSKAVMNGLAPGSNGQDKDMDLTKICTGKGAVTLRASSSYRETPSSSPASPQETRQHESKPGLEPEPSSADEWRLSSSADANGNAQPSSLAAKGYRSVHPNLPSDKSQDSSPLLNEVSSSLIGTDSQAFPSVSKPSSAYPSTTIVNPTIVLLQHNREQQKRLSSLSDPVSERRVGEQDSAPTQEKPTSPGKAIEKRAKDDSRRVVKSTQDLSDVSMDEVGIPLRNTERSKDWYKTMFKQIHKLNRDDDSDLYSPRYSFSEDTKSPLSVPRSKSEMSYIDGEKVVKRSATLPLPARSSSLKSSSERNDWEPPDKKVDTRKYRAEPKSIYEYQPGKSSVLTNEKMSRDISPEEIDLKNEPWYKFFSELEFGKPTNLDKDLSLCQTELEADLEKMETLNKAPSANVPQSSAISPTPEISSETPGYIYSSNFHAVKRESDGAPGDLTSLENERQIYKSVLEGGDIPLQGLSGLKRPSSSASTKDSESPRHFIPADYLESTEEFIRRRHDDKEKLLADQRRLKREQEEADIAARRHTGVIPTHHQFITNERFGDLLNIDDTAKRKSGSEMRPARAKFDFKAQTLKELPLQKGDIVYIYKQIDQNWYEGEHHGRVGIFPRTYIELLPPAEKAQPKKLTPVQVLEYGEAIAKFNFNGDTQVEMSFRKGERITLLRQVDENWYEGRIPGTSRQGIFPITYVDVIKRPLVKNPVDYMDLPFSSSPSRSATASPQQPQAQQRRVTPDRSQTSQDLFSYQALYSYIPQNDDELELRDGDIVDVMEKCDDGWFVGTSRRTKQFGTFPGNYVKPLYL

SEQ ID NO: 9167 - protein, 218 aa, Homo sapiens
MKVGVLWLISFFTFTDGHGGFLGKNDGIKTKKELIVNKKKHLGPVEEYQLLLQVTYRDSKEKRDLRNFLKLLKPPLLWSHGLIRIIRAKATTDCNSLNGVLQCTCEDSYTWFPPSCLDPQNCYLHTAGALPSCECHLNNLSQSVNFCERTKIWGTFKINERFTNDLLNSSSAIYSKYANGIEIQLKKAYERIQGFESVQVTQFRMSLLSPKLECNGTI

SEQ ID NO: 9168 - protein, 552 aa, Homo sapiens
MAEKQKHDGRVKIGHYVLGDTLGVGTFGKVKIGEHQLTGHKVAVKILNRQKIRSLDVVGKIKREIQNLKLFRHPHIIKLYQVISTPTDFFMVMEYVSGGELFDYICKHGRVEEMEARRLFQQILSAVDYCHRHMVVHRDLKPENVLLDAHMNAKIADFGLSNMMSDGEFLRTSCGSPNYAAPEVISGRLYAGPEVDIWSCGVILYALLCGTLPFDDEHVPTLFKKIRGGVFYIPEYLNRSVATLLMHMLQVDPLKRATIKDIREHEWFKQDLPSYLFPEDPSYDANVIDDEAVKEVCEKFECTESEVMNSLYSGDPQDQLAVAYHLIIDNRRIMNQASEFYLASSPPSGSFMDDSAMHIPPGLKPHPERMPPLIADSPKARCPLDALNTTKPKSLAVKKAKWHLGIRSQSKPYDIMAEVYRAMKQLDFEWKVVNAYHLRVRRKNPVTGNYVKMSLQLYLVDNRSYLLDFKSIDDEVVEQRSGSSTPQRSCSAAGLHRPRSSFDSTTAESHSLSGSLTGSLTGSTLSSVSPRLGSHTMDFFEMCASLITTLAR

SEQ ID NO: 9169 - protein, 905 aa, Homo sapiens
MSSECDGGSKAVMNGLAPGSNGQDKATADPLRARSISAVKIIPVKTVKNASGLVLPTDMDLTKICTGKGAVTLRASSSYRETPSSSPASPQETRQHESKPGLEPEPSSADEWRLSSSADANGNAQPSSLAAKGYRSVHPNLPSDKSQRWPHHSQPARASGSFAPISQTPPSFSPPPPLVPPAPEDLRRVSEPDLTGAVSSTDSSPLLNEVSSSLIGTDSQAFPSVSKPSSAYPSTTIVNPTIVLLQHNREQQKRLSSLSDPVSERRVGEQDSAPTQEKPTSPGKAIEKRAKDDSRRVVKSTQDLSDVSMDEVGIPLRNTERSKDWYKTMFKQIHKLNRDDDSDLYSPRYSFSEDTKSPLSVPRSKSEMSYIDGEKVVKRSATLPLPARSSSLKSSSERNDWEPPDKKVDTRKYRAEPKSIYEYQPGKSSVLTNEKMSRDISPEEIDLKNEPWYKFFSELEFGKPPPKKIWDYTPGDCSILPREDRKSSAISPTPEISSETPGYIYSSNFHAVKRESDGAPGDLTSLENERQIYKSVLEGGDIPLQGLSGLKRPSSSASTKDSESPRHFIPADYLESTEEFIRRRHDDKEKLLADQRRLKREQEEADIAARRHTGVIPTHHQFITNERFGDLLNIDDTAKRKSGSEMRPARAKFDFKAQTLKELPLQKGDIVYIYKQIDQNWYEGEHHGRVGIFPRTYIELLPPAEKAQPKKLTPVQVLEYGEAIAKFNFNGDTQVEMSFRKGERITLLRQVDENWYEGRIPGTSRQGIFPITYVDVIKRPLVKNPVDYMDLPFSSSPSRSATASPQLSHHSLRAGPDLTESEKSYVQPQAQQRRVTPDRSQTSQDLFSYQALYSYIPQNDDELELRDGDIVDVMEKCDDGWFVGTSRRTKQFGTFPGNYVKPLYL

SEQ ID NO: 9170 - protein, 910 aa, Homo sapiens
MKVGVLWLISFFTFTDGHGGFLGKNDGIKTKKELIVNKKKHLGPVEEYQLLLQVTYRDSKEKRDLRNFLKLLKPPLLWSHGLIRIIRAKATTDCNSLNGVLQCTCEDSYTWFPPSCLDPQNCYLHTAGALPSCECHLNNLSQSVNFCERTKIWGTFKINERFTNDLLNSSSAIYSKYANGIEIQLKKAYERIQGFESVQVTQFRNGSIVAGYEVVGSSSASELLSAIEHVAEKAKTALHKLFPLEDGSFRVFGKAQCNDIVFGFGSKDDEYTLPCSSGYRGNITAKCESSGWQVIRETCVLSLLEELNKNFSMIVGNATEAAVSSFVQNLSVIIRQNPSTTVGNLASVVSILSNISSLSLASHFRVSNSTMEDVISIADNILNSASVTNWTVLLREEKYASSRLLETLENISTLVPPTALPLNFSRKFIDWKGIPVNKSQLKRGYSYQIKMCPQNTSIPIRGRVLIGSDQFQRSLPETIISMASLTLGNILPVSKNGNAQVNGPVISTVIQNYSINEVFLFFSKIESNLSQPHCVFWDFSHLQWNDAGCHLVNETQDIVTCQCTHLTSFSILMSPFVPSTIFPVVKWITYVGLGISIGSLILCLIIEALFWKQIKKSQTSHTRRICMVNIALSLLIADVWFIVGATVDTTVNPSGVCTAAVFFTHFFYLSLFFWMLMLGILLAYRIILVFHHMAQHLMMAVGFCLGYGCPLIISVITIAVTQPSNTYKRKDVCWLNWSNGSKPLLAFVVPALAIVAVNFVVVLLVLTKLWRPTVGERLSRDDKATIIRVGKSLLILTPLLGLTWGFGIGTIVDSQNLAWHVIFALLNAFQGFFILCFGILLDSKLRQLLFNKLSALSSWKQTEKQNSSDLSAKPKFSKPFNPLQNKGHYAFSHTGDSSDNIMLTQFVSNE

SEQ ID NO: 9171 - protein, 396 aa, Homo sapiens
MAFAPMGPEASFFDVLDRHRESLLAALRRGGREPPTGGSRLASSSEVLASIENIIQDIITSLARNEAPAFTIDNRSSWENIKFEDSVGLQMVSHCTTRKIKSDSPKSAQKFSLILKILSMIYKLVQSNTYATKRDIYYTDSQLFGNQTVVDNIINDISCMLKVSRRSLHILSTSKGLIAGNLRYIEEDGTKVNCTCGATAVAVPSNIQGIRNLVTDAKFVLIVEKDATFQRLLDDNFCNKLSPCIMITGKGVPDLNTRLLVKKLWDTFHVPVFTLVDADPHGIEIMCIYKYGSMSMSFEAHHLTVPAIRWLGLLPSDLKRLNVPKDSLIPLTKRDQMKLDSILRRPYVTCQPFWRKEMEIMADSKMKAEIQALTFLSSDYLSRVYLPNKLKFGGWI

SEQ ID NO: 9172 - protein, 490 aa, Homo sapiens
MEPFVVLVLCLSFMLLFSLWRQSCRRRKLPPGPTPLPIIGNMLQIDVKDICKSFTNFSKVYGPVFTVYFGMNPIVVFHGYEAVKEALIDNGEEFSGRGNSPISQRITKGLGIISSNGKRWKEIRRFSLTTLRNFGMGKRSIEDRVQEEAHCLVEELRKTKASPCDPTFILGCAPCNVICSVVFQKRFDYKDQNFLTLMKRFNENFRILNSPWIQVCNNFPLLIDCFPGTHNKVLKNVALTRSYIREKVKEHQASLDVNNPRDFIDCFLIKMEQEKDNQKSEFNIENLVGTVADLFVAGTETTSTTLRYGLLLLLKHPEVTAKVQEEIDHVIGRHRSPCMQDRSHMPYTDAVVHEIQRYSDLVPTGVPHAVTTDTKFRNYLIPKGTTIMALLTSVLHDDKEFPNPNIFDPGHFLDKNGNFKKSDYFMPFSAGKRICAGEGLARMELFLFLTTILQNFNLKSVDDLKNLNTTAVTKGIVSLPPSYQICFIPV

SEQ ID NO: 9173 - protein, 418 aa, Homo sapiens
MRESQDAAGAHGWNRVGSTATKWFTGAPFGVQSHRFDISAVYPNWKKFSTFTEAPYSTRYSTQVSHIGPGTYSSKETCFSKKKLMKEVDTGWAKAQEATRLTQLPHFQYQAIMKEKRLKEQKLGPGSYNLKDFLEQLREKPCSTRGLLSSGEVRFRGLTGNYYPGPGNYGEKGNPYTKLEENAWNRSHSEGLMCRMSNKPHPRPHQGSGLGPGTYFFKSDLETYVARSVGTRGPYDTFSGDRSKPLPYGHYSMQKKKPRELMNFKSFVEELNSHHNKKHGVFSKLPRNPKTPTERIYWANLSQCPRTLATSGPSFWLPQEKKCKPVNQPPFLLTSKGSGAKACQMIMGSWNPVGVGRYLNTWLMETKDRRQRYRSLFLSGSKRYLSDLARDMLMQERITPFTKGKCPPTVDYNSDPTP

SEQ ID NO: 9174 - protein, 569 aa, Homo sapiens
MAELEAVADDLDALIDDLDYLPGHFHLEMQLNFEPRSPAPQRARDLKLQREGLRQELQLAAAPQRPAVRHLLGAFAFYLEELDEARECFLEVAHEHPGNLNAWANLAHVYGRLGQEEEEEACAARLADLMGLAEEPEAAGDPQLRAARCLAEQGYAHGFDVGCASPEERARGLAAGIALYDKALGYGQQIPMEEKRGWYFTMATLYIRLDGIFLELGSEEQKRLPAFNRTLALLRQVLKSEDPRHRALAWCYLGMLLERKDTFSTTPMGVHDCGYSGTDPLDCFGKAIEIAKNQPPILNRLAKIFYFLGKQDMAIGTCNMALDVLRDPELNWQAYCTRAKIHIRAYLHDLKRAKMGLGGMPDRNHLACAKADLEEVVRVCPGFKAYLDIGQVYYYMGVDAVQELLAVDEAALNQALVFLAKAGESELGATLPELQLLRGKCLRIKGEDANAAACFKRAVELDDAGSSHTDGFGCLLEALLAQWSQAQLSDGELGREVDAWLRRAQDKYPAARLRQELQRVWRGHTDEVLGLARALVAQGRPALVRLLFETMEREGEGASAPRDRRAVSF

SEQ ID NO: 9175 - protein, 398 aa, Homo sapiens
MVCREQLSKNQVKWVFAGITCVSVVVIAAIVLAITLRRPGCELEACSPDADMLDYLLSLGQISRRDALEVTWYHAANSKKAMTAALNSNITVLEADVNVEGLGTANETGVPIMAHPPTIYSDNTLEQWLDAVLGSSQKGIKLDFKNIKAVGPSLDLLRQLTEEGKVRRPIWINADILKGPNMLISTEVNATQFLALVQEKYPKATLSPGWTTFYMSTSPNRTYTQAMVEKMHELVGGVPQRVTFPVRSSMVRAAWPHFSWLLSQSERYSLTLWQAASDPMSVEDLLYVRDNTAVHQVYYDIFEPLLLTDMLELCQGLWQPVSFQMQAMLLGHSTAGAIGRLLASSPRATVTVEHNPAGGDYASVRTALLAARAVDRTRVYYRLPQGYHKDLLAHVGRN

SEQ ID NO: 9176 - protein, 299 aa, Homo sapiens
MSATGDRHPTQGDQEAPVSQEGAQAEAAGAGNQEGGDSGPDSSDMVPAAEVVGVAGPVEGLGEEEGEQAAGLAAVPQGGSAEEDSDIGPATEEEEEEEEGNEAANFDLAVATRRYPAAGIGFVFLYLVHSLLRRLYHNDHIQIANRHLSRLMVGPHAAVPNLWDNPPLLLLSQRLGAGAAAPEGEGLGLIQEAASVQEAASVPEPAVPADLAEMAREPAEEAADEKPPEEAAEEKLTEEATEEPAAEEPTSEEAVAPEEVTKSQPEKWDEEAQDAAGEEEKEQEKEKDVENKVKNSKGT

SEQ ID NO: 9177 - protein, 607 aa, Homo sapiens
MIQNVGNHLRRGLASVFSNRTSRKSALRAGNDSAMADGEGYRNPTEVQMSQLVLPCHTNQRGELSVGQLLKWIDTTACLSAERHAGCPCVTASMDDIYFEHTISVGQVVNIKAKVNRAFNSSMEVGIQVASEDLCSEKQWNVCKALATFVARREITKVKLKQITPRTEEEKMEHSVAAERRRMRLVYADTIKDLLANCAIQGDLESRDCSRMVPAEKTRVESVELVLPPHANHQGNTFGGQIMAWMENVATIAASRLCRAHPTLKAIEMFHFRGPSQVGDRLVLKAIVNNAFKHSMEVGVCVEAYRQEAETHRRHINSAFMTFVVLDADDQPQLLPWIRPQPGDGERRYREASARKKIRLDRKYIVSCKQTEVPLSVPWDPSNQVYLSYNNVSSLKMLVAKDNWVLSSEISQVRLYTLEDDKFLSFHMEMVVHVDAAQAFLLLSDLRQRPEWDKHYRSVELVQQVDEDDAIYHVTSPALGGHTKPQDFVILASRRKPCDNGDPYVIALRSVTLPTHRETPEYRRGETLCSGFCLWREGDQLTKCCWVRVSLTELVSASGFYSWGLESRSKGRRSDGWNGKLAGGHLSTLKAIPVAKINSRFGYLQDT

SEQ ID NO: 9178 - protein, 361 aa, Homo sapiens
MFAKGKGSAVPSDGQAREKLALYVYEYLLHVGAQKSAQTFLSEIRWEKNITLGEPPGFLHSWWCVFWDLYCAAPERRDTCEHSSEAKAFHDYSAAAAPSPVLGNIPPNDGMPGGPIPPGFFQPFMSPRYAGGPRPPIRMGNQPPGGVPGTQPLLPNSMDPTRQQGHPNMGGSMQRMNPPRGMGPMGPGPQNYGSGMRPPPNSLGPAMPGINMGPGAGRPWPNPNSANSIPYSSSSPGTYVGPPGGGGPPGTPIMPSPADSTNSSDNIYTMINPVPPGGSRSNFPMGPGSDGPMGGMGGMEPHHMNGSLGSGDIDGLPKNSPNNISGISNPPGTPRDDGELGGNFLHSFQNDNYSPSMTMSV

SEQ ID NO: 9179 - protein, 388 aa, Homo sapiens
MFAKGKGSAVPSDGQAREKLALYVYEYLLHVGAQKSAQTFLSEIRWEKNITLGEPPGFLHSWWCVFWDLYCAAPERRDTCEHSSEAKAFHDYSAAAAPSPVLGNIPPNDGMPGGPIPPGFFQGPPGSQPSPHAQPPPHNPSSMMGPHSQPFMSPRYAGGPRPPIRMGNQPPGGVPGTQPLLPNSMDPTRQQGHPNMGGSMQRMNPPRGMGPMGPGPQNYGSGMRPPPNSLGPAMPGINMGPGAGRPWPNPNSANSIPYSSSSPGTYVGPPGGGGPPGTPIMPSPADSTNSSDNIYTMINPVPPGGSRSNFPMGPGSDGPMGGMGGMEPHHMNGSLGSGDIDGLPKNSPNNISGISNPPGTPRDDGELGGNFLHSFQNDNYSPSMTMSV

SEQ ID NO: 9180 - protein, 490 aa, Homo sapiens
MDPFVVLVLCLSCLLLLSIWRQSSGRGKLPPGPTPLPVIGNILQIDIKDVSKSLTNLSKIYGPVFTLYFGLERMVVLHGYEVVKEALIDLGEEFSGRGHFPLAERANRGFGIVFSNGKRWKEIRRFSLMTLRNFGMGKRSIEDRVQEEARCLVEELRKTKASPCDPTFILGCAPCNVICSIIFQKRFDYKDQQFLNLMEKLNENIRIVSTPWIQICNNFPTIIDYFPGTHNKLLKNLAFMESDILEKVKEHQESMDINNPRDFIDCFLIKMEKEKQNQQSEFTIENLVITAADLLGAGTETTSTTLRYALLLLLKHPEVTAKVQEEIERVIGRNRSPCMQDRGHMPYTDAVVHEVQRYIDLIPTSLPHAVTCDVKFRNYLIPKGTTILTSLTSVLHDNKEFPNPEMFDPRHFLDEGGNFKKSNYFMPFSAGKRICVGEGLARMELFLFLTFILQNFNLKSLIDPKDLDTTPVVNGFASVPPFYQLCFIPV

SEQ ID NO: 9181 - protein, 171 aa, Homo sapiens
MWTLKSSLVLLLCLTCSYAFMFSSLRQKTSEPQGKVPCGEHFRIRQNLPEHTQGWLGSKWLWLLFAVVPFVILQCQRDSEKNKEQSPPGLRGFPFRTPLKKNQNASLYKDCVFNTLNELEVELLKFVSEVQNLKGAMATGSGSNLKLRRSEMPADPYHVTICKIWGEESSS

SEQ ID NO: 9182 - protein, 449 aa, Homo sapiens
MLAEWGACLLLAVALLGPGLQAQAMEGVKCGGVLSAPSGNFSSPNFPRLYPYNTECSWLIVVAEGSSVLLTFHAFDLEYHDTCSFDFLEIYNGASPDKGNLLGRFCGKVPPPPFTSSWHVMSVIFHSDKHVASHGFSAGYQKDVCGGVLTGLSGVLTSPEYPNNYPNSMECHWVIRAAGPAHVKLVFVDFQVEGNEECTYDYVAVLGGPGPTRGHHYCGSTRPPTLVSLGHELQVVFKSDFNIGGRGFKAYYFSGECQEVYMAMRGNFSSPQYPSSYPNNIRCHWTIRLPPGYQVKVFFLDLDLEEPNSLTKTCDFDHLAAFDGASEEAPLLGNWCGHHLPPPVTSSHNQLLLLLHTDRSTTRRGFSVAYIGGQLGCGSGSTEGEGEALQPQSLQSPSSIPPVCPAPPMNGLLQLLLHWLHPCPLSGPLRLDGTAPACFHYCRASFPSF

SEQ ID NO: 9183 - protein, 238 aa, Homo sapiens
MAVFSGVLESALFLDQNTLQARQGSRSPLTMDKFVIRTPRIQNSPQKKDSGGKVYKQATIESLKRVVVVEDIKRWKTMLELPDQTKENLVEALQELKKKIPSREVLKSTRIGHTVNKMRKHSDSEVASLAREVYTEWKTFTEKHSNRPSIEVRSDPKTESLRKNAQKLLSEALELKMDHLLVENIERETFHLCSRLINGPYRRTVRALVFTLKHRAEIRAQVKSGSLPVGTFVQTHKK

SEQ ID NO: 9184 - protein, 700 aa, Homo sapiens
MQVKRSQEILSVAKKNKKENEDENSSSTNLCVEDLQKNKDSNSIIKDRLSETVRQNTKFFFDPVRKCNGQPVPFQQPKHFTGGVMRWYQVEGMEWLRMLWENGINGILADEMGLGKTVQCIATIALMIQRGVPGPFLVCGPLSTLPNWMAEFKRFTPDIPTMLYHGTQEERQKLVRNIYKRKGTLQIHPVVITSFEIAMRDRNALQHCYWKYLIVDEGHRIKNMKCRLIRELKRFNADNKLLLTGTPLQNNLSELWSLLNFLLPDVFDDLKSFESWFDITSLSETAEDIIAKEREQNVLHMLHQILTPFLLRRLKSDVALEVPPKREVVVYAPLSKKQEIFYTAIVNRTIANMFGSSEKETIELSPTGRPKRRTRKSINYSKIDDFPNELEKLISQIQPEVDRERAVVEVNIPVESEVNLKLQNIMMLLRKCCNHPYLIEYPIDPVTQEFKIDEELVTNSGKFLILDRMLPELKKRGHKVLLFSQMTSMLDILMDYCHLRDFNFSRLDGSMSYSEREKNMHSFNTDPEVFIFLVSTRAGGLGINLTAADTVIIYDSDWNPQSDLQAQDRCHRIGQTKPVVVYRLVTANTIDQKIVERAAAKRKLEKLIIHKNHFKGGQSGLNLSKNFLDPKELMELLKSRDYEREIKGSREKVISDKDLELLLDRSDLIDQMNASGPIKEKMGIFKILENSEDSSPECLF

SEQ ID NO: 9185 - protein, 145 aa, Homo sapiens
MAAPKGSLWVRTQLGLPPLLLLTMALAGGSGTASAEAFDSVLGDTASCHRACQLTYPLHTYPKEEELYACQRGCRLFSICQFVDDGIDLNRTKLECESACTEAYSQSDEQYACHLGCQNQLPFAELRQEQVRNNTAFQTSLLRWH

SEQ ID NO: 9186 - protein, 2340 aa, Homo sapiens
MVRFGDELGGRYGGPGGGERARGGGAGGAGGPGPGGLQPGQRVLYKQSIAQRARTMALYNPIPVKQNCFTVNRSLFVFSEDNVVRKYAKRITEWPPFEYMILATIIANCIVLALEQHLPDGDKTPMSERLDDTEPYFIGIFCFEAGIKIIALGFVFHKGSYLRNGWNVMDFVVVLTGILATAGTDFDLRTLRAVRVLRPLKLVSGIPSLQVVLKSIMKAMVPLLQIGLLLFFAILMFAIIGLEFYMGKFHKACFPNSTDAEPVGDFPCGKEAPARLCEGDTECREYWPGPNFGITNFDNILFAILTVFQCITMEGWTDILYNTNDAAGNTWNWLYFIPLIIIGSFFMLNLVLGVLSGEFAKERERVENRRAFLKLRRQQQIERELNGYLEWIFKAEEVMLAEEDRNAEEKSPLDAVLKRAATKKSRNDLIHAEEGEDRFADLCAVGSPFARASLKSGKTESSSYFRRKEKMFRFFIRRMVKAQSFYWVVLCVVALNTLCVAMVHYNQPRRLTTTLYFAEFVFLGLFLTEMSLKMYGLGPRSYFRSSFNCFDFGVIVGSVFEVVWAAIKPGSSFGISVLRALRLLRIFKVTKYWSSLRNLVVSLLNSMKSIISLLFLLFLFIVVFALLGMQLFGGQFNFQDETPTTNFDTFPAAILTVFQILTGEDWNAVMYHGIESQGGVSKGMFSSFYFIVLTLFGNYTLLNVFLAIAVDNLANAQELTKDEEEMEEAANQKLALQKAKEVAEVSPMSAANISIAARQQNSAKARSVWEQRASQLRLQNLRASCEALYSEMDPEERLRFATTRHLRPDMKTHLDRPLVVELGRDGARGPVGGKARPEAAEAPEGVDPPRRHHRHRDKDKTPAAGDQDRAEAPKAESGEPGAREERPRPHRSHSKEAAGPPEARSERGRGPGPEGGRRHHRRGSPEEAAEREPRRHRAHRHQDPSKECAGAKGERRARHRGGPRAGPREAESGEEPARRHRARHKAQPAHEAVEKETTEKEATEKEAEIVEADKEKELRNHQPREPHCDLETSGTVTVGPMHTLPSTCLQKVEEQPEDADNQRNVTRMGSQPPDPNTIVHIPVMLTGPLGEATVVPSGNVDLESQAEGKKEVEADDVMRSGPRPIVPYSSMFCLSPTNLLRRFCHYIVTMRYFEVVILVVIALSSIALAAEDPVRTDSPRNNALKYLDYIFTGVFTFEMVIKMIDLGLLLHPGAYFRDLWNILDFIVVSGALVAFAFSGSKGKDINTIKSLRVLRVLRPLKTIKRLPKLKAVFDCVVNSLKNVLNILIVYMLFMFIFAVIAVQLFKGKFFYCTDESKELERDCRGQYLDYEKEEVEAQPRQWKKYDFHYDNVLWALLTLFTVSTGEGWPMVLKHSVDATYEEQGPSPGYRMELSIFYVVYFVVFPFFFVNIFVALIIITFQEQGDKVMSECSLEKNERACIDFAISAKPLTRYMPQNRQSFQYKTWTFVVSPPFEYFIMAMIALNTVVLMMKFYDAPYEYELMLKCLNIVFTSMFSMECVLKIIAFGVLNYFRDAWNVFDFVTVLGSITDILVTEIAETNNFINLSFLRLFRAARLIKLLRQGYTIRILLWTFVQSFKALPYVCLLIAMLFFIYAIIGMQVFGNIALDDDTSINRHNNFRTFLQALMLLFRSATGEAWHEIMLSCLSNQACDEQANATECGSDFAYFYFVSFIFLCSFLMLNLFVAVIMDNFEYLTRDSSILGPHHLDEFIRVWAEYDPAACGRISYNDMFEMLKHMSPPLGLGKKCPARVAYKRLVRMNMPISNEDMTVHFTSTLMALIRTALEIKLAPAGTKQHQCDAELRKEISVVWANLPQKTLDLLVPPHKPDEMTVGKVYAALMIFDFYKQNKTTRDQMQQAPGGLSQMGPVSLFHPLKATLEQTQPAVLRGARVFLRQKSSTSLSNGGAIQNQESGIKESVSWGTQRTQDAPHEARPPLERGHSTEIPVGRSGALAVDVQMQSITRRGPDGEPQPGLESQGRAASMPRLAAETQPVTDASPMKRSISTLAQRPRGTHLCSTTPDRPPPSQASSHHHHHRCHRRRDRKQRSLEKGPSLSADMDGAPSSAVGPGLPPGEGPTGCRRERERRQERGRSQERRQPSSSSSEKQRFYSCDRFGGREPPKPKPSLSSHPTSPTAGQEPGPHPQGSGSVNGSPLLSTSGASTPGRGGRRQLPQTPLTPRPSITYKTANSSPIHFAGAQTSLPAFSPGRLSRGLSEHNALLQRDPLSQPLAPGSRIGSDPYLGQRLDSEASVHALPEDTLTFEEAVATNSGRSSRTSYVSSLTSQSHPLRRVPNGYHCTLGLSSGGRARHSYHHPDQDHWC

SEQ ID NO: 9187 - protein, 2338 aa, Homo sapiens
MVRFGDELGGRYGGPGGGERARGGGAGGAGGPGPGGLQPGQRVLYKQSIAQRARTMALYNPIPVKQNCFTVNRSLFVFSEDNVVRKYAKRITEWPPFEYMILATIIANCIVLALEQHLPDGDKTPMSERLDDTEPYFIGIFCFEAGIKIIALGFVFHKGSYLRNGWNVMDFVVVLTGILATAGTDFDLRTLRAVRVLRPLKLVSGIPSLQVVLKSIMKAMVPLLQIGLLLFFAILMFAIIGLEFYMGKFHKACFPNSTDAEPVGDFPCGKEAPARLCEGDTECREYWPGPNFGITNFDNILFAILTVFQCITMEGWTDILYNTNDAAGNTWNWLYFIPLIIIGSFFMLNLVLGVLSGEFAKERERVENRRAFLKLRRQQQIERELNGYLEWIFKAEEVMLAEEDRNAEEKSPLDAVLKRAATKKSRNDLIHAEEGEDRFADLCAVGSPFARASLKSGKTESSSYFRRKEKMFRFFIRRMVKAQSFYWVVLCVVALNTLCVAMVHYNQPRRLTTTLYFAEFVFLGLFLTEMSLKMYGLGPRSYFRSSFNCFDFGVIVGSVFEVVWAAIKPGSSFGISVLRALRLLRIFKVTKYWSSLRNLVVSLLNSMKSIISLLFLLFLFIVVFALLGMQLFGGQFNFQDETPTTNFDTFPAAILTVFQILTGEDWNAVMYHGIESQGGVSKGMFSSFYFIVLTLFGNYTLLNVFLAIAVDNLANAQELTKDEEEMEEAANQKLALQKAKEVAEVSPMSAANISIAARQQNSAKARSVWEQRASQLRLQNLRASCEALYSEMDPEERLRFATTRHLRPDMKTHLDRPLVVELGRDGARGPVGGKARPEAAEAPEGVDPPRRHHRHRDKDKTPAAGDQDRAEAPKAESGEPGAREERPRPHRSHSKEAAGPPEARSERGRGPGPEGGRRHHRRGSPEEAAEREPRRHRAHRHQDPSKECAGAKGERRARHRGGPRAGPREAESGEEPARRHRARHKAQPAHEAVEKETTEKEATEKEAEIVEADKEKELRNHQPREPHCDLETSGTVTVGPMHTLPSTCLQKVEEQPEDADNQRNVTRMGSQPPDPNTIVHIPVMLTGPLGEATVVPSGNVDLESQAEGKKEVEADDVMRSGPRPIVPYSSMFCLSPTNLLRRFCHYIVTMRYFEVVILVVIALSSIALAAEDPVRTDSPRNNALKYLDYIFTGVFTFEMVIKMIDLGLLLHPGAYFRDLWNILDFIVVSGALVAFAFSGSKGKDINTIKSLRVLRVLRPLKTIKRLPKLKAVFDCVVNSLKNVLNILIVYMLFMFIFAVIAVQLFKGKFFYCTDESKELERDCRGQYLDYEKEEVEAQPRQWKKYDFHYDNVLWALLTLFTVSTGEGWPMVLKHSVDATYEEQGPSPGYRMELSIFYVVYFVVFPFFFVNIFVALIIITFQEQGDKVMSECSLEKNERACIDFAISAKPLTRYMPQNRQSFQYKTWTFVVSPPFEYFIMAMIALNTVVLMMKFYDAPYEYELMLKCLNIVFTSMFSMECVLKIIAFGVLNYFRDAWNVFDFVTVLGSITDILVTEIANNFINLSFLRLFRAARLIKLLRQGYTIRILLWTFVQSFKALPYVCLLIAMLFFIYAIIGMQVFGNIALDDDTSINRHNNFRTFLQALMLLFRSATGEAWHEIMLSCLSNQACDEQANATECGSDFAYFYFVSFIFLCSFLMLNLFVAVIMDNFEYLTRDSSILGPHHLDEFIRVWAEYDPAACGRISYNDMFEMLKHMSPPLGLGKKCPARVAYKRLVRMNMPISNEDMTVHFTSTLMALIRTALEIKLAPAGTKQHQCDAELRKEISVVWANLPQKTLDLLVPPHKPDEMTVGKVYAALMIFDFYKQNKTTRDQMQQAPGGLSQMGPVSLFHPLKATLEQTQPAVLRGARVFLRQKSSTSLSNGGAIQNQESGIKESVSWGTQRTQDAPHEARPPLERGHSTEIPVGRSGALAVDVQMQSITRRGPDGEPQPGLESQGRAASMPRLAAETQPVTDASPMKRSISTLAQRPRGTHLCSTTPDRPPPSQASSHHHHHRCHRRRDRKQRSLEKGPSLSADMDGAPSSAVGPGLPPGEGPTGCRRERERRQERGRSQERRQPSSSSSEKQRFYSCDRFGGREPPKPKPSLSSHPTSPTAGQEPGPHPQGSGSVNGSPLLSTSGASTPGRGGRRQLPQTPLTPRPSITYKTANSSPIHFAGAQTSLPAFSPGRLSRGLSEHNALLQRDPLSQPLAPGSRIGSDPYLGQRLDSEASVHALPEDTLTFEEAVATNSGRSSRTSYVSSLTSQSHPLRRVPNGYHCTLGLSSGGRARHSYHHPDQDHWC

SEQ ID NO: 9188 - protein, 800 aa, Homo sapiens
MKARRNKKQIPSFRKLIKTSKVKLENKLKNKQFKQQSTLKKYRKEQRKLRQAVKDAVSKKPIPLENPKEKRPGKRIEREEEEEEEALPLDMMDEDDLQLMKDLGQRVSFLTRDLSSSEPVHAKKRKHERIIDKYEKIPRTLQTAPEKELIHLLPIKDKSGIIPQTREKPVTDSNKDEEDQEEERELEEEIIEDPIQELTIEEHLIERKKKLQEKKMHIAALASAILSDPENNIKKLKELRSMLMEQDPDVAVTVRKLVIVSLMELFKDITPSYKIRPLTEAEKSTKTRKETQKLREFEEGLVSQYKFYLENLEQMVKDWKQRKLKKSNVVSLKAYKGLAEVAVKSLCELLVALPHFNFHNNIIVLIVPLMNDMSKLISEMCCEAVKKLFKQDKLGQASLGVIKVISGFVKGRNYEVRPEMLKTFLCLRIKEVEVKKDTEDINKPKKFMTFKEKRKSLSRMQRKWKKAEEKLERELREAEASESTEKKLKLHTETLNIVFVTYFRILKKAQRSPLLPAVLEGLAKFAHLINVEFFDDLLVVLHTLIESGDLSYQESLHCVQTAFHILSGQGDVLNIDPLKFYTHLYKTLFKLHAGATNEGVEIVLQCLDVMLTKRRKQVSQQRALAFIKRLCTLALHVLPNSSIGILATTRILMHTFPKTDLLLDSESQGSGVFLPELDEPEYCNAQNTALWELHALRRHYHPIVQRFAAHLIAGAPSEGSGALKPELSRRSATELFEAYSMAEMTFNPPVESSNPKIKGKFLQGDSFLNEDLNQLIKRYSSEVATESPLDFTKYLKTSLH

SEQ ID NO: 9189 - protein, 2337 aa, Homo sapiens
MVRFGDELGGRYGGPGGGERARGGGAGGAGGPGPGGLQPGQRVLYKQSIAQRARTMALYNPIPVKQNCFTVNRSLFVFSEDNVVRKYAKRITEWPPFEYMILATIIANCIVLALEQHLPDGDKTPMSERLDDTEPYFIGIFCFEAGIKIIALGFVFHKGSYLRNGWNVMDFVVVLTGILATAGTDFDLRTLRAVRVLRPLKLVSGIPSLQVVLKSIMKAMVPLLQIGLLLFFAILMFAIIGLEFYMGKFHKACFPNSTDAEPVGDFPCGKEAPARLCEGDTECREYWPGPNFGITNFDNILFAILTVFQCITMEGWTDILYNTNDAAGNTWNWLYFIPLIIIGSFFMLNLVLGVLSGEFAKERERVENRRAFLKLRRQQQIERELNGYLEWIFKAEEVMLAEEDRNAEEKSPLDVLKRAATKKSRNDLIHAEEGEDRFADLCAVGSPFARASLKSGKTESSSYFRRKEKMFRFFIRRMVKAQSFYWVVLCVVALNTLCVAMVHYNQPRRLTTTLYFAEFVFLGLFLTEMSLKMYGLGPRSYFRSSFNCFDFGVIVGSVFEVVWAAIKPGSSFGISVLRALRLLRIFKVTKYWSSLRNLVVSLLNSMKSIISLLFLLFLFIVVFALLGMQLFGGQFNFQDETPTTNFDTFPAAILTVFQILTGEDWNAVMYHGIESQGGVSKGMFSSFYFIVLTLFGNYTLLNVFLAIAVDNLANAQELTKDEEEMEEAANQKLALQKAKEVAEVSPMSAANISIAARQQNSAKARSVWEQRASQLRLQNLRASCEALYSEMDPEERLRFATTRHLRPDMKTHLDRPLVVELGRDGARGPVGGKARPEAAEAPEGVDPPRRHHRHRDKDKTPAAGDQDRAEAPKAESGEPGAREERPRPHRSHSKEAAGPPEARSERGRGPGPEGGRRHHRRGSPEEAAEREPRRHRAHRHQDPSKECAGAKGERRARHRGGPRAGPREAESGEEPARRHRARHKAQPAHEAVEKETTEKEATEKEAEIVEADKEKELRNHQPREPHCDLETSGTVTVGPMHTLPSTCLQKVEEQPEDADNQRNVTRMGSQPPDPNTIVHIPVMLTGPLGEATVVPSGNVDLESQAEGKKEVEADDVMRSGPRPIVPYSSMFCLSPTNLLRRFCHYIVTMRYFEVVILVVIALSSIALAAEDPVRTDSPRNNALKYLDYIFTGVFTFEMVIKMIDLGLLLHPGAYFRDLWNILDFIVVSGALVAFAFSGSKGKDINTIKSLRVLRVLRPLKTIKRLPKLKAVFDCVVNSLKNVLNILIVYMLFMFIFAVIAVQLFKGKFFYCTDESKELERDCRGQYLDYEKEEVEAQPRQWKKYDFHYDNVLWALLTLFTVSTGEGWPMVLKHSVDATYEEQGPSPGYRMELSIFYVVYFVVFPFFFVNIFVALIIITFQEQGDKVMSECSLEKNERACIDFAISAKPLTRYMPQNRQSFQYKTWTFVVSPPFEYFIMAMIALNTVVLMMKFYDAPYEYELMLKCLNIVFTSMFSMECVLKIIAFGVLNYFRDAWNVFDFVTVLGSITDILVTEIANNFINLSFLRLFRAARLIKLLRQGYTIRILLWTFVQSFKALPYVCLLIAMLFFIYAIIGMQVFGNIALDDDTSINRHNNFRTFLQALMLLFRSATGEAWHEIMLSCLSNQACDEQANATECGSDFAYFYFVSFIFLCSFLMLNLFVAVIMDNFEYLTRDSSILGPHHLDEFIRVWAEYDPAACGRISYNDMFEMLKHMSPPLGLGKKCPARVAYKRLVRMNMPISNEDMTVHFTSTLMALIRTALEIKLAPAGTKQHQCDAELRKEISVVWANLPQKTLDLLVPPHKPDEMTVGKVYAALMIFDFYKQNKTTRDQMQQAPGGLSQMGPVSLFHPLKATLEQTQPAVLRGARVFLRQKSSTSLSNGGAIQNQESGIKESVSWGTQRTQDAPHEARPPLERGHSTEIPVGRSGALAVDVQMQSITRRGPDGEPQPGLESQGRAASMPRLAAETQPVTDASPMKRSISTLAQRPRGTHLCSTTPDRPPPSQASSHHHHHRCHRRRDRKQRSLEKGPSLSADMDGAPSSAVGPGLPPGEGPTGCRRERERRQERGRSQERRQPSSSSSEKQRFYSCDRFGGREPPKPKPSLSSHPTSPTAGQEPGPHPQGSGSVNGSPLLSTSGASTPGRGGRRQLPQTPLTPRPSITYKTANSSPIHFAGAQTSLPAFSPGRLSRGLSEHNALLQRDPLSQPLAPGSRIGSDPYLGQRLDSEASVHALPEDTLTFEEAVATNSGRSSRTSYVSSLTSQSHPLRRVPNGYHCTLGLSSGGRARHSYHHPDQDHWC

SEQ ID NO: 9190 - protein, 2339 aa, Homo sapiens [sequence omitted]

SEQ ID NO: 9191 - protein, 1994 aa, Homo sapiens
MVSEGSAAGRDFAGMEEVRQLHVRFCKGIKIWHQAWFLCSLLGREPQEREAGCQLWLCTLSAVLKVGWLFPLSEVPNFTLLKDGCGCWRLKEDQIYNAVRREETENTVGSLLHFLTKLPASETAHGRISVGPCLKQCVRDTVCEYRATLQRTSISQYITGSLLEATTSLGARSGLLSTFGGSTGRMMLKERQPGPSVANSNALPSSSAGISKELIDLQPLIQFPEEVASILMEQEQTIYRRVLPVDYLCFLTRDLGTPECQSSLPCLKASISASILTTQNGEHNALEDLVMRFNEVSSWVTWLILTAGSMEEKREVFSYLVHVAKCCWNMGNYNAVMEFLAGLRSRKVLKMWQFMDQSDIETMRSLKDAMAQHESSCEYRKVVTRALHIPGCKVVPFCGVFLKELCEVLDGASGLMKLCPRYNSQEETLEFVADYSGQDNFLQRVGQNGLKNSEKESTVNSIFQVIRSCNRSLETDEEDSPSEGNSSRKSSLKDKSRWQFIIGDLLDSDNDIFEQSKEYDSHGSEDSQKAFDHGTELIPWYVLSIQADVHQFLLQGATVIHYDQDTHLSARCFLQLQPDNSTLTWVKPTTASPASSKAKLGVLNNTAEPGKFPLLGNAGLSSLTEGVLDLFAVKAVYMGHPGIDIHTVCVQNKLGSMFLSETGVTLLYGLQTTDNRLLHFVAPKHTAKMLFSGLLELTRAVRKMRKFPDQRQQWLRKQYVSLYQEDGRYEGPTLAHAVELFGGRRWSARNPSPGTSAKNAEKPNMQRNNTLGISTTKKKKKILMRGESGEVTDDEMATRKAKMHKECRSRSGSDPQDINEQEESEVNAIANPPNPLPSRRAHSLTTAGSPNLAAGTSSPIRPVSSPVLSSSNKSPSSAWSSSSWHGRIKGGMKGFQSFMVSDSNMSFVEFVELFKSFSVRSRKDLKDLFDVYAVPCNRSGSESAPLYTNLTIDENTSDLQPDLDLLTRNVSDLGLFIKSKQQLSDNQRQISDAIAAASIVTNGTGIESTSLGIFGVGILQLNDFLVNCQGEHCTYDEILSIIQKFEPSISMCHQGLMSFEGFARFLMDKENFASKNDESQENIKELQLPLSYYYIESSHNTYLTGHQLKGESSVELYSQVLLQGCRSVELDCWDGDDGMPIIYHGHTLTTKIPFKEVVEAIDRSAFINSDLPIIISIENHCSLPQQRKMAEIFKTVFGEKLVTKFLFETDFSDDPMLPSPDQLRKKVLLKNKKLKAHQTPVDILKQKAHQLASMQVQAYNGGNANPRPANNEEEEDEEDEYDYDYESLSDDNILEDRPENKSCNDKLQFEYNEEIPKRIKKADNSACNKGKVYDMELGEEFYLDQNKKESRQIAPELSDLVIYCQAVKFPGLSTLNASGSSRGKERKSRKSIFGNNPGRMSPGETASFNKTSGKSSCEGIRQTWEESSSPLNPTTSLSAIIRTPKCYHISSLNENAAKRLCRRYSQKLTQHTACQLLRTYPAATRIDSSNPNPLMFWLHGIQLVALNYQTDDLPLHLNAAMFEANGGCGYVLKPPVLWDKNCPMYQKFSPLERDLDSMDPAVYSLTIVSGQNVCPSNSMGSPCIEVDVLGMPLDSCHFRTKPIHRNTLNPMWNEQFLFHVHFEDLVFLRFAVVENNSSAVTAQRIIPLKALKRGYRHLQLRNLHNEVLEISSLFINSRRMEENSSGNTMSASSMFNTEERKCLQTHRVTVHGVPGPEPFTVFTINGGTKAKQLLQQILTNEQDIKPVTTDYFLMEEKYFISKEKNECRKQPFQRAIGPEEEIMQILSSWFPEEGYMGRIVLKTQQENLEEKNIVQDDKEVILSSEEESFFVQVHDVSPEQPRTVIKAPRVSTAQDVIQQTLCKAKYSYSILSNPNPSDYVLLEEVVKDTTNKKTTTPKSSQRVLLDQECVFQAQSKWKGAGKFILKLKEQVQASREDKKKGISFASELKKLTKSTKQPRGLTSPSQLLTSESIQTKEEKPVGGLSSSDTMDYRQ

SEQ ID NO: 9192 - protein, 2302 aa, Homo sapiens
MTSEEMTASVLIPVTQRKVVSAQSAADESSEKVSDINISKAHTVRRSGETSHTISQLNKLKEEPSGSNLPKILSIAREKIVSDENSNEKCWEKIMPDSAKNLNINCNNILRNHQHGLPQRQFYEMYNSVAEEDLCLETGIPSPLERKVFPGIQLELDRPSMGISPLGNQSVIIETGRAHPDSRRAVFHFHYEVDRRMSDTFCTLSENLILDDCGNCVPLPGGEEKQKKNYVAYTCKLMELAKNCDNKNEQLQCDHCDTLNDKYFCFEGSCEKVDMVYSGDSFCRKDFTDSQAAKTFLSHFEDFPDNCDDVEEDAFKSKKERSTLLVRRFCKNDREVKKSVYTGTRAIVRTLPSGHIGLTAWSYIDQKRNGPLLPCGRVMEPPSTVEIRQDGSQRLSEAQWYPIYNAVRREETENTVGSLLHFLTKLPASETAHGRISVGPCLKQCVRDTVCEYRATLQRTSISQYITGSLLEATTSLGARSGLLSTFGGSTGRMMLKERQPGPSVANSNALPSSSAGISKELIDLQPLIQFPEEVASILMEQEQTIYRRVLPVDYLCFLTRDLGTPECQSSLPCLKASISASILTTQNGEHNALEDLVMRFNEVSSWVTWLILTAGSMEEKREVFSYLVHVAKCCWNMGNYNAVMEFLAGLRSRKVLKMWQFMDQSDIETMRSLKDAMAQHESSCEYRKVVTRALHIPGCKVVPFCGVFLKELCEVLDGASGLMKLCPRYNSQEETLEFVADYSGQDNFLQRVGQNGLKNSEKESTVNSIFQVIRSCNRSLETDEEDSPSEGNSSRKSSLKDKSRWQFIIGDLLDSDNDIFEQSKEYDSHGSEDSQKAFDHGTELIPWYVLSIQADVHQFLLQGATVIHYDQDTHLSARCFLQLQPDNSTLTWVKPTTASPASSKAKLGVLNNTAEPGKFPLLGNAGLSSLTEGVLDLFAVKAVYMGHPGIDIHTVCVQNKLGSMFLSETGVTLLYGLQTTDNRLLHFVAPKHTAKMLFSGLLELTRAVRKMRKFPDQRQQWLRKQYVSLYQEDGRYEGPTLAHAVELFGGRRWSARNPSPGTSAKNAEKPNMQRNNTLGISTTKKKKKILMRGESGEVTDDEMATRKAKMHKECRSRSGSDPQDINEQEESEVNAIANPPNPLPSRRAHSLTTAGSPNLAAGTSSPIRPVSSPVLSSSNKSPSSAWSSSSWHGRIKGGMKGFQSFMVSDSNMSFVEFVELFKSFSVRSRKDLKDLFDVYAVPCNRSGSESAPLYTNLTIDENTSDLQPDLDLLTRNVSDLGLFIKSKQQLSDNQRQISDAIAAASIVTNGTGIESTSLGIFGVGILQLNDFLVNCQGEHCTYDEILSIIQKFEPSISMCHQGLMSFEGFARFLMDKENFASKNDESQENIKELQLPLSYYYIESSHNTYLTGHQLKGESSVELYSQVLLQGCRSVELDCWDGDDGMPIIYHGHTLTTKIPFKEVVEAIDRSAFINSDLPIIISIENHCSLPQQRKMAEIFKTVFGEKLVTKFLFETDFSDDPMLPSPDQLRKKVLLKNKKLKAHQTPVDILKQKAHQLASMQVQAYNGGNANPRPANNEEEEDEEDEYDYDYESLSDDNILEDRPENKSCNDKLQFEYNEEIPKRIKKADNSACNKGKVYDMELGEEFYLDQNKKESRQIAPELSDLVIYCQAVKFPGLSTLNASGSSRGKERKSRKSIFGNNPGRMSPGETASFNKTSGKSSCEGIRQTWEESSSPLNPTTSLSAIIRTPKCYHISSLNENAAKRLCRRYSQKLTQHTACQLLRTYPAATRIDSSNPNPLMFWLHGIQLVALNYQTDDLPLHLNAAMFEANGGCGYVLKPPVLWDKNCPMYQKFSPLERDLDSMDPAVYSLTIVSGQNVCPSNSMGSPCIEVDVLGMPLDSCHFRTKPIHRNTLNPMWNEQFLFHVHFEDLVFLRFAVVENNSSAVTAQRIIPLKALKRGYRHLQLRNLHNEVLEISSLFINSRRMEENSSGNTMSASSMFNTEERKCLQTHRVTVHGVPGPEPFTVFTINGGTKAKQLLQQILTNEQDIKPVTTDYFLMEEKYFISKEKNECRKQPFQRAIGPEEEIMQILSSWFPEEGYMGRIVLKTQQENLEEKNIVQDDKEVILSSEEESFFVQVHDVSPEQPRTVIKAPRVSTAQDVIQQTLCKAKYSYSILSNPNPSDYVLLEEVVKDTTNKKTTTPKSSQRVLLDQECVFQAQSKWKGAGKFILKLKEQVQASREDKKKGISFASELKKLTKSTKQPRGLTSPSQLLTSESIQTKEEKPVGGLSSSDTMDYRQ

SEQ ID NO: 9193 - protein, 557 aa, Homo sapiens
MESERSKRMGNACIPLKRIAYFLCLLSALLLTEGKKPAKPKCPAVCTCTKDNALCENARSIPRTVPPDVISLSFVRSGFTEISEGSFLFTPSLQLLLFTSNSFDVISDDAFIGLPHLEYLFIENNNIKSISRHTFRGLKSLIHLSLANNNLQTLPKDIFKGLDSLTNVDLRGNSFNCDCKLKWLVEWLGHTNATVEDIYCEGPPEYKKRKINSLSSKDFDCIITEFAKSQDLPYQSLSIDTFSYLNDEYVVIAQPFTGKCIFLEWDHVEKTFRNYDNITGTSTVVCKPIVIETQLYVIVAQLFGGSHIYKRDSFANKFIKIQDIEILKIRKPNDIETFKIENNWYFVVADSSKAGFTTIYKWNGNGFYSHQSLHAWYRDTDVEYLEIVRTPQTLRTPHLILSSSSQRPVIYQWNKATQLFTNQTDIPNMEDVYAVKHFSVKGDVYICLTRFIGDSKVMKWGGSSFQDIQRMPSRGSMVFQPLQINNYQYAILGSDYSFTQVYNWDAEKAKFVKFQELNVQAPRSFTHVSINKRNFLFASSFKGNTQIYKHVIVDLSA

SEQ ID NO: 9194 - protein, 134 aa, Homo sapiens
MAATMKKAAAEDVNVTFEDQQKINKFARNTSRITELKEEIEVKKKQLQNLEDACDDIMLADDDCLMIPYQIGDVFISHSQEETQEMLEEAKKNLQEEIDALESRVESIQRVLADLKVQLYAKFGSNINLEADES

SEQ ID NO: 9195 - protein, 499 aa, Homo sapiens
MASNSLFSTVTPCQQNFFWDPSTSRRFSPPSSSLQPGKMSDVSPVVAAQQQQQQQQQQQQQQQQQQQQQQQEAAAAAAAAAAAAAAAAAVPRLRPPHDNRTMVEIIADHPAELVRTDSPNFLCSVLPSHWRCNKTLPVAFKVVALGEVPDGTVVTVMAGNDENYSAELRNASAVMKNQVARFNDLRFVGRSGRGKSFTLTITVFTNPPQVATYHRAIKVTVDGPREPRRHRQKLDDSKPSLFSDRLSDLGRIPHPSMRVGVPPQNPRPSLNSAPSPFNPQGQSQITDPRQAQSSPPWSYDQSYPSYLSQMTSPSIHSTTPLSSTRGTGLPAITDVPRRISGASELGPFSDPRQFPSISSLTESRFSNPRMHYPATFTYTPPVTSGMSLGMSATTHYHTYLPPPYPGSSQSQSGPFQTSSTPYLYYGTSSGSYQFPMVPGGDRSPSRMLPPCTTTSNGSTLLNPNLPNQNDGVDADGSHSSSPTVLNSSGRMDESVWRPY

SEQ ID NO: 9196 - protein, 315 aa, Homo sapiens
MHGHGGYDSDFSDDERCGESSKRKKRTVEDDLLLQKPFQKEKHGKVAHKQVAAELLDREEARNRRFHLIAMDAYQRHTKFVNDYILYYGGKKEDFKRLGENDKTDLDVIRENHRFLWNEEDEMDMTWEKRLAKKYYDKLFKEYCIADLSKYKENKFGFRWRVEKEVISGKGQFFCGNKYCDKKEGLKSWEVNFGYIEHGEKRNALVKLRLCQECSIKLNFHHRRKEIKSKKRKDKTKKDCEESSHKKSRLSSAEEASKKKDKGHSSSKKSEDSLLRNSDEEESASESELWKGPLPETDEKSQEEEFDEYFQDLFL

SEQ ID NO: 9197 - protein, 506 aa, Homo sapiens
MGNQMSVPQRVEDQENEPEAETYQDNASALNGVPVVVSTHTVQHLEEVDLGISVKTDNVATSSPETTEISAVADANGKNLGKEAKPEAPAAKSRFFLMLSRPVPGRTGDQAADSSLGSVKLDVSSNKAPANKDPSESWTLPVAAGPGQDTDKTPGHAPAQDKVLSAARDPTLLPPETGGAGGEAPSKPKDSSFFDKFFKLDKGQEKVPGDSQQEAKRAEHQDKVDEVPGLSGQSDDVPAGKDIVDGKEKEGQELGTADCSVPGDPEGLETAKDDSQAAAIAENNNSIMSFFKTLVSPNKAETKKDPEDTGAEKSPTTSADLKSDKANFTSQETQGAGKNSKGCNPSGHTQSVTTPEPAKEGTKEKSGPTSLPLGKLFWKKSVKEDSVPTGAEENTSDSTEKTITPPEPEPTGAPQKGKEGSSKDKKSAAEMNKQKSNKQEAKEPAQCTEQATVDTNSLQNGDKLQKRPEKRQQSLGGFFKGLGPKRMLDAQVQTDPVSIGPVGKSK

SEQ ID NO: 9198 - protein, 521 aa, Homo sapiens
MASNSLFSTVTPCQQNFFWDPSTSRRFSPPSSSLQPGKMSDVSPVVAAQQQQQQQQQQQQQQQQQQQQQQQEAAAAAAAAAAAAAAAAAVPRLRPPHDNRTMVEIIADHPAELVRTDSPNFLCSVLPSHWRCNKTLPVAFKVVALGEVPDGTVVTVMAGNDENYSAELRNASAVMKNQVARFNDLRFVGRSGRGKSFTLTITVFTNPPQVATYHRAIKVTVDGPREPRRHRQKLDDSKPSLFSDRLSDLGRIPHPSMRVGVPPQNPRPSLNSAPSPFNPQGQSQITDPRQAQSSPPWSYDQSYPSYLSQMTSPSIHSTTPLSSTRGTGLPAITDVPRRISDDDTATSDFCLWPSTLSKKSQAGASELGPFSDPRQFPSISSLTESRFSNPRMHYPATFTYTPPVTSGMSLGMSATTHYHTYLPPPYPGSSQSQSGPFQTSSTPYLYYGTSSGSYQFPMVPGGDRSPSRMLPPCTTTSNGSTLLNPNLPNQNDGVDADGSHSSSPTVLNSSGRMDESVWRPY

SEQ ID NO: 9199 - protein, 342 aa, Homo sapiens
MADKMVRTPKCSRCRNHGFLVPVKGHAGKCRWKQCLCEKCYLISERQKIMAAQKVLKTQAAEEEQEAALCAQGPKQASGAAAAAPAPVPVPAASLRPLSPGTPSGDADPGPEGRAAACFFEQPPRGRNPGPRALQPVLGGRSHVEPSERAAVAMPSLAGPPFGAEAAGSGYPGPLDLRRPMRTVPGPLFTDFVRPLNINPDRALGPEYPGGSSMHPYCPFPLGYLDAPPGVPLQQGFRHVSRSQYQGGGLVSEPGGDFQPSYYLPPPPPPLPPLPPLPPQPQFLPPGYLSALHFLPPPPPPPPPSSFSLTVLFDTDKENTDDQDAEVLSGEPSQPSSQEQSD

SEQ ID NO: 9200 - protein, 858 aa, Homo sapiens
MGEINQVAVEKYLEENPQFAKEYFDRKLRVEVLGEIFKNSQVPVQSSMSFSELTQVEESALCLELLWTVQEEGGTPEQGVHRALQRLAHLLQADRCSMFLCRSRNGIPEVASRLLDVTPTSKFEDNLVGPDKEVVFPLDIGIVGWAAHTKKTHNVPDVKKNSHFSDFMDKQTGYVTKNLLATPIVVGKEVLAVIMAVNKVNASEFSKQDEEVFSKYLNFVSIILRLHHTSYMYNIESRRSQILMWSANKVFEELTDVERQFHKALYTVRSYLNCERYSIGLLDMTKEKEFYDEWPIKLGEVEPYKGPKTPDGREVNFYKIIDYILHGKEEIKVIPTPPADHWTLISGLPTYVAENGFICNMMNAPADEYFTFQKGPVDETGWVIKNVLSLPIVNKKEDIVGVATFYNRKDGKPFDEHDEYITETLTQFLGWSLLNTDTYDKMNKLENRKDIAQEMLMNQTKATPEEIKSILKFQEKLNVDVIDDCEEKQLVAILKEDLPDPRSAELYEFRFSDFPLTEHGLIKCGIRLFFEINVVEKFKVPVEVLTRWMYTVRKGYRAVTYHNWRHGFNVGQTMFTLLMTGRLKKYYTDLEAFAMLAAAFCHDIDHRGTNNLYQMKSTSPLARLHGSSILERHHLEYSKTLLQDESLNIFQNLNKRQFETVIHLFEVAIIATDLALYFKKRTMFQKIVDACEQMQTEEEAIKYVTVDPTKKEIIMAMMMTACDLSAITKPWEVQSQVALMVANEFWEQGDLERTVLQQQPIPMMDRNKRDELPKLQVGFIDFVCTFVYKEFSRFHKEITPMLSGLQNNRVEWKSLADEYDAKMKVIEEEAKKQEGGAEKAAEDSGGGDDKKSKTCLML

SEQ ID NO: 9201 - protein, 317 aa, Homo sapiens
MNNTAASPMSTATSSSGRSTGKSISFATELQSMMYSLGDARRPLHETAVLVEDVVHTQLINLLQQAAEVSQLRGARVITPEDLLFLMRKDKKKLRRLLKYMFIRDYKSKIVKGIDEDDLLEDKLSGSNNANKRQKIAQDFLNSIDQTGELLAMFEDDEIDEVKQERMERAERQTRIMDSAQYAEFCESRQLSFSKKASKFRDWLDCSSMEIKPNVVAMEILAYLAYETVAQLVDLALLVRQDMVTKAGDPFSHAISATFIQYHNSAESTAACGVEAHSDAIQPCHIREAIRRYSHRIGPLSPFTNAYRRNGMAFLAC

SEQ ID NO: 9202 - protein, 328 aa, Homo sapiens
MVVFGTTFFNFDSFIGKTDSIEIIGKSVFPYCYHNILPLLNDSGRYSLGDARRPLHETAVLVEDVVHTQLINLLQQAAEVSQLRGARVITPEDLLFLMRKDKKKLRRLLKYMFIRDYKSKIVKGIDEDDLLEDKLSGSNNANKRQKIAQDFLNSIDQTGELLAMFEDDEIDEVKQERMERAERQTRIMDSAQYAEFCESRQLSFSKKASKFRDWLDCSSMEIKPNVVAMEILAYLAYETVAQLVDLALLVRQDMVTKAGDPFSHAISATFIQYHNSAESTAACGVEAHSDAIQPCHIREAIRRYSHRIGPLSPFTNAYRRNGMAFLAC

SEQ ID NO: 9203 - protein, 500 aa, Homo sapiens
MGAAASRRRALRSEAMSSVAAKVRAARAFGEYLSQSHPENRNGADHLLADAYSGHDGSPEMQPAPQNKRRLSLVSNGCYEGSLSEEPSIRKPAGEGPQPRVYTISGEPALLPSPEAEAIELAVVKGRRQRHPHHHSQPLRASPGGSREDVSRPCQSWAGSRQGSKECPGCAQLAPGPTPRAFGLDQPPLPETSGRRKKLERMYSVDRVSDDIPIRTWFPKENLFSFQTATTTMQAISVFRGYAERKRRKRENDSASVIQRNFRKHLRMVGSRRVKAQSSDLQSSHCTLDEAFEDLDWDTEKGLEAVACDTEGFVPPKVMLISSKVPKAEYIPTIIRRDDPSIIPILYDHEHATFEDILEEIERKLNVYHKGAKIWKMLIFCQGGPGHLYLLKNKVATFAKVEKEEDMIHFWKRLSRLMSKVNPEPNVIHIMGCYILGNPNGEKLFQNLRTLMTPYRVTFESPLELSAQGKQMIETYFDFRLYRLWKSRQHSKLLDFDDVL

SEQ ID NO: 9204 - protein, 505 aa, Homo sapiens
MGAAASRRRALRSEAMSSVAAKVRAARAFGEYLSQSHPENRNGADHLLADAYSGHDGSPEMQPAPQNKRRLSLVSNGCYEGSLSEEPSIRKPAGEGPQPRVYTISGEPALLPSPEAEAIELAVVKGRRQRHPHHHSQPLRASPGGSREDVSRPCQSWAGSRQGSKECPGCAQLAPGPTPRAFGLDQPPLPETSGRRKKLERMYSVDRVSDDIPIRTWFPKENLFSFQTATTTMQANFRKHLRMVGSRRVKAQTFAERRERSFSRSWSDPTPMKADTSHDSRDSSDLQSSHCTLDEAFEDLDWDTEKGLEAVACDTEGFVPPKVMLISSKVPKAEYIPTIIRRDDPSIIPILYDHEHATFEDILEEIERKLNVYHKGAKIWKMLIFCQGGPGHLYLLKNKVATFAKVEKEEDMIHFWKRLSRLMSKVNPEPNVIHIMGCYILGNPNGEKLFQNLRTLMTPYRVTFESPLELSAQGKQMIETYFDFRLYRLWKSRQHSKLLDFDDVL

SEQ ID NO: 9205 - protein, 530 aa, Homo sapiens
MGAAASRRRALRSEAMSSVAAKVRAARAFGEYLSQSHPENRNGADHLLADAYSGHDGSPEMQPAPQNKRRLSLVSNGCYEGSLSEEPSIRKPAGEGPQPRVYTISGEPALLPSPEAEAIELAVVKGRRQRHPHHHSQPLRASPGGSREDVSRPCQSWAGSRQGSKECPGCAQLAPGPTPRAFGLDQPPLPETSGRRKKLERMYSVDRVSDDIPIRTWFPKENLFSFQTATTTMQAISVFRGYAERKRRKRENDSASVIQRNFRKHLRMVGSRRVKAQTFAERRERSFSRSWSDPTPMKADTSHDSRDSSDLQSSHCTLDEAFEDLDWDTEKGLEAVACDTEGFVPPKVMLISSKVPKAEYIPTIIRRDDPSIIPILYDHEHATFEDILEEIERKLNVYHKGAKIWKMLIFCQGGPGHLYLLKNKVATFAKVEKEEDMIHFWKRLSRLMSKVNPEPNVIHIMGCYILGNPNGEKLFQNLRTLMTPYRVTFESPLELSAQGKQMIETYFDFRLYRLWKSRQHSKLLDFDDVL

SEQ ID NO: 9206 - protein, 802 aa, Homo sapiens
MPRIMIKGGVWRNTEDEILKAAVMKYGKNQWSRIASLLHRKSAKQCKARWYEWLDPSIKKTEWSREEEEKLLHLAKLMPTQWRTIAPIIGRTAAQCLEHYEFLLDKAAQRDNEEETTDDPRKLKPGEIDPNPETKPARPDPIDMDEDELEMLSEARARLANTQGKKAKRKAREKQLEEARRLAALQKRRELRAAGIEIQKKRKRKRGVDYNAEIPFEKKPALGFYDTSEENYQALDADFRKLRQQDLDGELRSEKEGRDRKKDKQHLKRKKESDLPSAILQTSGVSEFTKKRSKLVLPAPQISDAELQEVVKVGQASEIARQTAEESGITNSASSTLLSEYNVTNNSVALRTPRTPASQDRILQEAQNLMALTNVDTPLKGGLNTPLHESDFSGVTPQRQVVQTPNTVLSTPFRTPSNGAEGLTPRSGTTPKPVINSTPGRTPLRDKLNINPEDGMADYSDPSYVKQMERESREHLRLGLLGLPAPKNDFEIVLPENAEKELEEREIDDTYIEDAADVDARKQAIRDAERVKEMKRMHKAVQKDLPRPSEVNETILRPLNVEPPLTDLQKSEELIKKEMITMLHYDLLHHPYEPSGNKKGKTVGFGTNNSEHITYLEHNPYEKFSKEELKKAQDVLVQEMEVVKQGMSHGELSSEAYNQVWEECYSQVLYLPGQSRYTRANLASKKDRIESLEKRLEINRGHMTTEAKRAAKMEKKMKILLGGYQSRAMGLMKQLNDLWDQIEQAHLELRTFEELKKHEDSAIPRRLECLKEDVQRQQEREKELQHRYADLLLEKETLKSKF

SEQ ID NO: 9207 - protein, 658 aa, Homo sapiens
MVPRLLLRAWPRGPAVGPGAPSRPLSAGSGPGQYLQRSIVPTMHYQDSLPRLPIPKLEDTIRRYLSAQKPLLNDGQFRKTEQFCKSFENGIGKELHEQLVALDKQNKHTSYISGPWFDMYLSARDSVVLNFNPFMAFNPDPKSEYNDQLTRATNMTVSAIRFLKTLRAGLLEPEVFHLNPAKSDTITFKRLIRFVPSSLSWYGAYLVNAYPLDMSQYFRLFNSTRLPKPSRDELFTDDKARHLLVLRKGNFYIFDVLDQDGNIVSPSEIQAHLKYILSDSSPAPEFPLAYLTSENRDIWAELRQKLMSSGNEESLRKVDSAVFCLCLDDFPIKDLVHLSHNMLHGDGTNRWFDKSFNLIIAKDGSTAVHFEHSWGDGVAVLRFFNEVFKDSTQTPAVTPQSQPATTDSTVTVQKLNFELTDALKTGITAAKEKFDATMKTLTIDCVQFQRGGKEFLKKQKLSPDAVAQLAFQMAFLRQYGQTVATYESCSTAAFKHGRTETIRPASVYTKRCSEAFVREPSRHSAGELQQMMVECSKYHGQLTKEAAMGQGFDRHLFALRHLAAAKGIILPELYLDPAYGQINHNVLSTSTLSSPAVNLGGFAPVVSDGFGVGYAVHDNWIGCNVSSYPGRNAREFLQCVEKALEDMFDALEGKSIKS

SEQ ID NO: 9208 - protein, 1034 aa, Homo sapiens
MPRRKQQAPKRAAGYAQEEQLKEEEEIKEEEEEEDSGSVAQLQGGNDTGTDEELETGPEQKGCFSYQNSPGSHLSNQDAENESLLSDASDQVSDIKSVCGRDASDKKAHTHVRLPNEAHNCMDKMTAVYANILSDSYWSGLGLGFKLSNSERRNCDTRNGSNKSDFDWHQDALSKSLQQNLPSRSVSKPSLFSSVQLYRQSSKMCGTVFTGASRFRCRQCSAAYDTLVELTVHMNETGHYQDDNRKKDKLRPTSYSKPRKRAFQDMDKEDAQKVLKCMFCGDSFDSLQDLSVHMIKTKHYQKVPLKEPVPTISSKMVTPAKKRVFDVNRPCSPDSTTGSFADSFSSQKNANLQLSSNNRYGYQNGASYTWQFEACKSQILKCMECGSSHDTLQQLTTHMMVTGHFLKVTSSASKKGKQLVLDPLAVEKMQSLSEAPNSDSLAPKPSSNSASDCTASTTELKKESKKERPEETSKDEKVVKSEDYEDPLQKPLDPTIKYQYLREEDLEDGSKGGGDILKSLENTVTTAINKAQNGAPSWSAYPSIHAAYQLSEGTKPPLPMGSQVLQIRPNLTNKLRPIAPKWKVMPLVSMPTHLAPYTQVKKESEDKDEAVKECGKESPHEEASSFSHSEGDSFRKSETPPEAKKTELGPLKEEEKLMKEGSEKEKPQPLEPTSALSNGCALANHAPALPCINPLSALQSVLNNHLGKATEPLRSPSCSSPSSSTISMFHKSNLNVMDKPVLSPASTRSASVSRRYLFENSDQPIDLTKSKSKKAESSQAQSCMSPPQKHALSDIADMVKVLPKATTPKPASSSRVPPMKLEMDVRRFEDVSSEVSTLHKRKGRQSNWNPQHLLILQAQFASSLFQTSEGKYLLSDLGPQERMQISKFTGLSMTTISHWLANVKYQLRKTGGTKFLKNMDKGHPIFYCSDCASQFRTPSTYISHLESHLGFQMKDMTRLSVDQQSKVEQEISRVSSAQRSPETIAAEEDTDSKFKCKLCCRTFVSKHAVKLHLSKTHSKSPEHHSQFVTDVDEE

SEQ ID NO: 9209 - protein, 642 aa, Homo sapiens
MEGEEAEQPAWFRQPWRPGASDSAPPAGTMAQSRVLLLLLLLPPQLHLGPVLAVRAPGFGRSGGHSLSPEENEFAEEEPVLVLSPEEPGPGPAAVSCPRDCACSQEGVVDCGGIDLREFPGDLPEHTNHLSLQNNQLEKIYPEELSRLHRLETLNLQNNRLTSRGLPEKAFEHLTNLNYLYLANNKLTLAPRFLPNALISVDFAANYLTKIYGLTFGQKPNLRSVYLHNNKLADAGLPDNMFNGSSNVEVLILSSNFLRHVPKHLPPALYKLHLKNNKLEKIPPGAFSELSSLRELYLQNNYLTDEGLDNETFWKLSSLEYLDLSSNNLSRVPAGLPRSLVLLHLEKNAIRSVDANVLTPIRSLEYLLLHSNQLREQGIHPLAFQGLKRLHTVHLYNNALERVPSGLPRRVRTLMILHNQITGIGREDFATTYFLEELNLSYNRITSPQVHRDAFRKLRLLRSLDLSGNRLHTLPPGLPRNVHVLKVKRNELAALARGALVGMAQLRELYLTSNRLRSRALGPRAWVDLAHLQLLDIAGNQLTEIPEGLPESLEYLYLQNNKISAVPANAFDSTPNLKGIFLRFNKLAVGSVVDSAFRRLKHLQVLDIEGNLEFGDISKDRGRLGKEKEEEEEEEEEEEETR

SEQ ID NO: 9210 - protein, 501 aa, Homo sapiens
MQDTVTTSALLDPSHSSVSTQDNSSTGGHTSSTSPQLSKPSITPVPAKSRNPHPRANIRRMRRIIAEDPEWSLAIVPLLTELCIQHIIRNFQKNPILKQMLPEHQQKVLNHLSPDLPLAVTANLIDSENYWLRCCMHRWPVCHVAHHGGSWKRMFFERHLENLLKHFIPGTTDPAVILDLLPLCRNYVRRVHVDQFLPPVQLPAQLRPGDQSDSGSEGEMEEPTVDHYQLGDLVAGLSHLEELDLVYDVKDCGMNFEWNLFLFTYRDCLSLAAAIKACHTLKIFKLTRSKVDDDKARIIIRSLLDHPVLEELDLSQNLIGDRGARGAAKLLSHSRLRVLNLANNQVRAPGAQSLAHALAHNTNLISLNLRLNCIEDEGGQALAHALQTNKCLTTLHLGGNELSEPTATLLSQVLAINTTLTSINLSCNHIGLDGGKQLLEGMSDNKTLLEFDLRLSDVAQESEYLIGQALYANREAARQRALNPSHFMSTITANGPENSVG

SEQ ID NO: 9211 - protein, 679 aa, Homo sapiens
MNASSEGESFAGSVQSGTTVLVELTPDIHICGICKQQFNNLDAFVAHKQSGCQLTGTSAAAPSTVQFVSEETVPATQTQTTTRTITSETQTITVSAPEFVFEHGYQTYLPTESNENQTATVISLPAKSRTKKPTTPPAQKRLNCCYPGCQFKTAYGMKDMERHLKIHTGDKPHKCEVCGKCFSRKDKLKTHMRCHTGVKPYKCKTCDYAAADSSSLNKHLRIHSDERPFKCQICPYASRNSSQLTVHLRSHTGDAPFQCWLCSAKFKISSDLKRHMRVHSGEKPFKCEFCNVRCTMKGNLKSHIRIKHSGNNFKCPHCDFLGDSKATLRKHSRVHQSEHPEKCSECSYSCSSKAALRIHERIHCTDRPFKCNYCSFDTKQPSNLSKHMKKFHGDMVKTEALERKDTGRQSSRQVAKLDAKKSFHCDICDASFMREDSLRSHKRQHSEYSESKNSDVTVLQFQIDPSKQPATPLTVGHLQVPLQPSQVPQFSEGRVKIIVGHQVPQANTIVQAAAAAVNIVPPALVAQNPEELPGNSRLQILRQVSLIAPPQSSRCPSEAGAMTQPAVLLTTHEQTDGATLHQTLIPTASGGPQEGSGNQTFITSSGITCTDFEGLNALIQEGTAEVTVVSDGGQNIAVATTAPPVFSSSSQQELPKQTYSIIQGAAHPALLCPADSIPD

SEQ ID NO: 9212 - protein, 426 aa, Homo sapiens
MSRRKQAKPQHLNSEEPRPARRECAEVAPQVAGEPASELDDDVPKANCLSTESTDTPKAPVITLPSEAREQMATLGERTFNCCYPGCHFKTVHGMKDLDRHLRIHTGDKPHKCEFCDKCFSRKDNLTMHMRCHTSVKPHKCHLCDYAAVDSSSLKKHLRIHSDERPYKCQLCPYASRNSSQLTVHLRSHTGDTPFQCWLCSAKFKISSDLKRHMIVHSGEKPFKCEFCDVRCTMKANLKSHIRIKHTFKCLHCAFQGRDRADLLEHSRLHQADHPEKCPECSYSCSSAAALRVHSRVHCKDRPFKCDFCSFDTKRPSSLAKHVDKVHRDEAKTENRAPLGKEGLREGSSQHVAKIVTQRAFRCETCGASFVRDDSLRCHKKQHSDQSENKNSDLVTFPPESGASGQLSTLVSVGQLEAPLEPSQDL

SEQ ID NO: 9213 - protein, 759 aa, Homo sapiens
MVHFLHPGHTPRNIVPPDAQKDALGCCVVQEEASPYTLVNICLNVLIANLEKLCSERPDGTLCLPEHWSFPQEVAERFLRVMTWQGKLTDRTASIFRGNQMKLKLVNIQKAKISTAAFIKAFCRHKLIELNATAVHADLPVPDIISGLCSNRWIQQNLQCLLLDSTSIPQNSRLLFFSQLTGLRILSVFNVCFHTEDLANVSQLPRLESLDISNTLVTDISALLTCKDRLKSLTMHYLKCLAMTKSQILAVIRELKCLLHLDISDHRQLKSDLAFHLLQQKDILPNVVSLDISGGNCITDEAVELFIRLRPAMQFVGLLATDAGSSDFFTTKQGLRVAGGASMSQISEALSRYRNRSCFVKEALHRLFTETFSMEVTMPAILKLVAIGMRNHPLDLRVQFTASACALNLTRQGLAKGMPVRLLSEVTCLLFKALKNFPHYQQLQKNCLLSLTNSRILVDVPFDRFDAAKFVMRWLCKHENPKMQTMAVSVTSILALQLSPEQTAQLEELFMAVKELLAIVKQKTTENLDDVTFLFTLKALWNLTDGSPAACKHFIENQGLQIFIQVLETFSESAIQSKVLGLLNNIAEVRELSSKLVTEDVLKHINSLLCSREMEVSYFAAGIIAHLTSDRQLWISRDFQRRTLLQDLHATIQNWPSSSCKMTALVTYRSFKTFFPLLGNFSQPEVQLWALWAMYHVCSKNPSKYCKMLVEEEGLQLLCDIQEHSEATPKAQQIAASILDDFRMHFMNYQRPTLCQMPF

SEQ ID NO: 9214 - protein, 417 aa, Homo sapiens
MSQISEALSRYRNRSCFVKEALHRLFTETFSMEVTMPAILKLVAIGMRNHPLDLRVQFTASACALNLTRQGLAKGMPVRLLSEVTCLLFKALKNFPHYQQLQKNCLLSLTNSRILVDVPFDRFDAAKFVMRWLCKHENPKMQTMAVSVTSILALQLSPEQTAQLEELFMAVKELLAIVKQKTTENLDDVTFLFTLKALWNLTDGSPAACKHFIENQGLQIFIQVLETFSESAIQSKVLGLLNNIAEVRELSSKLVTEDVLKHINSLLCSREMEVSYFAAGIIAHLTSDRQLWISRDFQRRTLLQDLHATIQNWPSSSCKMTALVTYRSFKTFFPLLGNFSQPEVQLWALWAMYHVCSKNPSKYCKMLVEEEGLQLLCDIQEHSEATPKAQQIAASILDDFRMHFMNYQRPTLCQMPF

SEQ ID NO: 9215 - protein, 276 aa, Homo sapiens
MSRRKQAKPQHINSEEDQGEQQPQQQTPEFADAAPAAPAAGELGRSSLPSTFIRAPPTYVKVEVPGTFVGPSTLSPGMTPLLAAQPRRQAKQHGCTRCGKNFSSASALQIHERTHTGEKPFVCNICGRAFTTKGNLKVHYMTHGANNNSARRGRKLAIENTMALLGTDGKRVSEIFPKEILAPSVNVDPVVWNQYTSMLNGGLAVKTNEISVIQSGGVPTLPVSLGATSVVNNATVSKMDGSQSGISADVEKPSATDGVPKHQFPHFLEENKIAVS

SEQ ID NO: 9216 - protein, 1644 aa, Homo sapiens
MEESKTLKSENHEPKKNVICEESKAVQVIGNQTLKARNDKSVKEIENSSPNRNSSKKNKQNDICIEKTEVKSCKVNAANLPGPKDLGLVLRDQSHCKAKKFPNSPVKAEKATISQAKSEKATSLQAKAEKSPKSPNSVKAEKASSYQMKSEKVPSSPAEAEKGPSLLLKDMRQKTELQQIGKKIPSSFTSVDKVNIEAVGGEKCALQNSPRSQKQQTCTDNTGDSDDSASGIEDVSDDLSKMKNDESNKENSSEMDYLENATVIDESALTPEQRLGLKQAEERLERDHIFRLEKRSPEYTNCRYLCKLCLIHIENIQGAHKHIKEKRHKKNILEKQEESELRSLPPPSPAHLAALSVAVIELAKEHGITDDDLRVRQEIVEEMSKVITTFLPECSLRLYGSSLTRFALKSSDVNIDIKFPPKMNHPDLLIKVLGILKKNVLYVDVESDFHAKVPVVVCRDRKSGLLCRVSAGNDMACLTTDLLTALGKIEPVFIPLVLAFRYWAKLCYIDSQTDGGIPSYCFALMVMFFLQQRKPPLLPCLLGSWIEGFDPKRMDDFQLKGIVEEKFVKWECNSSSATEKNSIAEENKAKADQPKDDTKKTETDNQSNAMKEKHGKSPLALETPNRVSLGQLWLELLKFYTLDFALEEYVICVRIQDILTRENKNWPKRRIAIEDPFSVKRNVARSLNSQLVYEYVVERFRAAYRYFACPQTKGGNKSTVDFKKREKGKISNKKPVKSNNMATNGCILLGETTEKINAEREQPVQCDEMDCTSQRCIIDNNNLLVNELDFADHGQDSSSLSTSKSSEIEPKLDKKQDDLAPSETCLKKELSQCNCIDLSKSPDPDKSTGTDCRSNLETESSHQSVCTDTSATSCNCKATEDASDLNDDDNLPTQELYYVFDKFILTSGKPPTIVCSICKKDGHSKNDCPEDFRKIDLKPLPPMTNRFREILDLVCKRCFDELSPPCSEQHNREQILIGLEKFIQKEYDEKARLCLFGSSKNGFGFRDSDLDICMTLEGHENAEKLNCKEIIENLAKILKRHPGLRNILPITTAKVPIVKFEHRRSGLEGDISLYNTLAQHNTRMLATYAAIDPRVQYLGYTMKVFAKRCDIGDASRGSLSSYAYILMVLYFLQQRKPPVIPVLQEIFDGKQIPQRMVDGWNAFFFDKTEELKKRLPSLGKNTESLGELWLGLLRFYTEEFDFKEYVISIRQKKLLTTFEKQWTSKCIAIEDPFDLNHNLGAGVSRKMTNFIMKAFINGRKLFGTPFYPLIGREAEYFFDSRVLTDGELAPNDRCCRVCGKIGHYMKDCPKRKSLLFRLKKKDSEEEKEGNEEEKDSRDVLDPRDLHDTRDFRDPRDLRCFICGDAGHVRRECPEVKLARQRNSSVAAAQLVRNLVNAQQVAGSAQQQGDQSIRTRQSSECSESPSYSPQPQPFPQNSSQSAAITQPSSQPGSQPKLGPPQQGAQPPHQVQMPLYNFPQSPPAQYSPMHNMGLLPMHPLQIPAPSWPIHGPVIHSAPGSAPSNIGLNDPSIIFAQPAARPVAIPNTSHDGHWPRTVAPNSLVNSGAVGNSEPGFRGLTPPIPWEHAPRPHFPLVPASWPYGLHQNFMHQGNARFQPNKPFYTQDRCATRRCRERCPHPPRGNVSE

SEQ ID NO: 9217 - protein, 959 aa, Homo sapiens
MSTMRLLTLALLFSCSVARAACDPKIVNIGAVLSTRKHEQMFREAVNQANKRHGSWKIQLNATSVTHKPNAIQMALSVCEDLISSQVYAILVSHPPTPNDHFTPTPVSYTAGFYRIPVLGLTTRMSIYSDKSIHLSFLRTVPPYSHQSSVWFEMMRVYSWNHIILLVSDDHEGRAAQKRLETLLEERESKSKKRNYENLDQLSYDNKRGPKAEKVLQFDPGTKNVTALLMEAKELEARVIILSASEDDAATVYRAAAMLNMTGSGYVWLVGEREISGNALRYAPDGILGLQLINGKNESAHISDAVGVVAQAVHELLEKENITDPPRGCVGNTNIWKTGPLFKRVLMSSKYADGVTGRVEFNEDGDRKFANYSIMNLQNRKLVQVGIYNGTHVIPNDRKIIWPGGETEKPRGYQMSTRLKIVTIHQEPFVYVKPTLSDGTCKEEFTVNGDPVKKVICTGPNDTSPGSPRHTVPQCCYGFCIDLLIKLARTMNFTYEVHLVADGKFGTQERVNNSNKKEWNGMMGELLSGQADMIVAPLTINNERAQYIEFSKPFKYQGLTILVKKEIPRSTLDSFMQPFQSTLWLLVGLSVHVVAVMLYLLDRFSPFGRFKVNSEEEEEDALTLSSAMWFSWGVLLNSGIGEGAPRSFSARILGMVWAGFAMIIVASYTANLAAFLVLDRPEERITGINDPRLRNPSDKFIYATVKQSSVDIYFRRQVELSTMYRHMEKHNYESAAEAIQAVRDNKLHAFIWDSAVLEFEASQKCDLVTTGELFFRSGFGIGMRKDSPWKQNVSLSILKSHENGFMEDLDKTWVRYQECDSRSNAPATLTFENMAGVFMLVAGGIVAGIFLIFIEIAYKRHKDARRKQMQLAFAAVNVWRKNLQDRKSGRAEPDPKKKATFRAITSTLASSFKRRRSSKDTSTGGGRGALQNQKDTVLPRRAIEREEGQLQLCSRHRES

SEQ ID NO: 9218 - protein, 901 aa, Homo sapiens
MSTMRLLTLALLFSCSVARAACDPKIVNIGAVLSTRKHEQMFREAVNQANKRHGSWKIQLNATSVTHKPNAIQMALSVCEDLISSQVYAILVSHPPTPNDHFTPTPVSYTAGFYRIPVLGLTTRMSIYSDKSIHLSFLRTVPPYSHQSSVWFEMMRVYSWNHIILLVSDDHEGRAAQKRLETLLEERESKAEKVLQFDPGTKNVTALLMEAKELEARVIILSASEDDAATVYRAAAMLNMTGSGYVWLVGEREISGNALRYAPDGILGLQLINGKNESAHISDAVGVVAQAVHELLEKENITDPPRGCVGNTNIWKTGPLFKRVLMSSKYADGVTGRVEFNEDGDRKFANYSIMNLQNRKLVQVGIYNGTHVIPNDRKIIWPGGETEKPRGYQMSTRLKIVTIHQEPFVYVKPTLSDGTCKEEFTVNGDPVKKVICTGPNDTSPGSPRHTVPQCCYGFCIDLLIKLARTMNFTYEVHLVADGKFGTQERVNNSNKKEWNGMMGELLSGQADMIVAPLTINNERAQYIEFSKPFKYQGLTILVKKEIPRSTLDSFMQPFQSTLWLLVGLSVHVVAVMLYLLDRFSPFGRFKVNSEEEEEDALTLSSAMWFSWGVLLNSGIGEGAPRSFSARILGMVWAGFAMIIVASYTANLAAFLVLDRPEERITGINDPRLRNPSDKFIYATVKQSSVDIYFRRQVELSTMYRHMEKHNYESAAEAIQAVRDNKLHAFIWDSAVLEFEASQKCDLVTTGELFFRSGFGIGMRKDSPWKQNVSLSILKSHENGFMEDLDKTWVRYQECDSRSNAPATLTFENMAGVFMLVAGGIVAGIFLIFIEIAYKRHKDARRKQMQLAFAAVNVWRKNLQSTGGGRGALQNQKDTVLPRRAIEREEGQLQLCSRHRES

SEQ ID NO: 9219 - protein, 799 aa, Homo sapiens
MLEEETDQTYENVLAEIQSFELPVEATLRSVYDDQPNAHKKFMEKLDACIRNHDKEIEKMCNFHHQGFVDAITELLKVRTDAEKLKVQVTDTNRRFQDAGKEVIVHTEDIIRCRIQQRNITTVVEKLQLCLPVLEMYSKLKEQMSAKRYYSALKTMEQLENVYFPWVSQYRFCQLMIENLPKLREDIKEISMSDLKDFLESIRKHSDKIGETAMKQAQHQKTFSVSLQKQNKMKFGKNMYINRDRIPEERNETVLKHSLEEEDENEEEILTVQDLVDFSPVYRCLHIYSVLGDEETFENYYRKQRKKQARLVLQPQSNMHETVDGYRRYFTQIVGFFVVEDHILHVTQGLVTRAYTDELWNMALSKIIAVLRAHSSYCTDPDLVLELKNLTVIFADTLQGYGFPVNRLFDLLFEIRDQYNETLLKKWAGVFRDIFEEDNYSPIPVVNEEEYKIVISKFPFQDPDLEKQSFPKKFPMSQSVPHIYIQVKEFIYASLKFSESLHRSSTEIDDMLRKSTNLLLTRTLSSCLLNLIRKPHIGLTELVQIIINTTHLEQACKYLEDFITNITNISQETVHTTRLYGLSTFKDARHAAEGEIYTKLNQKIDEFVQLADYDWTMSEPDGRASGYLMDLINFLRSIFQVFTHLPGKVAQTACMSACQHLSTSLMQMLLDSELKQISMGAVQQFNLDVIQCELFASSEPVPGFQGDTLQLAFIDLRQLLDLFMVWDWSTYLADYGQPASKYLRVNPNTALTLLEKMKDTSKKNNIFAQFRKNDRDKQKLIETVVKQLRSLVNGMSQHM

SEQ ID NO: 9220 - protein, 943 aa, Homo sapiens
MSTMRLLTLALLFSCSVARAACDPKIVNIGAVLSTRKHEQMFREAVNQANKRHGSWKIQLNATSVTHKPNAIQMALSVCEDLISSQVYAILVSHPPTPNDHFTPTPVSYTAGFYRIPVLGLTTRMSIYSDKSIHLSFLRTVPPYSHQSSVWFEMMRVYSWNHIILLVSDDHEGRAAQKRLETLLEERESKSKKRNYENLDQLSYDNKRGPKAEKVLQFDPGTKNVTALLMEAKELEARVIILSASEDDAATVYRAAAMLNMTGSGYVWLVGEREISGNALRYAPDGILGLQLINGKNESAHISDAVGVVAQAVHELLEKENITDPPRGCVGNTNIWKTGPLFKRVLMSSKYADGVTGRVEFNEDGDRKFANYSIMNLQNRKLVQVGIYNGTHVIPNDRKIIWPGGETEKPRGYQMSTRLKIVTIHQEPFVYVKPTLSDGTCKEEFTVNGDPVKKVICTGPNDTSPGSPRHTVPQCCYGFCIDLLIKLARTMNFTYEVHLVADGKFGTQERVNNSNKKEWNGMMGELLSGQADMIVAPLTINNERAQYIEFSKPFKYQGLTILVKKEIPRSTLDSFMQPFQSTLWLLVGLSVHVVAVMLYLLDRFSPFGRFKVNSEEEEEDALTLSSAMWFSWGVLLNSGIGEGAPRSFSARILGMVWAGFAMIIVASYTANLAAFLVLDRPEERITGINDPRLRNPSDKFIYATVKQSSVDIYFRRQVELSTMYRHMEKHNYESAAEAIQAVRDNKLHAFIWDSAVLEFEASQKCDLVTTGELFFRSGFGIGMRKDSPWKQNVSLSILKSHENGFMEDLDKTWVRYQECDSRSNAPATLTFENMAGVFMLVAGGIVAGIFLIFIEIAYKRHKDARRKQMQLAFAAVNVWRKNLQDRKSGRAEPDPKKKATFRAITSTLASSFKRRRSSKDTQYHPTDITGPLNLSDPSVSTVV

SEQ ID NO: 9221 - protein, 922 aa, Homo sapiens
MSTMRLLTLALLFSCSVARAACDPKIVNIGAVLSTRKHEQMFREAVNQANKRHGSWKIQLNATSVTHKPNAIQMALSVCEDLISSQVYAILVSHPPTPNDHFTPTPVSYTAGFYRIPVLGLTTRMSIYSDKSIHLSFLRTVPPYSHQSSVWFEMMRVYSWNHIILLVSDDHEGRAAQKRLETLLEERESKSKKRNYENLDQLSYDNKRGPKAEKVLQFDPGTKNVTALLMEAKELEARVIILSASEDDAATVYRAAAMLNMTGSGYVWLVGEREISGNALRYAPDGILGLQLINGKNESAHISDAVGVVAQAVHELLEKENITDPPRGCVGNTNIWKTGPLFKRVLMSSKYADGVTGRVEFNEDGDRKFANYSIMNLQNRKLVQVGIYNGTHVIPNDRKIIWPGGETEKPRGYQMSTRLKIVTIHQEPFVYVKPTLSDGTCKEEFTVNGDPVKKVICTGPNDTSPGSPRHTVPQCCYGFCIDLLIKLARTMNFTYEVHLVADGKFGTQERVNNSNKKEWNGMMGELLSGQADMIVAPLTINNERAQYIEFSKPFKYQGLTILVKKEIPRSTLDSFMQPFQSTLWLLVGLSVHVVAVMLYLLDRFSPFGRFKVNSEEEEEDALTLSSAMWFSWGVLLNSGIGEGAPRSFSARILGMVWAGFAMIIVASYTANLAAFLVLDRPEERITGINDPRLRNPSDKFIYATVKQSSVDIYFRRQVELSTMYRHMEKHNYESAAEAIQAVRDNKLHAFIWDSAVLEFEASQKCDLVTTGELFFRSGFGIGMRKDSPWKQNVSLSILKSHENGFMEDLDKTWVRYQECDSRSNAPATLTFENMAGVFMLVAGGIVAGIFLIFIEIAYKRHKDARRKQMQLAFAAVNVWRKNLQSTGGGRGALQNQKDTVLPRRAIEREEGQLQLCSRHRES

SEQ ID NO: 9222 - protein, 152 aa, Homo sapiens
MSTPARRRLMRDFKRLQEDPPAGVSGAPSENNIMVWNAVIFGPEGTPFEDGTFKLTIEFTEEYPNKPPTVRFVSKMFHPNVYADGSICLDILQNRWSPTYDVSSILTSIQSLLDEPNPNSPANSQAAQLYQENKREYEKRVSAIVEQSWRDC

SEQ ID NO: 9223 - protein, 885 aa, Homo sapiens
MSTMRLLTLALLFSCSVARAACDPKIVNIGAVLSTRKHEQMFREAVNQANKRHGSWKIQLNATSVTHKPNAIQMALSVCEDLISSQVYAILVSHPPTPNDHFTPTPVSYTAGFYRIPVLGLTTRMSIYSDKSIHLSFLRTVPPYSHQSSVWFEMMRVYSWNHIILLVSDDHEGRAAQKRLETLLEERESKAEKVLQFDPGTKNVTALLMEAKELEARVIILSASEDDAATVYRAAAMLNMTGSGYVWLVGEREISGNALRYAPDGILGLQLINGKNESAHISDAVGVVAQAVHELLEKENITDPPRGCVGNTNIWKTGPLFKRVLMSSKYADGVTGRVEFNEDGDRKFANYSIMNLQNRKLVQVGIYNGTHVIPNDRKIIWPGGETEKPRGYQMSTRLKIVTIHQEPFVYVKPTLSDGTCKEEFTVNGDPVKKVICTGPNDTSPGSPRHTVPQCCYGFCIDLLIKLARTMNFTYEVHLVADGKFGTQERVNNSNKKEWNGMMGELLSGQADMIVAPLTINNERAQYIEFSKPFKYQGLTILVKKEIPRSTLDSFMQPFQSTLWLLVGLSVHVVAVMLYLLDRFSPFGRFKVNSEEEEEDALTLSSAMWFSWGVLLNSGIGEGAPRSFSARILGMVWAGFAMIIVASYTANLAAFLVLDRPEERITGINDPRLRNPSDKFIYATVKQSSVDIYFRRQVELSTMYRHMEKHNYESAAEAIQAVRDNKLHAFIWDSAVLEFEASQKCDLVTTGELFFRSGFGIGMRKDSPWKQNVSLSILKSHENGFMEDLDKTWVRYQECDSRSNAPATLTFENMAGVFMLVAGGIVAGIFLIFIEIAYKRHKDARRKQMQLAFAAVNVWRKNLQQYHPTDITGPLNLSDPSVSTVV

SEQ ID NO: 9224 - protein, 906 aa, Homo sapiens
MSTMRLLTLALLFSCSVARAACDPKIVNIGAVLSTRKHEQMFREAVNQANKRHGSWKIQLNATSVTHKPNAIQMALSVCEDLISSQVYAILVSHPPTPNDHFTPTPVSYTAGFYRIPVLGLTTRMSIYSDKSIHLSFLRTVPPYSHQSSVWFEMMRVYSWNHIILLVSDDHEGRAAQKRLETLLEERESKSKKRNYENLDQLSYDNKRGPKAEKVLQFDPGTKNVTALLMEAKELEARVIILSASEDDAATVYRAAAMLNMTGSGYVWLVGEREISGNALRYAPDGILGLQLINGKNESAHISDAVGVVAQAVHELLEKENITDPPRGCVGNTNIWKTGPLFKRVLMSSKYADGVTGRVEFNEDGDRKFANYSIMNLQNRKLVQVGIYNGTHVIPNDRKIIWPGGETEKPRGYQMSTRLKIVTIHQEPFVYVKPTLSDGTCKEEFTVNGDPVKKVICTGPNDTSPGSPRHTVPQCCYGFCIDLLIKLARTMNFTYEVHLVADGKFGTQERVNNSNKKEWNGMMGELLSGQADMIVAPLTINNERAQYIEFSKPFKYQGLTILVKKEIPRSTLDSFMQPFQSTLWLLVGLSVHVVAVMLYLLDRFSPFGRFKVNSEEEEEDALTLSSAMWFSWGVLLNSGIGEGAPRSFSARILGMVWAGFAMIIVASYTANLAAFLVLDRPEERITGINDPRLRNPSDKFIYATVKQSSVDIYFRRQVELSTMYRHMEKHNYESAAEAIQAVRDNKLHAFIWDSAVLEFEASQKCDLVTTGELFFRSGFGIGMRKDSPWKQNVSLSILKSHENGFMEDLDKTWVRYQECDSRSNAPATLTFENMAGVFMLVAGGIVAGIFLIFIEIAYKRHKDARRKQMQLAFAAVNVWRKNLQQYHPTDITGPLNLSDPSVSTVV

SEQ ID NO: 9225 - protein, 938 aa, Homo sapiens
MSTMRLLTLALLFSCSVARAACDPKIVNIGAVLSTRKHEQMFREAVNQANKRHGSWKIQLNATSVTHKPNAIQMALSVCEDLISSQVYAILVSHPPTPNDHFTPTPVSYTAGFYRIPVLGLTTRMSIYSDKSIHLSFLRTVPPYSHQSSVWFEMMRVYSWNHIILLVSDDHEGRAAQKRLETLLEERESKAEKVLQFDPGTKNVTALLMEAKELEARVIILSASEDDAATVYRAAAMLNMTGSGYVWLVGEREISGNALRYAPDGILGLQLINGKNESAHISDAVGVVAQAVHELLEKENITDPPRGCVGNTNIWKTGPLFKRVLMSSKYADGVTGRVEFNEDGDRKFANYSIMNLQNRKLVQVGIYNGTHVIPNDRKIIWPGGETEKPRGYQMSTRLKIVTIHQEPFVYVKPTLSDGTCKEEFTVNGDPVKKVICTGPNDTSPGSPRHTVPQCCYGFCIDLLIKLARTMNFTYEVHLVADGKFGTQERVNNSNKKEWNGMMGELLSGQADMIVAPLTINNERAQYIEFSKPFKYQGLTILVKKEIPRSTLDSFMQPFQSTLWLLVGLSVHVVAVMLYLLDRFSPFGRFKVNSEEEEEDALTLSSAMWFSWGVLLNSGIGEGAPRSFSARILGMVWAGFAMIIVASYTANLAAFLVLDRPEERITGINDPRLRNPSDKFIYATVKQSSVDIYFRRQVELSTMYRHMEKHNYESAAEAIQAVRDNKLHAFIWDSAVLEFEASQKCDLVTTGELFFRSGFGIGMRKDSPWKQNVSLSILKSHENGFMEDLDKTWVRYQECDSRSNAPATLTFENMAGVFMLVAGGIVAGIFLIFIEIAYKRHKDARRKQMQLAFAAVNVWRKNLQDRKSGRAEPDPKKKATFRAITSTLASSFKRRRSSKDTSTGGGRGALQNQKDTVLPRRAIEREEGQLQLCSRHRES

SEQ ID NO: 9226 - protein, 921 aa, Homo sapiens
MNAPERQPQPDGGDAPGHEPGGSPQDELDFSILFDYEYLNPNEEEPNAHKVASPPSGPAYPDDVLDYGLKPYSPLASLSGEPPGRFGEPDRVGPQKFLSAAKPAGASGLSPRIEITPSHELIQAVGPLRMRDAGLLVEQPPLAGVAASPRFTLPVPGFEGYREPLCLSPASSGSSASFISDTFSPYTSPCVSPNNGGPDDLCPQFQNIPAHYSPRTSPIMSPRTSLAEDSCLGRHSPVPRPASRSSSPGAKRRHSCAEALVALPPGASPQRSRSPSPQPSSHVAPQDHGSPAGYPPVAGSAVIMDALNSLATDSPCGIPPKMWKTSPDPSPVSAAPSKAGLPRHIYPAVEFLGPCEQGERRNSAPESILLVPPTWPKPLVPAIPICSIPVTASLPPLEWPLSSQSGSYELRIEVQPKPHHRAHYETEGSRGAVKAPTGGHPVVQLHGYMENKPLGLQIFIGTADERILKPHAFYQVHRITGKTVTTTSYEKIVGNTKVLEIPLEPKNNMRATIDCAGILKLRNADIELRKGETDIGRKNTRVRLVFRVHIPESSGRIVSLQTASNPIECSQRSAHELPMVERQDTDSCLVYGGQQMILTGQNFTSESKVVFTEKTTDGQQIWEMEATVDKDKSQPNMLFVEIPEYRNKHIRTPVKVNFYVINGKRKRSQPQHFTYHPVPAIKTEPTDEYDPTLICSPTHGGLGSQPYYPQHPMVAESPSCLVATMAPCQQFRTGLSSPDARYQQQNPAAVLYQRSKSLSPSLLGYQQPALMAAPLSLADAHRSVLVHAGSQGQSSALLHPSPTNQQASPVIHYSPTNQQLRCGSHQEFQHIMYCENFAPGTTRPGPPPVSQGQRLSPGSYPTVIQQQNATSQRAAKNGPPVSDQKEVLPAGVTIKQEQNLDQTYLDDELIDTHLSWIQNIL

SEQ ID NO: 9227 - protein, 861 aa, Homo sapiens
MAHYPTRLKTRKTYSWVGRPLLDRKLHYQTYREMCVKTEGCSTEIHIQIGQFVLIEGDDDENPYVAKLLELFEDDSDPPPKKRARVQWFVRFCEVPACKRHLLGRKPGAQEIFWYDYPACDSNINAETIIGLVRVIPLAPKDVVPTNLKNEKTLFVKLSWNEKKFRPLSSELFAELNKPQESAAKCQKPVRAKSKSAESPSWTPAEHVAKRIESRHSASKSRQTPTHPLTPRARKRLELGNLGNPQMSQQTSCASLDSPGRIKRKVAFSEITSPSKRSQPDKLQTLSPALKAPEKTRETGLSYTEDDKKASPEHRIILRTRIAASKTIDIREERTLTPISGGQRSSVVPSVILKPENIKKRDAKEAKAQNEATSTPHRIRRKSSVLTMNRIRQQLRFLGNSKSDQEEKEILPAAEISDSSSDEEEASTPPLPRRAPRTVSRNLRSSLKSSLHTLTKVPKKSLKPRTPRCAAPQIRSRSLAAQEPASVLEEARLRLHVSAVPESLPCREQEFQDIYNFVESKLLDHTGGCMYISGVPGTGKTATVHEVIRCLQQAAQANDVPPFQYIEVNGMKLTEPHQVYVQILQKLTGQKATANHAAELLAKQFCTRGSPQETTVLLVDELDLLWTHKQDIMYNLFDWPTHKEARLVVLAIANTMDLPERIMMNRVSSRLGLTRMCFQPYTYSQLQQILRSRLKHLKAFEDDAIQLVARKVAALSGDARRCLDICRRATEICEFSQQKPDSPGLVTIAHSMEAVDEMFSSSYITAIKNSSVLEQSFLRAILAEFRRSGLEEATFQQIYSQHVALCRMEGLPYPTMSETMAVCSHLGSCRLLLVEPSRNDLLLRVRLNVSQDDVLYALKDE

SEQ ID NO: 9228 - protein, 513 aa, Homo sapiens
MTLLPGDNSDYDYSALSCTSDASFHPAFLPQRQAIKGAFYRRAQRLRPQDEPRQGCQPEDRRRRIIINVGGIKYSLPWTTLDEFPLTRLGQLKACTNFDDILNVCDDYDVTCNEFFFDRNPGAFGTILTFLRAGKLRLLREMCALSFQEELLYWGIAEDHLDGCCKRRYLQKIEEFAEMVEREEEDDALDSEGRDSEGPAEGEGRLGRCMRRLRDMVERPHSGLPGKVFACLSVLFVTVTAVNLSVSTLPSLREEEEQGHCSQMCHNVFIVESVCVGWFSLEFLLRLIQAPSKFAFLRSPLTLIDLVAILPYYITLLVDGAAAGRRKPGAGNSYLDKVGLVLRVLRALRILYVMRLARHSLGLQTLGLTARRCTREFGLLLLFLCVAIALFAPLLYVIENEMADSPEFTSIPACYWWAVITMTTVGYGDMVPRSTPGQVVALSSILSGILLMAFPVTSIFHTFSRSYLELKQEQERVMFRRAQFLIKTKSQLSVSQDSDILFGSASSDTRDNN

SEQ ID NO: 9229 - protein, 858 aa, Homo sapiens
MMPGPRPRKGPQARGQGVAAAKQMGLFMEFGPEDMLLGMDEAEDDEDLEAELLALTGEAQTTGKKPAPKGQAPLPMAHIEKLAADCMRDVEEEEEEEGLEEDAELLTELQEVLGVDEETEPLDGDEVADPGGSEEENGLEDTEPPVQTAVLTASAPAAQAGASQGLHALLEERIHNYREAAASAKEAGEAAKARRCERGLKTLESQLASVRRGRKINEDEIPPPVALGKRPLAPQEPANRSPETDPPAPPALESDNPSQPETSLPGISAQPVSDLDPDPRALLSSRQREYKVAALSAKRAGELDRARELMRIGKRFGAVLEALEKGQPVDLSAMPPAPEDLKPQQASQAPTAPSVIPPAVERVQPVMAPDVPATPVAPTESQTVLDALQQRLNKYREAGIQARSGGDERKARMHERIAKQYQDAIRAHRAGRKVNFAELPVPPGFPPIPGLESTMGVEEDAVAATLAAAEKLASAEDSAPADKDEDEPPGHLQGEPPAQAPVAKKPARPTVPSSQRLPEPRASSSKESPSPSVREQLALLEARKLQYQRAALQAKRSQDLEQAKAYLRVAKWLEAQIIQARSGRPVDLSKVPSPLTDEEGDFILIHHEDLRLSQKAEEVYAQLQKMLLEQQEKCLLFSKQFMHQGNVAETTRFEKLAQDRKKQLEILQLAQAQGLDPPTHHFELKTFQTVRIFSELNSTEMHLIIVRGMNLPAPPGVTPDDLDAFVRFEFHYPNSDQAQKSKTAVVKNTNSPEFDQLFKLNINRNHRGFKRVIQSKGIKFEIFHKGSFFRSDKLVGTAHLKLERLENECEIREIVEVLDGRKPTGGKLEVKVRLREPLSGQDVQMVTENWLVLEPRGL

SEQ ID NO: 9230 - protein, 699 aa, Homo sapiens
MAACEGRRSGALGSSQSDFLTPPVGGAPWAVATTVVMYPPPPPPPHRDFISVTLSFGENYDNSKSWRRRSCWRKWKQLSRLQRNMILFLLAFLLFCGLLFYINLADHWKALAFRLEEEQKMRPEIAGLKPANPPVLPAPQKADTDPENLPEISSQKTQRHIQRGPPHLQIRPPSQDLKDGTQEEATKRQEAPVDPRPEGDPQRTVISWRGAVIEPEQGTELPSRRAEVPTKPPLPPARTQGTPVHLNYRQKGVIDVFLHAWKGYRKFAWGHDELKPVSRSFSEWFGLGLTLIDALDTMWILGLRKEFEEARKWVSKKLHFEKDVDVNLFESTIRILGGLLSAYHLSGDSLFLRKAEDFGNRLMPAFRTPSKIPYSDVNIGTGVAHPPRWTSDSTVAEVTSIQLEFRELSRLTGDKKFQEAVEKVTQHIHGLSGKKDGLVPMFINTHSGLFTHLGVFTLGARADSYYEYLLKQWIQGGKQETQLLEDYVEAIEGVRTHLLRHSEPSKLTFVGELAHGRFSAKMDHLVCFLPGTLALGVYHGLPASHMELAQELMETCYQMNRQMETGLSPEIVHFNLYPQPGRRDVEVKPADRHNLLRPETVESLFYLYRVTGDRKYQDWGWEILQSFSRFTRVPSGGYSSINNVQDPQKPEPRDKMESFFLGETLKYLFLLFSDDPNLLSLDAYVFNTEAHPLPIWTPA

SEQ ID NO: 9231 - protein, 2435 aa, Homo sapiens
MGFLHQLQLLLWKNVTLKRRSPWVLAFEIFIPLVLFFILLGLRQKKPTISVKEAFYTAAPLTSAGILPVMQSLCPDGQRDEFGFLQYANSTVTQLLERLDRVVEEGNLFDPARPSLGSELEALRQHLEALSAGPGTSGSHLDRSTVSSFSLDSVARNPQELWRFLTQNLSLPNSTAQALLAARVDPPEVYHLLFGPSSALDSQSGLHKGQEPWSRLGGNPLFRMEELLLAPALLEQLTCTPGSGELGRILTVPESQKGALQGYRDAVCSGQAAARARRFSGLSAELRNQLDVAKVSQQLGLDAPNGSDSSPQAPPPRRLQALLGDLLDAQKVLQDVDVLSALALLLPQGACTGRTPGPPASGAGGAANGTGAGAVMGPNATAEEGAPSAAALATPDTLQGQCSAFVQLWAGLQPILCGNNRTIEPEALRRGNMSSLGFTSKEQRNLGLLVHLMTSNPKILYAPAGSEVDRVILKANETFAFVGNVTHYAQVWLNISAEIRSFLEQGRLQQHLRWLQQYVAELRLHPEALNLSLDELPPALRQDNFSLPSGMALLQQLDTIDNAACGWIQFMSKVSVDIFKGFPDEESIVNYTLNQAYQDNVTVFASVIFQTRKDGSLPPHVHYKIRQNSSFTEKTNEIRRAYWRPGPNTGGRFYFLYGFVWIQDMMERAIIDTFVGHDVVEPGSYVQMFPYPCYTRDDFLFVIEHMMPLCMVISWVYSVAMTIQHIVAEKEHRLKEVMKTMGLNNAVHWVAWFITGFVQLSISVTALTAILKYGQVLMHSHVVIIWLFLAVYAVATIMFCFLVSVLYSKAKLASACGGIIYFLSYVPYMYVAIREEVAHDKITAFEKCIASLMSTTAFGLGSKYFALYEVAGVGIQWHTFSQSPVEGDDFNLLLAVTMLMVDAVVYGILTWYIEAVHPGMYGLPRPWYFPLQKSYWLGSGRTEAWEWSWPWARTPRLSVMEEDQACAMESRRFEETRGMEEEPTHLPLVVCVDKLTKVYKDDKKLALNKLSLNLYENQVVSFLGHNGAGKTTTMSILTGLFPPTSGSATIYGHDIRTEMDEIRKNLGMCPQHNVLFDRLTVEEHLWFYSRLKSMAQEEIRREMDKMIEDLELSNKRHSLVQTLSGGMKRKLSVAIAFVGGSRAIILDEPTAGVDPYARRAIWDLILKYKPGRTILLSTHHMDEADLLGDRIAIISHGKLKCCGSPLFLKGTYGDGYRLTLVKRPAEPGGPQEPGLASSPPGRAPLSSCSELQVSQFIRKHVASCLLVSDTSTELSYILPSEAAKKGAFERLFQHLERSLDALHLSSFGLMDTTLEEVFLKVSEEDQSLENSEADVKESRKDVLPGAEGPASGEGHAGNLARCSELTQSQASLQSASSVGSARGDEGAGYTDVYGDYRPLFDNPQDPDNVSLQEVEAEALSRVGQGSRKLDGGWLKVRQFHGLLVKRFHCARRNSKALFSQILLPAFFVCVAMTVALSVPEIGDLPPLVLSPSQYHNYTQPRGNFIPYANEERREYRLRLSPDASPQQLVSTFRLPSGVGATCVLKSPANGSLGPTLNLSSGESRLLAARFFDSMCLESFTQGLPLSNFVPPPPSPAPSDSPASPDEDLQAWNVSLPPTAGPEMWTSAPSLPRLVREPVRCTCSAQGTGFSCPSSVGGHPPQMRVVTGDILTDITGHNVSEYLLFTSDRFRLHRYGAITFGNVLKSIPASFGTRAPPMVRKIAVRRAAQVFYNNKGYHSMPTYLNSLNNAILRANLPKSKGNPAAYGITVTNHPMNKTSASLSLDYLLQGTDVVIAIFIIVAMSFVPASFVVFLVAEKSTKAKHLQFVSGCNPIIYWLANYVWDMLNYLVPATCCVIILFVFDLPAYTSPTNFPAVLSLFLLYGWSITPIMYPASFWFEVPSSAYVFLIVINLFIGITATVATFLLQLFEHDKDLKVVNSYLKSCFLIFPNYNLGHGLMEMAYNEYINEYYAKIGQFDKMKSPFEWDIVTRGLVAMAVEGVVGFLLTIMCQYNFLRRPQRMPVSTKPVEDDVDVASERQRVLRGDADNDMVKIENLTKVYKSRKIGRILAVDRLCLGVRPGECFGLLGVNGAGKTSTFKMLTGDESTTGGEAFVNGHSVLKELLQVQQSLGYCPQCDALFDELTAREHLQLYTRLRGISWKDEARVVKWALEKLELTKYADKPAGTYSGGNKRKLSTAIALIGYPAFIFLDEPTTGMDPKARRFLWNLILDLIKTGRSVVLTSHSMEECEALCTRLAIMVNGRLRCLGSIQHLKNRFGDGYMITVRTKSSQSVKDVVRFFNRNFPEAMLKERHHTKVQYQLKSEHISLAQVFSKMEQVSGVLGIEDYSVSQTTLDNVFVNFAKKQSDNLEQQETEPPSALQSPLGCLLSLLRPRSAPTELRALVADEPEDLDTEDEGLISFEEERAQLSFNTDTLC

SEQ ID NO: 9232 - protein, 298 aa, Homo sapiens
MTDAAVSFAKDFLAGGVAAAISKTAVAPIERVKLLLQVQHASKQITADKQYKGIIDCVVRIPKEQGVLSFWRGNLANVIRYFPTQALNFAFKDKYKQIFLGGVDKRTQFWLYFAGNLASGGAAGATSLCFVYPLDFARTRLAADVGKAGAEREFRGLGDCLVKIYKSDGIKGLYQGFNVSVQGIIIYRAAYFGIYDTAKGMLPDPKNTHIVISWMIAQTVTAVAGLTSYPFDTVRRRMMMQSGRKGTDIMYTGTLDCWRKIARDEGGKAFFKGAWSNVLRGMGGAFVLVLYDEIKKYT

SEQ ID NO: 9233 - protein, 1166 aa, Homo sapiens
MSGRRCAGGGAACASAAAEAVEPAARELFEACRNGDVERVKRLVTPEKVNSRDTAGRKSTPLHFAAGFGRKDVVEYLLQNGANVQARDDGGLIPLHNACSFGHAEVVNLLLRHGADPNARDNWNYTPLHEAAIKGKIDVCIVLLQHGAEPTIRNTDGRTALDLADPSAKAVLTGEYKKDELLESARSGNEEKMMALLTPLNVNCHASDGRKSTPLHLAAGYNRVKIVQLLLQHGADVHAKDKGDLVPLHNACSYGHYEVTELLVKHGACVNAMDLWQFTPLHEAASKNRVEVCSLLLSYGADPTLLNCHNKSAIDLAPTPQLKERLAYEFKGHSLLQAAREADVTRIKKHLSLEMVNFKHPQTHETALHCAAASPYPKRKQICELLLRKGANINEKTKEFLTPLHVASEKAHNDVVEVVVKHEAKVNALDNLGQTSLHRAAYCGHLQTCRLLLSYGCDPNIISLQGFTALQMGNENVQQLLQEGISLGNSEADRQLLEAAKAGDVETVKKLCTVQSVNCRDIEGRQSTPLHFAAGYNRVSVVEYLLQHGADVHAKDKGGLVPLHNACSYGHYEVAELLVKHGAVVNVADLWKFTPLHEAAAKGKYEICKLLLQHGADPTKKNRDGNTPLDLVKDGDTDIQDLLRGDAALLDAAKKGCLARVKKLSSPDNVNCRDTQGRHSTPLHLAAGYNNLEVAEYLLQHGADVNAQDKGGLIPLHNAASYGHVDVAALLIKYNACVNATDKWAFTPLHEAAQKGRTQLCALLLAHGADPTLKNQEGQTPLDLVSADDVSALLTAAMPPSALPSCYKPQVLNGVRSPGATADALSSGPSSPSSLSAASSLDNLSGSFSELSSVVSSSGTEGASSLEKKEVPGVDFSITQFVRNLGLEHLMDIFEREQITLDVLVEMGHKELKEIGINAYGHRHKLIKGVERLISGQQGLNPYLTLNTSGSGTILIDLSPDDKEFQSVEEEMQSTVREHRDGGHAGGIFNRYNILKIQKVCNKKLWERYTHRRKEVSEENHNHANERMLFHGSPFVNAIIHKGFDERHAYIGGMFGAGIYFAENSSKSNQYVYGIGGGTGCPVHKDRSCYICHRQLLFCRVTLGKSFLQFSAMKMAHSPPGHHSVTGRPSVNGLALAEYVIYRGEQAYPEYLITYQIMRPEGMVDG

SEQ ID NO: 9234 - protein, 730 aa, Homo sapiens
MFSALKKLVGSDQAPGRDKNIPAGLQSMNQALQRRFAKGVQYNMKIVIRGDRNTGKTALWHRLQGRPFVEEYIPTQEIQVTSIHWSYKTTDDIVKVEVWDVVDKGKCKKRGDGLKMENDPQEAESEMALDAEFLDVYKNCNGVVMMFDITKQWTFNYILRELPKVPTHVPVCVLGNYRDMGEHRVILPDDVRDFIDNLDSRPPGSSYFRYAESSMKNSFGLKYLHKFFNIPFLQLQRETLLRQLETNQLDMDATLEELSVQQETEDQNYGIFLEMMEARSRGHASPLAANGQSPSPGSQSPVVPAGAVSTGSSSPGTPQPAPQLPLNAAPPSSVPPVPPSEALPPPACPSAPAPRRSIISRLFGTSPATEAAPPPPEPVPAAEGPATVQSVEDFVPDDRLDRSFLEDTTPARDEKKVGAKAAQQDSDSDGEALGGNPMVAGFQDDVDLEDQPRGSPPLPAGPVPSQDITLSSEEEAEVAAPTKGPAPAPQQCSEPETKWSSIPASKPRRGTAPTRTAAPPWPGGVSVRTGPEKRSSTRPPAEMEPGKGEQASSSESDPEGPIAAQMLSFVMDDPDFESEGSDTQRRADDFPVRDDPSDVTDEDEGPAEPPPPPKLPLPAFRLKNDSDLFGLGLEEAGPKESSEEGKEGKTPSKEKKKKKKKGKEEEEKAAKKKSKHKKSKDKEEGKEERRRRQQRPPRSRERTAADELEAFLGGGAPGGRHPGGGDYEEL

SEQ ID NO: 9235 - protein, 426 aa, Homo sapiens
MEEYHTWQNFGNSHRFSFCQYPFVISVAAKKIIIQRDSEQQMINIARQSLVDKVSRRQRPDMNILFLNMKVRRTHLVSDSLDELTRKRADLKKKLKVTFVGEAGLDMGGLTKEWFLLLIRQIFHPDYGMFTYHKDSHCHWFSSFKCDNYSEFRLVGILMGLAVYNSITLDIRFPPCCYKKLLSPPIIPSDQNIPVGICNVTVDDLCQIMPELAHGLSELLSHEGNVEEDFYSTFQVFQEEFGIIKSYNLKPGGDKISVTNQNRKEYVQLYTDFLLNKSIYKQFAAFYYGFHSVCASNALMLLRPEEVEILVCGSPDLDMHALQRSTQYDGYAKTDLTIKYFWDVVLGFPLDLQKKLLHFTTGSDRVPVGGMADLNFKISKNETSTNCLPVAHTCFNQLCLPPYKSKKDLKQKLIIGISNSEGFGLE

SEQ ID NO: 9236 - protein, 207 aa, Homo sapiens
MSEAVRVPSPATPLVVAAPAPEERKGKESEREKLPPIVSAGAGATAGLDRGAKGQISTFSSFISAVSPKKEAAENRSSPAHLVFPNIKNVREPPPICLDVRQKQRTSMDASSSEMKAPVLPEPILPIQPKTVKDFQEDVEKVKSSGDWKAVHDFYLTTFDSFPELNAAFKKDATASFNTIEDSGINAKFVNAVYDTLLNTVSIMTCK

SEQ ID NO: 9237 - protein, 319 aa, Homo sapiens
MMVLKVEELVTGKKNGNGEAGEFLPEDFRDGEYEAAVTLEKQEDLKTLLAHPVTLGEQQWKSEKQREAELKKKKLEQRSKLENLEDLEIIIQLKKRKKYRKTKVPVVKEPEPEIITEPVDVPTFLKAALENKLPVVEKFLSDKNNPDVCDEYKRTALHRACLEGHLAIVEKLMEAGAQIEFRDMLESTAIHWASRGGNLDVLKLLLNKGAKISARDKLLSTALHVAVRTGHYECAEHLIACEADLNAKDREGDTPLHDAVRLNRYKMIRLLIMYGADLNIKNCAGKTPMDLVLHWQNGTKAIFDSLRENSYKTSRIATF

SEQ ID NO: 9238 - protein, 268 aa, Homo sapiens
MAVFADLDLRAGSDLKALRGLVETAAHLGYSVVAINHIVDFKEKKQEIEKPVAVSELFTTLPIVQGKSRPIKILTRLTIIVSDPSHCNVLRATSSRARLYDVVAVFPKTEKLFHIACTHLDVDLVCITVTEKLPFYFKRPPINVAIDRGLAFELVYSPAIKDSTMRRYTISSALNLMQICKGKNVIISSAAERPLEIRGPYDVANLGLLFGLSESDAKAAVSTNCRAALLHGETRKTAFGIISTVKKPRPSEGDEDCLPASKKAKCEG

SEQ ID NO: 9239 - protein, 2134 aa, Homo sapiens
MPGLDRPLSRQNPHDGVVTPAASPSLPQPGLQMPGQWGPVQGGPQPSGQHRSPCPEGPVPSGVPCATSVPHFPTPSILHQGPGHEQHSPLVAPPAALPSDGRDEVSHLQSGSHLANNSDPESTFRQNPRIVNHWASPELRQNPGVKNEHRPASALVNPLARGDSPENRTHHPLGAGAGSGCAPLEADSGASGALAMFFQGGETENEENLSSEKAGLSGQADFDDFCSSPGLGRPPAPTHVGAGSLCQALLPGPSNEAAGDVWGDTASTGVPDASGSQYENVENLEFVQNQEVLPSEPLNLDPSSPSDQFRYGPLPGPAVPRHGAVCHTGAPDATLHTVHPDSVSSSYSSRSHGRLSGSARPQELVGTFIQQEVGKPEDEASGSFFKQIDSSPVGGETDETTVSQNYRGSVSQPSTPSPPKPTGIFQTSANSSFEPVKSHLVGVKPFEADRANVVGEVRETCVRQKQCRPAAALPDASPGNLEQPPDNMETLCAPQVCPLPLNSTTEAVHMLPHAGAPPLDTVYPAPEKRPSARTQGPVKCESPATTLWAQSELPDFGGNVLLAPAAPALYVCAKPQPPVVQPPEEAMSGQQSRNPSSAAPVQSRGGIGASENLENPPKMGEEEALQSQASSGYASLLSSPPTESLQNPPVLIAQPDHSYNLAQPINFSVSLSNSHEKNQSWREALVGDRPAVSSWALGGDSGENTSLSGIPTSSVLSLSLPSSVAQSNFPQGSGASEMVSNQPANLLVQPPSQPVPENLVPESQKDRKAGSALPGFANSPAGSTSVVLVPPAHGTLVPDGNKANHSSHQEDTYGALDFTLSRTLENPVNVYNPSHSDSLASQQSVASHPRQSGPGAPNLDRFYQQVTKDAQGQPGLERAQQELVPPQQQASPPQLPKAMFSELSNPESLPAQGQAQNSAQSPASLVLVDAGQQLPPRPPQSSSVSLVSSGSGQAAVPSEQPWPQPVPALAPGPPPQDLAAYYYYRPLYDAYQPQYSLPYPPEPGAASLYYQDVYSLYEPRYRPYDGAASAYAQNYRYPEPERPSSRASHSSERPPPRQGYPEGYYSSKSGWSSQSDYYASYYSSQYDYGDPGHWDRYHYSARVRDPRTYDRRYWCDAEYDAYRREHSAFGDRPEKRDNNWRYDPRFTGSFDDDPDPHRDPYGEEVDRRSVHSEHSARSLHSAHSLASRRSSLSSHSHQSQIYRSHNVAAGSYEAPLPPGSFHGDFAYGTYRSNFSSGPGFPEYGYPADTVWPAMEQVSSRPTSPEKFSVPHVCARFGPGGQLIKVIPNLPSEGQPALVEVHSMEALLQHTSEQEEMRAFPGPLAKDDTHKVDVINFAQNKAMKCLQNENLIDKESASLLWNFIVLLCRQNGTVVGTDIAELLLRDHRTVWLPGKSPNEANLIDFTNEAVEQVEEEESGEAQLSFLTGGPAAAASSLERETERFRELLLYGRKKDALESAMKNGLWGHALLLASKMDSRTHARVMTRFANSLPINDPLQTVYQLMSGRMPAASTCCGDEKWGDWRPHLAMVLSNLNNNMDVESRTMATMGDTLASRGLLDAAHFCYLMAQAGFGVYTKKTTKLVLIGSNHSLPFLKFATNEAIQRTEAYEYAQSLGAETCPLPSFQVFKFIYSCRLAEMGLATQAFHYCEAIAKSILTQPHLYSPVLISQLVQMASQLRLFDPQLKEKPEEESLAAPTWLVHLQQVERQIKEGAGVWHQDGALPQQCPGTPSSEMEQLDRPGLSQPGALGIANPLLAVPAPSPEHSSPSVRLLPSAPQTLPDGPLASPARVPMFPVPLPPGPLEPGPGCVTPGPALGFLEPSGPGLPPGVPPLQERRHLLQEARSPDPGIVPQEAPVGNSLSELSEENFDGKFANLTPSRTVPDSEAPPGWDRADSGPTQPPLSLSPAPETKRPGQAAKKETKEPKKGESWFFRWLPGKKKTEAYLPDDKNKSIVWDEKKNQWVNLNEPEEEKKAPPPPPTSMPKTVQAAPPALPGPPGAPVNMYSRRAAGTRARYVDVLNPSGTQRSEPALAPADFVAPLAPLPIPSNLFVPTPDAEEPQLPDGTGREGPAAARGLANPEPAPEPKAPGDLPAAGGPPSGAMPFYNPAQLAQACATSGSSRLGRIGQRKHLVLN

SEQ ID NO: 9240 - protein, 1820 aa, Homo sapiens
MESNFNQEGVPRPSYVFSADPIARPSEINFDGIKLDLSHEFSLVAPNTEANSFESKDYLQVCLRIRPFTQSEKELESEGCVHILDSQTVVLKEPQCILGRLSEKSSGQMAQKFSFSKVFGPATTQKEFFQGCIMQPVKDLLKGQSRLIFTYGLTNSGKTYTFQGTEENIGILPRTLNVLFDSLQERLYTKMNLKPHRSREYLRLSSEQEKEEIASKSALLRQIKEVTVHNDSDDTLYGSLTNSLNISEFEESIKDYEQANLNMANSIKFSVWVSFFEIYNEYIYDLFVPVSSKFQKRKMLRLSQDVKGYSFIKDLQWIQVSDSKEAYRLLKLGIKHQSVAFTKLNNASSRSHSIFTVKILQIEDSEMSRVIRVSELSLCDLAGSERTMKTQNEGERLRETGNINTSLLTLGKCINVLKNSEKSKFQQHVPFRESKLTHYFQSFFNGKGKICMIVNISQCYLAYDETLNVLKFSAIAQKVCVPDTLNSSQEKLFGPVKSSQDVSLDSNSNSKILNVKRATISWENSLEDLMEDEDLVEELENAEETQNVETKLLDEDLDKTLEENKAFISHEEKRKLLDLIEDLKKKLINEKKEKLTLEFKIREEVTQEFTQYWAQREADFKETLLQEREILEENAERRLAIFKDLVGKCDTREEAAKDICATKVETEETHNYVGFEDIIDSLQDNVADIKKQAEIAHLYIASLPDPQEATACLELKFNQIKAELAKTKGELIKTKEELKKRENESDSLIQELETSNKKIITQNQRIKELINIIDQKEDTINEFQNLKSHMENTFKCNDKADTSSLIINNKLICNETVEVPKDSKSKICSERKRVNENELQQDEPPAKKGSIHVSSAITEDQKKSEEVRPNIAEIEDIRVLQENNEGLRAFLLTIENELKNEKEEKAELNKQIVHFQQELSLSEKKNLTLSKEVQQIQSNYDIAIAELHVQKSKNQEQEEKIMKLSNEIETATRSITNNVSQIKLMHTKIDELRTLDSVSQISNIDLLNLRDLSNGSEEDNLPNTQLDLLGNDYLVSKQVKEYRIQEPNRENSFHSSIEAIWEECKEIVKASSKKSHQIEELEQQIEKLQAEVKGYKDENNRLKEKEHKNQDDLLKEKETLIQQLKEELQEKNVTLDVQIQHVVEGKRALSELTQGVTCYKAKIKELETILETQKVECSHSAKLEQDILEKESIILKLERNLKEFQEHLQDSVKNTKDLNVKELKLKEEITQLTNNLQDMKHLLQLKEEEEETNRQETEKLKEELSASSARTQNLKADLQRKEEDYADLKEKLTDAKKQIKQVQKEVSVMRDEDKLLRIKINELEKKKNQCSQELDMKQRTIQQLKEQLNNQKVEEAIQQYERACKDLNVKEKIIEDMRMTLEEQEQTQVEQDQVLEAKLEEVERLATELEKWKEKCNDLETKNNQRSNKEHENNTDVLGKLTNLQDELQESEQKYNADRKKWLEEKMMLITQAKEAENIRNKEMKKYAEDRERFFKQQNEMEILTAQLTEKDSDLQKWREERDQLVAALEIQLKALISSNVQKDNEIEQLKRIISETSKIETQIMDIKPKRISSADPDKLQTEPLSTSFEISRNKIEDGSVVLDSCEVSTENDQSTRFPKPELEIQFTPLQPNKMAVKHPGCTTPVTVKIPKARKRKSNEMEEDLVKCENKKNATPRTNLKFPISDDRNSSVKKEQKVAIRPSSKKTYSLRSQASIIGVNLATKKKEGTLQKFGDFLQHSPSILQSKAKKIIETMSSSKLSNVEASKENVSQPKRAKRKLYTSEISSPIDISGQVILMDQKMKESDHQIIKRRLRTKTAK

SEQ ID NO: 9241 - protein, 762 aa, Homo sapiens
MAAAAQLSLTQLSSGNPVYEKYYRQVDTGNTGRVLASDAAAFLKKSGLPDLILGKIWDLADTDGKGILNKQEFFVALRLVACAQNGLEVSLSSLNLAVPPPRFHDTSSPLLISGTSAAELPWAVKPEDKAKYDAIFDSLSPVNGFLSGDKVKPVLLNSKLPVDILGRVWELSDIDHDGMLDRDEFAVAMFLVYCALEKEPVPMSLPPALVPPSKRKTWVVSPAEKAKYDEIFLKTDKDMDGFVSGLEVREIFLKTGLPSTLLAHIWSLCDTKDCGKLSKDQFALAFHLISQKLIKGIDPPHVLTPEMIPPSDRASLQKNIIGSSPVADFSAIKELDTLNNEIVDLQREKNNVEQDLKEKEDTIKQRTSEVQDLQDEVQRENTNLQKLQAQKQQVQELLDELDEQKAQLEEQLKEVRKKCAEEAQLARSSPELLPSGVTDENEVTTAVTEKVCSELDNNRHSKEEDPFNVDSSSLTGPVADTNLDFFQSDPFVGSDPFKDDPFGKIDPFGGDPFKGSDPFASDCFFRQSTDPFATSSTDPFSAANNSSITSVETLKHNDPFAPGGTVVAASDSATDPFASVFGNESFGGGFADFSTLSKVNNEDPFRSATSSSVSNVVITKNVFEETSVKSEDEPPALPPKIGTPTRPCPLPPGKRSINKLDSPDPFKLNDPFQPFPGNDSPKEKDPEIFCDPFTSATTTTNKEADPSNFANFSAYPSEEDMIEWAKRESEREEEQRLARLNQQEQEDLELAIALSKSEISEA

SEQ ID NO: 9242 - protein, 536 aa, Homo sapiens
MSDYENDDECWSVLEGFRVTLTSVIDPSRITPYLRQCKVLNPDDEEQVLSDPNLVIRKRKVGVLLDILQRTGHKGYVAFLESLELYYPQLYKKVTGKEPARVFSMIIDASGESGLTQLLMTEVMKLQKKVQDLTALLSSKDDFIKELRVKDSLLRKHQERVQRLKEECEAGSRELKRCKEENYDLAMRLAHQSEEKGAALMRNRDLQLEIDQLKHSLMKAEDDCKVERKHTLKLRHAMEQRPSQELLWELQQEKALLQARVQELEASVQEGKLDRSSPYIQVLEEDWRQALRDHQEQANTIFSLRKDLRQGEARRLRCMEEKEMFELQCLALRKDSKMYKDRIEAILLQMEEVAIERDQAIATREELHAQHARGLQEKDALRKQVRELGEKADELQLQVFQCEAQLLAVEGRLRRQQLETLVLSSDLEDGSPRRSQELSLPQDLEDTQLSDKGCLAGGGSPKQPFAALHQEQVLRNPHDAGLSSGEPPEKERRRLKESFENYRRKRALRKMQKGWRQGEEDRENTTGSDNTDTEGS

SEQ ID NO: 9243 - protein, 896 aa, Homo sapiens
MAAAAQLSLTQLSSGNPVYEKYYRQVDTGNTGRVLASDAAAFLKKSGLPDLILGKIWDLADTDGKGILNKQEFFVALRLVACAQNGLEVSLSSLNLAVPPPRFHDTSSPLLISGTSAAELPWAVKPEDKAKYDAIFDSLSPVNGFLSGDKVKPVLLNSKLPVDILGRVWELSDIDHDGMLDRDEFAVAMFLVYCALEKEPVPMSLPPALVPPSKRKTWVVSPAEKAKYDEIFLKTDKDMDGFVSGLEVREIFLKTGLPSTLLAHIWSLCDTKDCGKLSKDQFALAFHLISQKLIKGIDPPHVLTPEMIPPSDRASLQKNIIGSSPVADFSAIKELDTLNNEIVDLQREKNNVEQDLKEKEDTIKQRTSEVQDLQDEVQRENTNLQKLQAQKQQVQELLDELDEQKAQLEEQLKEVRKKCAEEAQLISSLKAELTSQESQISTYEEELAKAREELSRLQQETAELEESVESGKAQLEPLQQHLQDSQQEISSMQMKLMEMKDLENHNSQLNWCSSPHSILVNGATDYCSLSTSSSETANLNEHVEGQSNLESEPIHQESPARSSPELLPSGVTDENEVTTAVTEKVCSELDNNRHSKEEDPFNVDSSSLTGPVADTNLDFFQSDPFVGSDPFKDDPFGKIDPFGGDPFKGSDPFASDCFFRQSTDPFATSSTDPFSAANNSSITSVETLKHNDPFAPGGTVVAASDSATDPFASVFGNESFGGGFADFSTLSKVNNEDPFRSATSSSVSNVVITKNVFEETSVKSEDEPPALPPKIGTPTRPCPLPPGKRSINKLDSPDPFKLNDPFQPFPGNDSPKEKDPEIFCDPFTSATTTTNKEADPSNFANFSAYPSEEDMIEWAKRESEREEEQRLARLNQQEQEDLELAIALSKSEISEA

SEQ ID NO: 9244 - protein, 492 aa, Homo sapiens
MSDYENDDECWSVLEGFRVTLTSVIDPSRITPYLRQCKVLNPDDEEQVLSDPNLVIRKRKVGVLLDILQRTGHKGYVAFLESLELYYPQLYKKVTGKEPARVFSMIIDASGESGLTQLLMTEVMKLQKKVQDLTALLSSKDDFIKELRVKDSLLRKHQERVQRLKEECEAGSRELKRCKEENYDLAMRLAHQSEEKGAALMRNRDLQLEIDQLKHSLMKAEDDCKVERKHTLKLRHAMEQRPSQELLWELQQEKALLQARVQELEASVQEGKLDRSSPYIQVLEEDWRQALRDHQEQANTIFSLRKDLRQGEARRLRCMEEKEMFELQCLALRKDSKMYKDRIEAILLQMEEVAIERDQAIATREELHAQHARGLQEKDALRKQVRELGEKADELQLQVFQCEAQLLAVEGRLRRQQLETLVLSSDLEDGSPRRSQELSLPQDLEDTQLSDKGCLAGGGSPKQPFAALHQEQVLRNPHDAGPAGLPGIGAVC

SEQ ID NO: 9245 - protein, 858 aa, Homo sapiens [sequence omitted]

SEQ ID NO: 9246 - protein, 934 aa, Homo sapiens
MEERRPHLDARPRNSHTNHRGPVDGELPPRARNQANNPPANALRGGASHPGRHPRANNHPAAYWQREERFRAMGRNPHQGRRNQEGHASDEARDQRHDQENDTRWRNGNQDCRNRRPPWSNDNFQQWRTPHQKPTEQPQQAKKLGYKFLESLLQKDPSEVVITLATSLGLKELLSHSSMKSNFLELICQVLRKACSSKMDRQSVLHVLGILKNSKFLKVCLPAYVVGMITEPIPDIRNQYPEHISNIISLLQDLVSVFPASSVQETSMLVSLLPTSLNALRASGVDIEEETEKNLEKVQTIIEHLQEKRREGTLRVDTYTLVQPEAEDHVESYRTMPIYPTYNEVHLDERPFLRPNIISGKYDSTAIYLDTHFRLLREDFVRPLREGILELLQSFEDQGLRKRKFDDIRIYFDTRIITPMCSSSGIVYKVQFDTKPLKFVRWQNSKRLLYGSLVCMSKDNFETFLFATVSNREQEDLCRGIVQLCFNEQSQQLLAEVQPSDSFLMVETTAYFEAYRHVLEGLQEVQEEDVPFQRNIVECNSHVKEPRYLLMGGRYDFTPLIENPSATGEFLRNVEGLRHPRINVLDPGQWPSKEALKLDDSQMEALQFALTRELAIIQGPPGTGKTYVGLKIVQALLTNESVWQISLQKFPILVVCYTNHALDQFLEGIYNCQKTSIVRVGGRSNSEILKQFTLRELRNKREFRRNLPMHLRRAYMSIMTQMKESEQELHEGAKTLECTMRGVLREQYLQKYISPQHWESLMNGPVQDSEWICFQHWKHSMMLEWLGLGVGSFTQSVSPAGPENTAQAEGDEEEEGEEESSLIEIAEEADLIQADRVIEEEEVVRPQRRKKEESGADQELAKMLLAMRLDHCGTGTAAGQEQATGEWQTQRNQKKKMKKRVKDELRKLNTMTAAEANEIEDVWQLDLSSRWQLY

SEQ ID NO: 9247 - protein, 426 aa, Homo sapiens
MTSAGGAPGALPAGTPESSLHEALDQCMTALDLFLTNQFSEALSYLKPRTKESMYHSLTYATILEMQAMMTFDPQDILLAGNMMKEAQMLCQRHRRKSSVTDSFSSLVNRPTLGQFTEEEIHAEVCYAECLLQRAALTFLQGSSHGGAVRPRALHDPSHACSCPPGPGRQHLFLLQDENMVSFIKGGIKVRNSYQTYKELDSLVQSSQYCKGENHPHFEGGVKLGVGAFNLTLSMLPTRILRLLEFVGFSGNKDYGLLQLEEGASGHSFRSVLCVMLLLCYHTFLTFVLGTGNVNIEEAEKLLKPYLNRYPKGAIFLFFAGRIEVIKGNIDAAIRRFEECCEAQQHWKQFHHMCYWELMWCFTYKGQWKMSYFYADLLSKENCWSKATYIYMKAAYLSMFGKEDHKPFGDDEVELFRWVPHRAPTV

SEQ ID NO: 9248 - protein, 578 aa, Homo sapiens
MGQKGHKDSLYPCGGTPESSLHEALDQCMTALDLFLTNQFSEALSYLKPRTKESMYHSLTYATILEMQAMMTFDPQDILLAGNMMKEAQMLCQRHRRKSSVTDSFSSLVNRPTLGQFTEEEIHAEVCYAECLLQRAALTFLQDENMVSFIKGGIKVRNSYQTYKELDSLVQSSQYCKGENHPHFEGGVKLGVGAFNLTLSMLPTRILRLLEFVGFSGNKDYGLLQLEEGASGHSFRSVLCVMLLLCYHTFLTFVLGTGNVNIEEAEKLLKPYLNRYPKGAIFLFFAGRIEVIKGNIDAAIRRFEECCEAQQHWKQFHHMCYWELMWCFTYKGQWKMSYFYADLLSKENCWSKATYIYMKAAYLSMFGKEDHKPFGDDEVELFRAVPGLKLKIAGKSLPTEKFAIRKSRRYFSSNPISLPVPALEMMYIWNGYAVIGKQPKLTDGILEIITKAEEMLEKGPENEYSVDDECLVKLLKGLCLKYLGRVQEAEENFRSISANEKKIKYDHYLIPNALLELALLLMEQDRNEEAIKLLESAKQNYKNYSMESRTHFRIQAATLQAKSSLENSSRSMVSSVSL

SEQ ID NO: 9249 - protein, 1918 aa, Homo sapiens
MEERRPHLDARPRNSHTNHRGPVDGELPPRARNQANNPPANALRGGASHPGRHPRANNHPAAYWQREERFRAMGRNPHQGRRNQEGHASDEARDQRHDQENDTRWRNGNQDCRNRRPPWSNDNFQQWRTPHQKPTEQPQQAKKLGYKFLESLLQKDPSEVVITLATSLGLKELLSHSSMKSNFLELICQVLRKACSSKMDRQSVLHVLGILKNSKFLKVCLPAYVVGMITEPIPDIRNQYPEHISNIISLLQDLVSVFPASSVQETSMLVSLLPTSLNALRASGVDIEEETEKNLEKVQTIIEHLQEKRREGTLRVDTYTLVQPEAEDHVESYRTMPIYPTYNEVHLDERPFLRPNIISGKYDSTAIYLDTHFRLLREDFVRPLREGILELLQSFEDQGLRKRKFDDIRIYFDTRIITPMCSSSGIVYKVQFDTKPLKFVRWQNSKRLLYGSLVCMSKDNFETFLFATVSNREQEDLCRGIVQLCFNEQSQQLLAEVQPSDSFLMVETTAYFEAYRHVLEGLQEVQEEDVPFQRNIVECNSHVKEPRYLLMGGRYDFTPLIENPSATGEFLRNVEGLRHPRINVLDPGQWPSKEALKLDDSQMEALQFALTRELAIIQGPPGTGKTYVGLKIVQALLTNESVWQISLQKFPILVVCYTNHALDQFLEGIYNCQKTSIVRVGGRSNSEILKQFTLRELRNKREFRRNLPMHLRRAYMSIMTQMKESEQELHEGAKTLECTMRGVLREQYLQKYISPQHWESLMNGPVQDSEWICFQHWKHSMMLEWLGLGVGSFTQSVSPAGPENTAQAEGDEEEEGEEESSLIEIAEEADLIQADRVIEEEEVVRPQRRKKEESGADQELAKMLLAMRLDHCGTGTAAGQEQATGEWQTQRNQKKKMKKRVKDELRKLNTMTAAEANEIEDVWQLDLSSRWQLYRLWLQLYQADTRRKILSYERQYRTSAERMAELRLQEDLHILKDAQVVGMTTTGAAKYRQILQKVEPRIVIVEEAAEVLEAHTIATLSKACQHLILIGDHQQLRPSANVYDLAKNFNLEVSLFERLVKVNIPFVRLNYQHRMCPEIARLLTPHIYQDLENHPSVLKYEKIKGVSSNLFFVEHNFPEQEIQEGKSHQNQHEAHFVVELCKYFLCQEYLPSQITILTTYTGQLFCLRKLMPAKTFAGVRVHVVDKYQGEENDIILLSLVRSNQEGKVGFLQISNRICVALSRAKKGMYCIGNMQMLAKVPLWSKIIHTLRENNQIGPMLRLCCQNHPETHTLVSKASDFQKVPEGGCSLPCEFRLGCGHVCTRACHPYDSSHKEFQCMKPCQKVICQEGHRCPLVCFQECQPCQVKVPKTIPRCGHEQMVPCSVPESDFCCQEPCSKSLRCGHRCSHPCGEDCVQLCSEMVTIKLKCGHSQPVKCGHVEGLLYGGLLVKCTTKCGTILDCGHPCPGSCHSCFEGRFHERCQQPCKRLLICSHKCQEPCIGECPPCQRTCQNRCVHSQCKKKCGELCSPCVEPCVWRCQHYQCTKLCSEPCNRPPCYVPCTKLLVCGHPCIGLCGEPCPKKCRICHMDEVTQIFFGFEDEPDARFVQLEDCSHIFEVQALDRYMNEQKDDEVAIRLKVCPICQVPIRKNLRYGTSIKQRLEEIEIIKEKIQGSAGEIATSQERLKALLERKSLLHQLLPEDFLMLKEKLAQKNLSVKDLGLVENYISFYDHLASLWDSLKKMHVLEEKRVRTRLEQVHEWLAKKRLSFTSQELSDLRSEIQRLTYLVNLLTRYKIAEKKVKDSIAVEVYSVQNILEKTCKFTQEDEQLVQEKMEALKATLPCSGLGISEEERVQIVSAIGYPRGHWFKCRNGHIYVIGDCGGAMERGTCPDCKEVIGGTNHTLERSNQLASEMDGAQHAAWSDTANNLMNFEEIQGMM

SEQ ID NO: 9250 - protein, 1270 aa, Homo sapiens
MEERRPHLDARPRNSHTNHRGPVDGELPPRARNQANNPPANALRGGASHPGRHPRANNHPAAYWQREERFRAMGRNPHQGRRNQEGHASDEARDQRHDQENDTRWRNGNQDCRNRRPPWSNDNFQQWRTPHQKPTEQPQQAKKLGYKFLESLLQKDPSEVVITLATSLGLKELLSHSSMKSNFLELICQVLRKACSSKMDRQSVLHVLGILKNSKFLKVCLPAYVVGMITEPIPDIRNQYPEHISNIISLLQDLVSVFPASSVQETSMLVSLLPTSLNALRASGVDIEEETEKNLEKVQTIIEHLQEKRREGTLRVDTYTLVQPEAEDHVESYRTMPIYPTYNEVHLDERPFLRPNIISGKYDSTAIYLDTHFRLLREDFVRPLREGILELLQSFEDQGLRKRKFDDIRIYFDTRIITPMCSSSGIVYKVQFDTKPLKFVRWQNSKRLLYGSLVCMSKDNFETFLFATVSNREQEDLCRGIVQLCFNEQSQQLLAEVQPSDSFLMVETTAYFEAYRHVLEGLQEVQEEDVPFQRNIVECNSHVKEPRYLLMGGRYDFTPLIENPSATGEFLRNVEGLRHPRINVLDPGQWPSKEALKLDDSQMEALQFALTRELAIIQGPPGTGKTYVGLKIVQALLTNESVWQISLQKFPILVVCYTNHALDQFLEGIYNCQKTSIVRVGGRSNSEILKQFTLRELRNKREFRRNLPMHLRRAYMSIMTQMKESEQELHEGAKTLECTMRGVLREQYLQKYISPQHWESLMNGPVQDSEWICFQHWKHSMMLEWLGLGVGSFTQSVSPAGPENTAQAEGDEEEEGEEESSLIEIAEEADLIQADRVIEEEEVVRPQRRKKEESGADQELAKMLLAMRLDHCGTGTAAGQEQATGEWQTQRNQKKKMKKRVKDELRKLNTMTAAEANEIEDVWQLDLSSRWQLYRLWLQLYQADTRRKILSYERQYRTSAERMAELRLQEDLHILKDAQVVGMTTTGAAKYRQILQKVEPRIVIVEEAAEVLEAHTIATLSKACQHLILIGDHQQLRPSANVYDLAKNFNLEVSLFERLVKVNIPFVRLNYQHRMCPEIARLLTPHIYQDLENHPSVLKYEKIKAKSNSCRALATGMRRKHKISGMILSFFKLTIRSARFQLLLSGSWTTASFPFSRSRFAVLICRDNKRMPAVKPVSTNTGSHGLQMPGALMGETFQKGSTSRDAAACLLSSLVNKIPPRSLTWASDCCISFSSASSCRTAYTSFSIFSILSRNLRMTSQWEKIKRIYK

SEQ ID NO: 9251 - protein, 1235 aa, Homo sapiens
MPLPDGARTPGGVCREARGGGYTNRTFEFDDGQCAPRRPCAGDGALLDTAGFKMSDLDSEVLPLPPRYRFRDLLLGDPSFQNDDRVQVEFYVNENTFKERLKLFFIKNQRSSLRIRLFNFSLKLLTCLLYIVRVLLDDPALGIGCWGCPKQNYSFNDSSSEINWAPILWVERKMTLWAIQVIVAIISFLETMLLIYLSYKGNIWEQIFRVSFVLEMINTLPFIITIFWPPLRNLFIPVFLNCWLAKHALENMINDFHRAILRTQSAMFNQVLILFCTLLCLVFTGTCGIQHLERAGENLSLLTSFYFCIVTFSTVGYGDVTPKIWPSQLLVVIMICVALVVLPLQFEELVYLWMERQKSGGNYSRHRAQTEKHVVLCVSSLKIDLLMDFLNEFYAHPRLQDYYVVILCPTEMDVQVRRVLQIPLWSQRVIYLQGSALKDQDLMRAKMDNGEACFILSSRNEVDRTAADHQTILRAWAVKDFAPNCPLYVQILKPENKFHVKFADHVVCEEECKYAMLALNCICPATSTLITLLVHTSRGQEGQESPEQWQRMYGRCSGNEVYHIRMGDSKFFREYEGKSFTYAAFHAHKKYGVCLIGLKREDNKSILLNPGPRHILAASDTCFYINITKEENSAFIFKQEEKRKKRAFSGQGLHEGPARLPVHSIIASMGTVAMDLQGTEHRPTQSGGGGGGSKLALPTENGSGSRRPSIAPVLELADSSALLPCDLLSDQSEDEVTPSDDEGLSVVEYVKGYPPNSPYIGSSPTLCHLLPVKAPFCCLRLDKGCKHNSYEDAKAYGFKNKLIIVSAETAGNGLYNFIVPLRAYYRSRKELNPIVLLLDNKPDHHFLEAICCFPMVYYMEGSVDNLDSLLQCGIIYADNLVVVDKESTMSAEEDYMADAKTIVNVQTMFRLFPSLSITTELTHPSNMRFMQFRAKDSYSLALSKLEKRERENGSNLAFMFRLPFAAGRVFSISMLDTLLYQSFVKDYMITITRLLLGLDTTPGSGYLCAMKITEGDLWIRTYGRLFQKLCSSSAEIPIGIYRTESHVFSTSEPHDLRAQSQISVNVEDCEDTREVKGPWGSRAGTGGSSQGRHTGGGDPAEHPLLRRKSLQWARRLSRKAPKQAGRAAAAEWISQQRLSLYRRSERQELSELVKNRMKHLGLPTTGYDEMNDHQNTLSYVLINPPPDTRLEPSDIVYLIRSDPLAHVASSSQSRKSSCSHKLSSCNPETRDETQL

SEQ ID NO: 9252 - protein, 796 aa, Homo sapiens
MVLAQRRRGGCEKLRAGPQAVLASGSGFCDNMLADLGLIGTIGEDDEVPVEPESDSGDEEEEGPIVLGRRQKALGKNRSADFNPDFVFTEKEGTYDGSWALADVMSQLKKKRAATTLDEKIEKVRKKRKTEDKEAKSGKLEKEKEAKEGSEPKEQEDLQENDEEGSEDEASETDYSSADENILTKADTLKVKDRKKKKKKGQEAGGFFEDASQYDENLSFQDMNLSRPLLKAITAMGFKQPTPIQKACIPVGLLGKDICACAATGTGKTAAFALPVLERLIYKPRQAPVTRVLVLVPTRELGIQVHSVTRQLAQFCNITTCLAVGGLDVKSQEAALRAAPDILIATPGRLIDHLHNCPSFHLSSIEVLILDEADRMLDEYFEEQMKEIIRMCSHHRQTMLFSATMTDEVKDLASVSLKNPVRIFVNSNTDVAPFLRQEFIRIRPNREGDREAIVAALLTRTFTDHVMLFTQTKKQAHRMHILLGLMGLQVGELHGNLSQTQRLEALRRFKDEQIDILVATDVAARGLDIEGVKTVINFTMPNTIKHYVHRVGRTARAGRAGRSVSLVGEDERKMLKEIVKAAKAPVKARILPQDVILKFRDKIEKMEKDVYAVLQLEAEEKEMQQSEAQINTAKRLLEKGKEAVVQEPERSWFQTKEERKKEKIAKALQEFDLALRGKKKRKKFMKDAKKKGEMTAEERSQFEILKAQMFAERLAKRNRRAKRARAMPEEEPVRGPAKKQKQGKKSVFDEELTNTSKKALKQYRAGPSFEERKQLGLPHQRRGGNFKSKSRYKRRK

SEQ ID NO: 9253 - protein, 276 aa, Homo sapiens
MNSKRMLLLVLFAFSLMLVERYFRNHQVEELRLSDWFHPRKRPDVITKTDWLAPVLWEGTFDRRVLEKHYRRRNITVGLAVFATGRFAEEYLRPFLHSANKHFMTGYRVIFYIMVDAFFKLPDIEPSPLRTFKAFKVGTERWWLDGPLVHVKSLGEHIASHIQDEVDFLFSMAANQVFQNEFGVETLGPLVAQLHAWWYFRNTKNFPYERRPTSAACIPFGQGDFYYGNLMVGGTPHNILDFIKEYLNGVIHDIKNGLNSTYEKHLNKYFYLNKPT

SEQ ID NO: 9254 - protein, 170 aa, Homo sapiens
MKTLFLGVTLGLAAALSFTLEEEDITGTWYVKAMVVDKDFPEDRRPRKVSPVKVTALGGGNLEATFTFMREDRCIQKKILMRKTEEPGKFSAYGGRKLIYLQELPGTDDYVFYCKDQRRGGLRYMGKLVGRNPNTNLEALEEFKKLVQHKGLSEEDIFMPLQTGSCVLEH

SEQ ID NO: 9255 - protein, 494 aa, Homo sapiens
MKLGKKPMYKPVDPYSRMQSTYNYNMRGGAYPPRYFYPFPVPPLLYQVELSVGGQQFNGKGKTRQAAKHDAAAKALRILQNEPLPERLEVNGRESEEENLNKSEISQVFEIALKRNLPVNFEVARESGPPHMKNFVTKVSVGEFVGEGEGKSKKISKKNAAIAVLEELKKLPPLPAVERVKPRIKKKTKPIVKTSPEYGQGINPISRLAQIQQAKKEKEPEYTLLTERGLPRRREFVMQVKVGNHTAEGTGTNKKVAKRNAAENMLEILGFKVPQAQPTKPALKSEEKTPIKKPGDGRKVTFFEPGSGDENGTSNKEDEFRMPYLSHQQLPAGILPMVPEVAQAVGVSQGHHTKDFTRAAPNPAKATVTAMIARELLYGGTSPTAETILKNNISSGHVPHGPLTRPSEQLDYLSRVQGFQVEYKDFPKNNKNEFVSLINCSSQPPLISHGIGKDVESCHDMAALNILKLLSELDQQSTEMPRTGNGPMSVCGRC

SEQ ID NO: 9256 - protein, 485 aa, Homo sapiens
MSVPLLKIGVVLSTMAMITNWMSQTLPSLVGLNTTKLSAAGGGTLDRSTGVLPTNPEESWQVYSSAQDSEGRCICTVVAPQQTMCSRDARTKQLRQLLEKVQNMSQSIEVLDRRTQRDLQYVEKMENQMKGLESKFKQVEESHKQHLARQFKAIKAKMDELRPLIPVLEEYKADAKLVLQFKEEVQNLTSVLNELQEEIGAYDYDELQSRVSNLEERLRACMQKLACGKLTGISDPVTVKTSGSRFGSWMTDPLAPEGDNRVWYMDGYHNNRFVREYKSMVDFMNTDNFTSHRLPHPWSGTGQVVYNGSIYFNKFQSHIIIRFDLKTETILKTRSLDYAGYNNMYHYAWGGHSDIDLMVDESGLWAVYATNQNAGNIVVSRLDPVSLQTLQTWNTSYPKRSAGEAFIICGTLYVTNGYSGGTKVHYAYQTNASTYEYIDIPFQNKYSHISMLDYNPKDRALYAWNNGHQILYNVTLFHVIRSDEL

SEQ ID NO: 9257 - protein, 482 aa, Homo sapiens
MSEIRKDTLKAILLELECHFTWNLLKEDIDLFEVEDTIGQQLEFLTTKSRLALYNLLAYVKHLKGQNKDALECLEQAEEIIQQEHSDKEEVRSLVTWGNYAWVYYHMDQLEEAQKYTGKIGNVCKKLSSPSNYKLECPETDCEKGWALLKFGGKYYQKAKAAFEKALEVEPDNPEFNIGYAITVYRLDDSDREGSVKSFSLGPLRKAVTLNPDNSYIKVFLALKLQDVHAEAEGEKYIEEILDQISSQPYVLRYAAKFYRRKNSWNKALELLKKALEVTPTSSFLHHQMGLCYRAQMIQIKKATHNRPKGKDKLKVDELISSAIFHFKAAMERDSMFAFAYTDLANMYAEGGQYSNAEDIFRKALRLENITDDHKHQIHYHYGRFQEFHRKSENTAIHHYLEALKVKDRSPLRTKLTSALKKLSTKRLCHNALDVQSLSALGFVYKLEGEKRQAAEYYEKAQKIDPENAEFLTALCELRLSI

SEQ ID NO: 9258 - protein, 458 aa, Homo sapiens
MGEAPGREGRGPCPQLESPRRRRVLPTNPEESWQVYSSAQDSEGRCICTVVAPQQTMCSRDARTKQLRQLLEKVQNMSQSIEVLDRRTQRDLQYVEKMENQMKGLESKFKQVEESHKQHLARQFKAIKAKMDELRPLIPVLEEYKADAKLVLQFKEEVQNLTSVLNELQEEIGAYDYDELQSRVSNLEERLRACMQKLACGKLTGISDPVTVKTSGSRFGSWMTDPLAPEGDNRVWYMDGYHNNRFVREYKSMVDFMNTDNFTSHRLPHPWSGTGQVVYNGSIYFNKFQSHIIIRFDLKTETILKTRSLDYAGYNNMYHYAWGGHSDIDLMVDESGLWAVYATNQNAGNIVVSRLDPVSLQTLQTWNTSYPKRSAGEAFIICGTLYVTNGYSGGTKVHYAYQTNASTYEYIDIPFQNKYSHISMLDYNPKDRALYAWNNGHQILYNVTLFHVIRSDEL

SEQ ID NO: 9259 - protein, 502 aa, Homo sapiens
MKLGKKPMYKPVDPYSRMQSTYNYNMRGGAYPPRYFYPFPVPPLLYQVELSVGGQQFNGKGKTRQAAKHDAAAKALRILQNEPLPERLEVNGRESEEENLNKSEISQVFEIALKRNLPVNFESFPLKQVARESGPPHMKNFVTKVSVGEFVGEGEGKSKKISKKNAAIAVLEELKKLPPLPAVERVKPRIKKKTKPIVKPQTSPEYGQGINPISRLAQIQQAKKEKEPEYTLLTERGLPRRREFVMQVKVGNHTAEGTGTNKKVAKRNAAENMLEILGFKVPQAQPTKPALKSEEKTPIKKPGDGRKVTFFEPGSGDENGTSNKEDEFRMPYLSHQQLPAGILPMVPEVAQAVGVSQGHHTKDFTRAAPNPAKATVTAMIARELLYGGTSPTAETILKNNISSGHVPHGPLTRPSEQLDYLSRVQGFQVEYKDFPKNNKNEFVSLINCSSQPPLISHGIGKDVESCHDMAALNILKLLSELDQQSTEMPRTGNGPMSVCGRC

SEQ ID NO: 9260 - protein, 474 aa, Homo sapiens
MSEESDGKLIEDSLIQLRCHFTWKLLIEAPEIPDLENRIWEEIQFLDTKYNVGIHNLLAYVKHLKGQNEEALVSLKKAEDLIQKEHANQADIRSLVTWGNFAWVYYHMGRLAEAQTYLDKVENTCKKFANPSRYRMECPEVDCEEGWALAKCGGKNYERAKTCFEKALEGNPENPEFNTGYAITVYRLDKFNTASGRNKAFSLHVLKRAVRLNPDDVYIRVLLALKLQDEGQEAEGEKYIEEALTSISSQAYVFQYAAKFYRRKGSVDKALELLKMALETTPTSAFLHHQMGLCYRAQMIQIKEATNWQPRGQDRETVDRLVQLAICKFEKTIMLKRTFEMAYVDLAETYAEIGHHRKAEEHFQKGLRMKIFEDQLKQEIHYHYGRFQEHHGKSQDKAITHYLKGLKIEKMSHSREKLLNALEKLAKRCIHQNVRVVESVSLLGLIHKLKGEVSDALLCYERALRLAADLNPIF

SEQ ID NO: 9261 - protein, 1838 aa, Homo sapiens
MDVHTRWKARSALRPGAPLLPPLLLLLLWAPPPSRAAQPADLLKVLDFHNLPDGITKTTGFCATRRSSKGPDVAYRVTKDAQLSAPTKQLYPASAFPEDFSILTTVKAKKGSQAFLVSIYNEQGIQQIGLELGRSPVFLYEDHTGKPGPEDYPLFRGINLSDGKWHRIALSVHKKNVTLILDCKKKTTKFLDRSDHPMIDINGIIVFGTRILDEEVFEGDIQQLLFVSDHRAAYDYCEHYSPDCDTAVPDTPQSQDPNPDEYYTEGDGEGETYYYEYPYYEDPEDLGKEPTPSKKPVEAAKETTEVPEELTPTPTEAAPMPETSEGAGKEEDVGIGDYDYVPSEDYYTPSPYDDLTYGEGEENPDQPTDPGAGAEIPTSTADTSNSSNPAPPPGEGADDLEGEFTEETIRNLDENYYDPYYDPTSSPSEIGPGMPANQDTIYEGIGGPRGEKGQKGEPAIIEPGMLIEGPPGPEGPAGLPGPPGTMGPTGQVGDPGERGPPGRPGLPGADGLPGPPGTMLMLPFRFGGGGDAGSKGPMVSAQESQAQAILQQARLALRGPAGPMGLTGRPGPVGPPGSGGLKGEPGDVGPQGPRGVQGPPGPAGKPGRRGRAGSDGARGMPGQTGPKGDRGFDGLAGLPGEKGHRGDPGPSGPPGPPGDDGERGDDGEVGPRGLPGEPGPRGLLGPKGPPGPPGPPGVTGMDGQPGPKGNVGPQGEPGPPGQQGNPGAQGLPGPQGAIGPPGEKGPLGKPGLPGMPGADGPPGHPGKEGPPGEKGGQGPPGPQGPIGYPGPRGVKGADGIRGLKGTKGEKGEDGFPGFKGDMGIKGDRGEIGPPGPRGEDGPEGPKGRGGPNGDPGPLGPPGEKGKLGVPGLPGYPGRQGPKGSIGFPGFPGANGEKGGRGTPGKPGPRGQRGPTGPRGERGPRGITGKPGPKGNSGGDGPAGPPGERGPNGPQGPTGFPGPKGPPGPPGKDGLPGHPGQRGETGFQGKTGPPGPPGVVGPQGPTGETGPMGERGHPGPPGPPGEQGLPGLAGKEGTKGDPGPAGLPGKDGPPGLRGFPGDRGLPGPVGALGLKGNEGPPGPPGPAGSPGERGPAGAAGPIGIPGRPGPQGPPGPAGEKGAPGEKGPQGPAGRDGLQGPVGLPGPAGPVGPPGEDGDKGEIGEPGQKGSKGDKGEQGPPGPTGPQGPIGQPGPSGADGEPGPRGQQGLFGQKGDEGPRGFPGPPGPVGLQGLPGPPGEKGETGDVGQMGPPGPPGPRGPSGAPGADGPQGPPGGIGNPGAVGEKGEPGEAGEPGLPGEGGPPGPKGERGEKGESGPSGAAGPPGPKGPPGDDGPKGSPGPVGFPGDPGPPGEPGPAGQDGPPGDKGDDGEPGQTGSPGPTGEPGPSGPPGKRGPPGPAGPEGRQGEKGAKGEAGLEGPPGKTGPIGPQGAPGKPGPDGLRGIPGPVGEQGLPGSPGPDGPPGPMGPPGLPGLKGDSGPKGEKGHPGLIGLIGPPGEQGEKGDRGLPGPQGSSGPKGEQGITGPSGPIGPPGPPGLPGPPGPKGAKGSSGPTGPKGEAGHPGPPGPPGPPGEVIQPLPIQASRTRRNIDASQLLDDGNGENYVDYADGMEEIFGSLNSLKLEIEQMKRPLGTQQNPARTCKDLQLCHPDFPDGEYWVDPNQGCSRDSFKVYCNFTAGGSTCVFPDKKSEGARITSWPKENPGSWFSEFKRGKLLSYVDAEGNPVGVVQMTFLRLLSASAHQNVTYHCYQSVAWQDAATGSYDKALRFLGSNDEEMSYDNNPYIRALVDGCATKKGYQKTVLEIDTPKVEQVPIVDIMFNDFGEASQKFGFEVGPACFMG

SEQ ID NO: 9262 - protein, 371 aa, Homo sapiens
MEWNGLKMIISTMEPQVSNGPTSNTSNGPSSNNRNCPSPMQTGATTDDSKTNLIVNYLPQNMTQEEFRSLFGSIGEIESCKLVRDKITGQSLGYGFVNYIDPKDAEKAINTLNGLRLQTKTIKVSYARPSSASIRDANLYVSGLPKTMTQKELEQLFSQYGRIITSRILVDQVTGVSRGVGFIRFDKRIEAEEAIKGLNGQKPSGATEPITVKFANNPSQKSSQALLSQLYQSPNRRYPGPLHHQAQRFRLDNLLNMAYGVKRFSPITIDGMTSLVGMNIPGHTGTGWCIFVYNLSPDSDESVLWQLFGPFGAVNNVKVIRDFNTNKCKGFGFVTMTNYDEAAMAIASLNGYRLGDRVLQVSFKTNKAHKS

SEQ ID NO: 9263 - protein, 209 aa, Homo sapiens
RTRRNIDASQLLDDGNGENYVDYADGMEEIFGSLNSLKLEIEQMKRPLGTQQNPARTCKDLQLCHPDFPDGEYWVDPNQGCSRDSFKVYCNFTAGGSTCVFPDKKSEGSKMARWPKEQPSTWYSQYKRGSLLSYVDAEGNPVGVVQMTFLRLLSASAHQNVTYHCYQSVAWQDAATGSYDKALRFLGSNDEEMSYDNNPYIRALVDGCA

SEQ ID NO: 9264 - protein, 385 aa, Homo sapiens
MEWNGLKMIISTMEPQVSNGPTSNTSNGPSSNNRNCPSPMQTGATTDDSKTNLIVNYLPQNMTQEEFRSLFGSIGEIESCKLVRDKITGQSLGYGFVNYIDPKDAEKAINTLNGLRLQTKTIKVSYARPSSASIRDANLYVSGLPKTMTQKELEQLFSQYGRIITSRILVDQVTGVSRGVGFIRFDKRIEAEEAIKGLNGQKPSGATEPITVKFANNPSQKSSQALLSQLYQSPNRRYPGPLHHQAQRFRLDNLLNMAYGVKRLMSGPVPPSACPPRFSPITIDGMTSLVGMNIPGHTGTGWCIFVYNLSPDSDESVLWQLFGPFGAVNNVKVIRDFNTNKCKGFGFVTMTNYDEAAMAIASLNGYRLGDRVLQVSFKTNKAHKS

SEQ ID NO: 9265 - protein, 824 aa, Homo sapiens
MASESDTEEFYDAPEDVHLGGGYPVGSPGKVGLSTFKIIESIIEESQKVLQLEDDSLDSKGKELSDQATASPIVARTDLSNIPGLLAIDQVLPEESQKAESQNTFEETELELKKCFPSDETCEKPVDETTKLTQTSSTEQLNVLETETEVLNKEAVEVKGGGDVLEPVSSDSLSTKDFAAVEEVAPAKPPRHLTPEPDIVASTKKPVPARPPPPTNFPPPRPPPPSRPAPPPRKRKSELEFETLKTPDIDVPKENITSDSLLTASMASESTVKDSQPSLDLASATSGDKIVTAQENGKAPDGQTVAGEVMGPQRPRSNSGRELTDEEILASVMIKNLDTGEEIPLSLAEEKLPTGINPLTLHIMRRTKEYVSNDAAQSDDEEKLQSQPTDTDGGRLKQKTTQLKKFLGKSVKRAKHLAEEYGERAINKVKSVRDEVFHTDQDDPSSSDDEGMPYTRPVKFKAAHGFKGPYDFDQIKVVQDLSGEHMGAVWTMKFSHCGRLLASAGQDNVVRIWALKNAFDYFNNMRMKYNTEGRVSPSPSQESLSSSKSDTDTGVCSGTDEDPDDKNAPFRQRPFCKYKGHTADLLDLSWSKNYFLLSSSMDKTVRLWHISRRECLCCFQHIDFVTAIAFHPRHLKYHTQIHVRSTRGRNKVGRKITGIEPLPGENKILVTSNDSRIRLYDLRDLSLSMKYKGYVNSSSQIKASFSHDFTYLVSGSEDKYVYIWSTYHDLSKFTSVRRDRNDFWEGIKAHNAVVTSAIFAPNPSLMLSLDVQSEKSEGNEKSEDAEVLDATPSGIMKTDNTEVLLSADFTGAIKVFVNKRKNVS

SEQ ID NO: 9266 - protein, 380 aa, Homo sapiens
MVMIISTMEPQVSNGPTSNTSNGPSSNNRNCPSPMQTGATTDDSKTNLIVNYLPQNMTQEEFRSLFGSIGEIESCKLVRDKITGQSLGYGFVNYIDPKDAEKAINTLNGLRLQTKTIKVSYARPSSASIRDANLYVSGLPKTMTQKELEQLFSQYGRIITSRILVDQVTGVSRGVGFIRFDKRIEAEEAIKGLNGQKPSGATEPITVKFANNPSQKSSQALLSQLYQSPNRRYPGPLHHQAQRFRLDNLLNMAYGVKRLMSGPVPPSACPPRFSPITIDGMTSLVGMNIPGHTGTGWCIFVYNLSPDSDESVLWQLFGPFGAVNNVKVIRDFNTNKCKGFGFVTMTNYDEAAMAIASLNGYRLGDRVLQVSFKTNKAHKS

SEQ ID NO: 9267 - protein, 366 aa, Homo sapiens
MVMIISTMEPQVSNGPTSNTSNGPSSNNRNCPSPMQTGATTDDSKTNLIVNYLPQNMTQEEFRSLFGSIGEIESCKLVRDKITGQSLGYGFVNYIDPKDAEKAINTLNGLRLQTKTIKVSYARPSSASIRDANLYVSGLPKTMTQKELEQLFSQYGRIITSRILVDQVTGVSRGVGFIRFDKRIEAEEAIKGLNGQKPSGATEPITVKFANNPSQKSSQALLSQLYQSPNRRYPGPLHHQAQRFRLDNLLNMAYGVKRFSPITIDGMTSLVGMNIPGHTGTGWCIFVYNLSPDSDESVLWQLFGPFGAVNNVKVIRDFNTNKCKGFGFVTMTNYDEAAMAIASLNGYRLGDRVLQVSFKTNKAHKS

SEQ ID NO: 9268 - protein, 905 aa, Homo sapiens
MASESDTEEFYDAPEDVHLGGGYPVGSPGKVGLSTFKETENTAYKVGNESPVQELKQDVSKKIIESIIEESQKVLQLEDDSLDSKGKELSDQATASPIVARTDLSNIPGLLAIDQVLPEESQKAESQNTFEETELELKKCFPSDETCEKPVDETTKLTQTSSTEQLNVLETETEVLNKEAVEVKGGGDVLEPVSSDSLSTKDFAAVEEVAPAKPPRHLTPEPDIVASTKKPVPARPPPPTNFPPPRPPPPSRPAPPPRKRKSELEFETLKTPDIDVPKENITSDSLLTASMASESTVKDSQPSLDLASATSGDKIVTAQENGKAPDGQTVAGEVMGPQRPRSNSGRELTDEEILASVMIKNLDTGEEIPLSLAEEKLPTGINPLTLHIMRRTKEYVSNDAAQSDDEEKLQSQPTDTDGGRLKQKTTQLKKFLGKSVKRAKHLAEEYGERAINKVKSVRDEVFHTDQDDPSSSDDEGMPYTRPVKFKAAHGFKGPYDFDQIKVVQDLSGEHMGAVWTMKFSHCGRLLASAGQDNVVRIWALKNAFDYFNNMRMKYNTEGRVSPSPSQESLSSSKSDTDTGVCSGTDEDPDDKNAPFRQRPFCKYKGHTADLLDLSWSKNYFLLSSSMDKTVRLWHISRRECLCCFQHIDFVTAIAFHPRDDRYFLSGSLDGKLRLWNIPDKKVALWNEVDGQTKLITAANFCQNGKYAVIGTYDGRCIFYDTEHLKYHTQIHVRSTRGRNKVGRKITGIEPLPGENKILVTSNDSRIRLYDLRDLSLSMKYKGYVNSSSQIKASFSGSEDKYVYIWSTYHDLSKFTSVRRDRNDFWEGIKAHNAVVTSAIFAPNPSLMLSLDVQSEKSEGNEKSEDAEVLDATPSGIMKTDNTEVLLSADFTGAIKVFVNKRKNVS

SEQ ID NO: 9269 - protein, 472 aa, Homo sapiens
MSENNKNSLESSLRQLKCHFTWNLMEGENSLDDFEDKVFYRTEFQNREFKATMCNLLAYLKHLKGQNEAALECLRKAEELIQQEHADQAEIRSLVTWGNYAWVYYHMGRLSDVQIYVDKVKHVCEKFSSPYRIESPELDCEEGWTRLKCGGNQNERAKVCFEKALEKKPKNPEFTSGLAIASYRLDNWPPSQNAIDPLRQAIRLNPDNQYLKVLLALKLHKMREEGEEEGEGEKLVEEALEKAPGVTDVLRSAAKFYRRKDEPDKAIELLKKALEYIPNNAYLHCQIGCCYRAKVFQVMNLRENGMYGKRKLLELIGHAVAHLKKADEANDNLFRVCSILASLHALADQYEDAEYYFQKEFSKELTPVAKQLLHLRYGNFQLYQMKCEDKAIHHFIEGVKINQKSREKEKMKDKLQKIAKMRLSKNGADSEALHVLAFLQELNEKMQQADEDSERGLESGSLIPSASSWNGE

SEQ ID NO: 9270 - protein, 366 aa, Homo sapiens
MEQIISTMEPQVSNGPTSNTSNGPSSNNRNCPSPMQTGATTDDSKTNLIVNYLPQNMTQEEFRSLFGSIGEIESCKLVRDKITGQSLGYGFVNYIDPKDAEKAINTLNGLRLQTKTIKVSYARPSSASIRDANLYVSGLPKTMTQKELEQLFSQYGRIITSRILVDQVTGVSRGVGFIRFDKRIEAEEAIKGLNGQKPSGATEPITVKFANNPSQKSSQALLSQLYQSPNRRYPGPLHHQAQRFRLDNLLNMAYGVKRFSPITIDGMTSLVGMNIPGHTGTGWCIFVYNLSPDSDESVLWQLFGPFGAVNNVKVIRDFNTNKCKGFGFVTMTNYDEAAMAIASLNGYRLGDRVLQVSFKTNKAHKS

SEQ ID NO: 9271 - protein, 421 aa, Homo sapiens
MYAFVRFLEDNVCYALPVSCVRDFSPRSRLDFDNQKVYAVYRGPEELGAGPESPPRAPRDWGALLLHKAQILALAEDKSDLENSVMQKKIKIPKLSLNHVEEDGEVKDYGEEDLQLRHIKRPEGRKPSEVAHKSIEAVVARLEKQNGLSLGHSTCPEEVFVEASPGTEDMDSLEDAVVPRALYEELLRNYQQQQEEMRHLQQELERTRRQLVQQAKKLKEYGALVSEMKELRDLNRRLQDVLLLRLGSGPAIDLEKVKSECLEPEPELRSTFSEEANTSSYYPAPAPVMDKYILDNGKVHLGSGIWVDEEKWHQLQVTQGDSKYTKNLAVMIWGTDVLKNRSVTGVATKKKKDAVPKPPLSPHKLSIVRECLYDRIAQETVDETEIAQRLSKVNKYICEKIMDINKSCKNEERREAKYNLQ

SEQ ID NO: 9272 - protein, 556 aa, Homo sapiens
MSTATTVAPAGIPATPGPVNPPPPEVSNPSKPGRKTNQLQYMQNVVVKTLWKHQFAWPFYQPVDAIKLNLPDYHKIIKNPMDMGTIKKRLENNYYWSASECMQDFNTMFTNCYIYNKPTDDIVLMAQALEKIFLQKVAQMPQEEVELLPPAPKGKGRKPAAGAQSAGTQQVAAVSSVSPATPFQSVPPTVSQTPVIAATPVPTITANVTSVPVPPAAAPPPPATPIVPVVPPTPPVVKKKGVKRKADTTTPTTSAITASRSESPPPLSDPKQAKVVARRESGGRPIKPPKKDLEDGEVPQHAGKKGKLSEHLRYCDSILREMLSKKHAAYAWPFYKPVDAEALELHDYHDIIKHPMDLSTVKRKMDGREYPDAQGFAADVRLMFSNCYKYNPPDHEVVAMARKLQDVFEMRFAKMPDEPVEAPALPAPAAPMVSKGAESSRSSEESSSDSGSSDSEEERATRLAELQEQLKAVHEQLAALSQAPVNKPKKKKEKKEKEKKKKDKEKEKEKHKVKAEEEKKAKVAPPAKQAQQKKAPAKKANSTTTAGRDHFLTCGV

SEQ ID NO: 9273 - protein, 722 aa, Homo sapiens
MSAESGPGTRLRNLPVMGDGLETSQMSTTQAQAQPQPANAASTNPPPPETSNPNKPKRQTNQLQYLLRVVLKTLWKHQFAWPFQQPVDAVKLNLPDYYKIIKTPMDMGTIKKRLENNYYWNAQECIQDFNTMFTNCYIYNKPGDDIVLMAEALEKLFLQKINELPTEETEIMIVQAKGRGRGRKETGTAKPGVSTVPNTTQASTPPQTQTPQPNPPPVQATPHPFPAVTPDLIVQTPVMTVVPPQPLQTPPPVPPQPQPPPAPAPQPVQSHPPIIAATPQPVKTKKGVKRKADTTTPTTIDPIHEPPSLPPEPKTTKLGQRRESSRPVKPPKKDVPDSQQHPAPEKSSKVSEQLKCCSGILKEMFAKKHAAYAWPFYKPVDVEALGLHDYCDIIKHPMDMSTIKSKLEAREYRDAQEFGADVRLMFSNCYKYNPPDHEVVAMARKLQDVFEMRFAKMPDEPEEPVVAVSSPAVPPPTKVVAPPSSSDSSSDSSSDSDSSTDDSEEERAQRLAELQEQLKAVHEQLAALSQPQQNKPKKKEKDKKEKKKEKHKRKEEVEENKKSKAKEPPPKKTKKNNSSNSNVSKKEPAPMKSKPPPTYESEEEDKCKPMSYEEKRQLSLDINKLPGEKLGRVVHIIQSREPSLKNSNPDEIEIDFETLKPSTLRELERYVTSCLRKKRKPQAEKVDVIAGSSKMKGFSSSESESSSESSSSDSEDSETGPA

SEQ ID NO: 9274 - protein, 74 aa, Homo sapiens
MSTATTVAPAGIPATPGPVNPPPPEVSNPSKPGRKTNQLQYMQNVVVKTLWKHQFAWPFYQPVDAIKLNLPDYH

SEQ ID NO: 9275 - protein, 472 aa, Homo sapiens
MPKVKALQCALALEISSVTCPGVVLKDKEDIYLSICVFGQYKKTQCVPATFPLVFNARMVFEKVFPDAVDPGDVVTQLEYDTAVFELIQLVPPVGETLSTYDENTRDFMFPGPNQMSGHHDSNRQVTMRRISGLRGNAPRLEFSTTSVITECLISSRKCHTQDKFIYHLAPVEKSHGRLQNRTSRSQKKKSKSPERSKYCINAKNYEQPTISSKSHSPSPYTKRRMCELSEDTRRRLAHLNLGPYEFKKETDKPPFVIRHVDPPSPRADTLLGSSGRDCERDGWSRVHNDHSHLGCCRPKDYKVIRTPHGRDFDDSLEKCEEYLSPRSCSKPRHSARTLLVHSAPSTMPKHSPSPVLNRASLRERFHSDWCSPSNCDEIHDRDERDLEKDDELELKRSLLCRDSAYDSDPEYSSCQQPRGTFHLDDGEYWSNRAASYKGKSHRPIFENSMDKMYRNLYKKACSSASHTQESF

SEQ ID NO: 9276 - protein, 488 aa, Homo sapiens
MPKVKALQCALALEISSVTCPGVVLKDKEDIYLSICVFGQYKKTQCVPATFPLVFNARMVFEKVFPDAVDPGDVVTQLEYDTAVFELIQLVPPVGETLSTYDENTRDFMFPGPNQMSGHHDSNRQVTMRRISGLRGNAPRLEFSTTSVITECLISSRKCHTQDKFIYHLAPVEKSHGRLQNRTSRSQKKKSKSPERSKYCINAKNYEQPTISSKSHSPSPYTKRRMCELSEDTRRRLAHLNLGPYEFKKETDKPPFVIRHVDPPSPRADTLLGSSGRDCERDGWSRVHNDHSHLGCCRPKDYKVIRTPHGRDFDDSLEKCEEYLSPRSCSKPRHSARTLLVHSAPSTMPKHSPSPVLNRASLRERFHSDWCSPSNCDEIHDRVKNVLKSHQAHQRHLYDERDLEKDDELELKRSLLCRDSAYDSDPEYSSCQQPRGTFHLDDGEYWSNRAASYKGKSHRPIFENSMDKMYRNLYKKACSSASHTQESF

SEQ ID NO: 9277 - protein, 878 aa, Homo sapiens
MEQWRQCGRWLIDCKVLPPNHRVVWPSAVVFDLAQALRDGVLLCQLLHNLSPGSIDLKDINFRPQMSQFLCLKNIRTFLKVCHDKFGLRNSELFDPFDLFDVRDFGKVISAVSRLSLHSIAQNKGIRPFPSEETTENDDDVYRSLEELADEHDLGEDIYDCVPCEDGGDDIYEDIIKVEVQQPMIRYMQKMGMTEDDKRNCCLLEIQETEAKYYRTLEDIEKNYMSPLRLVLSPADMAAVFINLEDLIKVHHSFLRAIDVSVMVGGSTLAKVFLDFKERLLIYGEYCSHMEHAQNTLNQLLASREDFRQKVEECTLKVQDGKFKLQDLLVVPMQRVLKYHLLLKELLSHSAERPERQQLKEALEAMQDLAMYINEVKRDKETLRKISEFQSSIENLQVKLEEFGRPKIDGELKVRSIVNHTKQDRYLFLFDKVVIVCKRKGYSYELKEIIELLFHKMTDDPMNNKDVKKSHGKMWSYGFYLIHLQGKQGFQFFCKTEDMKRKWMEQFEMAMSNIKPDKANANHHSFQMYTFDKTTNCKACKMFLRGTFYQGYMCTKCGVGAHKECLEVIPPCKFTSPADLDASGAGPGPKMVAMQNYHGNPAPPGKPVLTFQTGDVLELLRGDPESPWWEGRLVQTRKSGYFPSSSVKPCPVDGRPPISRPPSREIDYTAYPWFAGNMERQQTDNLLKSHASGTYLIRERPAEAERFAISIKFNDEVKHIKVVEKDNWIHITEAKKFDSLLELVEYYQCHSLKESFKQLDTTLKYPYKSRERSASRASSRSPASCASYNFSFLSPQGLSFASQGPSAPFWSVFTPRVIGTAVARYNFAARDMRELSLREGDVVRIYSRIGGDQGWWKGETNGRIGWFPSTYVEEEGIQ

SEQ ID NO: 9278 - protein, 868 aa, Homo sapiens
MEQWRQCGRWLIDCKVLPPNHRVVWPSAVVFDLAQALRDGVLLCQLLHNLSPGSIDLKDINFRPQMSQFLCLKNIRTFLKVCHDKFGLRNSELFDPFDLFDVRDFGKVISAVSRLSLHSIAQNKGIRPFPSEETTENDDDVYRSLEELADEHDLGEDIYDCVPCEDGGDDIYEDIIKVEVQQPMKMGMTEDDKRNCCLLEIQETEAKYYRTLEDIEKNYMSPLRLVLSPADMAAVFINLEDLIKVHHSFLRAIDVSVMVGGSTLAKVFLDFKERLLIYGEYCSHMEHAQNTLNQLLASREDFRQKVEECTLKVQDGKFKLQDLLVVPMQRVLKYHLLLKELLSHSAERPERQQLKEALEAMQDLAMYINEVKRDKETLRKISEFQSSIENLQVKLEEFGRPKIDGELKVRSIVNHTKQDRYLFLFDKVVIVCKRKGYSYELKEIIELLFHKMTDDPMNNKDVKKWSYGFYLIHLQGKQGFQFFCKTEDMKRKWMEQFEMAMSNIKPDKANANHHSFQMYTFDKTTNCKACKMFLRGTFYQGYMCTKCGVGAHKECLEVIPPCKFTSPADLDASGAGPGPKMVAMQNYHGNPAPPGKPVLTFQTGDVLELLRGDPESPWWEGRLVQTRKSGYFPSSSVKPCPVDGRPPISRPPSREIDYTAYPWFAGNMERQQTDNLLKSHASGTYLIRERPAEAERFAISIKFNDEVKHIKVVEKDNWIHITEAKKFDSLLELVEYYQCHSLKESFKQLDTTLKYPYKSRERSASRASSRSPASCASYNFSFLSPQGLSFASQGPSAPFWSVFTPRVIGTAVARYNFAARDMRELSLREGDVVRIYSRIGGDQGWWKGETNGRIGWFPSTYVEEEGIQ

SEQ ID NO: 9279 - protein, 577 aa, Homo sapiens
MSQVQVQVQNPSAALSGSQILNKNQSLLSQPLMSIPSTTSSLPSENAGRPIQNSALPSASITSTSAAAESITPTVELNALCMKLGKKPMYKPVDPYSRMQSTYNYNMRGGAYPPRYFYPFPVPPLLYQVELSVGGQQFNGKGKTRQAAKHDAAAKALRILQNEPLPERLEVNGRESEEENLNKSEISQVFEIALKRNLPVNFEVARESGPPHMKNFVTKVSVGEFVGEGEGKSKKISKKNAAIAVLEELKKLPPLPAVERVKPRIKKKTKPIVKPQTSPEYGQGINPISRLAQIQQAKKEKEPEYTLLTERGLPRRREFVMQVKVGNHTAEGTGTNKKVAKRNAAENMLEILGFKVPQAQPTKPALKSEEKTPIKKPGDGRKVTFFEPGSGDENGTSNKEDEFRMPYLSHQQLPAGILPMVPEVAQAVGVSQGHHTKDFTRAAPNPAKATVTAMIARELLYGGTSPTAETILKNNISSGHVPHGPLTRPSEQLDYLSRVQGFQVEYKDFPKNNKNEFVSLINCSSQPPLISHGIGKDVESCHDMAALNILKLLSELDQQSTEMPRTGNGPMSVCGRC

SEQ ID NO: 9280 - protein, 368 aa, Homo sapiens
MSYFGKFYLVGLDARKAADWLFSADVSRPPGSTVYTCMLNHRGGTESDLTVSRLAPSHQASPLAPAFEGDGYYLAMGGAVAQHNWSHITTVLQDQKSQCQLIDSSEDLGMISIQGPASRAILQEVLDADLSNEAFPFSTHKLLRAAGHLVRAMRLSFVGELGWELHIPKASCVPVYRAVMAAGAKHGLINAGYRAIDSLSIEKGYRHWHADLRPDDSPLEAGLAFTCKLKSPVPFLGREALEQQRAAGLRRRLVCFTMEEPLWTRPHPAVSGAPAFSTASSSKVPMFGLEAIWRNGQVVGHVRRADFGFAIDKTIAYGYIHDPSGGPVSLDFVKSGDYALERMGVTYGAQAHLKSPFDPNNKRVKGIY

SEQ ID NO: 9281 - protein, 918 aa, Homo sapiens
MASLSRALRVAAAHPRQSPTRGMGPCNLSSAAGPTAEKSVPYQRTLKEGQGTSVVAQGPSRPLPSTANVVVIGGGSLGCQTLYHLAKLGMSGAVLLERERLTSGTTWHTAGLLWQLRPSDVEVELLAHTRRVVSRELEEETGLHTGWIQNGGLFIASNRQRLDEYKRLMSLGKAYGVESHVLSPAETKTLYPLMNVDDLYGTLYVPHDGTMDPAGTCTTLARAASARGAQVIENCPVTGIRVWTDDFGVRRVAGVETQHGSIQTPCVVNCAGVWASAVGRMAGVKVPLVAMHHAYVVTERIEGIQNMPNVRDHDASVYLRLQGDALSVGGYEANPIFWEEVSDKFAFGLFDLDWEVFTQHIEGAINRVPVLEKTGIKSTVCGPESFTPDHKPLMGEAPELRGFFLGCGFNSAGMMLGGGCGQELAHWIIHGRPEKDMHGYDIRRFHHSLTDHPRWIRERSHESYAKNYSVVFPHDEPLAGRNMRRDPLHEELLGQGCVFQERHGWERPGWFHPRGPAPVLEYDYYGAYGSRAHEDYAYRRLLADEYTFAFPPHHDTIKKECLACRGAAAVFDMSYFGKFYLVGLDARKAADWLFSADVSRPPGSTVYTCMLNHRGGTESDLTVSRLAPSHQASPLAPAFEGDGYYLAMGGAVAQHNWSHITTVLQDQKSQCQLIDSSEDLGMISIQGPASRAILQEVLDADLSNEAFPFSTHKLLRAAGHLVRAMRLSFVGELGWELHIPKASCVPVYRAVMAAGAKHGLINAGYRAIDSLSIEKGYRHWHADLRPDDSPLEAGLAFTCKLKSPVPFLGREALEQQRAAGLRRRLVCFTMEDKVPMFGLEAIWRNGQVVGHVRRADFGFAIDKTIAYGYIHDPSGGPVSLDFVKSGDYALERMGVTYGAQAHLKSPFDPNNKRVKGIY

SEQ ID NO: 9282 - protein, 604 aa, Homo sapiens
MGLSSHLQSSKAGPTRIFTSNTHSSVVLQGFDQLRLEGLLCDVTLMPGDTDDAFPVHRVMMASASDYFKAMFTGGMKEQDLMCIKLHGVSKVGLRKIIDFIYTAKLSLNMDNLQDTLEAASFLQILPVLDFCKVFLISGVTLDNCVEVGRIANTYNLTEVDKYVNSFVLKNFPALLSTGEFLKLPFERLAFVLSSNSLKHCTELELFKATCRWLRLEEPRMDFAAKLMKNIRFPLMTPQELINYVQTVDFMRTDNTCVNLLLEASNYQMMPYMQPVMQSDRTAIRSDTTHLVTLGGVLRQQLVVSKELRMYDEKAHEWKSLAPMDAPRYQHGIAVIGNFLYVVGGQSNYDTKGKTAVDTVFRFDPRYNKWMQVASLNEKRTFFHLSALKGYLYAVGGRNAAGELPTVECYNPRTNEWTYVAKMSEPHYGHAGTVYGGVMYISGGITHDTFQKELMCFDPDTDKWIQKAPMTTVRGLHCMCTVGERLYVIGGNHFRGTSDYDDVLSCEYYSPILDQWTPIAAMLRGQSDVGVAVFENKIYVVGGYSWNNRCMVEIVQKYDPDKDEWHKVFDLPESLGGIRACTLTVFPPEETTPSPSRESPLSAP

SEQ ID NO: 9283 - protein, 1288 aa, Homo sapiens
MEPIYPFARPQMNTRFPSSRMVPFHFPPSKCALWNPTPTGDFIYLHLSYYRNPKLVVTEKTIRLAYRHAKQNKKNSSCFLLGSLTADEDEEGVTLTVDRFDPGREVPECLEITPTASLPGDFLIPCKVHTQELCSREMIVHSVDDFSSALKALQCHICSKDSLDCGKLLSLRVHITSRESLDSVEFDLHWAAVTLANNFKCTPVKPIPIIPTALARNLSSNLNISQVQGTYKYGYLTMDETRKLLLLLESDPKVYSLPLVGIWLSGITHIYSPQVWACCLRYIFNSSVQERVFSESGNFIIVLYSMTHKEPEFYECFPCDGKIPDFRFQLLTSKETLHLFKNVEPPDKNPIRCELSAESQNAETEFFSKASKNFSIKRSSQKLSSGKMPIHDHDSGVEDEDFSPRPIPSPHPVSQKISKIQPSVPELSLVLDGNFIESNPLPTPLEMVNNENPPLINHLEHLKPLQPQLYDEKHSPEVEAGEPSLRGIPNQLNQDKPALLRHCKVRQPPAYKKGNPHTRNSIKPSSHNGPSHDIFEKLQTVSAGNVQNEEYPIRPSTLNSRQSSLAPQSQPHDFVFSPHNSGRPMELQIPTPPLPSYCSTNVCRCCQHHSHIQYSPLNSWQGANTVGSIQDVQSEALQKHSLFHPSGCPALYCNAFCSSSSPIALRPQGDMGSCSPHSNIEPSPVARPPSHMDLCNPQPCTVCMHTPKTESDNGMMGLSPDAYRFLTEQDRQLRLLQAQIQRLLEAQSLMPCSPKTTAVEDTVQAGRQMELVSVEAQSSPGLHMRKGVSIAVSTGASLFWNAAGEDQEPDSQMKQDDTKISSEDMNFSVDINNEVTSLPGSASSLKAVDIPSFEESNIAVEEEFNQPLSVSNSSSLVVRKEPDVPVFFPSGQLAESVSMCLQTGPTGGASNNSETSEEPKIEHVMQPLLHQPSDNQKIYQDLLGQVNHLLNSSSKETEQPSTKAVIISHECTRTQNVYHTKKKTHHSRLVDKDCVLNATLKQLRSLGVKIDSPTKVKKNAHNVDHASVLACISPEAVISGLNCMSFANVGMSGLSPNGVDLSMEANAIALKYLNENQLSQLSVTRSNQNNCDPFSLLHINTDRSTVGLSLISPNNMSFATKKYMKRYGLLQSSDNSEDEEEPPDNADSKSEYLLNQNLRSIPEQLGGQKEPSKNDHEIINCSNCESVGTNADTPVLRNITNEVLQTKAKQQLTEKPAFLVKNLKPSPAVNLRTGKAEFTQHPEKENEGDITIFPESLQPSETLKQMNSMNSVGTFLDVKRLRQLPKLF

SEQ ID NO: 9284 - protein, 421 aa, Homo sapiens
MSVSVLSPSRRLGGVSGILQVTSLLILLLLLIKAAQLYLHRQWLLKALQQFPCPPSHWLFGHIQEFQHDQELQRIQERVKTFPSACPYWIWGGKVRVQLYDPDYMKVILGRSDPKSHGSYKFLAPRIGYGLLLLNGQTWFQHRRMLTPAFHNDILKPYVGLMADSVRVMLDKWEELLGQDSPLEVFQHVSLMTLDTIMKSAFSHQGSIQVDRPSDPTEEGSTTEGGGAGEDQEEEALGFSGHPPLGQRAPGLPRPCWCSGWNCFRNHLDQMPYTTMCIKEALRLYPPVPGIGRELSTPVTFPDGRSLPKGIMVLLSIYGLHHNPKVWPNLEVFDPSRFAPGSAQHSHAFLPFSGGSRNCIGKQFAMNQLKVARALTLLRFELLPDPTRIPIPMARLVLKSKNGIHLRLRRLPNPCEDKDQL

SEQ ID NO: 9285 - protein, 519 aa, Homo sapiens
MSVSVLSPSRRLGGVSGILQVTSLLILLLLLIKAAQLYLHRQWLLKALQQFPCPPSHWLFGHIQEFQHDQELQRIQERVKTFPSACPYWIWGGKVRVQLYDPDYMKVILGRSDPKSHGSYKFLAPRIGYGLLLLNGQTWFQHRRMLTPAFHNDILKPYVGLMADSVRVMLDKWEELLGQDSPLEVFQHVSLMTLDTIMKSAFSHQGSIQVDRNSQSYIQAISDLNSLVFCCMRNAFHENDTIYSLTSAGRWTHRACQLAHQHTDQVIQLRKAQLQKEGELEKIKRKRHLDFLDILLLAKMENGSILSDKDLRAEVDTFMFEGHDTTASGISWILYALATHPKHQERCREEIHGLLGDGASITWNHLDQMPYTTMCIKEALRLYPPVPGIGRELSTPVTFPDGRSLPKGIMVLLSIYGLHHNPKVWPNLEVFDPSRFAPGSAQHSHAFLPFSGGSRNCIGKQFAMNQLKVARALTLLRFELLPDPTRIPIPMARLVLKSKNGIHLRLRRLPNPCEDKDQL

SEQ ID NO: 9286 - protein, 760 aa, Homo sapiens
SILRKVAWDYGRLALVTDADSVASAMHGDSHDRYERLTSVSSSVDFDQRDNGFCSWLTAIFRIKDDEIRDKCGGDAVHYLSFQRHIIGLLVVVGVLSVGIVLPVNFSGDLLENNAYSFGRTTIANLKSGNNLLWLHTSFAFLYLLLTVYSMRRHTSKMRYKEDDLVKRTLFINGISKYAESEKIKKHFEEAYPNCTVLEARPCYNVARLMFLDAERKKAERGKLYFTNLQSKENVPTMINPKPCGHLCCCVVRGCEQVEAIEYYTKLEQKLKEDYKREKEKVNEKPLGMAFVTFHNETITAIILKDFNVCKCQGCTCRGEPRPSSCSESLHISNWTVSYAPDPQNIYWEHLSIRGFIWWLRCLVINVVLFILLFFLTTPAIIITTMDKFNVTKPVEYLNNPIITQFFPTLLLWCFSALLPTIVYYSAFFEAHWTRSGENRTTMHKCYTFLIFMVLLLPSLGLSSLDLFFRWLFDKKFLAEAAIRFECVFLPDNGAFFVNYVIASAFIGNAMDLLRIPGLLMYMIRLCLARSAAERRNVKRHQAYEFQFGAAYAWMMCVFTVVMTYSITCPIIVPFGLMYMLLKHLVDRYNLYYAYLPAKLDKKIHSGAVNQVVAAPILCLFWLLFFSTMRTGFLAPTSMFTFVVLVITIVICLCHVCFGHFKYLSAHNYKIEHTETDTVDPRSNGRPPTAAAVPKSAKYIAQVLQDSEVDGDGDGAPGSSGDEPPSSSSQDEELLMPPDALTDTDFQSCEDSLIENEIHQ

SEQ ID NO: 9287 - protein, 520 aa, Homo sapiens [sequence omitted]

SEQ ID NO: 9288 - protein, 455 aa, Homo sapiens
MSVSVLSPSRLLGDVSGILQAASLLILLLLLIKAVQLYLHRQWLLKALQQFPCPPSHWLFGHIQELQQDQELQRIQKWVETFPSACPHWLWGGKVRVQLYDPDYMKVILGRSDPKSHGSYRFLAPWIGYGLLLLNGQTWFQHRRMLTPAFHYDILKPYVGLMADSVRVMLDKWEELLGQDSPLEVFQHVSLMTLDTIMKCAFSHQGSIQVDRNSQSYIQAISDLNNLVFSRVRNAFHQNDTIYSLTSAGRWTHRACQLAHQHTDQVIQLRKAQLQKEGELEKIKRKRHLDFLDILLLAKMENGSILSDKDLRAEVDTFMFEGHDTTASGISWILYALATHPKHQERCREEIHSLLGDGASITWNHLDQMPYTTMCIKEALRLYPPVPGIGRELSTPVTFPDGRSLPKGIMVLLSIYGLHHNPKVWPNPEVFDPFRFAPGSAQHSHAFLPFSGGSR

SEQ ID NO: 9289 - protein, 1785 aa, Homo sapiens
MQESQTKSMFVSRALEKILADKEVKRPQHSQLRRACQVALDEIKAEIEKQRLGTAAPPKANFIEADKYFLPFELACQSKSPRVVSTSLDCLQKLIAYGHITGNAPDSGAPGKRLIDRIVETICSCFQGPQTDEGVQLQIIKALLTAVTSPHIEIHEGTILQTVRTCYNIYLASKNLINQTTAKATLTQMLNVIFTRMENQVLQEARELEKPIQSKPQSPVIQAAAVSPKFVRLKHSQAQSKPTTPEKTDLTNGEHARSDSGKVSTENGDAPRERGSSLSGTDDGAQEVVKDILEDVVTSAIKEAAEKHGLTEPERVLGELECQECAIPPGVDENSQTNGIADDRQSLSSADNLESDAQGHQVAARFSHVLQKDAFLVFRSLCKLSMKPLGEGPPDPKSHELRSKVVSLQLLLSVLQNAGPVFRTHEMFINAIKQYLCVALSKNGVSSVPDVFELSLAIFLTLLSNFKMHLKMQIEVFFKEIFLNILETSTSSFEHRWMVIQTLTRICADAQCVVDIYVNYDCDLNAANIFERLVNDLSKIAQGRSGHELGMTPLQELSLRKKGLECLVSILKCMVEWSKDLYVNPNHQTSLGQERLTDQEIGDGKGLDMARRCSVTSMESTVSSGTQTTVQDDPEQFEVIKQQKEIIEHGIELFNKKPKRGIQFLQEQGMLGTSVEDIAQFLHQEERLDSTQVGDFLGDSARFNKEVMYAYVDQLDFCEKEFVSALRTFLEGFRLPGEAQKIDRLMEKFAARYIECNQGQTLFASADTAYVLAYSIIMLTTDLHSPQVKNKMTKEQYIKMNRGINDSKDLPEEYLSSIYEEIEGKKIAMKETKELTIATKSTKQNVASEKQRRLLYNLEMEQMAKTAKALMEAVSHAKAPFTSATHLDHVRPMFKLVWTPLLAAYSIGLQNCDDTEVASLCLEGIRCAIRIACIFGMQLERDAYVQALARFSLLTASSSITEMKQKNIDTIKTLITVAHTDGNYLGNSWHEILKCISQLELAQLIGTGVKTRYLSGSGREREGSLKGHTLAGEEFMGLGLGNLVSGGVDKRQMASFQESVGETSSQSVVVAVDRIFTGSTRLDGNAIVDFVRWLCAVSMDELASPHHPRMFSLQKIVEISYYNMNRIRLQWSRIWHVIGDHFNKVGCNPNEDVAIFAVDSLRQLSMKFLEKGELANFRFQKDFLRPFEHIMKKNRSPTIRDMAIRCIAQMVNSQAANIRSGWKNIFAVFHQAASDHDGNIVELAFQTTCHIVTTIFQHHFPAAIDSFQDAVKCLSEFACNAAFPDTSMEAIRLIRFCGKYVSERPRVLQEYTSDDMNVAPGDRVWVRGWFPILFELSCIINRCKLDVRTRGLTVMFEIMKSYGHTFEKHWWQDLFRIVFRIFDNMKLPEQLSEKSEWMTTTCNHALYAICDVFTQFYEALNEVLLSDVFAQLQWCVKQDNEQLARSGTNCLENLVISNGEKFSPEVWDETCNCMLDIFKTTIPHVLLTWRPVGMEEDSSEKHLDVDLDRQSLSSIDKNPSERGQSQLSNPTDDSWKGRPYANQKLFASLLIKCVVQLELIQTIDNIVFYPATSKKEDAEHMVAAQQDTLDADIHIETEDQGMYKYMSSQHLFKLLDCLQESHSFSKAFNSNYEQRTVLWRAGFKGKSKPNLLKQETSSLACCLRILFRMYVDENRRDSWEEIQQRLLTVCSEALAYFITVNSESHREAWTSLLLLLLTKTLKINDEKFKAHASMYYPYLCEIMQFDLIPELRAVLRKFFLRIGVVYKIWIPEEPSQVPAALSPVW

SEQ ID NO: 9290 - protein, 497 aa, Homo sapiens
MVPSFLSLSFSSLGLWASGLILVLGFLKLIHLLLRRQTLAKAMDKFPGPPTHWLFGHALEIQETGSLDKVVSWAHQFPYAHPLWFGQFIGFLNIYEPDYAKAVYSRGGRGLLVLEGPKWLQHRKLLTPGFHYDVLKPYVAVFTESTRIMLDKWEEKAREGKSFDIFCDVGHMALNTLMKCTFGRGDTGLGHSRDSSYYLAVSDLTLLMQQRLVSFQYHNDFIYWLTPHGRRFLRACQVAHDHTDQVIRERKAALQDEKVRKKIQNRRHLDFLDILLGARDEDDIKLSDADLRAEVDTFMFEGHDTTTSGISWFLYCMALYPEHQHRCREEVREILGDQDFFQWDDLGKMTYLTMCIKESFRLYPPVPQVYRQLSKPVTFVDGRSLPAGSLISMHIYALHRNSAVWPDPEVFDSLRFSTENASKRHPFAFMPFSAGPRNCIGQQFAMSEMKVVTAMCLLRFEFSLDPSRLPIKMPQLVLRSKNGFHLHLKPLGPGSGK

SEQ ID NO: 9291 - protein, 313 aa, Homo sapiens
MASFRKLTLSEKVPPNHPSRKKVNFLDMSLDDIIIYKELEGTNAEEEKNKRQNHSKKESPSRQQSKAHRHRHRRGYSRCRSNSEEGNHDKKPSQKPSGFKSGQHPLNGQPLIEQEKCSDNYEAQAEKNQGQSEGNQHQSEGNPDKSEESQGQPEENHHSERSRNHLERSLSQSDRSQGQLKRHHPQYERSHGQYKRSHGQSERSHGHSERSHGHSERSHGHSERSHGHSKRSRSQGDLVDTQSDLIATQRDLIATQKDLIATQRDLIATQRDLIVTQRDLVATERDLINQSGRSHGQSERHQRYSTGKNTITT

SEQ ID NO: 9292 - protein, 512 aa, Homo sapiens
MVPSFLSLSFSSLGLWASGLILVLGFLKLIHLLLRRQTLAKAMDKFPGPPTHWLFGHALEIQETGSLDKVVSWAHQFPYAHPLWFGQFIGFLNIYEPDYAKAVYSRGDPKAPDVYDFFLQWIGRGLLVLEGPKWLQHRKLLTPGFHYDVLKPYVAVFTESTRIMLDKWEEKAREGKSFDIFCDVGHMALNTLMKCTFGRGDTGLGHSRDSSYYLAVSDLTLLMQQRLVSFQYHNDFIYWLTPHGRRFLRACQVAHDHTDQVIRERKAALQDEKVRKKIQNRRHLDFLDILLGARDEDDIKLSDADLRAEVDTFMFEGHDTTTSGISWFLYCMALYPEHQHRCREEVREILGDQDFFQWDDLGKMTYLTMCIKESFRLYPPVPQVYRQLSKPVTFVDGRSLPAGSLISMHIYALHRNSAVWPDPEVFDSLRFSTENASKRHPFAFMPFSAGPRNCIGQQFAMSEMKVVTAMCLLRFEFSLDPSRLPIKMPQLVLRSKNGFHLHLKPLGPGSGK

SEQ ID NO: 9293 - protein, 436 aa, Homo sapiens
MDQPFTVNSLKKLAAMPDHTDVSLSPEERVRALSKLGCNITISEDITPRRYFRSGVEMERMASVYLEEGNLENAFVLYNKFITLFVEKLPNHRDYQQCAVPEKQDIMKKLKEIAFPRTDELKNDLLKKYNVEYQEYLQSKNKYKAEILKKLEHQRLIEAERKRIAQMRQQQLESEQFLFFEDQLKKQELARGQMRSQQTSGLSEQIDGSALSCFSTHQNNSLLNVFADQPNKSDATNYASHSPPVNRALTPAATLSAVQNLVVEGLRCVVLPEDLCHKFLQLAESNTVRGIETCGILCGKLTHNEFTITHVIVPKQSAGPDYCDMENVEELFNVQDQHDLLTLGWIHTHPTQTAFLSSVDLHTHCSYQLMLPEAIAIVCSPKHKDTGIFRLTNAGMLEVSACKKKGFHPHTKEPRLFSICKHVLVKDIKIIVLDLR

SEQ ID NO: 9294 - protein, 461 aa, Homo sapiens
MDQPFTVNSLKKLAAMPDHTDVSLSPEERVRALSKLGCNITISEDITPRRYFRSGVEMERMASVYLEEGNLENAFVLYNKFITLFVEKLPNHRDYQQCAVPEKQDIMKKLKEIAFPRTDELKNDLLKKYNVEYQEYLQSKNKYKAEILKKLEHQRLIEAERKRIAQMRQQQLESEQFLFFEDQLKKQELARGQMRSQQTSGLSEQIDGSALSCFSTHQNNSLLNVFADQPNKSDATNYASHSPPVNRALTPAATLSAVQNLVVEGLRCVVLPEDLCHKFLQLAESNTVRGIETCGILCGKLTHNEFTITHVIVPKQSAGPDYCDMENVEELFNVQDQHDLLTLGWIHTHPTQTAFLSSVDLHTHCSYQLMLPEAIAIVCSPKHKDTGIFRLTNAGMLEVSACKKKGFHPHTKEPRLFSIQKFLSGIISGTALEMEPLKIGYGPNGFPLLGISRSSSPSEQL

SEQ ID NO: 9295 - protein, 1427 aa, Homo sapiens
MHQRHPRARCPPLCVAGILACGFLLGCWGPSHFQQSCLQALEPQAVSSYLSPGAPLKGRPPSPGFQRQRQRQRRAAGGILHLELLVAVGPDVFQAHQEDTERYVLTNLNIGAELLRDPSLGAQFRVHLVKMVILTEPEGAPNITANLTSSLLSVCGWSQTINPEDDTDPGHADLVLYITRFDLELPDGNRQVRGVTQLGGACSPTWSCLITEDTGFDLGVTIAHEIGHSFGLEHDGAPGSGCGPSGHVMASDGAAPRAGLAWSPCSRRQLLSLLSAGRARCVWDPPRPQPGSAGHPPDAQPGLYYSANEQCRVAFGPKAVACTFAREHLDMCQALSCHTDPLDQSSCSRLLVPLLDGTECGVEKWCSKGRCRSLVELTPIAAVHGRWSSWGPRSPCSRSCGGGVVTRRRQCNNPRPAFGGRACVGADLQAEMCNTQACEKTQLEFMSQQCARTDGQPLRSSPGGASFYHWGAAVPHSQGDALCRHMCRAIGESFIMKRGDSFLDGTRCMPSGPREDGTLSLCVSGSCRTFGCDGRMDSQQVWDRCQVCGGDNSTCSPRKGSFTAGRAREYVTFLTVTPNLTSVYIANHRPLFTHLAVRIGGRYVVAGKMSISPNTTYPSLLEDGRVEYRVALTEDRLPRLEEIRIWGPLQEDADIQVYRRYGEEYGNLTRPDITFTYFQPKPRQAWVWAAVRGPCSVSCGAGLRWVNYSCLDQARKELVETVQCQGSQQPPAWPEACVLEPCPPYWAVGDFGPCSASCGGGLRERPVRCVEAQGSLLKTLPPARCRAGAQQPAVALETCNPQPCPARWEVSEPSSCTSAGGAGLALENETCVPGADGLEAPVTEGPGSVDEKLPAPEPCVGMSCPPGWGHLDATSAGEKAPSPWGSIRTGAQAAHVWTPAAGSCSVSCGRGLMELRFLCMDSALRVPVQEELCGLASKPGSRREVCQAVPCPARWQYKLAACSVSCGRGVVRRILYCARAHGEDDGEEILLDTQCQGLPRPEPQEACSLEPCPPRWKVMSLGPCSASCGLGTARRSVACVQLDQGQDVEVDEAACAALVRPEASVPCLIADCTYRWHVGTWMECSVSCGDGIQRRRDTCLGPQAQAPVPADFCQHLPKPVTVRGCWAGPCVGQGTPSLVPHEEAAAPGRTTATPAGASLEWSQARGLLFSPAPQPRRLLPGPQENSVQSSACGRQHLEPTGTIDMRGPGQADCAVAIGRPLGEVVTLRVLESSLNCSAGDMLLLWGRLTWRKMCRKLLDMTFSSKTNTLVVRQRCGRPGGGVLLRYGSQLAPETFYRECDMQLFGPWGEIVSPSLSPATSNAGGCRLFINVAPHARIAIHALATNMGAGTEGANASYILIRDTHSLRTTAFHGQQVLYWESESSQAEMEFSEGFLKAQASLRGQYWTLQSWVPEMQDPQSWKGKEGT

SEQ ID NO: 9296 - protein, 1659 aa, Homo sapiens
MEAPSGSEPGGDGAGDCAHPDPRAPGAAAPSSGPGPCAAARESERQLRLRLCVLNEILGTERDYVGTLRFLQSAFLHRIRQNVADSVEKGLTEENVKVLFSNIEDILEVHKDFLAALEYCLHPEPQSQHELGNVFLKFKDKFCVYEEYCSNHEKALRLLVELNKIPTVRAFLLSCMLLGGRKTTDIPLEGYLLSPIQRICKYPLLLKELAKRTPGKHPDHPAVQSALQAMKTVCSNINETKRQMEKLEALEQLQSHIEGWEGSNLTDICTQLLLQGTLLKISAGNIQERAFFLFDNLLVYCKRKSRVTGSKKSTKRTKSINGSLYIFRGRINTEVMEVENVEDGTADYHSNGYTVTNGWKIHNTAKNKWFVCMAKTAEEKQKWLDAIIREREQRESLKLGMERDAYVMIAEKGEKLYHMMMNKKVNLIKDRRRKLSTVPKCFLGNEFVAWLLEIGEISKTEEGVNLGQALLENGIIHHVSDKHQFKNEQVMYRFRYDDGTYKARSELEDIMSKGVRLYCRLHSLYTPVIKDRDYHLKTYKSVLPGSKLVDWLLAQGDCQTREEAVALGVGLCNNGFMHHVLEKSEFRDESQYFRFHADEEMEGTSSKNKQLRNDFKLVENILAKRLLILPQEEDYGFDIEEKNKAVVVKSVQRGSLAEVAGLQVGRKIYSINEDLVFLRPFSEVESILNQSFCSRRPLRLLVATKAKEIIKIPDQPDTLCFQIRGAAPPYVYAVGRGSEAMAAGLCAGQCILKVNGSNVMNDGAPEVLEHFQAFRSRREEALGLYQWIYHTHEDAQEARASQEASTEDPSGEQAQEEDQADSAFPLLSLGPRLSLCEDSPMVTLTVDNVHLEHGVVYEYVSTAGVRCHVLEKIVEPRGCFGLTAKILEAFAANDSVFVENCRRLMALSSAIVTMPHFEFRNICDTKLESIGQRIACYQEFAAQLKSRVSPPFKQAPLEPHPLCGLDFCPTNCHINLMEVSYPKTTPSVGRSFSIRFGRKPSLIGLDPEQGHLNPMSYTQHCITTMAAPSWKCLPAAEGDPQGQGLHDGSFGPASGTLGQEDRGLSFLLKQEDREIQDAYLQLFTKLDVALKEMKQYVTQINRLLSTITEPTSGGSCDASLAEEASSLPLVSEESEMDRSDHGGIKKVCFKVAEEDQEDSGHDTMSYRDSYSECNSNRDSVLSYTSVRSNSSYLGSDEMGSGDELPCDMRIPSDKQDKLHGCLEHLFNQVDSINALLKGPVMSRAFEETKHFPMNHSLQEFKQKEECTIRGRSLIQISIQEDPWNLPNSIKTLVDNIQRYVEDGKNQLLLALLKCTDTELQLRRDAIFCQALVAAVCTFSKQLLAALGYRYNNNGEYEESSRDASRKWLEQVAATGVLLHCQSLLSPATVKEERTMLEDIWVTLSELDNVTFSFKQLDENYVANTNVFYHIEGSRQALKVIFYLDSYHFSKLPSRLEGGASLRLHTALFTKVLENVEGLPSPGSQAAEDLQQDINAQSLEKVQQYYRKLRAFYLERSNLPTDASTTAVKIDQLIRPINALDELCRLMKSFVHPKPGAAGSVGAGLIPISSELCYRLGACQMVMCGTGMQRSTLSVSLEQAAILARSHGLLPKCIMQATDIMRKQGPRVEILAKNLRVKDQMPQGAPRLYRLCQPPVDGDL

SEQ ID NO: 9297 - protein, 248 aa, Homo sapiens
MVNLRNAVHSFLVHLIGLLVWQSDISVSPVAAIVTDIFNTSDGGRFKFPDGVQNWPALSIVIIIIMTIGGNILVIMAVSMEKKLHNATNYFLMSLAIADMLVGLLVMPLSLLAILYDYVWPLPRYLCPVWISLDVLFSTASIMHLCAISLDRCISSYPCDWTEGRRKGVREQHDVRAQRPKFRSYWVLRSFLHTADDYGDYVLPDHLRSAPTSFDVTARPHRGTAWTKSGFPEVLQEEYGRGRELCKP

SEQ ID NO: 9298 - protein, 403 aa, Homo sapiens [sequence omitted]

SEQ ID NO: 9299 - protein, 382 aa, Homo sapiens
MQHYGVNGYSLHAMNSLSAMYNLHQQAAQQAQHAPDYRPSVHALTLAERLAGCTFQDIILEARYGSQHRKQRRSRTAFTAQQLEALEKTFQKTHYPDVVMRERLAMCTNLPEARVQVWFKNRRAKFRKKQRSLQKEQLQKQKEAEGSHGEGKAEAPTPDTQLDTEQPPRLPGSDPPAELHLSLSEQSASESAPEDQPDREEDPRAGAEDPKAEKSPGADSKGLGCKRGSPKADSPGSLTITPVAPGGGLLGPSHSYSSSPLSLFRLQEQFRQHMAATNNLVHYSSFEVGGPAPAAAAAAAAVPYLGVNMAPLGSLHCQSYYQSLSAAAAAHQGVWGSPLLPAPPAGLAPASATLNSKTTSIENLRLRAKQHAASLGLDTLPN

SEQ ID NO: 9300 - protein, 680 aa, Homo sapiens
MLGPGSNRRRPTQGERGPGSPGEPMEKYQVLYQLNPGALGVNLVVEEMETKVKHVIKQVECMDDHYASQALEELMPLLKLRHAHISVYQELFITWNGEISSLYLCLVMEFNELSFQEVIEDKRKAKKIIDSEWMQNVLGQVLDALEYLHHLDIIHRNLKPSNIILISSDHCKLQDLSSNVLMTDKAKWNIRAEEDPFRKSWMAPEALNFSFSQKSDIWSLGCIILDMTSCSFMDGTEAMHLRKSLRQSPGSLKAVLKTMEEKQIPDVETFRNLLPLMLQIDPSDRITIKDVVHITFLRGSFKSSCVSLTLHRQMVPASITDMLLEGNVASILEVMQKFSGWPEVQLRAMKRLLKMPADQLGLPWPPELVEVVVTTMELHDRVLDVQLCACSLLLHLLGQALVHHPEAKAPCNQAITSTLLSALQSHPEEEPLLVMVYSLLAITTTQESESLSEELQNAGLLEHILEHLNSSLESRDVCASGLGLLWALLLDGIIVNKAPLEKVPDLISQVLATYPADGEMAEASCGVFWLLSLLGCIKEQQFEQVVALLLQSIRLCQDRALLVNNAYRGLASLVKVSELAAFKVVVQEEGGSGLSLIKETYQLHRDDPEVVENVGMLLVHLASYEEILPELVSSSMKALLQEIKERFTSSLVSDSSAFSKPGLPPGGSPQLGCTTSGGLE

SEQ ID NO: 9301 - protein, 597 aa, Homo sapiens
MEHRGPPPEYPFKGMPPQSVVCKPQEPGHFYSEHRLNQPGRTEGQLMRYQHPPEYGAARPAQDISLPLSARNSQPHSPTSSLTSGGSLPLLQSPPSTRLSPARHPLVPNQGDHSAHLPRPQQHFLPNQAHQGDHYRLSQPGLSQQQQQQQQQHHHHHHHQQQQQQQPQQQPGEAYSAMPRAQPSSASYQPVPADPFAIVSRAQQMVEILSDENRNLRQELEGCYEKVARLQKVETEIQRVSEAYENLVKSSSKREALEKAMRNKLEGEIRRMHDFNRDLRERLETANKQLAEKEYEGSEDTRKTISQLFAKNKESQREKEKLEAELATARSTNEDQRRHIEIRDQALSNAQAKVVKLEEELKKKQVYVDKVEKMQQALVQLQAACEKREQLEHRLRTRLERELESLRIQQRQGNCQPTNVSEYNAAALMELLREKEERILALEADMTKWEQKYLEENVMRHFALDAAATVAAQRDTTVISHSPNTSYDTALEARIQKEEEEILMANKRCLDMEGRIKTLHAQIIEKDAMIKVLQQRSRKEPSKTEQLSCMRPAKSLMSISNAGSGLLSHSSTLTGSPIMEEKRDDKSWKGSLGNDSK

SEQ ID NO: 9302 - protein, 1084 aa, Homo sapiens
MRNSEEQPSGGTTVLQRLLQEQLRYGNPSENRSLLAIHQQATGNGPPFPSGSGNPGPQSDVLSPQDHHQQLVAHAARQEPQGQEIQSENLIMEKQLSPRMQNNEELPTYEEAKVQSQYFRGQQHASVGAAFYVTGVTNQKMRTEGRPSVQRLNPGKMHQDEGLRDLKQGHVRSLSERLMQMSLATSGVKAHPPVTSAPLSPPQPNDLYKNPTSSSEFYKAQGPLPNQHSLKGMEHRGPPPEYPFKGMPPQSVVCKPQEPGHFYSEHRLNQPGRTEGQLMRYQHPPEYGAARPAQDISLPLSARNSQPHSPTSSLTSGGSLPLLQSPPSTRLSPARHPLVPNQGDHSAHLPRPQQHFLPNQAHQGDHYRLSQPGLSQQQQQQQQQHHHHHHHQQQQQQQPQQQPGEAYSAMPRAQPSSASYQPVPADPFAIVSRAQQMVEILSDENRNLRQELEGCYEKVARLQKVETEIQRVSEAYENLVKSSSKREALEKAMRNKLEGEIRRMHDFNRDLRERLETANKQLAEKEYEGSEDTRKTISQLFAKNKESQREKEKLEAELATARSTNEDQRRHIEIRDQALSNAQAKVVKLEEELKKKQVYVDKVEKMQQALVQLQAACEKREQLEHRLRTRLERELESLRIQQRQGNCQPTNVSEYNAAALMELLREKEERILALEADMTKWEQKYLEENVMRHFALDAAATVAAQRDTTVISHSPNTSYDTALEARIQKEEEEILMANKRCLDMEGRIKTLHAQIIEKDAMIKVLQQRSRKEPSKTEQLSCMRPAKSLMSISNAGSGLLSHSSTLTGSPIMEEKRDDKSWKGSLGILLGGDYRAEYVPSTPSPVPPSTPLLSAHSKTGSRDCSTQTERGTESNKTAAVAPISVPAPVAAAATAAAITATAATITTTMVAAAPVAVAAAAAPAAAAAPSPATAAATAAAVSPAAAGQIPAAASVASAAAVAPSAAAAAAVQVAPAAPAPVPAPALVPVPAPAAAQASAPAQTQAPTSAPAVAPTPAPTPTPAVAQAEVPASPATGPGPHRLSIPSLTCNPDKTDGPVFHSNTLERKTPIQILGQEPDAEMVEYLI

SEQ ID NO: 9303 - protein, 852 aa, Homo sapiens
MEHRGPPPEYPFKGMPPQSVVCKPQEPGHFYSEHRLNQPGRTEGQLMRYQHPPEYGAARPAQDISLPLSARNSQPHSPTSSLTSGGSLPLLQSPPSTRLSPARHPLVPNQGDHSAHLPRPQQHFLPNQAHQGDHYRLSQPGLSQQQQQQQQQHHHHHHHQQQQQQQPQQQPGEAYSAMPRAQPSSASYQPVPADPFAIVSRAQQMVEILSDENRNLRQELEGCYEKVARLQKVETEIQRVSEAYENLVKSSSKREALEKAMRNKLEGEIRRMHDFNRDLRERLETANKQLAEKEYEGSEDTRKTISQLFAKNKESQREKEKLEAELATARSTNEDQRRHIEIRDQALSNAQAKVVKLEEELKKKQVYVDKVEKMQQALVQLQAACEKREQLEHRLRTRLERELESLRIQQRQGNCQPTNVSEYNAAALMELLREKEERILALEADMTKWEQKYLEENVMRHFALDAAATVAAQRDTTVISHSPNTSYDTALEARIQKEEEEILMANKRCLDMEGRIKTLHAQIIEKDAMIKVLQQRSRKEPSKTEQLSCMRPAKSLMSISNAGSGLLSHSSTLTGSPIMEEKRDDKSWKGSLGILLGGDYRAEYVPSTPSPVPPSTPLLSAHSKTGSRDCSTQTERGTESNKTAAVAPISVPAPVAAAATAAAITATAATITTTMVAAAPVAVAAAAAPAAAAAPSPATAAATAAAVSPAAAGQIPAAASVASAAAVAPSAAAAAAVQVAPAAPAPVPAPALVPVPAPAAAQASAPAQTQAPTSAPAVAPTPAPTPTPAVAQAEVPASPATGPGPHRLSIPSLTCNPDKTDGPVFHSNTLERKTPIQILGQEPDAEMVEYLI

SEQ ID NO: 9304 - protein, 300 aa, Homo sapiens
MAAVAALQLGLRAAGLGRAPASAAWRSVLRVSPRPGVAWRPSRCGSSAAEASATKAEDDSFLQWVLLLIPVTAFGLGTWQVQRRKWKLNLIAELESRVLAEPVPLPADPMELKNLEYRPVKVRGCFDHSKELYMMPRTMVDPVREAREGGLISSSTQSGAYVVTPFHCTDLGVTILVNRGFVPRKKVNPETRQKGQIEGEVDLIGMVRLTETRQPFVPENNPERNHWHYRDLEAMARITGAEPIFIDANFQSTVPGGPIGGQTRVTLRNEHLQYIVTWYGLSAATSYLWFKKFLRGTPGV

SEQ ID NO: 9305 - protein, 747 aa, Homo sapiens
MRRSLAPSQLAKRKPEGRSCDDEDWQPGLVTPRKRKSSSETQIQECFLSPFRKPLSQLTNQPPCLDSSQHEAFIRSILSKPFKVPIPNYQGPLGSRALGLKRAGVRRALHDPLEKDALVLYEPPPLSAHDQLKLDKEKLPVHVVVDPILSKVLRPHQREGVKFLWECVTSRRIPGSHGCIMADEMGLGKTLQCITLMWTLLRQSPECKPEIDKAVVVSPSSLVKNWYNEVGKWLGGRIQPLAIDGGSKDEIDQKLEGFMNQRGARVSSPILIISYETFRLHVGVLQKGSVGLVICDEGHRLKNSENQTYQALDSLNTSRRVLISGTPIQNDLLEYFSLVHFVNSGILGTAHEFKKHFELPILKGRDAAASEADRQLGEERLRELTSIVNRCLIRRTSDILSKYLPVKIEQVVCCRLTPLQTELYKRFLRQAKPAEELLEGKMSVSSLSSITSLKKLCNHPALIYDKCVEEEDGFVGALDLFPPGYSSKALEPQLSGKMLVLDYILAVTRSRSSDKVVLVSNYTQTLDLFEKLCRARRYLYVRLDGTMSIKKRAKVVERFNSPSSPDFVFMLSSKAGGCGLNLIGANRLVMFDPDWNPANDEQAMARVWRDGQKKTCYIYRLLSAGTIEEKIFQRQSHKKALSSCVVDEEQDVERHFSLGELKELFILDEASLSDTHDRLHCRRCVNSRQIRPPPDGSDCTSDLAGWNHCTDKWGLRDEVLQAAWDAASTAITFVFHQRSHEEQRGLR

SEQ ID NO: 9306 - protein, 1415 aa, Homo sapiens
MSGLGENLDPLASDSRKRKLPCDTPGQGLTCSGEKRRREQESKYIEELAELISANLSDIDNFNVKPDKCAILKETVRQIRQIKEQGKTISNDDDVQKADVSSTGQGVIDKDSLGPLLLQALDGFLFVVNRDGNIVFVSENVTQYLQYKQEDLVNTSVYNILHEEDRKDFLKNLPKSTVNGVSWTNETQRQKSHTFNCRMLMKTPHDILEDINASPEMRQRYETMQCFALSQPRAMMEEGEDLQSCMICVARRITTGERTFPSNPESFITRHDLSGKVVNIDTNSLRSSMRPGFEDIIRRCIQRFFSLNDGQSWSQKRHYQEVTSDGIFSPTAYLNGHAETPVYRFSLADGTIVTAQTKSKLFRNPVTNDRHGFVSTHFLQREQNGYRPNPNPVGQGIRPPMAGCNSSVGGMSMSPNQGLQMPSSRAYGLADPSTTGQMSGARYGGSSNIASLTPGPGMQSPSSYQNNNYGLNMSSPPHGSPGLAPNQQNIMISPRNRGSPKIASHQFSPVAGVHSPMASSGNTGNHSFSSSSLSALQAISEGVGTSLLSTLSSPGPKLDNSPNMNITQPSKVSNQDSKSPLGFYCDQNPVESSMCQSNSRDHLSDKESKESSVEGAENQRGPLESKGHKKLLQLLTCSSDDRGHSSLTNSPLDSSCKESSVSVTSPSGVSSSTSGGVSSTSNMHGSLLQEKHRILHKLLQNGNSPAEVAKITAEATGKDTSSITSCGDGNVVKQEQLSPKKKENNALLRYLLDRDDPSDALSKELQPQVEGVDNKMSQCTSSTIPSSSQEKDPKIKTETSEEGSGDLDNLDAILGDLTSSDFYNNSISSNGSHLGTKQQVFQGTNSLGLKSSQSVQSIRPPYNRAVSLDSPVSVGSSPPVKNISAFPMLPKQPMLGGNPRMMDSQENYGSSMGDWGLPNSKAGRMEPMNSNSMGRPGGDYNTSLPRPALGGSIPTLPLRSNSIPGARPVLQQQQQMLQMRPGEIPMGMGANPYGQAAASNQLGSWPDGMLSMEQVSHGTQNRPLLRNSLDDLVGPPSNLEGQSDERALLDQLHTLLSNTDATGLEEIDRALGIPELVNQGQALEPKQDAFQGQEAAVMMDQKAGLYGQTYPAQGPPMQGGFHLQGQSPSFNSMMNQMNQQGNFPLQGMHPRANIMRPRTNTPKQLRMQLQQRLQGQQFLNQSRQALELKMENPTAGGAAVMRPMMQPQQGFLNAQMVAQRSRELLSHHFRQQRVAMMMQQQQQQQQQQQQQQQQQQQQQQQQQQQQQTQAFSPPPNVTASPSMDGLLAGPTMPQAPPQQFPYQPNYGMGQQPDPAFGRVSSPPNAMMSSRMGPSQNPMMQHPQAASIYQSSEMKGWPSGNLARNSSFSQQQFAHQGNPAVYSMVHMNGSSGHMGQMNMNPMPMSGMPMGPDQKYC

SEQ ID NO: 9307 - protein, 1424 aa, Homo sapiens
MSGLGENLDPLASDSRKRKLPCDTPGQGLTCSGEKRRREQESKYIEELAELISANLSDIDNFNVKPDKCAILKETVRQIRQIKEQGKTISNDDDVQKADVSSTGQGVIDKDSLGPLLLQALDGFLFVVNRDGNIVFVSENVTQYLQYKQEDLVNTSVYNILHEEDRKDFLKNLPKSTVNGVSWTNETQRQKSHTFNCRMLMKTPHDILEDINASPEMRQRYETMQCFALSQPRAMMEEGEDLQSCMICVARRITTGERTFPSNPESFITRHDLSGKVVNIDTNSLRSSMRPGFEDIIRRCIQRFFSLNDGQSWSQKRHYQEAYLNGHAETPVYRFSLADGTIVTAQTKSKLFRNPVTNDRHGFVSTHFLQREQNGYRPNPNPVGQGIRPPMAGCNSSVGGMSMSPNQGLQMPSSRAYGLADPSTTGQMSGARYGGSSNIASLTPGPGMQSPSSYQNNNYGLNMSSPPHGSPGLAPNQQNIMISPRNRGSPKIASHQFSPVAGVHSPMASSGNTGNHSFSSSSLSALQAISEGVGTSLLSTLSSPGPKLDNSPNMNITQPSKVSNQDSKSPLGFYCDQNPVESSMCQSNSRDHLSDKESKESSVEGAENQRGPLESKGHKKLLQLLTCSSDDRGHSSLTNSPLDSSCKESSVSVTSPSGVSSSTSGGVSSTSNMHGSLLQEKHRILHKLLQNGNSPAEVAKITAEATGKDTSSITSCGDGNVVKQEQLSPKKKENNALLRYLLDRDDPSDALSKELQPQVEGVDNKMSQCTSSTIPSSSQEKDPKIKTETSEEGSGDLDNLDAILGDLTSSDFYNNSISSNGSHLGTKQQVFQGTNSLGLKSSQSVQSIRPPYNRAVSLDSPVSVGSSPPVKNISAFPMLPKQPMLGGNPRMMDSQENYGSSMGGPNRNVTVTQTPSSGDWGLPNSKAGRMEPMNSNSMGRPGGDYNTSLPRPALGGSIPTLPLRSNSIPGARPVLQQQQQMLQMRPGEIPMGMGANPYGQAAASNQLGSWPDGMLSMEQVSHGTQNRPLLRNSLDDLVGPPSNLEGQSDERALLDQLHTLLSNTDATGLEEIDRALGIPELVNQGQALEPKQDAFQGQEAAVMMDQKAGLYGQTYPAQGPPMQGGFHLQGQSPSFNSMMNQMNQQGNFPLQGMHPRANIMRPRTNTPKQLRMQLQQRLQGQQFLNQSRQALELKMENPTAGGAAVMRPMMQPQVSSQQGFLNAQMVAQRSRELLSHHFRQQRVAMMMQQQQQQQQQQQQQQQQQQQQQQQQQQQQQTQAFSPPPNVTASPSMDGLLAGPTMPQAPPQQFPYQPNYGMGQQPDPAFGRVSSPPNAMMSSRMGPSQNPMMQHPQAASIYQSSEMKGWPSGNLARNSSFSQQQFAHQGNPAVYSMVHMNGSSGHMGQMNMNPMPMSGMPMGPDQKYC

SEQ ID NO: 9308 - protein, 1420 aa, Homo sapiens
MSGLGENLDPLASDSRKRKLPCDTPGQGLTCSGEKRRREQESKYIEELAELISANLSDIDNFNVKPDKCAILKETVRQIRQIKEQGKTISNDDDVQKADVSSTGQGVIDKDSLGPLLLQALDGFLFVVNRDGNIVFVSENVTQYLQYKQEDLVNTSVYNILHEEDRKDFLKNLPKSTVNGVSWTNETQRQKSHTFNCRMLMKTPHDILEDINASPEMRQRYETMQCFALSQPRAMMEEGEDLQSCMICVARRITTGERTFPSNPESFITRHDLSGKVVNIDTNSLRSSMRPGFEDIIRRCIQRFFSLNDGQSWSQKRHYQEAYLNGHAETPVYRFSLADGTIVTAQTKSKLFRNPVTNDRHGFVSTHFLQREQNGYRPNPNPVGQGIRPPMAGCNSSVGGMSMSPNQGLQMPSSRAYGLADPSTTGQMSGARYGGSSNIASLTPGPGMQSPSSYQNNNYGLNMSSPPHGSPGLAPNQQNIMISPRNRGSPKIASHQFSPVAGVHSPMASSGNTGNHSFSSSSLSALQAISEGVGTSLLSTLSSPGPKLDNSPNMNITQPSKVSNQDSKSPLGFYCDQNPVESSMCQSNSRDHLSDKESKESSVEGAENQRGPLESKGHKKLLQLLTCSSDDRGHSSLTNSPLDSSCKESSVSVTSPSGVSSSTSGGVSSTSNMHGSLLQEKHRILHKLLQNGNSPAEVAKITAEATGKDTSSITSCGDGNVVKQEQLSPKKKENNALLRYLLDRDDPSDALSKELQPQVEGVDNKMSQCTSSTIPSSSQEKDPKIKTETSEEGSGDLDNLDAILGDLTSSDFYNNSISSNGSHLGTKQQVFQGTNSLGLKSSQSVQSIRPPYNRAVSLDSPVSVGSSPPVKNISAFPMLPKQPMLGGNPRMMDSQENYGSSMGGPNRNVTVTQTPSSGDWGLPNSKAGRMEPMNSNSMGRPGGDYNTSLPRPALGGSIPTLPLRSNSIPGARPVLQQQQQMLQMRPGEIPMGMGANPYGQAAASNQLGSWPDGMLSMEQVSHGTQNRPLLRNSLDDLVGPPSNLEGQSDERALLDQLHTLLSNTDATGLEEIDRALGIPELVNQGQALEPKQDAFQGQEAAVMMDQKAGLYGQTYPAQGPPMQGGFHLQGQSPSFNSMMNQMNQQGNFPLQGMHPRANIMRPRTNTPKQLRMQLQQRLQGQQFLNQSRQALELKMENPTAGGAAVMRPMMQPQQGFLNAQMVAQRSRELLSHHFRQQRVAMMMQQQQQQQQQQQQQQQQQQQQQQQQQQQQQTQAFSPPPNVTASPSMDGLLAGPTMPQAPPQQFPYQPNYGMGQQPDPAFGRVSSPPNAMMSSRMGPSQNPMMQHPQAASIYQSSEMKGWPSGNLARNSSFSQQQFAHQGNPAVYSMVHMNGSSGHMGQMNMNPMPMSGMPMGPDQKYC

SEQ ID NO: 9309 - protein, 544 aa, Homo sapiens
MSDGLDNEEKPPAPPLRMNSNNRDSSALNHSSKPLPMAPEEKNKKARLRSIFPGGGDKTNKKKEKERPEISLPSDFEHTIHVGFDAVTGEFTGIPEQWARLLQTSNITKLEQKKNPQAVLDVLKFYDSKETVNNQKYMSFTSGDKSAHGYIAAHPSSTKTASEPPLAPPVSEEEDEEEEEEEDENEPPPVIAPRPEHTKSIYTRSVVESIASPAVPNKEVTPPSAENANSSTLYRNTDRQRKKSKMTDEEILEKLRSIVSVGDPKKKYTRFEKIGQGASGTVYTALDIATGQEVAIKQMNLQQQPKKELIINEILVMRENKNPNIVNYLDSYLVGDELWVVMEYLAGGSLTDVVTETCMDEGQIAAVCRECLQALDFLHSNQVIHRDIKSDNILLGMDGSVKLTDFGFCAQITPEQSKRSTMVGTPYWMAPEVVTRKAYGPKVDIWSLGIMAIEMVEGEPPYLNENPLRALYLIATNGTPELQNPERLSAVFRDFLNRCLEMDVDRRGSAKELLQHPFLKLAKPLSSLTPLIIAAKEAIKNSSR

SEQ ID NO: 9310 - protein, 791 aa, Homo sapiens
MRPRSRSLSPGRSPVSFDSEIIMMNHVYKERFPKAHERSESSEVAFVMQLVKKLMIIIARPARLLECLEFDPEEFYHLLEAAEGHAKEGQGIKCDIPRYIVSQLGLTRDPLEEMAQLSSCDSPDTPETDDSIEGHGASLPSKKTPSEEDFETIKLISNGAYGAVFLVRHKSTRQRFAMKKINKQNLILRNQIQQAFVERDILTFAENPFVVSMFCSFDTKRHLCMVMEYVEGGDCATLLKNIGALPVDMVRLYFAETVLALEYLHNYGIVHRDLKPDNLLITSMGHIKLTDFGLSKIGLMSLTTNLYEGHIEKDAREFLDKQVCGTPEYIAPEVILRQGYGKPVDWWAMGIILYEFLVGCVPFFGDTPEELFGQVISDEIVWPEGDEALPPDAQDLTSKLLHQNPLERLGTGSAYEVKQHPFFTGLDWTGLLRQKAEFIPQLESEDDTSYFDTRSERYHHMDSEDEEEVSEDGCLEIRQFSSCSPRFNKVYSSMERLSLLEERRTPPPTKRSLSEEKEDHSDGLAGLKGRDRSWVIGSPEILRKRLSVSESSHTESDSSPPMTVRRRCSGLLDAPRFPEGPEEASSTLRRQPQEGIWVLTPPSGEGVSGPVTEHSGEQRPKLDEEAVGRSSGSSPAMETRGRGTSQLAEGATAKAISDLAVRRARHRLLSGDSTEKRTARPVNKVIKSASATALSLLIPSEHHTCSPLASPMSPHSQSSNPSSRDSSPRSMASPCGPFASTWVTPMSTPCTIWCGTWRMEVRPVRQGFVKVTSSPMSMGNLCMAWCTRRWS

SEQ ID NO: 9311 - protein, 361 aa, Homo sapiens
MASLLAKDAYLQSLAKKICSHSAPEQQARTRAGKTQGSETAGPPKKKRKKTQKKFRKREEKAAEHKAKSLGEKSPAASGARRPEAAKEEAAWASSSAGNPADGLATEPESVFALDVLRQRLHEKIQEARGQGSAKELSPAALEKRRRRKQERDRKKRKRKELRAKEKARKAEEATEAQEVVEATPEGACTEPREPPGLIFNKVEVSEDEPASKAQRRKEKRQRVKGNLTPLTGRNYRQLLERLQARQSRLDELRGQDEGKAQELEAKMKWTNLLYKAEGVKIRDDERLLQEALKRKEKRRAQRQRRWEKRTAGVVEKMQQRQDRRRQNLRRKKAARAERRLLRARKKGRILPQDLERAGLV

SEQ ID NO: 9312 - protein, 1105 aa, Homo sapiens
MDISTRSKDPGSAERTAQKRKFPSPPHSSNGHSPQDTSTSPIKKKKKPGLLNSNNKEQDGRNDFYCWVCHREGQVLCCELCPRVYHAKCLRLTSEPEGDWFCPECETDAFQKPVPLEQHPDYAEYIFHPMDLCTLEKNAKKKMYGCTEAFLADAKWILHNCIIYNGGNHKLTQIAKVVIKICEHEMNEIEVCPECYLAACQKRDNWFCEPCSNPHPLVWAKLKGFPFWPAKALRDKDGQVDARFFGQHDRAWVPINNCYLMSKEIPFSVKKTKSIFNSAMQEMEVYVENIRRKFGVFNYSPFRTPYTPNSQYQMLLDPTNPSAGTAKIDKQEKVKLNFDMTASPKILMSKPVLSGGTGRRISLSDMPRSPMSTNSSVHTGSDVEQDAEKKATSSHFSASEESMDFLDKSTASPASTKTGQAGSLSGSPKPFSPQLSAPITTKTDKTSTTGSILNLNLDRSKAEMDLKELSESVQQQSTPVPLISPKRQIRSRFQLNLDKTIESCKAQLGINEISEDVYTAVEHSDSEDSEKSDSSDSEYISDDEQKSKNEPEDTEDKEGCQMDKEPSAVKKKPKPTNPVEIKEELKSTSPASEKADPGAVKDKASPEPEKDFSEKAKPSPHPIKDKLKGKDETDSPTVHLGLDSDSESELVIDLGEDHSGREGRKNKKEPKEPSPKQDVVGKTPPSTTVGSHSPPETPVLTRSSAQTSAAGATATTSTSSTVTVTAPAPAATGSPVKKQRPLLPKETAPAVQRVVWNSSTVQQKEITQSPSTSTITLVTSTQSSPLVTSSGSMSTLVSSVNADLPIATASADVAADIAKYTSKMMDAIKGTMTEIYNDLSKNTTGSTIAEIRRLRIEIEKLQWLHQQELSEMKHNLELTMAEMRQSLEQERDRLIAEVKKQLELEKQQAVDETKKKQWCANCKKEAIFYCCWNTSYCDYPCQQAHWPEHMKSCTQSATAPQQEADAEVNTETLNKSSQGSSSSTQSAPSETASASKEKETSAEKSKESGSTLDLSGSRETPSSILLGSNQGSVSKRCDKQPAYAPTTTDHQPHPNYPAQKYHSRSNKSSWSSSDEKRGSTRSDHNTSTSTKSLLPKESRLDTFWD

SEQ ID NO: 9313 - protein, 247 aa, Homo sapiens
MLRFIQKFSQASSKILKYSFPVGLRTSRTDILSLKMSLQQNFSPCPRPWLSSSFPAYMSKTQCYHTSPCSFKKQQKQALLARPSSTITYLTDSPKPALCVTLAGLIPFVAPPLVMLMTKTYIPILAFTQMAYGASFLSFLGGIRWGFALPEGSPAKPDYLNLASSAAPLFFSWFAFLISERLSEAIVTVIMGMGVAFHLELFLLPHYPNWFKALRIVVTLLATFSFIITLVVKSSFPEKGHKRPGQV

SEQ ID NO: 9314 - protein, 170 aa, Homo sapiens
MKTLFLGVTLGLAAALSFTLEEEDITGTWYVKAMVVDKDFPEDRRPRKVSPVKVTALGGGKLEATFTFMREDRCIQKKILMRKTEEPGKYSAYGGRKLMYLQELPRRDHYIFYCKDQHHGGLLHMGKLVGRNSDTNREALEEFKKLVQRKGLSEEDIFTPLQTGSCVPEH

SEQ ID NO: 9315 - protein, 347 aa, Homo sapiens
MHRRRLALGLGFCLLAGTSLSVLWVYLENWLPVSYVPYYLPCPEIFNMKLHYKREKPLQPVVWSQYPQPKLLEHRPTQLLTLTPWLAPIVSEGTFNPELLQHIYQPLNLTIGVTVFAVGKYTHFIQSFLESAEEFFMRGYRVHYYIFTDNPAAVPGVPLGPHRLLSSIPIQGHSHWEETSMRRMETISQHIAKRAHREVDYLFCLDVDMVFRNPWGPETLGDLVAAIHPSYYAVPRQQFPYERRRVSTAFVADSEGDFYYGGAVFGGQVARVYEFTRGCHMAILADKANGIMAAWREESHLNRHFISNKPSKVLSPEYLWDDRKPQPPSLKLIRFSTLDKDISCLRS

SEQ ID NO: 9316 - protein, 458 aa, Homo sapiens
MRKKWKMGGMKYIFSLLFFLLLEGGKTEQVKHSETYCMFQDKKYRVGERWHPYLEPYGLVYCVNCICSENGNVLCSRVRCPNVHCLSPVHIPHLCCPRCPEDSLPPVNNKVTSKSCEYNGTTYQHGELFVAEGLFQNRQPNQCTQCSCSEGNVYCGLKTCPKLTCAFPVSVPDSCCRVCRGDGELSWEHSDGDIFRQPANREARHSYHRSHYDPPPSRQAGGLSRFPGARSHRGALMDSQQASGTIVQIVINNKHKHGQVCVSNGKTYSHGESWHPNLRAFGIVECVLCTCNVTKQECKKIHCPNRYPCKYPQKIDGKCCKVCPGKKAKEELPGQSFDNKGYFCGEETMPVYESVFMEDGETTRKIALETERPPQVEVHVWTIRKGILQHFHIEKISKRMFEELPHFKLVTRTTLSQWKIFTEGEAQISQMCSSRVCRTELEDLVKVLYLERSEKGHC

SEQ ID NO: 9317 - protein, 450 aa, Homo sapiens
MGGMKYIFSLLFFLLLEGGKTEQVKHSETYCMFQDKKYRVGERWHPYLEPYGLVYCVNCICSENGNVLCSRVRCPNVHCLSPVHIPHLCCPRCPDSLPPVNNKVTSKSCEYNGTTYQHGELFVAEGLFQNRQPNQCTQCSCSEGNVYCGLKTCPKLTCAFPVSVPDSCCRVCRGDGELSWEHSDGDIFRQPANREARHSYHRSHYDPPPSRQAGGLSRFPGARSHRGALMDSQQASGTIVQIVINNKHKHGQVCVSNGKTYSHGESWHPNLRAFGIVECVLCTCNVTKQECKKIHCPNRYPCKYPQKIDGKCCKVCPGKKAKELPGQSFDNKGYFCGEETMPVYESVFMEDGETTRKIALETERPPQVEVHVWTIRKGILQHFHIEKISKRMFEELPHFKLVTRTTLSQWKIFTEGEAQISQMCSSRVCRTELEDLVKVLYLERSEKGHC

SEQ ID NO: 9318 - protein, 902 aa, Homo sapiens
MVQRMWAEAAGPAGGAEPLFPGSRRSRSVWDAVRLEVGVPDSCPVVLHSFTQLDPDLPRPESSTQEIGEELINGVIYSISLRKVQLHHGGNKGQRWLGYENESALNLYETCKVRTVKAGTLEKLVEHLVPAFQGSDLSYVTIFLCTYRAFTTTQQVLDLLFKRYGCILPYSDEDGGPQDQLKNAISSILGTWLDQYSEDFCQPPDFPCLKQLVAYVQLNMPGSDLERRAHLLLAQLEHSEPIEAEPEALSPVPALKPTPELELALTPARAPSPVPAPAPEPEPAPTPAPGSELEVAPAPAPELQQAPEPAVGLESAPAPALELEPAPEQDPAPSQTLELEPAPAPVPSLQPSWPSPVVAENGLSEEKPHLLVFPPDLVAEQFTLMDAELFKKVVPYHCLGSIWSQRDKKGKEHLAPTIRATVTQFNSVANCVITTCLGNRSTKAPDRARVVEHWIEVARECRILKNFSSLYAILSALQSNSIHRLKKTWEDVSRDSFRIFQKLSEIFSDENNYSLSRELLIKEGTSKFATLEMNPKRAQKRPKETGIIQGTVPYLGTFLTDLVMLDTAMKDYLYGRLINFEKRRKEFEVIAQIKLLQSACNNYSIAPDEQFGAWFRAVERLSETESYNLSCELEPPSESASNTLRTKKNTAIVKRWSDRQAPSTELSTSGSSHSKSCDQLRCGPYLSSGDIADALSVHSAGSSSSDVEEINISFVPESPDGQEKKFWESASQSSPETSGISSASSSTSSSSASTTPVAATRTHKRSVSGLCNSSSALPLYNQQVGDCCIIRVSLDVDNGNMYKSILVTSQDKAPAVIRKAMDKHNLEEEEPEDYELLQILSDDRKLKIPENANVFYAMNSTANYDFVLKKRTFTKGVKVKHGASSTLPRMKQKGLKIAKGIF

SEQ ID NO: 9319 - protein, 914 aa, Homo sapiens
MVQRMWAEAAGPAGGAEPLFPGSRRSRSVWDAVRLEVGVPDSCPVVLHSFTQLDPDLPRPESSTQEIGEELINGVIYSISLRKVQLHHGGNKGQRWLGYENESALNLYETCKVRTVKAGTLEKLVEHLVPAFQGSDLSYVTIFLCTYRAFTTTQQVLDLLFKRYGRCDALTASSRYGCILPYSDEDGGPQDQLKNAISSILGTWLDQYSEDFCQPPDFPCLKQLVAYVQLNMPGSDLERRAHLLLAQLEHSEPIEAEPEALSPVPALKPTPELELALTPARAPSPVPAPAPEPEPAPTPAPGSELEVAPAPAPELQQAPEPAVGLESAPAPALELEPAPEQDPAPSQTLELEPAPAPVPSLQPSWPSPVVAENGLSEEKPHLLVFPPDLVAEQFTLMDAELFKKVVPYHCLGSIWSQRDKKGKEHLAPTIRATVTQFNSVANCVITTCLGNRSTKAPDRARVVEHWIEVARECRILKNFSSLYAILSALQSNSIHRLKKTWEDVSRDSFRIFQKLSEIFSDENNYSLSRELLIKEGTSKFATLEMNPKRAQKRPKETGIIQGTVPYLGTFLTDLVMLDTAMKDYLYGRLINFEKRRKEFEVIAQIKLLQSACNNYSIAPDEQFGAWFRAVERLSETESYNLSCELEPPSESASNTLRTKKNTAIVKRWSDRQAPSTELSTSGSSHSKSCDQLRCGPYLSSGDIADALSVHSAGSSSSDVEEINISFVPESPDGQEKKFWESASQSSPETSGISSASSSTSSSSASTTPVAATRTHKRSVSGLCNSSSALPLYNQQVGDCCIIRVSLDVDNGNMYKSILVTSQDKAPAVIRKAMDKHNLEEEEPEDYELLQILSDDRKLKIPENANVFYAMNSTANYDFVLKKRTFTKGVKVKHGASSTLPRMKQKGLKIAKGIF

SEQ ID NO: 9320 - protein, 412 aa, Homo sapiens
LTDRQTDTAPSPSYHLLPGRRRTVDAAASRGQGPEPAPGGGVEGVGARGVALKLFVQLLGCSRFGGAVVRAGEAEPSGAARSASSGREEPQPEEGEEEEEKEEERGPQWRLGARKPGSWTGEAAVCADSAPAARAPQALARASGRGGRVARRGAEESGPPHSPSRRGSASRAGPGRASETMNFLLSWVHWSLALLLYLHHAKWSQAAPMAEGGGQNHHEVVKFMDVYQRSYCHPIETLVDIFQEYPDEIEYIFKPSCVPLMRCGGCCNDEGLECVPTEESNITMQIMRIKPHQGQHIGEMSFLQHNKCECRPKKDRARQEKKSVRGKGKGQKRKRKKSRYKSWSVYVGARCCLMPWSLPGPHPCGPCSERRKHLFVQDPQTCKCSCKNTDSRCKARQLELNERTCRCDKPRR

SEQ ID NO: 9321 - protein, 885 aa, Homo sapiens
MCLWGHSTAPAHTLSSPPLLFCSLPCALHLQPGTGHPPGQVPRKSSTQEIGEELINGVIYSISLRKVQLHHGGNKGQRWLGYENESALNLYETCKVRTVKAGTLEKLVEHLVPAFQGSDLSYVTIFLCTYRAFTTTQQVLDLLFKRYGCILPYSDEDGGPQDQLKNAISSILGTWLDQYSEDFCQPPDFPCLKQLVAYVQLNMPGSDLERRAHLLLAQLEHSEPIEAEPEALSPVPALKPTPELELALTPARAPSPVPAPAPEPEPAPTPAPGSELEVAPAPAPELQQAPEPAVGLESAPAPALELEPAPEQDPAPSQTLELEPAPAPVPSLQPSWPSPVVAENGLSEEKPHLLVFPPDLVAEQFTLMDAELFKKVVPYHCLGSIWSQRDKKGKEHLAPTIRATVTQFNSVANCVITTCLGNRSTKAPDRARVVEHWIEVARECRILKNFSSLYAILSALQSNSIHRLKKTWEDVSRDSFRIFQKLSEIFSDENNYSLSRELLIKEGTSKFATLEMNPKRAQKRPKETGIIQGTVPYLGTFLTDLVMLDTAMKDYLYGRLINFEKRRKEFEVIAQIKLLQSACNNYSIAPDEQFGAWFRAVERLSETESYNLSCELEPPSESASNTLRTKKNTAIVKRWSDRQAPSTELSTSGSSHSKSCDQLRCGPYLSSGDIADALSVHSAGSSSSDVEEINISFVPESPDGQEKKFWESASQSSPETSGISSASSSTSSSSASTTPVAATRTHKRSVSGLCNSSSALPLYNQQVGDCCIIRVSLDVDNGNMYKSILVTSQDKAPAVIRKAMDKHNLEEEEPEDYELLQILSDDRKLKIPENANVFYAMNSTANYDFVLKKRTFTKGVKVKHGASSTLPRMKQKGLKIAKGIF

SEQ ID NO: 9322 - protein, 489 aa, Homo sapiens
MNPPSGPRVPPSPTQEPSCMATPAPPSWWDSSQSSISSLGRLPSISPTAPGTWAAAWVPLPTVDVPDHAHYTLGTVILLVGLTGMLGNLTVIYTFCRAVLRGVTVMMQSRSLRTPANMFIINLAVSDFLMSFTQAPVFFTSSLYKQWLFGETGCEFYAFCGALFGISSMITLTAIALDRYLVITRPLATFGVASKRRAAFVLLGVWLYALAWSLPPFFGWSAYVPEGLLTSCSWDYMSFTPAVRAYTMLLCCFVFFLPLLIIIYCYIFIFRAIRETGRALQTFGACKGNGESLWQRQRLQSECKMAKIMLLVILLFVLSWAPYSAVALVAFAGYAHVLTPYMSSVPAVIAKASAIHNPIIYAITHPKYRVAIAQHLPCLGVLLGVSRRHSRPYPSYRSTHRSTLTSHTSNLSWISIRRRQESLGSESEVGWTHMEAAAVWGAAQQANGRSLYGQGLEDLEAKAPPRPQGHEAETPGKTKGLIPSQDPRM

SEQ ID NO: 9323 - protein, 421 aa, Homo sapiens
NLSLCTAALMYILSRDRLNMDLDRASLDLMIRLLELEQDASSAKLLNEKDMNKIKEKIRRLCETVHNKHLDLENITTGHLAMETLLSLTSKRAGDWFKEELRLLGGLDHIVDKVKECVDHLSRDEDEEKLVASLWGAERCLRVLESVTVHNPENQSYLIAYKDSQLIVSSAKALQHCEELIQQYNRAEDSICLADSKPLPHQNVTNHVGKAVEDCMRAIIGVLLNLTNDNEWGSTKTGEQDGLIGTALNCVLQVPKYLPQEQRFDIRVLLFLERERAAQLAESKTDELIKDAPTTQHDKSGEWQETSGEIQWVSTEKTDGTEEKHKKEEEDEELDLNKALQHAGKHMEDCIVASYTALLLGCLCQESPINVTTVREYLPEGDFSIMTEMLKKFLSFMNLTCAVGTTGQKSISRVIEYLEHC

SEQ ID NO: 9324 - protein, 753 aa, Homo sapiens
MGRLQLVVLGLTCCWAVASAAKLGAVYTEGGFVEGVNKKLGLLGDSVDIFKGIPFAAPTKALENPQPHPGWQGTLKAKNFKKRCLQATITQDSTYGDEDCLYLNIWVPQGRKQVSRDLPVMIWIYGGAFLMGSGHGANFLNNYLYDGEEIATRGNVIVVTFNYRVGPLGFLSTGDANLPGNYGLRDQHMAIAWVKRNIAAFGGDPNNITLFGESAGGASVSLQTLSPYNKGLIRRAISQSGVALSPWVIQKNPLFWAKKVAEKVGCPVGDAARMAQCLKVTDPRALTLAYKVPLAGLEYPMLHYVGFVPVIDGDFIPADPINLYANAADIDYIAGTNNMDGHIFASIDMPAINKGNKKVTEEDFYKLVSEFTITKGLRGAKTTFDVYTESWAQDPSQENKKKTVVDFETDVLFLVPTEIALAQHRANAKSAKTYAYLFSHPSRMPVYPKWVGADHADDIQYVFGKPFATPTGYRPQDRTVSKAMIAYWTNFAKTGDPNMGDSAVPTHWEPYTTENSGYLEITKKMGSSSMKRSLRTNFLRYWTLTYLALPTVTDQEATPVPPTGDSEATPVPPTGDSETAPVPPTGDSGAPPVPPTGDSGAPPVPPTGDSGAPPVPPTGDSGAPPVPPTGDSGAPPVPPTGDSGAPPVPPTGDSGAPPVPPTGDSGAPPVPPTGDAGPPPVPPTGDSGAPPVPPTGDSGAPPVTPTGDSETAPVPPTGDSGAPPVPPTGDSEAAPVPPTDDSKEAQMPAVIRF

SEQ ID NO: 9325 - protein, 542 aa, Homo sapiens
MDRSKRNSIAGFPPRVERLEEFEGGGGGEGNVSQVGRVWPSSYRALISAFSRLTRLDDFTCEKIGSGFFSEVFKVRHRASGQVMALKMNTLSSNRANMLKEVQLMNRLSHPNILRFMGVCVHQGQLHALTEYINSGNLEQLLDSNLHLPWTVRVKLAYDIAVGLSYLHFKGIFHRDLTSKNCLIKRDENGYSAVVADFGLAEKIPDVSMGSEKLAVVGSPFWMAPEVLRDEPYNEKADVFSYGIILCEIIARIQADPDYLPRTEMDPKLRPSFVEIGKTLEEILSRLQEEEQERDRKLQPTARGLLEKAPGVKRLSSLDDKIPHKSPCPRRTIWLSRSQSDIFSRKPPRTVSVLDPYYRPRDGAARTPKVNPFSARQDLMGGKIKFFDLPSKSVISLVFDLDAPGPGTMPLADWQEPLAPPIRRWRSLPGSPEFLHQEACPFVGREESLSDGPPPRLSSLKYRVKEIPPFRASALPAAQAHEAMDCSILQEENGFGSRPQGTSPCPAGASEEMEVEERPAGSTPATFSTSGIGLQTQGKQDG

SEQ ID NO: 9326 - protein, 571 aa, Homo sapiens
MDRSKRNSIAGFPPRVERLEEFEGGGGGEGNVSQVGRVWPSSYRALISAFSRLTRLDDFTCEKIGSGFFSEVFKVRHRASGQVMALKMNTLSSNRANMLKEVQLMNRLSHPNILRFMGVCVHQGQLHALTEYINSGNLEQLLDSNLHLPWTVRVKLAYDIAVGLSYLHFKGIFHRDLTSKNCLIKRDENGYSAVVADFGLAEKIPDVSMGSEKLAVVGSPFWMAPEVLRDEPYNEKADVFSYGIILCEIIARIQADPDYLPRTENFGLDYDAFQHMVGDCPPDFLQLTFNCCNMDPKLRPSFVEIGKTLEEILSRLQEEEQERDRKLQPTARGLLEKAPGVKRLSSLDDKIPHKSPCPRRTIWLSRSQSDIFSRKPPRTVSVLDPYYRPRDGAARTPKVNPFSARQDLMGGKIKFFDLPSKSVISLVFDLDAPGPGTMPLADWQEPLAPPIRRWRSLPGSPEFLHQEACPFVGREESLSDGPPPRLSSLKYRVKEIPPFRASALPAAQAHEAMDCSILQEENGFGSRPQGTSPCPAGASEEMEVEERPAGSTPATFSTSGIGLQTQGKQDG

SEQ ID NO: 9327 - protein, 1047 aa, Homo sapiens
MEEKTQIKTFLGSKLPKYGTKSVRSTLQPMPNGTPVNLLGTSKNSNVKSYIKNNGSDCPSSHSFNWRKANKYQLCAQGVEEPNNTQNSHDKIIDPEKRVPTQGMFDKNGIKGGLKSVSLFTSKLAKPSTMFVSSTEELNQKSFSGPSNLGKFTKGTLLGRTSYSSINTPKSQLNGFYGNRSAGSMQRPRANSCATRSSSGESLAQSPDSSKSINCEKMVRSQSFSHSIQNSFLPPSSITRSHSFNRAVDLTKPYQNQQLSIRVPLRSSMLTRNSRQPEVLNGNEHLGYGFNRPYAAGGKKLALPNGPGVTSTLGYRMVHPSLLKSSRSPFSGTMTVDGNKNSPADTCVEEDATVLAKDRAANKDQELIENESYRTKNNQTMKHDAKMRYLSDDVDDISLSSLSSSDKNDLSEDFSDDFIDIEDSNRTRITPEEMSLKEEKHENGPPQDMFDSPKENEKAFSKTDEWIDISVSDRSECTKHTSGNNLVSPDTDYRAGSSFELSPSDSSDGTYMWDEEGLEPIGNVHPVGSYESSEMNSIDILNNLESCDLEDDDLMLDVDLPEDAPLENVECDNMNRFDRPDRNVRQPQEGFWKRPPQRWSGQEHYHLSHPDHYHHHGKSDLSRGSPYRESPLGHFESYGGMPFFQAQKMFVDVPENTVILDEMTLRHMVQDCTAVKTQLLKLKRLLHQHDGSGSLHDIQLSLPSSPEPEDGDKVYKNEDLLNEIKQLKDEIKKKDEKIQLLELQLATQHICHQKCKEEKCTYADKYTQTPWRRIPPQVLQPSSSLPRPTDHTQGKLIKPQRIEARSECSIQDMHQGGAHPEESFTHVLHQESNYGLEEQPFSSGPQLTMDVAKSTPSEANLNITVNAQEPYHLANNQISDMQFIPTSLQTPPESSTVDQAKRVGRNQSPPVGYMSQPKSLQLLKPSILSSLVPPPVSESSPSRTPTCKKSPIITTCNSAKLQPTSSQTNLANNQNLKASKLRPPSGSFKQKQTNSPQLEPQSFQAKTSIPRPLTQRKEIMQNPNGNLHSGDCLASNRYSRLPKPKIH

SEQ ID NO: 9328 - protein, 519 aa, Homo sapiens
MAAEAADLGLGAAVPVELRRERRMVCVEYPGVVRDVAKMLPTLGGEEGVSRIYADPTKRLELYFRPKDPYCHPVCANRFSTSSLLLRIRKRTRRQKGVLGTEAHSEVTFDMEILGIISTIYKFQGMSDFQYLAVHTEAGGKHTSMYDKVLMLRPEKEAFFHQELPLYIPPPIFSRLDAPVDYFYRPETQHREGYNNPPISGENLIGLSRARRPHNAIFVNFEDEEVPKQPLEAAAQTWRRVCTNPVDRKVEEELRKLFDIRPIWSRNAVKANISVHPDKLKVLLPFIAYYMITGPWRSLWIRFGYDPRKNPDAKIYQVLDFRIRCGMKHGYAPSDLPVKAKRSTYNYSLPITVKKTSSQLVTMHDLKQGLGPSGTSGARKPASSKYKLKDSVYIFREGALPPYRQMFYQLCDLNVEELQKIIHRNDGAENSCTERDGWCLPKTSDELRDTMSLMIRQTIRSKRPALFSSSAKADGGKEQLTYESGEDEEDEEEEEEEEEDFKPSDGSENEMETEILDYV

SEQ ID NO: 9329 - protein, 623 aa, Homo sapiens
MRVALGMLWLLALAWPPQARGFCPSQCSCSLHIMGDGSKARTVVCNDPDMTLPPASIPPDTSRLRLERTAIRRVPGEAFRPLGRLEQLWLPYNALSELNALMLRGLRRLRELRLPGNRLAAFPWAALRDAPKLRLLDLQANRLSAVPAEAARFLENLTFLDLSSNQLMRLPQELIVSWAHLETGIFPPGHHPRRVLGLQDNPWACDCRLYDLVHLLDGWAPNLAFIETELRCASPRSLAGVAFSQLELRKCQGPELHPGVASIRSLLGGTALLRCGATGVPGPEMSWRRANGRPLNGTVHQEVSSDGTSWTLLGLPAVSHLDSGDYICQAKNFLGASETVISLIVTEPPTSTEHSGSPGALWARTGGGGEAAAYNNKLVARHVPQIPKPAVLATGPSVPSTKEELTLEHFQMDALGELSDGRAGPSEARMVRSVKVVGDTYHSVSLVWKAPQAKNTTAFSVLYAVFGQHSMRRVIVQPGKTRVTITGLLPKTKYVACVCVQGLVPRKEQCVIFSTNEVVDAENTQQLINVVVISVAIVIALPLTLLVCCSALQKRCRKCFNKDSTEATVTYVNLERLGYSEDGLEELSRHSVSEADRLLSARSSVDFQAFGVKGGRRINEYFC

SEQ ID NO: 9330 - protein, 526 aa, Homo sapiens
MAAEAADLGLGAAVPVELRRERRMVCVEYPGVVRDVAKMLPTLGGEEGVSRIYADPTKRLELYFRPKDPYCHPVCANRFSTSSLLLRIRKRTRRQKGVLGTEAHSEVTFDMEILGIISTIYKFQGMSDFQYLAVHTEAGGKHTSMYDKVLMLRPEKEAFFHQELPLYIPPPIFSRLDAPVDYFYRPETQHREGYNNPPISGENLIGLSRARRPHNAIFVNFEDEEVPKQPLEAAAQTWRRVCTNPVDRKVEEELRKLFDIRPIWSRNAVKANISVHPDKLKVLLPFIAYYMITGPWRSLWIRFGYDPRKNPDAKIYQVLDFRIRCGMKHGYAPSDLPVKAKRSTYNYSLPITVKKTSSQLVTMHDLKQGLGPSGTSGARKPASSKYKLKVSLQTLRDSVYIFREGALPPYRQMFYQLCDLNVEELQKIIHRNDGAENSCTERDGWCLPKTSDELRDTMSLMIRQTIRSKRPALFSSSAKADGGKEQLTYESGEDEEDEEEEEEEEEDFKPSDGSENEMETEILDYV

SEQ ID NO: 9331 - protein, 550 aa, Homo sapiens
MASVFHYFLLVLVFLDTHAAQPFCLPGCTCSEESFGRTLQCTSVSLGKIPGNLSEEFKQVRIENSPLFEMPQGSFINMSTLEYLWLNFNNISVIHLGALEHLPELRELRLEGNKLCSVPWTAFRATPLLRVLDLKRNKIDALPELALQFLVSLTYLDLSSNRLTVVSKSVFLNWPAYQKCRQPDCGAEILSSLVVALHDNPWVCDCRLRGLVQFVKSITLPVILVNSYLICQGPLSKAGQLFHETELSACMKPQISTPSANITIRAGQNVTLRCLAQASPSPSIAWTYPLSMWREFDVLTSSTGEDTALSELAIPAAHLVDSGNYTCMASNSIGKSNLVISLHVQPAQALHAPDSLSIPSEGNAYIDLRVVKQTVHGILLEWLAVADTSKEEWFTLYIASDEAFRKEVVHIGPGINTYAVDDLLPGTKYEACLSLEGQPPHQGQCVAFVTGRDAGGLEAREHLLHVTVVLCVVLLAVPVGAYAWAAQGPCSCSKWVLRGCLHRRKAPSCTPAAPQSKDGSFREHPAVCDDGEGHIDTEGDKEKGGTEDNS

SEQ ID NO: 9332 - protein, 253 aa, Homo sapiens
MAAARATTPADGEEPAPEAEALAAARERSSRFLSGLELVKQGAEARVFRGRFQGRAAVIKHRFPKGYRHPALEARLGRRRTVQEARALLRCRRAGISAPVVFFVDYASNCLYMEEIEGSVTVRDYIQSTMETEKTPQGLSNLAKTIGQVLARMHDEDLIHGDLTTSNMLLKPPLEQLNIVLIDFGLSFISALPEDKGVDLYVLEKAFLSTHPNTETVFEAFLKSYSTSSKKARPVLKKLDEVRLRGRKRSMVG

SEQ ID NO: 9333 - protein, 597 aa, Homo sapiens
ITVVAKDGGGRLHGADVVFSATTTVTVNVEDVQDMAPVFVGTPYYGYVYEDTLPGSEVLKVVAMDGDRGKPNRILYSLVNGNDGAFEINETSGAISITQSPAQLQREVYELHVQVTEMSPAGSPAAQATVPVTIRIVDLNNHPPTFYGESGPQNRFELSMNEHPPQGEILRGLKITVNDSDQGANAKFNLQLVGPRGIFRVVPQTVLNEAQVTIIVENSAAIDFEKSKVLTFKAVDPDTGPWGEVKYSTYGTGADLFLIHPSTGLIYTQPWASLDAEATARYNFYVKAEDMEGKYSVAEVFITLLDVNDHPPQFGKSVQKKTMVLGTPVKIEAIDEDAEEPNNLVDYSITHAEPANVFDINSHTGEIWLKNSIRSLDALHNITPGRDCLWSLEVQAKDRGSPSFSTTALLKIDITDAETLSRSPMAAFLIQTKDNPMKAVGVLAGTMATVVAITVLISTATFWRNKKSNKVLPMRRVLRKRPSPAPRTIRIEWLKSKSTKAATKFMLKEKPPNENCNNNSPESSLLPRAPALPPPPSVAPSTGAAQWTVPTVSGSLTPQPTQPPPKPKTMGSPVQSTLISELKQKFEKKSVHNKAYF

SEQ ID NO: 9334 - protein, 1257 aa, Homo sapiens
MASCSFTRDQATRRLRGAAAAAAAALAAVVTTPLLSSGTPTALIGTGSSCPGAMWLSTATGSRSDSESEEEDLPVGEEVCKRGYLRKQKHGHRRYFVLKLETADAPARLEYYENARKFRHSVRAAAAAAAAAASGAAIPPLIPPRRVITLYQCFSVSQRADARYRHLIALFTQDEYFAMVAENESEQESWYLLLSRLILESKRRRCGTLGAQPDGEPAALAAAAAAEPPFYKDVWQVIVKPRGLGHRKELSGVFRLCLTDEEVVFVRLNTEVASVVVQLLSIRRCGHSEQYFFLEVGRSTVIGPGELWMQVDDCVVAQNMHELFLEKMRALCADEYRARCRSYSISIGAHLLTLLSARRHLGLVPLEPGGWLRRSRFEQFCHLRAIGDGEDEMLFTRRFVTPSEPVAHSRRGRLHLPRGRRSRRAVSVPASFFRRLAPSPARPRHPAEAPNNGARLSSEVSGSGSGNFGEEGNPQGKEDQEGSGGDYMPMNNWGSGNGRGSGGGQGSNGQGSSSHSSGGNQCSGEGQGSRGGQGSNGQGSGGNQCSRDGQGTAGGHGSGGGQRPGGGHGSGGGQGPGDGHGSGGGKNSGGGKGSGSGKGSDGDGERGKSLKKRSYFGKLTQSKQQQMPPPPPPPPPPPPAGGTGGKGKSGGRFRLYFCVDRGATKECKEAKEVKDAEIPEGAARGPHRARAFDEDEDDPYVPMRPGVATPLVSSSDYMPMAPQNVSASKKRHSRSPFEDSRGYMMMFPRVSPPPAPSPPKAPDTNKEDDSKDNDSESDYMFMAPGAGAIPKNPRNPQGGSSSKSWSSYFSLPNPFRSSPLGQNDNSEYVPMLPGKFLGRGLDKEVSYNWDPKDAASKPSGEGSFSKPGDGGSPSKPSDHEPPKNKAKRPNRLSFITKGYKIKPKPQKPTHEQREADSSSDYVNMDFTKRESNTPAPSTQGLPDSWGIIAEPRQSAFSNYVNVEFGVPFPNPANDLSDLLRAIPRANPLSLDSARWPLPPLPLSATGSNAIEEEGDYIEVIFNSAMTPAMALADSAIRYDAETGRIYVVDPFSECCMDISLSPSRCSEPPPVARLLQEEEQERRRPQSRSQSFFAAARAAVSAFPTDSLERDLSPSSAPAVASAAEPTLALSQVVAAASALAAAPGIGAAAAAAGFDSASARWFQPVANAADAEAVRGAQDVAGGSNPGAHNPSANLARGDNQAGGAAAAAAAPEPPPRSRRVPRPPEREDSDNDDDTHVRMDFARRDNQFDSPKRGR

SEQ ID NO: 9335 - protein, 696 aa, Homo sapiens
MSEGAAAASPPGAASAAAASAEEGTAAAAAAAAAGGGPDGGGEGAAEPPRELRCSDCIVWNRQQTWLCVVPLFIGFIGLGLSLMLLKWIVVGSVKEYVPTDLVDSKGMGQDPFFLSKPSSFPKAMETTTTTTSTTSPATPSAGGAASSRTPNRISTRLTTITRAPTRFPGHRVPIRASPRSTTARNTAAPATVPSTTAPFFSSSTLGSRPPVPGTPSTQAMPSWPTAAYATSSYLHDSTPSWTLSPFQDAASSSSSSSSSATTTTPETSTSPKFHTTTYSTERSEHFKPCRDKDLAYCLNDGECFVIETLTGSHKHCRCKEGYQGVRCDQFLPKTDSILSDPTDHLGIEFMESEEVYQRQVLSISCIIFGIVIVGMFCAAFYFKSKKQAKQIQEQLKVPQNGKSYSLKASSTMAKSENLVKSHVQLQNYSKVERHPVTALEKMMESSFVGPQSFPEVPSPDRGSQSVKHHRSLSSCCSPGQRSGMLHRNAFRRTPPSPRSRLGGIVGPAYQQLEESRIPDQDTIPCQGYSSSGLKTQRNTSINMQLPSRETNPYFNSLEQKDLVGYSSTRASSVPIIPSVGLEETCLQMPGISEVKSIKWCKNSYSADVVNVSIPVSDCLIAEQQEVKILLETVQEQIRILTDARRSEDYELASVETEDSASENTAFLPLSPTAKSEREAQFVLRNEIQRDSALTK

SEQ ID NO: 9336 - protein, 499 aa, Homo sapiens
MECGIPPTLVCVGRGGGLHTINIIIWYYFPSAWRTCFNISSSVGLLLTNSYKFYTTTYSTERSEHFKPCRDKDLAYCLNDGECFVIETLTGSHKHCRCKEGYQGVRCDQFLPKTDSILSDPTDHLGIEFMESEEVYQRQVLSISCIIFGIVIVGMFCAAFYFKSKKQAKQIQEQLKVPQNGKSYSLKASSTMAKSENLVKSHVQLQNYSKVERHPVTALEKMMESSFVGPQSFPEVPSPDRGSQSVKHHRSLSSCCSPGQRSGMLHRNAFRRTPPSPRSRLGGIVGPAYQQLEESRIPDQDTIPCQGIEVRKTISHLPIQLWCVERPLDLKYSSSGLKTQRNTSINMQLPSRETNPYFNSLEQKDLVGYSSTRASSVPIIPSVGLEETCLQMPGISEVKSIKWCKNSYSADVVNVSIPVSDCLIAEQQEVKILLETVQEQIRILTDARRSEDYELASVETEDSASENTAFLPLSPTAKSEREAQFVLRNEIQRDSALTK

SEQ ID NO: 9337 - protein, 851 aa, Homo sapiens
MAPDLASQRHSESFPSVNSRPNVILPGREGRREGLPPGGGTRGSLVPTRPVPPSPAPLGTSPYSWSRSGPGRGGGAGSSRVPRGVPGPAVCAPGSLLHHASPTQTMAAADGSLFDNPRTFSRRPPAQASRQAKATKRKYQASSEAPPAKRRNETSFLPAKKTSVKETQRTFKGNAQKMFSPKKHSVSTSDRNQEERQCIKTSSLFKNNPDIPELHRPVVKQVQEKVFTSAAFHELGLHPHLISTINTVLKMSSMTSVQKQSIPVLLEGRDALVRSQTGSGKTLAYCIPVVQSLQAMESKIQRSDGPYALVLVPTRELALQSFDTVQKLLKPFTWIVPGVLMGGEKRKSEKARLRKGINILISTPGRLVDHIKSTKNIHFSRLRWLVFDEADRILDLGFEKDITVILNAVNAECQKRQNVLLSATLTEGVTRLADISLHDPVSISVLDKSHDQLNPKDKAVQEVCPPPAGDKLDSFAIPESLKQHVTVVPSKLRLVCLAAFILQKCKFEEDQKMVVFFSSCELVEFHYSLFLQTLLSSSGAPASGQLPSASMRLKFLRLHGGMEQEERTAVFQEFSHSRRGVLLCTDVAARGLDLPQVTWIVQYNAPSSPAEYIHRIGRTARIGCHGSSLLILAPSEAEYVNSLASHKINVSEIKMEDILCVLTRDDCFKGKRWGAQKSHAVGPQEIRERATVLQTVFEDYVHSSERRVSWAKKALQSFIQAYATYPRELKHIFHVRSLHLGHVAKSFGLRDAPRNLSALTRKKRKAHVKRPDLHKKTQSKHSLAEILRSEYSSGMEADIAKVKKQNAPGEPGGRPLQHSLQPTPCFGRGKTLKWRKTQKGVQRDSKTSQKV

SEQ ID NO: 9338 - protein, 276 aa, Homo sapiens
MDADSLLLSLELASGSGQGLSPDRRASLLTSLMLVKRDYRYDRVLFWGRILGLVADYYIAQGLSEDQLAPRKTLYSLNCTEWSLLPPATEEMVAQSSVVKGRFMGDPSYEYEHTELQKVNEGEKVFEEEIVVQIKEETRLVSVIDQIDKAVAIIPRGALFKTPFGPTHVNRTFEGLSLSEAKKLSSYFHFREPVELKNKTLLEKADLDPSLDFMDSLEHDIPKGSWSIQMERGNALVVLRSLLWPGLTFYHAPRTKNYGYVYVGTGEKNMDLPFML

SEQ ID NO: 9339 - protein, 306 aa, Homo sapiens
MDADSLLLSLELASGSGQGLSPDRRASLLTSLMLVKRDYRYDRVLFWGRILGLVADYYIAQGLSEDQLAPRKTLYSLNCTEWSLLPPATEEMVAQSSVVKGRFMGDPSYEYEHTELQKVNEGEKVFEEEIVIDKAVAIIPRGALFKTPFGPTHVNRTFEGLSLSEAKKLSSYFHFREPVELKNKTLLEKADLDPSLDFMDSLEHDIPKGSEAVVQGDFTWLLSRCGFGWPCSWDSCSVSMRVLEHPDGEGQCPGGAAQPALAGPHLLPCSPHQELWLRLRGHWREEHGLALHAIEWEPAWMFLNRV

SEQ ID NO: 9340 - protein, 274 aa, Homo sapiens
MAAPEAEVLSSAAVPDLEWYEKSEETHASQIELLETSSTQEPLNASEAFCPRDCMVPVVFPGPVSQEGCCQFTCELLKHIMYQRQQLPLPYEQLKHFYRKPSPQAEEMLKKKPRATTEVSSRKCQQALAELESVLSHLEDFFARTLVPRVLILLGGNALSPKEFYELDLSLLAPYSVDQSLSTAACLRRLFRAIFMADAFSELQAPPLMGTVVMAQGHRNCGEDWFRPKLNYRVPSRGHKLTVTLSCGRPSIRTTAWEDYIWFQAPVTFKGFRE

SEQ ID NO: 9341 - protein, 861 aa, Homo sapiens
MAGPGPGAVLESPRQLLGRVRFLAEAARSLRAGRPLPAALAFVPREVLYKLYKDPAGPSRVLLPVWEAEGLGLRVGAAGPAPGTGSGPLRAARDSIELRRGACVRTTGEELCNGHGLWVKLTKEQLAEHLGDCGLQEGWLLVCRPAEGGARLVPIDTPNHLQRQQQLFGVDYRPVLRWEQVVDLTYSHRLGSRPQPAEAYAEAVQRLLYVPPTWTYECDEDLIHFLYDHLGKEDENLGSVKQYVESIDVSSYTEEFNVSCLTDSNADTYWESDGSQCQHWVRLTMKKGTIVKKLLLTVDTTDDNFMPKRVVVYGGEGDNLKKLSDVSIDETLIGDVCVLEDMTVHLPIIEIRIVECRDDGIDVRLRGVKIKSSRQRELGLNADLFQPTSLVRYPRLEGTDPEVLYRRAVLLQRFIKILDSVLHHLVPAWDHTLGTFSEIKQVKQFLLLSRQRPGLVAQCLRDSESSKPSFMPRLYINRRLAMEHRACPSRDPACKNAVFTQVYEGLKPSDKYEKPLDYRWPMRYDQWWECKFIAEGIIDQGGGFRDSLADMSEELCPSSADTPVPLPFFVRTANQGNGTGEARDMYVPNPSCRDFAKYEWIGQLMGAALRGKEFLVLALPGFVWKQLSGEEVSWSKDFPAVDSVLVKLLEVMEGMDKETFEFKFGKELTFTTVLSDQQVVELIPGGAGIVVGYGDRSRFIQLVQKARLEESKEQVAAMQAGLLKVVPQAVLDLLTWQELEKKVCGDPEVTVDALRKLTRFEDFEPSDSRVQYFWEALNNFTNEDRSRFLRFVTGRSRLPARIYIYPDKLGYETTDALPESSTCSSTLFLPHYASAKVCEEKLRYAAYNCVAIDTDMSPWEE

SEQ ID NO: 9342 - protein, 412 aa, Homo sapiens
MEFQAVVMAVGGGSRMTDLTSSIPKPLLPVGNKPLIWYPLNLLERVGFEEVIVVTTRDVQKALCAEFKMKMKPDIVCIPDDADMGTADSLRYIYPKLKTDVLVLSCDLITDVALHEVVDLFRAYDASLAMLMRKGQDSIEPVPGQKGKKKAVEQRDFIGVDSTGKRLLFMANEADLDEELVIKGSILQKHPRIRFHTGLVDAHLYCLKKYIVDFLMENGSITSIRSELIPYLVRKQFSSASSQQGQEEKEEDLKKKELKSLDIYSFIKEANTLNLAPYDACWNACRGDRWEDLSRSQVRCYVHIMKEGLCSRVSTLGLYMEANRQVPKLLSALCPEEPPVHSSAQIVSKHLVGVDSLIGPETQIGEKSSIKRSVIGSSCLIKDRVTITNCLLMNSVTVEEGYVSPCTHLRQR

SEQ ID NO: 9343 - protein, 1203 aa, Homo sapiens
MTRSPPLRELPPSYTPPARTAAPQILAGSLKAPLWLRAYFQGLLFSLGCGIQRHCGKVLFLGLLAFGALALGLRMAIIETNLEQLWVEVGSRVSQELHYTKEKLGEEAAYTSQMLIQTARQEGENILTPEALGLHLQAALTASKVQVSLYGKSWDLNKICYKSGVPLIENGMIERMIEKLFPCVILTPLDCFWEGAKLQGGSAYLPGRPDIQWTNLDPEQLLEELGPFASLEGFRELLDKAQVGQAYVGRPCLHPDDLHCPPSAPNHHSRQAPNVAHELSGGCHGFSHKFMHWQEELLLGGMARDPQGELLRAEALQSTFLLMSPRQLYEHFRGDYQTHDIGWSEEQASTVLQAWQRRFVQLAQEALPENASQQIHAFSSTTLDDILHAFSEVSAARVVGGYLLMLAYACVTMLRWDCAQSQGSVGLAGVLLVALAVASGLGLCALLGITFNAATTQVLPFLALGIGVDDVFLLAHAFTEALPGTPLQERMGECLQRTGTSVVLTSINNMAAFLMAALVPIPALRAFSLQAAIVVGCTFVAVMLVFPAILSLDLRRRHCQRLDVLCCFSSPCSAQVIQILPQELGDGTVPVGIAHLTATVQAFTHCEASSQHVVTILPPQAHLVPPPSDPLGSELFSPGGSTRDLLGQEEETRQKAACKSLPCARWNLAHFARYQFAPLLLQSHAKAIVLVLFGALLGLSLYGATLVQDGLALTDVVPRGTKEHAFLSAQLRYFSLYEVALVTQGGFDYAHSQRALFDLHQRFSSLKAVLPPPATQAPRTWLHYYRNWLQGIQAAFDQDWASGRITRHSYRNGSEDGALAYKLLIQTGDAQEPLDFSQLTTRKLVDREGLIPPELFYMGLTVWVSSDPLGLAASQANFYPPPPEWLHDKYDTTGENLRIPPAQPLEFAQFPFLLRGLQKTADFVEAIEGARAACAEAGQAGVHAYPSGSPFLFWEQYLGLRRCFLLAVCILLVCTFLVCALLLLNPWTAGLIVLVLAMMTVELFGIMGFLGIKLSAIPVVILVASVGIGVEFTVHVALGFLTTQGSRNLRAAHALEHTFAPVTDGAISTLLGLLMLAGSHFDFIVRYFFAALTVLTLLGLLHGLVLLPVLLSILGPPPEVIQMYKESPEILSPPAPQGGGLRWGASSSLPQSFARVTTSMTVAIHPPPLPGAYIHPAPDEPPWSPAATSSGNLSSRGPGPATG

SEQ ID NO: 9344 - protein, 646 aa, Homo sapiens
MEPAAGFLSPRPFQRAAAAPAPPAGPGPPPSALRGPELEMLAGLPTSDPGRLITDPRSGRTYLKGRLLGKGGFARCYEATDTETGSAYAVKVIPQSRVAKPHQREKILNEIELHRDLQHRHIVRFSHHFEDADNIYIFLELCSRKSLAHIWKARHTLLEPEVRYYLRQILSGLKYLHQRGILHRDLKLGNFFITENMELKVGDFGLAARLEPPEQRKKTICGTPNYVAPEVLLRQGHGPEADVWSLGCVMYTLLCGSPPFETADLKETYRCIKQVHYTLPASLSLPARQLLAAILRASPRDRPSIDQILRHDFFTKGYTPDRLPISSCVTVPDLTPPNPARSLFAKVTKSLFGRKKKSKNHAQERDEVSGLVSGLMRTSVGHQDARPEAPAASGPAPVSLVETAPEDSSPRGTLASSGDGFEEGLTVATVVESALCALRNCIAFMPPAEQNPAPLAQPEPLVWVSKWVDYSNKFGFGYQLSSRRVAVLFNDGTHMALSANRKTVHYNPTSTKHFSFSVGAVPRALQPQLGILRYFASYMEQHLMKGGDLPSVEEVEVPAPPLLLQWVKTDQALLMLFSDGTVQVNFYGDHTKLILSGWEPLLVTFVARNRSACTYLASHLRQLGCSPDLRQRLRYALRLLRDRSPA

SEQ ID NO: 9345 - protein, 395 aa, Homo sapiens
MNGPVDGLCDHSLSEGVFMFTSESVGEGHPDKICDQISDAVLDAHLKQDPNAKVACETVCKTGMVLLCGEITSMAMVDYQRVVRDTIKHIGYDDSAKGFDFKTCNVLVALEQQSPDIAQCVHLDRNEEDVGAGDQGLMFGYATDETEECMPLTIILAHKLNARMADLRRSGLLPWLRPDSKTQVTVQYMQDNGAVIPVRIHTIVISVQHNEDITLEEMRRALKEQVIRAVVPAKYLDEDTVYHLQPSGRFVIGGPQGDAGVTGRKIIVDTYGGWGAHGGGAFSGKDYTKVDRSAAYAARWVAKSLVKAGLCRRVLVQVSYAIGVAEPLSISIFTYGTSQKTERELLDVVHKNFDLRPGVIVRDLDLKKPIYQKTACYGHFGRSEFPWEVPRKLVF

SEQ ID NO: 9346 - protein, 1691 aa, Homo sapiens
MLINKLWLLLVTLCLTEELAAAGEKSYGKPCGGQDCSGSCQCFPEKGARGRPGPIGIQGPTGPQGFTGSTGLSGLKGERGFPGLLGPYGPKGDKGPMGVPGFLGINGIPGHPGQPGPRGPPGLDGCNGTQGAVGFPGPDGYPGLLGPPGLPGQKGSKGDPVLAPGSFKGMKGDPGLPGLDGITGPQGAPGFPGAVGPAGPPGLQGPPGPPGPLGPDGNMGLGFQGEKGVKGDVGLPGPAGPPPSTGELEFMGFPKGKKGSKGEPGPKGFPGISGPPGFPGLGTTGEKGEKGEKGIPGLPGPRGPMGSEGVQGPPGQQGKKGTLGFPGLNGFQGIEGQKGDIGLPGPDVFIDIDGAVISGNPGDPGVPGLPGLKGDEGIQGLRGPSGVPGLPALSGVPGALGPQGFPGLKGDQGNPGRTTIGAAGLPGRDGLPGPPGPPGPPSPEFETETLHNKESGFPGLRGEQGPKGNLGLKGIKGDSGFCACDGGVPNTGPPGEPGPPGPWGLIGLPGLKGARGDRGSGGAQGPAGAPGLVGPLGPSGPKGKKGEPILSTIQGMPGDRGDSGSQGFRGVIGEPGKDGVPGLPGLPGLPGDGGQGFPGEKGLPGLPGEKGHPGPPGLPGNGLPGLPGPRGLPGDKGKDGLPGQQGLPGSKGITLPCIIPGSYGPSGFPGTPGFPGPKGSRGLPGTPGQPGSSGSKGEPGSPGLVHLPELPGFPGPRGEKGLPGFPGLPGKDGLPGMIGSPGLPGSKGATGDIFGAENGAPGEQGLQGLTGHKGFLGDSGLPGLKGVHGKPGLLGPKGERGSPGTPGQVGQPGTPGSSGPYGIKGKSGLPGAPGFPGISGHPGKKGTRGKKGPPGSIVKKGLPGLKGLPGNPGLVGLKGSPGSPGVAGLPALSGPKGEKGSVGFVGFPGIPGLPGIPGTRGLKGIPGSTGKMGPSGRAGTPGEKGDRGNPGPVGIPSPRRPMSNLWLKGDKGSQGSAGSNGFPGPRGDKGEAGRPGPPGLPGAPGLPGIIKGVSGKPGPPGFMGIRGLPGLKGSSGITGFPGMPGESGSQGIRGSPGLPGASGLPGLKGDNGQTVEISGSPGPKGQPGESGFKGTKGRDGLIGNIGFPGNKGEDGKVGVSGDVGLPGAPGFPGVAGMRGEPGLPGSSGHQGAIGPLGSPGLIGPKGFPGFPGLHGLNGLPGTKGTHGTPGPSITGVPGPAGLPGPKGEKGYPGIGIGAPGKPGLRGQKGDRGFPGLQGPAGLPGAPGISLPSLIAGQPGDPGRPGLDGERGRPGPAGPPGPPGPSSNQGDTGDPGFPGIPGPKGPKGDQGIPGFSGLPGELGLKGMRGEPGFMGTPGKVGPPGDPGFPGMKGKAGPRGSSGLQGDPGQTPTAEAVQVPPGPLGLPGIDGIPGLTGDPGAQGPVGLQGSKGLPGIPGKDGPSGLPGPPGALGDPGLPGLQGPPGFEGAPGQQGPFGMPGMPGQSMRVGYTLVKHSQSEQVPPCPIGMSQLWVGYSLLFVEGQEKAHNQDLGFAGSCLPRFSTMPFIYCNINEVCHYARRNDKSYWLSTTAPIPMMPVSQTQIPQYISRCSVCEAPSQAIAVHSQDITIPQCPLGWRSLWIGYSFLMHTAAGAEGGGQSLVSPGSCLEDFRATPFIECSGARGTCHYFANKYSFWLTTVEERQQFGELPVSETLKAGQLHTRVSRCQVCMKSL

SEQ ID NO: 9347 - protein, 671 aa, Homo sapiens
MIDFDDVAAINPELLQLLPLHPKDNLPLQENVTIQKQKRRSVNSKIPAPKESLRSRSTRMSTVSELRITAQENDMEVELPAAANSRKQFSVPPAPTRPSCPAVAEIPLRMVSEEMEEQVHSIRGSSSANPVNSVRRKSCLVKEVEKMKNKREEKKAQNSEMRMKRAQEYDSSFPNWEFARMIKEFRATLECHPLTMTDPIEEHRICVCVRKRPLNKQELAKKEIDVISIPSKCLLLVHEPKLKVDLTKYLENQAFCFDFAFDETASNEVVYRFTARPLVQTIFEGGKATCFAYGQTGSGKTHTMGGDLSGKAQNASKGIYAMASRDVFLLKNQPCYRKLGLEVYVTFFEIYNGKLFDLLNKKAKLRVLEDGKQQVQVVGLQEHLVNSADDVIKMIDMGSACRTSGQTFANSNSSRSHACFQIILRAKGRMHGKFSLVDLAGNERGADTSSADRQTRMEGAEINKSLLALKECIRALGQNKAHTPFRESKLTQVLRDSFIGENSRTCMIATISPGISSCEYTLNTLRYADRVKELSPHSGPSGEQLIQMETEEMEACSNGALIPGNLSKEEEELSSQMSSFNEAMTQIRELEEKAMEELKEIIQQGPDWLELSEMTEQPDYDLETFVNKAESALAQQAKHFSALRDVIKALRLAMQLEEQASRQISSKKRPQ

SEQ ID NO: 9348 - protein, 725 aa, Homo sapiens
MAMDSSLQARLFPGLAIKIQRSNGLIHSANVRTVNLEKSCVSVEWAEGGATKGKEIDFDDVAAINPELLQLLPLHPKDNLPLQENVTIQKQKRRSVNSKIPAPKESLRSRSTRMSTVSELRITAQENDMEVELPAAANSRKQFSVPPAPTRPSCPAVAEIPLRMVSEEMEEQVHSIRGSSSANPVNSVRRKSCLVKEVEKMKNKREEKKAQNSEMRMKRAQEYDSSFPNWEFARMIKEFRATLECHPLTMTDPIEEHRICVCVRKRPLNKQELAKKEIDVISIPSKCLLLVHEPKLKVDLTKYLENQAFCFDFAFDETASNEVVYRFTARPLVQTIFEGGKATCFAYGQTGSGKTHTMGGDLSGKAQNASKGIYAMASRDVFLLKNQPCYRKLGLEVYVTFFEIYNGKLFDLLNKKAKLRVLEDGKQQVQVVGLQEHLVNSADDVIKMIDMGSACRTSGQTFANSNSSRSHACFQIILRAKGRMHGKFSLVDLAGNERGADTSSADRQTRMEGAEINKSLLALKECIRALGQNKAHTPFRESKLTQVLRDSFIGENSRTCMIATISPGISSCEYTLNTLRYADRVKELSPHSGPSGEQLIQMETEEMEACSNGALIPGNLSKEEEELSSQMSSFNEAMTQIRELEEKAMEELKEIIQQGPDWLELSEMTEQPDYDLETFVNKAESALAQQAKHFSALRDVIKALRLAMQLEEQASRQISSKKRPQ

SEQ ID NO: 9349 - protein, 414 aa, Homo sapiens
MATGQDRVVALVDMDCFFVQVEQRQNPHLRNKPCAVVQYKSWKGGGIIAVSYEARAFGVTRSMWADDAKKLCPDLLLAQVRESRGKANLTKYREASVEVMEIMSRFAVIERASIDEAYVDLTSAVQERLQKLQGQPISADLLPSTYIEGLPQGPTTAEETVQKEGMRKQGLFQWLDSLQIDNLTSPDLQLTVGAVIVEEMRAAIERETGFQCSAGISHNKVLAKLACGLNKPNRQTLVSHGSVPQLFSQMPIRKIRSLGGKLGASVIEILGIEYMGELTQFTESQLQSHFGEKNGSWLYAMCRGIEHDPVKPRQLPKTIGCSKNFPGKTALATREQVQWWLLQLAQELEERLTKDRNDNDRVATQLVVSIRVQGDKRLSSLRRCCALTRYDAHKMSHDAFTVIKNCNTSGIQTE

SEQ ID NO: 9350 - protein, 747 aa, Homo sapiens
MWGFLKRPVVVTADINLSLVALTGMGLLSRLWRLTYPRAVVFDEVYYGQYISFYMKQIFFLDDSGPPFGHMVLALGGYLGGFDGNFLWNRIGAEYSSNVPVWSLRLLPALAGALSVPMAYQIVLELHFSHCAAMGAALLMLIENALITQSRLMLLESVLIFFNLLAVLSYLKFFNCQKHSPFSLSWWFWLTLTGVACSCAVGIKYMGVFTYVLVLGVAAVHAWHLLGDQTLSNVGADVQCCMRPACMGQMQMSQGVCVFCHLLARAVALLVIPVVLYLLFFYVHLILVFRSGPHDQIMSSAFQASLEGGLARITQGQPLEVAFGSQVTLRNVFGKPVPCWLHSHQDTYPMIYENGRGSSHQQQVTCYPFKDVNNWWIVKDPRRHQLVVSSPPRPVRHGDMVQLVHGMTTRSLNTHDVAAPLSPHSQEVSCYIDYNISMPAQNLWRLEIVNRGSDTDVWKTILSEVRFVHVNTSAVLKLSGAHLPDWGYRQLEIVGEKLSRGYHGSTVWNVEEHRYGASQEQRERERELHSPAQVDVSRNLSFMARFSELQWRMLALRSDDSEHKYSSSPLEWVTLDTNIAYWLHPRTSAQIHLLGNIVIWVSGSLALAIYALLSLWYLLRRRRNVHDLPQDAWLRWVLAGALCAGGWAVNYLPFFLMEKTLFLYHYLPALTFQILLLPVVLQHISDHLCRSQLQRSIFSALVVAWYSSACHVSNTLRPLTYGDKSLSPHELKALRWKDSWDILIRKH

SEQ ID NO: 9351 - protein, 505 aa, Homo sapiens
MSYPGYPPPPGGYPPAAPGGGPWGGAAYPPPPSMPPIGLDNVATYAGQFNQDYLSGMAANMSGTFGGANMPNLYPGAPGAGYPPVPPGGFGQPPSAQQPVPPYGMYPPPGGNPPSRMPSYPPYPGAPVPGQPMPPPGQQPPGAYPGQPPVTYPGQPPVPLPGQQQPVPSYPGYPGSGTVTPAVPPTQFGSRGTITDAPGFDPLRDAEVLRKAMKGFGTDEQAIIDCLGSRSNKQRQQILLSFKTAYGKDLIKDLKSELSGNFEKTILALMKTPVLFDIYEIKEAIKGVGTDEACLIEILASRSNEHIRELNRAYKAEFKKTLEEAIRSDTSGHFQRLLISLSQGNRDESTNVDMSLAQRDAQELYAAGENRLGTDESKFNAVLCSRSRAHLVAVFNEYQRMTGRDIEKSICREMSGDLEEGMLAVVKCLKNTPAFFAERLNKAMRGAGTKDRTLIRIMVSRSETDLLDIRSEYKRMYGKSLYHDISGDTSGDYRKILLKICGGND

SEQ ID NO: 9352 - protein, 713 aa, Homo sapiens
MATGQDRVVALVDMDCFFVQVEQRQNPHLRNKPCAVVQYKSWKGGGIIAVSYEARAFGVTRSMWADDAKKLCPDLLLAQVRESRGKANLTKYREASVEVMEIMSRFAVIERASIDEAYVDLTSAVQERLQKLQGQPISADLLPSTYIEGLPQGPTTAEETVQKEGMRKQGLFQWLDSLQIDNLTSPDLQLTVGAVIVEEMRAAIERETGFQCSAGISHNKVLAKLACGLNKPNRQTLVSHGSVPQLFSQMPIRKIRSLGGKLGASVIEILGIEYMGELTQFTESQLQSHFGEKNGSWLYAMCRGIEHDPVKPRQLPKTIGCSKNFPGKTALATREQVQWWLLQLAQELEERLTKDRNDNDRVATQLVVSIRVQGDKRLSSLRRCCALTRYDAHKMSHDAFTVIKNCNTSGIQTEWSPPLTMLFLCATKFSASAPSSSTDITSFLSSDPSSLPKVPVTSSEAKTQGSGPAVTATKKATTSLESFFQKAAERQKVKEASLSSLTAPTQAPMSNSPSKPSLPFQTSQSTGTEPFFKQKSLLLKQKQLNNSSVSSPQQNPWSNCKALPNSLPTEYPGCVPVCEGVSKLEESSKATPAEMDLAHNSQSMHASSASKSVLEVTQKATPNPSLLAAEDQVPCEKCGSLVPVWDMPEHMDYHFALELQKSFLQPHSSNPQVVSAVSHQGKRNPKSPLACTNKRPRPEGMQTLESFFKPLTH

SEQ ID NO: 9353 - protein, 566 aa, Homo sapiens; identical to SEQ ID NO: 7081

SEQ ID NO: 9354 - protein, 271 aa, Homo sapiens
MPASQSRARARDRNNVLNRAEFLSLNQPPKGGPEPRSSGRKASGPSAQPPPAGDGARERRQSQQLPEEDCMQLNPSFKGIAFNSLLAIDICMSKRLGVCAGRAASWASARSMVKLIGITGHGIPWIGGTILCLVKSSTLAGQEVLMNLLLALLLDIMTVAGVQKLIKRRGPYETSPSLLDYLTMDIYAFPAGHASRAAMVSKFFLSHLVLAVPLRVLLVLWALCVGLSRVMIGRHHVTDVLSGFVIGYLQFRLVELVWMPSSTCQMLISAW

SEQ ID NO: 9355 - protein, 277 aa, Homo sapiens
MVRLPLQCVLWGCLLTAVHPEPPTACREKQYLINSQCCSLCQPGQKLVSDCTEFTETECLPCGESEFLDTWNRETHCHQHKYCDPNLGLRVQQKGTSETDTICTCEEGWHCTSEACESCVLHRSCSPGFGVKQIATGVSDTICEPCPVGFFSNVSSAFEKCHPWTSCETKDLVVQQAGTNKTDVVCGPQDRLRALVVIPIIFGILFAILLVLVFIKKVAKKPTNKAPHPKQEPQEINFPDDLPGSNTAAPVQETLHGCQPVTQEDGKESRISVQERQ

SEQ ID NO: 9356 - protein, 375 aa, Homo sapiens
MLLFLLSALVLLTQPLGYLEAEMKTYSHRTMPSACTLVMCSSVESGLPGRDGRDGREGPRGEKGDPGLPGAAGQAGMPGQAGPVGPKGDNGSVGEPGPKGDTGPSGPPGPPGVPGPAGREGPLGKQGNIGPQGKPGPKGEAGPKGEVGAPGMQGSAGARGLAGPKGERGVPGERGVPGNTGAAGSAGAMGPQGSPGARGPPGLKGDKGIPGDKGAKGESGLPDVASLRQQVEALQGQVQHLQAAFSQYKKVELFPNGQSVGEKIFKTAGFVKPFTEAQLLCTQAGGQLASPRSAAENAALQQLVVAKNEAAFLSMTDSKTEGKFTYPTGESLVYSNWAPGEPNDDGGSEDCVEIFTNGKWNDRACGEKRLVVCEF

SEQ ID NO: 9357 - protein, 389 aa, Homo sapiens
MYGRPQAEMEQEAGELSRWQAAHQAAQDNENSAPILNMSSSSGSSGVHTSWNQGLPSIQHFPHSAEMLGSPLVSVEAPGQNVNEGGPQFSMPLPERGMSYCPQATLTPSRMIYCQRMSPPQQEMTIFSGPQLMPVGEPNIPRVARPFGGNLRMPPNGLPVSASTGIPIMSHTGNPPVPYPGLSTVPSDETLLGPTVPSTEAQAVLPSMAQMLPPQDAHDLGMPPAESQSLLVLGSQDSLVSQPDSQEGPFLPEQPGPAPQTVEKNSRPQEGTGRRGSSEARPYCCNYENCGKAYTKRSHLVSHQRKHTGERPYSCNWESCSWSFFRSDELRRHMRVHTRYRPYKCDQCSREFMRSDHLKQHQKTHRPGPSDPQANNNNGEQDSPPAAGP

SEQ ID NO: 9358 - protein, 741 aa, Homo sapiens
MASNGAYPVLGPGVTVNPGTSLSVFTALPFATPSPGPTHRPPLVTAVVPPAGPLVLSAFPSTPLVAGQDGRGPSGAGASNVFVQMRTEVGPVKPPQAQTLILTQAPLVWQAPGTLCGGVMCPPPLLLAAAPGVPVTSAQVVGGTQACEGGWSHGLPLPPPPPAAQVAPIVSPGNAGPWPQGAHGEGSLAPSQAKARPDDSCKPKSVYENFRLWQHYKPLARRHLPQSPDTEALSCFLIPVLRSLARRKPTMTLEEGLWRAMREWQHTSNFDRMIFYEMAAKFLEFEAEEEMQIQKSQWMKGPQSLPPPAPPRLEPRGPPAPEVVKQPVYLPSKDGPKAPTACLPPPRPQRPAETKAHLPPPRPPRPAETKVPEEIPPEVVQEYVDIMEELLGSHPGDTGEPEGQREKGKVEQPQEEDGMTSDPGLLSYIDKLCSQEDFVTKVEAVIHPRFLEELLSPDPQMDFLALSQELEQEEGLTLAQLVEKRLLSLKEKGCGRAAPRHGTARLDSSPSEFAAGQEAAREVPDPQQRVSVETSPPQTAAQDPQGQGRVRTGMARSEDPAVLLGCQDSPRLKAVRPTSPPQDHRPTCPGLGTKDALGLPGESPVKESHGLAKGSSEETELPGMVYVVGSHHRLRPWRLSQSPVPSSGLLSPGGRGPQGALQSPSAQKRGLSPSPSPASKSKKRPLFGSPSPAEKTPHPGPGLRVSGEQSLAWGLGGPSQSQKRKGDPLASRRKKKRHCSQ

SEQ ID NO: 9359 - protein, 707 aa, Homo sapiens
MSLWQPLVLVLLVLGCCFAAPRQRQSTLVLFPGDLRTNLTDRQLAEEYLYRYGYTRVAEMRGESKSLGPALLLLQKQLSLPETGELDSATLKAMRTPRCGVPDLGRFQTFEGDLKWHHHNITYWIQNYSEDLPRAVIDDAFARAFALWSAVTPLTFTRVYSRDADIVIQFGVAEHGDGYPFDGKDGLLAHAFPPGPGIQGDAHFDDDELWSLGKGVVVPTRFGNADGAACHFPFIFEGRSYSACTTDGRSDGLPWCSTTANYDTDDRFGFCPSERLYTQDGNADGKPCQFPFIFQGQSYSACTTDGRSDGYRWCATTANYDRDKLFGFCPTRADSTVMGGNSAGELCVFPFTFLGKEYSTCTSEGRGDGRLWCATTSNFDSDKKWGFCPDQGYSLFLVAAHEFGHALGLDHSSVPEALMYPMYRFTEGPPLHKDDVNGIRHLYGPRPEPEPRPPTTTTPQPTAPPTVCPTGPPTVHPSERPTAGPTGPPSAGPTGPPTAGPSTATTVPLSPVDDACNVNIFDAIAEIGNQLYLFKDGKYWRFSEGRGSRPQGPFLIADKWPALPRKLDSVFEERLSKKLFFFSGRQVWVYTGASVLGPRRLDKLGLGADVAQVTGALRSGRGKMLLFSGRRLWRFDVKAQMVDPRSASEVDRMFPGVPLDTHDVFQYREKAYFCQDRFYWRVSSRSELNQVDQVGYVTYDILQCPED

SEQ ID NO: 9360 - protein, 228 aa, Homo sapiens
MQEVCSGEDTHGGHFPSRPGHTGAEQQCVQGRLTLWLPQQHRRWPQLPHRALLRPDPHLRGSQAQQAAPTQLPVPPVLQQRTLHQGLPPGTPQRRGPDSIPGQKALLRRVQVSQVQEKMDERELLGQHGAGVHQVPHQRVSTQAETPGEARRPGRVRPEQGAPAAPLREVQGPGLLLPSRAVTGCPPAPRATPRQPEETLLPCATPRGCVSPCAWGALAGLRGWAGGS

SEQ ID NO: 9361 - protein, 963 aa, Homo sapiens
MERREEQPGAAGAGAAPALDFTVENVEKALHQLYYDPNIENKNLAQKWLMQAQVSPQAWHFSWQLLQPDKVPEIQYFGASALHIKISRYWSDIPTDQYESLKAQLFTQITRFASGSKIVLTRLCVALASLALSMMPDAWPCAVADMVRLFQAEDSPVDGQGRCLALLELLTVLPEEFQTSRLPQYRKGLVRTSLAVECGAVFPLLEQLLQQPSSPSCVRQKVLKCFSSWVQLEVPLQDCEALIQAAFAALQDSELFDSSVEAIVNAISQPDAQRYVNTLLKLIPLVLGLQEQLRQAVQNGDMETSHGICRIAVALGENHSRALLDQVEHWQSFLALVNMIMFCTGIPGHYPVNETTSSLTLTFWYTLQDDILSFEAEKQAVYQQVYRPVYFQLVDVLLHKAQFPSDEEYGFWSSDEKEQFRIYRVDISDTLMYVYEMLGAELLSNLYDKLGRLLTSSEEPYSWQHTEALLYGFQSIAETIDVNYSDVVPGLIGLIPRISISNVQLADTVMFTIGALSEWLADHPVMINSVLPLVLHALGNPELSVSSVSTLKKICRECKYDLPPYAANIVAVSQDVLMKQIHKTSQCMWLMQALGFLLSALQVEEILKNLHSLISPYIQQLEKLAEEIPNPSNKLAIVHILGLLSNLFTTLDISHHEDDHEGPELRKLPVPQGPNPVVVVLQQVFQLIQKVLSKWLNDAQVVEAVCAIFEKSVKTLLDDFAPMVPQLCEMLGRMYSTIPQASALDLTRQLVHIFAHEPAHFPPIEALFLLVTSVTLTLFQQGPRDHPDIVDSFMQLLAQALKRKPDLFLCERLDVKAVFQCAVLALKFPEAPTVKASCGFFTELLPRCGEVESVGKVVQEDGRMLLIAVLEAIGGQASRSLMDCFADILFALNKHCFSLLSMWIKEALQPPGFPSARLSPEQKDTFSQQILRERVNKRRVKEMVKEFTLLCRGLHGTDYTADY

SEQ ID NO: 9362 - protein, 1149 aa, Homo sapiens
MGQQPGKVLGDQRRPSLPALHFIKGAGKKESSRHGGPHCNVFVEHEALQRPVASDFEPQGLSEAARWNSKENLLAGPSENDPNLFVALYDFVASGDNTLSITKGEKLRVLGYNHNGEWCEAQTKNGQGWVPSNYITPVNSLEKHSWYHGPVSRNAAEYLLSSGINGSFLVRESESSPGQRSISLRYEGRVYHYRINTASDGKLYVSSESRFNTLAELVHHHSTVADGLITTLHYPAPKRNKPTVYGVSPNYDKWEMERTDITMKHKLGGGQYGEVYEGVWKKYSLTVAVKTLKEDTMEVEEFLKEAAVMKEIKHPNLVQLLGVCTREPPFYIITEFMTYGNLLDYLRECNRQEVNAVVLLYMATQISSAMEYLEKKNFIHRDLAARNCLVGENHLVKVADFGLSRLMTGDTYTAHAGAKFPIKWTAPESLAYNKFSIKSDVWAFGVLLWEIATYGMSPYPGIDLSQVYELLEKDYRMERPEGCPEKVYELMRACWQWNPSDRPSFAEIHQAFETMFQESSISDEVEKELGKQGVRGAVSTLLQAPELPTKTRTSRRAAEHRDTTDVPEMPHSKGQGESDPLDHEPAVSPLLPRKERGPPEGGLNEDERLLPKDKKTNLFSALIKKKKKTAPTPPKRSSSFREMDGQPERRGAGEEEGRDISNGALAFTPLDTADPAKSPKPSNGAGVPNGALRESGGSGFRSPHLWKKSSTLTSSRLATGEEEGGGSSSKRFLRSCSASCVPHGAKDTEWRSVTLPRDLQSTGRQFDSSTFGGHKSEKPALPRKRAGENRSDQVTRGTVTPPPRLVKKNEEAADEVFKDIMESSPGSSPPNLTPKPLRRQVTVAPASGLPHKEEAGKGSALGTPAAAEPVTPTSKAGSGAPGGTSKGPAEESRVRRHKHSSESPGRDKGKLSRLKPAPPPPPAASAGKAGGKPSQSPSQEAAGEAVLGAKTKATSLVDAVNSDAAKPSQPGEGLKKPVLPATPKPQSAKPSGTPISPAPVPSTLPSASSALAGDQPSSTAFIPLISTRVSLRKTRQPPERIASGAITKGVVLDSTEALCLAISRNSEQMASHSAVLEAGKNLYTFCVSYVDSIQQMRNKFAFREAINKLENNLRELQICPATAGSGPAATQDFSKLLSSVKEISDIVQR

SEQ ID NO: 9363 - protein, 380 aa, Homo sapiens
MGLLVFVRNLLLALCLFLVLGFLYYSAWKLHLLQWEEDSNSVVLSFDSAGQTLGSEYDRLGFLLNLDSKLSPRTLCTVVFGLDCILESPGEPKKLLMPASHPLEILKSLSEDTAFALGFLKLPRPAELATKYANFSEGACKPGYASALMTAIFPRFSKPAPMFLDDSFRKWARIREFVPPFGIKGQDNLIKAILSVTKEYRLTPALDSLRCRRCIIVGNGGVLANKSLGSRIDDYDIVVRLNSAPVKGFEKDVGSKTTLRITYPEGAMQRPEQYERDSLFVLAGFKWQDFKWLKYIVYKERVSASDGFWKSVATRVPKEPPEIRILNPYFIQEAAFTLIGLPFNNGLMGRGSWTHNIQREKEFLRKLVKARVITDLSSGI

SEQ ID NO: 9364 - protein, 1390 aa, Homo sapiens
MVKEQFRETDVAKKISHICFGMKSPEEMRQQAHIQVVSKNLYSQDNQHAPLLYGVLDHRMGTSEKDRPCETCGKNLADCLGHYGYIDLELPCFHVGYFRAVIGILQMICKTCCHIMLSQEEKKQFLDYLKRPGLTYLQKRGLKKKISDKCRKKNICHHCGAFNGTVKKCGLLKIIHEKYKTNKKVVDPIVSNFLQSFETAIEHNKEVEPLLGRAQENLNPLVVLNLFKRIPAEDVPLLLMNPEAGKPSDLILTRLLVPPLCIRPSVVSDLKSGTNEDDLTMKLTEIIFLNDVIKKHRISGAKTQMIMEDWDFLQLQCALYINSELSGIPLNMAPKKWTRGFVQRLKGKQGRFRGNLSGKRVDFSGRTVISPDPNLRIDEVAVPVHVAKILTFPEKVNKANINFLRKLVQNGPEVHPGANFIQQRHTQMKRFLKYGNREKMAQELKYGDIVERHLIDGDVVLFNRQPSLHKLSIMAHLARVKPHRTFRFNECVCTPYNADFDGDEMNLHLPQTEEAKAEALVLMGTKANLVTPRNGEPLIAAIQDFLTGAYLLTLKDTFFDRAKACQIIASILVGKDEKIKVRLPPPTILKPVTLWTGKQIFSVILRPSDDNPVRANLRTKGKQYCGKGEDLCANDSYVTIQNSELMSGSMDKGTLGSGSKNNIFYILLRDWGQNEAADAMSRLARLAPVYLSNRGFSIGIGDVTPGQGLLKAKYELLNAGYKKCDEYIEALNTGKLQQQPGCTAEETLEALILKELSVIRDHAGSACLRELDKSNSPLTMALCGSKGSFINISQMIACVGQQAISGSRVPDGFENRSLPHFEKHSKLPAAKGFVANSFYSGLTPTEFFFHTMAGREGLVDTAVKTAETGYMQRRLVKSLEDLCSQYDLTVRSSTGDIIQFIYGGDGLDPAAMEGKDEPLEFKRVLDNIKAVFPCPSEPALSKNELILTTESIMKKSEFLCCQDSFLQEIKKFIKGVSEKIKKTRDKYGINDNGTTEPRVLYQLDRITPTQVEKFLETCRDKYMRAQMEPGSAVGALCAQSIGEPGTQMTLKTFHFAGVASMNITLGVPRIKEIINASKAISTPIITAQLDKDDDADYARLVKGRIEKTLLGEISEYIEEVFLPDDCFILVKLSLERIRLLRLEVNAETVRYSICTSKLRVKPGDVAVHGEAVVCVTPRENSKSSMYYVLQFLKEDLPKVVVQGIPEVSRAVIHIDEQSGKEKYKLLVEGDNLRAVMATHGVKGTRTTSNNTYEVEKTLGIEAARTTIINEIQYTMVNHGMSIDRRHVMLLSDLMTYKGEVLGITRFGLAKMKESVLMLASFEKTADHLFDAAYFGQKDSVCGVSECIIMGIPMNIGTGLFKLLHKADRDPNPPKRPLIFDTNEFHIPLVT

SEQ ID NO: 9365 - protein, 413 aa, Homo sapiens
MGLLVFVRNLLLALCLFLVLGFLYYSAWKLHLLQWEEDSKYDRLGFLLNLDSKLSPRTLCTVVFGLDCILESPGEPKKLLMPASHPLEILKSLSEDTAFALGFLKLPRPAELATKYANFSEGACKPGYASALMTAIFPRFSKPAPMFLDDSFRKWARIREFVPPFGIKGQDNLIKAILSVTKEYRLTPALDSLRCRRCIIVGNGGVLANKSLGSRIDDYDIVVRLNSAPVKGFEKDVGSKTTLRITYPEGAMQRPEQYERDSLFVLAGFKWQDFKWLKYIVYKERVSASDGFWKSVATRVPKEPPEIRILNPYFIQEAAFTLIGLPFNNGLMGRGNIPTLGSVAVTMALHGCDEVAVAGFGYDMSTPNAPLHYYETVRMAAIKESWTHNIQREKEFLRKLVKARVITDLSSGI

SEQ ID NO: 9366 - protein, 1919 aa, Homo sapiens
MEPQRRELLAQCQQSLAQAMTEVEAVLGLLEAAGALSPGERRQLDEEAGGAKAELLLKLLLAKERDHFQDLRAALEKTQPHLLPILYLNGVVGPPQPAEGAGSTYSVLSTMPSDSESSSSLSSVGTTGKAPSPPPLLTDQQVNEKVENLSIQLRLMTRERNELRKRLAFATHGTAFDKRPYHRLNPDYERLKIQCVRAMSDLQSLQNQHTNALKRCEEVAKETDFYHTLHSRLLSDQTRLKDDVDMLRRENGQLLRERNLLQQSWEDMKRLHEEDQKEIGDLRAQQQQVLKHNGSSEILNKLYDTAMDKLEVVKKDYDALRKRYSEKVAIHNADLSRLEQLGEENQRLLKQTEMLTQQRDTAIQLQHQCALSLRRFEAIHHELNKATAQNKDLQWEMELLQSELTELRTTQVKTAKESEKYREERDAVYSEYKLIMSERDQVISELDKLQTEVELAESKLKSSTSEKKAANEEMEALRQIKDTVTMDAGRANKEVEILRKQCKALCQELKEALQEADVAKCRRDWAFQERDKIVAERDSIRTLCDNLRRERDRAVSELAEALRSLDDTRKQKNDVSRELKELKEQMESQLEKEARFRQLMAHSSHDSAIDTDSMEWETEVVEFERETEDIDLKALGFDMAEGVNEPCFPGDCGIFVTKVDKGSIADGRLRVNDWLLRINDVDLINKDKKQAIKALLNGEGAINMVVRRRKSLGGKVVTPLHINLSGQKDSGISLENGVYAAAVLPGSPAAKEGSLAVGDRIVAINGIALDNKSLNECESLLRSCQDSLTLSLLKVFPQSSSWSGQNIFENIKDSDKMLSFRAHGPEVQAHNKRNLIQHNNSTQTDIFYTDRLEDRKEPGPPGGSSSFLHKPFPGGPLQVCPQACPSASERSLSSFRSDASGDRGFGLVDVRGRRPLLPFETEVGPCGVGEASLDKADSEGSNSGGTWPKAMLSSTAVPEKLSVYKKPKQRKSIFDPNTFKRPQTPPKIDYLLPGPGPAHSPQPSKRAGPLTPPKPPRRSDSIKFQHRLETSSESEATLVGSSPSTSPPSALPPDVDPGEPMHASPPRKARVRIASSYYPEGDGDSSHLPAKKSCDEDLTSQKVDELGQKRRRPKSAPSFRPKLAPVVIPAQFLEEQKCVPASGELSPELQEWAPYSPGHSSRHSNPPLYPSRPSVGTVPRSLTPSTTVSSILRNPIYTVRSHRVGPCSSPPAARDAGPQGLHPSVQHQGRLSLDLSHRTCSDYSEMRATHGSNSLPSSARLGSSSNLQFKAERIKIPSTPRYPRSVVGSERGSVSHSECSTPPQSPLNIDTLSSCSQSQTSASTLPRIAVNPASLGERRKDRPYVEEPRHVKVQKGSEPLGISIVSGEKGGIYVSKVTVGSIAHQAGLEYGDQLLEFNGINLRSATEQQARLIIGQQCDTITILAQYNPHVHQLSSHSRSSSHLDPAGTHSTLQGSGTTTPEHPSVIDPLMEQDEGPSTPPAKQSSSRIAGDANKKTLEPRVVFIKKSQLELGVHLCGGNLHGVFVAEVEDDSPAKGPDGLVPGDLILEYGSLDVRNKTVEEVYVEMLKPRDGVRLKVQYRPEEFTKAKGLPGDSFYIRALYDRLADVEQELSFKKDDILYVDDTLPQGTFGSWMAWQLDENAQKIQRGQIPSKYVMDQEFSRRLSMSEVKDDNSATKTLSAAARRSFFRRKHKHKRSGSKDGKDLLALDAFSSDSIPLFEDSVSLAYQRVQKVDCTALRPVLILGPLLDVVKEMLVNEAPGKFCRCPLEVMKASQQAIERGVKDCLFVDYKRRSGHFDVTTVASIKEITEKNRHCLLDIAPHAIERLHHMHIYPIVIFIHYKSAKHIKEQRDPIYLRDKVTQRHSKEQFEAAQKLEQEYSRYFTGVIQGGALSSICTQILAMVNQEQNKVLWIPACPL

SEQ ID NO: 9367 - protein, 1064 aa, Homo sapiens
MASESETLNPSARIMTFYPTMEEFRNFSRYIAYIESQGAHRAGLAKVVPPKEWKPRASYDDIDDLVIPAPIQQLVTGQSGLFTQYNIQKKAMTVREFRKIANSDKYCTPRYSEFEELERKYWKNLTFNPPIYGADVNGTLYEKHVDEWNIGRLRTILDLVEKESGITIEGVNTPYLYFGMWKTSFAWHTEDMDLYSINYLHFGEPKSWYSVPPEHGKRLERLAKGFFPGSAQSCEAFLRHKMTLISPLMLKKYGIPFDKVTQEAGEFMITFPYGYHAGFNHGFNCAESTNFATRRWIEYGKQAVLCSCRKDMVKISMDVFVRKFQPERYKLWKAGKDNTVIDHTLPTPEAAEFLKESELPPRAGNEEECPEEDMEGVEDGEEGDLKTSLAKHRIGTKRHRVCLEIPQEVSQSELFPKEDLSSEQYEMTECPAALAPVRPTHSSVRQVEDGLTFPDYSDSTEVKFEELKNVKLEEEDEEEEQAAAALDLSVNPASVGGRLVFSGSKKKSSSSLGSGSSRDSISSDSETSEPLSCRAQGQTGVLTVHSYAKGDGRVTVGEPCTRKKGSAARSFSERELAEVADEYMFSLEENKKSKGRRQPLSKLPRHHPLVLQECVSDDETSEQLTPEEEAEETEAWAKPLSQLWQNRPPNFEAEKEFNETMAQQAPHCAVCMIFQTYHQVEFGGFNQNCGNASDLAPQKQRTKPLIPEMCFTSTGCSTDINLSTPYLEEDGTSILVSCKKCSVRVHASCYGVPPAKASEDWMCSRCSANALEEDCCLCSLRGGALQRANDDRWVHVSCAVAILEARFVNIAERSPVDVSKIPLPRFKLKCIFCKKRRKRTAGCCVQCSHGRCPTAFHVSCAQAAGVMMQPDDWPFVVFITCFRHKIPNLERAKGALQSITAGQKVISKHKNGRFYQCEVVRLTTETFYEVNFDDGSFSDNLYPEDIVSQDCLQFGPPAEGEVVQVRWTDGQVYGAKFVASHPIQMYQVEFEDGSQLVVKRDDVYTLDEELPKRVKSRLSVASDMRFNEIFTEKEVKQEKKRQRVINSRYREDYIEPALYRAIME

SEQ ID NO: 9368 - protein, 134 aa, Homo sapiens
MNTEMYQTPMEVAVYQLHNFSISFFSSLLGGDVVSVKLDNSASGASVVAIDNKIEQAMDLVKNHLMYAVREEVEILKEQIRELVEKNSQLERENTLLKTLASPEQLEKFQSCLSPEEPAPESPQVPEAPGGSAV

SEQ ID NO: 9369 - protein, 1192 aa, Homo sapiens
MDALIIPVTMEVPCDSRGQRMWWAFLASSMVTFFGGLFIILLWRTLKYLWTVCCHCGGKTKEAQKINNGSSQADGTLKPVDEKEEAVAAEVGWMTSVKDWAGVMISAQTLTGRVLVVLVFALSIGALVIYFIDSSNPIESCQNFYKDFTLQIDMAFNVFFLLYFGLRFIAANDKLWFWLEVNSVVDFFTVPPVFVSVYLNRSWLGLRFLRALRLIQFSEILQFLNILKTSNSIKLVNLLSIFISTWLTAAGFIHLVENSGDPWENFQNNQALTYWECVYLLMVTMSTVGYGDVYAKTTLGRLFMVFFILGGLAMFASYVPEIIELIGNRKKYGGSYSAVSGRKHIVVCGHITLESVSNFLKDFLHKDRDDVNVEIVFLHNISPNLELEALFKRHFTQVEFYQGSVLNPHDLARVKIESADACLILANKYCADPDAEDASNIMRVISIKNYHPKIRIITQMLQYHNKAHLLNIPSWNWKEGDDAICLAELKLGFIAQSCLAQGLSTMLANLFSMRSFIKIEEDTWQKYYLEGVSNEMYTEYLSSAFVGLSFPTVCELCFVKLKLLMIAIEYKSANRESRILINPGNHLKIQEGTLGFFIASDAKEVKRAFFYCKACHDDITDPKRIKKCGCKRLEDEQPSTLSPKKKQRNGGMRNSPNTSPKLMRHDPLLIPGNDQIDNMDSNVKKYDSTGMFHWCAPKEIEKVILTRSEAAMTVLSGHVVVCIFGDVSSALIGLRNLVMPLRASNFHYHELKHIVFVGSIEYLKREWETLHNFPKVSILPGTPLSRADLRAVNINLCDMCVILSANQNNIDDTSLQDKECILASLNIKSMQFDDSIGVLQANSQGFTPPGMDRSSPDNSPVHGMLRQPSITTGVNIPIITELAKPGKLPLVSVNQEKNSGTHILMITELVNDTNVQFLDQDDDDDPDTELYLTQPFACGTAFAVSVLDSLMSATYFNDNILTLIRTLVTGGATPELEALIAEENALRGGYSTPQTLANRDRCRVAQLALLDGPFADLGDGGCYGDLFCKALKTYNMLCFGIYRLRDAHLSTPSQCTKRYVITNPPYEFELVPTDLIFCLMQFDHNAGQSRASLSHSSHSSQSSSKKSSSVHSIPSTANRQNRPKSRESRDKQNATRMNRMGQEKKWFTDEPDNAYPRNIQIKPMSTHMANQINQYKSTSSLIPPIREVEDEC

SEQ ID NO: 9370 - protein, 979 aa, Homo sapiens
TYVRLENGEPRGLPIIQDVMLAEAQWRPEESEDYETTISGLTPETTYSVTVAAYTTKGDGARSKPKIVTTTGAVFAKNFRVAAAMKTSVLLSWEVPDSYKSAVPFKILYNGQSVEVDGHSMRKLIADLQPNTEYSFVLMNRGSSAGGLQHLVSIRTAPDLLPHKPLPASAYIEDGRFDLSMPHVQDPSLVRWFYIVVVPIDRVGGSMLTPRWSTPEELELDELLEAIEQGGEEQRRRRRQAERLKPYVAAQLDVLPETFTLGDKKNYRGFYNRPLSPDLSYQCFVLASLKEPMDQKRYASSPYSDEIVVQVTPAQQQEEPEMLWVTGPVLAVILIILIVIAILLFKRKRTHSPSSKDEQSIGLKDSLLAHSSDPVEMRRLNYQTPGSSVPSCPNTSSMRDHPPIPITDLADNIERLKANDGLKFSQEYESIDPGQQFTWENSNLEVNKPKNRYANVIAYDHSRVILTSIDGVPGSDYINANYIDGYRKQNAYIATQGPLPETMGDFWRMVWEQRTATVVMMTRLEEKSRVKCDQYWPARGTETCGLIQVTLLDTVELATYTVRTFALHKSGSSEKRELRQFQFMAWPDHGVPEYPTPILAFLRRVKACNPLDAGPMVVHCSAGVGRTGCFIVIDAMLERMKHEKTVDIYGHVTCMRSQRNYMVQTEDQYVFIHEALLEAATCGHTEVPARNLYAHIQKLGQVPPGESVTAMELEFKLLASSKAHTSRFISANLPCNKFKNRLVNIMPYELTRVCLQPIRGVEGSDYINASFLDGYRQQKAYIATQGPLAESTEDFWRMLWEHNSTIIVMLTKLREMGREKCHQYWPAERSARYQYFVVDPMAEYNMPQYILREFKVTDARDGQSRTIRQFQFTDWPEQGVPKTGEGFIDFIGQVHKTKEQFGQDGPITVHCSAGVGRTGVFITLSIVLERMRYEGVVDMFQTVKTLRTQRPAMVQTEDQYQLCYRAALEYLGSFDHYAT

SEQ ID NO: 9371 - protein, 1195 aa, Homo sapiens
MDALIIPVTMEVPCDSRGQRMWWAFLASSMVTFFGGLFIILLWRTLKYLWTVCCHCGGKTKEAQKINNGSSQADGTLKPVDEKEEAVAAEVGWMTSVKDWAGVMISAQTLTGRVLVVLVFALSIGALVIYFIDSSNPIESCQNFYKDFTLQIDMAFNVFFLLYFGLRFIAANDKLWFWLEVNSVVDFFTVPPVFVSVYLNRSWLGLRFLRALRLIQFSEILQFLNILKTSNSIKLVNLLSIFISTWLTAAGFIHLVENSGDPWENFQNNQALTYWECVYLLMVTMSTVGYGDVYAKTTLGRLFMVFFILGGLAMFASYVPEIIELIGNRKKYGGSYSAVSGRKHIVVCGHITLESVSNFLKDFLHKDRDDVNVEIVFLHNISPNLELEALFKRHFTQVEFYQGSVLNPHDLARVKIESADACLILANKYCADPDAEDASNIMRVISIKNYHPKIRIITQMLQYHNKAHLLNIPSWNWKEGDDAICLAELKLGFIAQSCLAQGLSTMLANLFSMRSFIKIEEDTWQKYYLEGVSNEMYTEYLSSAFVGLSFPTVCELCFVKLKLLMIAIEYKSANRESRILINPGNHLKIQEGTLGFFIASDAKEVKRAFFYCKACHDDITDPKRIKKCGCKRLIYFEDEQPSTLSPKKKQRNGGMRNSPNTSPKLMRHDPLLIPGNDQIDNMDSNVKKYDSTGMFHWCAPKEIEKVILTRSEAAMTVLSGHVVVCIFGDVSSALIGLRNLVMPLRASNFHYHELKHIVFVGSIEYLKREWETLHNFPKVSILPGTPLSRADLRAVNINLCDMCVILSANQNNIDDTSLQDKECILASLNIKSMQFDDSIGVLQANSQGFTPPGMDRSSPDNSPVHGMLRQPSITTGVNIPIITELAKPGKLPLVSVNQEKNSGTHILMITELVNDTNVQFLDQDDDDDPDTELYLTQPFACGTAFAVSVLDSLMSATYFNDNILTLIRTLVTGGATPELEALIAEENALRGGYSTPQTLANRDRCRVAQLALLDGPFADLGDGGCYGDLFCKALKTYNMLCFGIYRLRDAHLSTPSQCTKRYVITNPPYEFELVPTDLIFCLMQFDHNAGQSRASLSHSSHSSQSSSKKSSSVHSIPSTANRQNRPKSRESRDKQNATRMNRMGQEKKWFTDEPDNAYPRNIQIKPMSTHMANQINQYKSTSSLIPPIREVEDEC

SEQ ID NO: 9372 - protein, 405 aa, Homo sapiens
MLQITNASLGLRFRRQLLYWFFYDGGYINASAEGVSIRTGLELSRDPAGRMKVSNVSCQASVSRMHAAFGGTFKKVYDFLSTFITSGMRFLLNQQICPVLYHAGTVLLNSLLDTVPVRSSVDELVGIDYSLMKDPVASTSNLDMDFRGAFFPLTERNWSLPNRAVEPQLQEEERMVYVAFSEFFFDSAMESYFRAGALQLLLVGDKVPHDLDMLLRATYFGSIVLLSPAVIDSPLKLELRVLAPPRCTIKPSGTTISVTASVTIALVPPDQPEVQLSSMTMDARLSAKMALRGKALRTQLDLRRFRIYSNHSALESLALIPLQAPLKTMLQIGVMPMLNERTWRGVQIPLPEGINFVHEVVTNHAGFLTIGADLHFAKGLREVIEKNRPADVRASTAPTPSTAAV

SEQ ID NO: 9373 - protein, 1181 aa, Homo sapiens
NIHANHLSLDASSSSSSSSSSSSSSSSSSSSSSVHEPKMDALIIPVTMEVPCDSRGQRMWWAFLASSMVTFFGGLFIILLWRTLKYLWTVCCHCGGKTKEAQKINNGSSQADGTLKPVDEKEEAVAAEVGWMTSVKDWAGVMISAQTLTGRVLVVLVFALSIGALVIYFIDSSNPIESCQNFYKDFTLQIDMAFNVFFLLYFGLRFIAANDKLWFWLEVNSVVDFFTVPPVFVSVYLNRSWLGLRFLRALRLIQFSEILQFLNILKTSNSIKLVNLLSIFISTWLTAAGFIHLVENSGDPWENFQNNQALTYWECVYLLMVTMSTVGYGDVYAKTTLGRLFMVFFILGGLAMFASYVPEIIELIGNRKKYGGSYSAVSGRKHIVVCGHITLESVSNFLKDFLHKDRDDVNVEIVFLHNISPNLELEALFKRHFTQVEFYQGSVLNPHDLARVKIESADACLILANKYCADPDAEDASNIMRVISIKNYHPKIRIITQMLQYHNKAHLLNIPSWNWKEGDDAICLAELKLGFIAQSCLAQGLSTMLANLFSMRSFIKIEEDTWQKYYLEGVSNEMYTEYLSSAFVGLSFPTVCELCFVKLKLLMIAIEYKSANRESRSRKRILINPGNHLKIQEGTLGFFIASDAKEVKRAFFYCKACHDDITDPKRIKKCGCKRLEDEQPSTLSPKKKQRNGGMRNSPNTSPKLMRHDPLLIPGNDQIDNMDSNVKKYDSTGMFHWCAPKEIEKVILTRSEAAMTVLSGHVVVCIFGDVSSALIGLRNLVMPLRASNFHYHELKHIVFVGSIEYLKREWETLHNFPKVSILPGTPLSRADLRAVNINLCDMCVILSANQNNIDDTSLQDKECILASLNIKSMQFDDSIGVLQANSQGFTPPGMDRSSPDNSPVHGMLRQPSITTGVNIPIITELAKPGKLPLVSVNQEKNSGTHILMITELVNDTNVQFLDQDDDDDPDTELYLTQPFACGTAFAVSVLDSLMSATYFNDNILTLIRTLVTGGATPELEALIAEENALRGGYSTPQTLANRDRCRVAQLALLDGPFADLGDGGCYGDLFCKALKTYNMLCFGIYRLRDAHLSTPSQCTKRYVITNPPYEFELVPTDLIFCLMQFDHNAGQSRASLSHSSHSSQSSSKKSSSVHSIPSTANRQNRPKSRESRDKQKKEMVYR

SEQ ID NO: 9374 - protein, 350 aa, Homo sapiens
MATTAAPAGGARNGAGPEWGGFEENIQGGGSAVIDMENMDDTSGSSFEDMGELHQRLREEEVDADAADAAAAEEEDGEFLGMKGFKGQLSRQVADQMWQAGKRQASRAFSLYANIDILRPYFDVEPAQVRSRLLESMIPIKMVNFPQKIAGELYGPLMLVFTLVAILLHGMKTSDTIIREGTLMGTAIGTCFGYWLGVSSFIYFLAYLCNAQITMLQMLALLGYGLFGHCIVLFITYNIHLHALFYLFWLLVGGLSTLRMVAVLVSRTVGPTQRLLLCGTLAALHMLFLLYLHFAYHKVVEGILDTLEGPNIPPIQRVPRDIPAMLPAARLPTTVLNATAKAVAVTLQSH

SEQ ID NO: 9375 - protein, 277 aa, Homo sapiens
MAPLRFSANLSWLFPELSGLPARVRAAGSSGFEAVEVAWPYAETPEALARAAREAGLRLVLINTPPGDQEKGEMGLGAVPGRQAAFREGLEQAVRYAKALGCPRIHLMAGRVPQGADRIAVKAEMEAVFLENLRHAAGVLAQEDLVGLLEPINTRITDPQYFLDTPQQAAAILQKVGRPNLQLQMDIFHWQIMDGNLTGNIREFLPIVGHVQVAQVPGRGEPSSPGELNFPYLFQLLEDEGYKGFVGCEYQPRGDTVEGLSWLRSYWDRRGHPEAGQ

SEQ ID NO: 9376 - protein, 237 aa, Homo sapiens
YAETPEALARAAREAGLRLVLINTPPGDQEKGEMGLGAVPGRQAAFREGLEQAVRYAKALGCPRIHLMAGRVPQGADRIAVKAEMEAVFLENLRHAAGVLAQEDLVGLLEPINTRITDPQYFLDTPQQAAAILQKVGRPNLQLQMDIFHWQIMDGNLTGNIREFLPIVGHVQVAQVPGRGEPSSPGELNFPYLFQLLEDEGYKGFVGCEYQPRGDTVEGLSWLRSYWDRRGHPEAGQ

SEQ ID NO: 9377 - protein, 493 aa, Homo sapiens
MALFGALFLALLAGAHAEFPGCKIRVTSKALELVKQEGLRFLEQELETITIPDLRGKEGHFYYNISEVKVTELQLTSSELDFQPQQELMLQITNASLGLRFRRQLLYWFFYDGGYINASAEGVSIRTGLELSRDPAGRMKVSNVSCQASVSRMHAAFGGTFKKVYDFLSTFITSGMRFLLNQQICPVLYHAGTVLLNSLLDTVPVRSSVDELVGIDYSLMKDPVASTSNLDMDFRGAFFPLTERNWSLPNRAVEPQLQEEERMVYVAFSEFFFDSAMESYFRAGALQLLLVGDKVPHDLDMLLRATYFGSIVLLSPAVIDSPLKLELRVLAPPRCTIKPSGTTISVTASVTIALVPPDQPEVQLSSMTMDARLSAKMALRGKALRTQLDLRRFRIYSNHSALESLALIPLQAPLKTMLQIGVMPMLNERTWRGVQIPLPEGINFVHEVVTNHAGFLTIGADLHFAKGLREVIEKNRPADVRASTAPTPSTAAV

SEQ ID NO: 9378 - protein, 247 aa, Homo sapiens
MAPLRFSANLSWLFPELSGLPARVRAAGSSGFEAVEVAWPYAETPEALARAAREAGLRLVLINTPPGDQEKGEMGLGAVPGRQAAFREGLEQAVRYAKALGCPRIHLMAGRVPQGADRIAVKAEMEAVFLENLRHAAGVLAQEDLVGLLEPINTRITDPQYFLDTPQQAAAILQKVGRPNLQLQMDIFHWQIMDGNLTGNIREFLPIVGHVQVAQVPGRGEPSSPGELNFPYLFQLLEDEGYKGFVG

SEQ ID NO: 9379 - protein, 212 aa, Homo sapiens
AGSSGFEAVEVAWPYAETPEALARAAREAGLRLVLINTPPGDQEKGEMGLGAVPGRQAAFREGLEQAVRIHLMAGRVPQGADRIAVKAEMEAVFLENLRHAAGVLAQEDLVGLLEPINTRITDPQYFLDTPQQAAAILQKVGRPNLQLQMDIFHWQIMDGNLTGNIREFLPIVGHVQVAQVPGRGEPSSPGELNFPYLFQLLEDEGYKGFVG

SEQ ID NO: 9380 - protein, 302 aa, Homo sapiens
MAPLRFSANLSWLFPELSGLPARVRAAGSSGFEAVEVAWPYAETPEALARAAREAGLRLVLINTPPGDQEKGEMGLGAVPGRQAAFREGLEQAVRSGHCLMGRKLSVPCKGAVARGGLVYLAAFLRLDMIHLMAGRVPQGADRIAVKAEMEAVFLENLRHAAGVLAQEDLVGLLEPINTRITDPQYFLDTPQQAAAILQKVGRPNLQLQMDIFHWQIMDGNLTGNIREFLPIVGHVQVAQVPGRGEPSSPGELNFPYLFQLLEDEGYKGFVGCEYQPRGDTVEGLSWLRSYWDRRGHPEAGQ

SEQ ID NO: 9381 - protein, 1232 aa, Homo sapiens
PKMDALIIPVTMEVPCDSRGQRMWWAFLASSMVTFFGGLFIILLWRTLKYLWTVCCHCGGKTKEAQKINNGSSQADGTLKPVDEKEEAVAAEVGWMTSVKDWAGVMISAQTLTGRVLVVLVFALSIGALVIYFIDSSNPIESCQNFYKDFTLQIDMAFNVFFLLYFGLRFIAANDKLWFWLEVNSVVDFFTVPPVFVSVYLNRSWLGLRFLRALRLIQFSEILQFLNILKTSNSIKLVNLLSIFISTWLTAAGFIHLVENSGDPWENFQNNQALTYWECVYLLMVTMSTVGYGDVYAKTTLGRLFMVFFILGGLAMFASYVPEIIELIGNRKKYGGSYSAVSGRKHIVVCGHITLESVSNFLKDFLHKDRDDVNVEIVFLHNISPNLELEALFKRHFTQVEFYQGSVLNPHDLARVKIESADACLILANKYCADPDAEDASNIMRVISIKNYHPKIRIITQMLQYHNKAHLLNIPSWNWKEGDDAICLAELKLGFIAQSCLAQGLSTMLANLFSMRSFIKIEEDTWQKYYLEGVSNEMYTEYLSSAFVGLSFPTVCELCFVKLKLLMIAIEYKSANRESRSRKRILINPGNHLKIQEGTLGFFIASDAKEVKRAFFYCKACHDDITDPKRIKKCGCKRLIYSKMSIYKRMRRACCFDCGRSERDCSCMSGRVRGNVDTLERAFPLSSVSVNDCSTSFRAFEDEQPSTLSPKKKQRNGGMRNSPNTSPKLMRHDPLLIPGNDQIDNMDSNVKKYDSTGMFHWCAPKEIEKVILTRSEAAMTVLSGHVVVCIFGDVSSALIGLRNLVMPLRASNFHYHELKHIVFVGSIEYLKREWETLHNFPKVSILPGTPLSRADLRAVNINLCDMCVILSANQNNIDDTSLQDKECILASLNIKSMQFDDSIGVLQANSQGFTPPGMDRSSPDNSPVHGMLRQPSITTGVNIPIITELVNDTNVQFLDQDDDDDPDTELYLTQPFACGTAFAVSVLDSLMSATYFNDNILTLIRTLVTGGATPELEALIAEENALRGGYSTPQTLANRDRCRVAQLALLDGPFADLGDGGCYGDLFCKALKTYNMLCFGIYRLRDAHLSTPSQCTKRYVITNPPYEFELVPTDLIFCLMQFDHNAGQSRASLSHSSHSSQSSSKKSSSVHSIPSTANRQNRPKSRESRDKQNATRMNRMGQEKKWFTDEPDNAYPRNIQIKPMSTHMANQINQYKSTSSLIPPIREVEDEC

SEQ ID NO: 9382 - protein, 1233 aa, Homo sapiens
MANGGGGGGGSSGGGGGGGGSSLRMSSNIHANHLSLDASSSSSSSSSSSSSSSSSSSSSSVHEPKMDALIIPVTMEVPCDSRGQRMWWAFLASSMVTFFGGLFIILLWRTLKYLWTVCCHCGGKTKEAQKINNGSSQADGTLKPVDEKEEAVAAEVGWMTSVKDWAGVMISAQTLTGRVLVVLVFALSIGALVIYFIDSSNPIESCQNFYKDFTLQIDMAFNVFFLLYFGLRFIAANDKLWFWLEVNSVVDFFTVPPVFVSVYLNRSWLGLRFLRALRLIQFSEILQFLNILKTSNSIKLVNLLSIFISTWLTAAGFIHLVENSGDPWENFQNNQALTYWECVYLLMVTMSTVGYGDVYAKTTLGRLFMVFFILGGLAMFASYVPEIIELIGNRKKYGGSYSAVSGRKHIVVCGHITLESVSNFLKDFLHKDRDDVNVEIVFLHNISPNLELEALFKRHFTQVEFYQGSVLNPHDLARVKIESADACLILANKYCADPDAEDASNIMRVISIKNYHPKIRIITQMLQYHNKAHLLNIPSWNWKEGDDAICLAELKLGFIAQSCLAQGLSTMLANLFSMRSFIKIEEDTWQKYYLEGVSNEMYTEYLSSAFVGLSFPTVCELCFVKLKLLMIAIEYKSANRESRILINPGNHLKIQEGTLGFFIASDAKEVKRAFFYCKACHDDITDPKRIKKCGCKRLIYFEDEQPSTLSPKKKQRNGGMRNSPNTSPKLMRHDPLLIPGNDQIDNMDSNVKKYDSTGMFHWCAPKEIEKVILTRSEAAMTVLSGHVVVCIFGDVSSALIGLRNLVMPLRASNFHYHELKHIVFVGSIEYLKREWETLHNFPKVSILPGTPLSRADLRAVNINLCDMCVILSANQNNIDDTSLQDKECILASLNIKSMQFDDSIGVLQANSQGFTPPGMDRSSPDNSPVHGMLRQPSITTGVNIPIITELVNDTNVQFLDQDDDDDPDTELYLTQPFACGTAFAVSVLDSLMSATYFNDNILTLIRTLVTGGATPELEALIAEENALRGGYSTPQTLANRDRCRVAQLALLDGPFADLGDGGCYGDLFCKALKTYNMLCFGIYRLRDAHLSTPSQCTKRYVITNPPYEFELVPTDLIFCLMQFDHNAGQSRASLSHSSHSSQSSSKKSSSVHSIPSTANRQNRPKSRESRDKQNATRMNRMGQEKKWFTDEPDNAYPRNIQIKPMSTHMANQINQYKSTSSLIPPIREVEDEC

SEQ ID NO: 9383 - protein, 1209 aa, Homo sapiens
MANGGGGGGGSSGGGGGGGGSSLRMSSNIHANHLSLDASSSSSSSSSSSSSSSSSSSSSSVHEPKMDALIIPVTMEVPCDSRGQRMWWAFLASSMVTFFGGLFIILLWRTLKYLWTVCCHCGGKTKEAQKINNGSSQADGTLKPVDEKEEAVAAEVGWMTSVKDWAGVMISAQTLTGRVLVVLVFALSIGALVIYFIDSSNPIESCQNFYKDFTLQIDMAFNVFFLLYFGLRFIAANDKLWFWLEVNSVVDFFTVPPVFVSVYLNRSWLGLRFLRALRLIQFSEILQFLNILKTSNSIKLVNLLSIFISTWLTAAGFIHLVENSGDPWENFQNNQALTYWECVYLLMVTMSTVGYGDVYAKTTLGRLFMVFFILGGLAMFASYVPEIIELIGNRKKYGGSYSAVSGRKHIVVCGHITLESVSNFLKDFLHKDRDDVNVEIVFLHNISPNLELEALFKRHFTQVEFYQGSVLNPHDLARVKIESADACLILANKYCADPDAEDASNIMRVISIKNYHPKIRIITQMLQYHNKAHLLNIPSWNWKEGDDAICLAELKLGFIAQSCLAQGLSTMLANLFSMRSFIKIEEDTWQKYYLEGVSNEMYTEYLSSAFVGLSFPTVCELCFVKLKLLMIAIEYKSANRESRSRKRILINPGNHLKIQEGTLGFFIASDAKEVKRAFFYCKACHDDITDPKRIKKCGCKRLEDEQPSTLSPKKKQRNGGMRNSPNTSPKLMRHDPLLIPGNDQIDNMDSNVKKYDSTGMFHWCAPKEIEKVILTRSEAAMTVLSGHVVVCIFGDVSSALIGLRNLVMPLRASNFHYHELKHIVFVGSIEYLKREWETLHNFPKVSILPGTPLSRADLRAVNINLCDMCVILSANQNNIDDTSLQDKECILASLNIKSMQFDDSIGVLQANSQGFTPPGMDRSSPDNSPVHGMLRQPSITTGVNIPIITELAKPGKLPLVSVNQEKNSGTHILMITELVNDTNVQFLDQDDDDDPDTELYLTQPFACGTAFAVSVLDSLMSATYFNDNILTLIRTLVTGGATPELEALIAEENALRGGYSTPQTLANRDRCRVAQLALLDGPFADLGDGGCYGDLFCKALKTYNMLCFGIYRLRDAHLSTPSQCTKRYVITNPPYEFELVPTDLIFCLMQFDHNAGQSRASLSHSSHSSQSSSKKSSSVHSIPSTANRQNRPKSRESRDKQNRKEMVYR

SEQ ID NO: 9384 - protein, 289 aa, Homo sapiens
MPVVRKIFRRRRGDSESEEDEQDSEEVRLKLEETREVQNLRKRPNGVSAVALLVGEKVQEETTLVDDPFQMKTGGMVDMKKLKERGKDKISEEEDLHLGTSFSAETNRRDEDADMMKYIETELKKRKGIVEHEEQKVKPKNAEDCLYELPENIRVSSAKKTEEMLSNQMLSGIPEVDLGIDAKIKNIISTEDAKARLLAEQQNKKKDSETSFVPTNMAVNYVQHNRFYHEELNAPIRRNKEEPKARPLRVGDTEKPEPERSPPNRKRPANEKATDDYHYEKFKKMNRRY

SEQ ID NO: 9385 - protein, 179 aa, Homo sapiens
MRQTEGRVPVFSHEVVPDHLRTKPDPEVEEQEKQLTTDAARIGADAAQKQIQSLNKMCSNLLEKISKEERESESGGLRPNKQTFNPTDTNALVAAVAFGKGLSNWRPSGSSGPGQAGQPGAGTILAGTSGLQQVQMAGAPSQQQPMLSGVQMAQAGQPGKMPSGIKTNIKSASMHPYQR

SEQ ID NO: 9386 - protein, 268 aa, Homo sapiens
MQREEKQLEASLDALLSQVADLKNSLGSFICKLENEYGRLTWPSVLDSFALLSGQLNTLNKVLKHEKTPLFRNQVIIPLVLSPDRDEDLMRQTEGRVPVFSHEVVPDHLRTKPDPEVEEQEKQLTTDAARIGADAAQKQIQSLNKMCSNLLEKISKEERESESGGLRPNKQTFNPTDTNALVAAVAFGKGLSNWRPSGSSGPGQAGQPGAGTILAGTSGLQQVQMAGAPSQQQPMLSGVQMAQAGQPGKMPSGIKTNIKSASMHPYQR

SEQ ID NO: 9387 - protein, 1138 aa, Homo sapiens
MVWRVPPFLLPILFLASHVGAAVDLTLLANLRLTDPQRFFLTCVSGEAGAGRGSDAWGPPLLLEKDDRIVRTPPGPPLRLARNGSHQVTLRGFSKPSDLVGVFSCVGGAGARRTRVIYVHNSPGAHLLPDKVTHTVNKGDTAVLSARVHKEKQTDVIWKSNGSYFYTLDWHEAQDGRFLLQLPNVQPPSSGIYSATYLEASPLGSAFFRLIVRGCGAGRWGPGCTKECPGCLHGGVCHDHDGECVCPPGFTGTRCEQACREGRFGQSCQEQCPGISGCRGLTFCLPDPYGCSCGSGWRGSQCQEACAPGHFGADCRLQCQCQNGGTCDRFSGCVCPSGWHGVHCEKSDRIPQILNMASELEFNLETMPRINCAAAGNPFPVRGSIELRKPDGTVLLSTKAIVEPEKTTAEFEVPRLVLADSGFWECRVSTSGGQDSRRFKVNVKVPPVPLAAPRLLTKQSRQLVVSPLVSFSGDGPISTVRLHYRPQDSTMDWSTIVVDPSENVTLMNLRPKTGYSVRVQLSRPGEGGEGAWGPPTLMTTDCPEPLLQPWLEGWHVEGTDRLRVSWSLPLVPGPLVGDGFLLRLWDGTRGQERRENVSSPQARTALLTGLTPGTHYQLDVQLYHCTLLGPASPPAHVLLPPSGPPAPRHLHAQALSDSEIQLTWKHPEALPGPISKYVVEVQVAGGAGDPLWIDVDRPEETSTIIRGLNASTRYLFRMRASIQGLGDWSNTVEESTLGNGLQAEGPVQESRAAEEGLDQQLILAVVGSVSATCLTILAALLTLVCIRRSCLHRRRTFTYQSGSGEETILQFSSGTLTLTRRPKLQPEPLSYPVLEWEDITFEDLIGEGNFGQVIRAMIKKDGLKMNAAIKMLKEYASENDHRDFAGELEVLCKLGHHPNIINLLGACKNRGYLYIAIEYAPYGNLLDFLRKSRVLETDPAFAREHGTASTLSSRQLLRFASDAANGMQYLSEKQFIHRDLAARNVLVGENLASKIADFGLSRGEEVYVKKTMGRLPVRWMAIESLNYSVYTTKSDVWSFGVLLWEIVSLGGTPYCGMTCAELYEKLPQGYRMEQPRNCDDEVYELMRQCWRDRPYERPPFAQIALQLGRMLEARKAYVNMSLFENFTYAGIDATAEEA

SEQ ID NO: 9388 - protein, 377 aa, Homo sapiens
MPSGCRCLHLVCLLCILGAPGQPVRADDCSSHCDLAHGCCAPDGSCRCDPGWEGLHCERCVRMPGCQHGTCHQPWQCICHSGWADEHICTTQSPCQNGGQCMYDGGGEYHCVCLPGFHGRDCERKAGPCEQAGSPCRNGGQCQDDQGFALNFTCRCLVGFVGARCEVNVDDCLMRPCANGATCLDGINRFSCLCPEGFAGRFCTINLDDCASRPCQRGARCRDRVHDFDCLCPSGYGGKTCELVLPVPDPPTTVDTPLGPTSAVVVPATGPAPHSAGAGLLRISVKEVVRRQEAGLGEPSLVALVVFGALTAALVLATVLLTLRAWRRGVCPPGPCCYPAPHYAPACQDQECQVSMLPAGLPLPRDLPPEPGKTTAL

SEQ ID NO: 9389 - protein, 1250 aa, Homo sapiens
MSAVVAQTLHVFGLRSHVANNIFYFDEQIIIFPSGNHCVKYNVDQKWQKFIPGSEKSQGMLALSISPNRRYLAISETVQEKPAITIYELSSIPCRKRKVLNNFDFQVQKFISMAFSPDSKYLLAQTSPPESNLVYWLWEKQKVMAIVRIDTQNNPVYQVSFSPQDNTQVCVTGNGMFKLLRFAEGTLKQTSFQRGEPQNYLAHTWVADDKIVVGTDTGKLFLFESGDQRWETSIMVKEPTNGSKSLDVIQESESLIEFPPVSSPLPSYEQMVAASSHSQMSMPQVFAIAAYSKGFACSAGPGRVLLFEKMEEKDFYRESREIRIPVDPQSNDPSQSDKQDVLCLCFSPSEETLVASTSKNQLYSITMSLTEISKGEPAHFEYLMYPLHSAPITGLATCIRKPLIATCSLDRSIRLWNYETNTLELFKEYQEEAYSISLHPSGHFIVVGFADKLRLMNLLIDDIRSFKEYSVRGCGECSFSNGGHLFAAVNGNVIHVYTTTSLENISSLKGHTGKIRSIVWNADDSKLISGGTDGAVYEWNLSTGKRETECVLKSCSYNCVTVSPDAKIIFAVGSDHTLKEIADSLILREISAFDVTYTAIVISHSGRMMFVGTSVGTIRAMKYPLPLQKEFNEYQAHAGPITKMLLTFDDQFLLTAAEDGCLFTWKVFDKDGRGIKREREVGFAEEVLVTKTDMEEKAQVMLELKTRVEELKMENEYQLRLKDMNYSEKIKELTDKFIQEMESLKTKNQVLRTEKEKQDVYHHEHIEDLLDKQSRELQDMECCNNQKLLLEYEKYQELQLKSQRMQEEYEKQLRDNDETKSQALEELTEFYEAKLQEKTTLLEEAQEDVRQQLREFEETKKQIEEDEDREIQDIKTKYEKKLRDEKESNLRLKGETGIMRKKFSSLQKEIEERTNDIETLKGEQMKLQGVIKSLEKDIQGLKREIQERDETIQDKEKRIYDLKKKNQELGKFKFVLDYKIKELKKQIEPRENEIRVMKEQIQEMEAELENFHKQNTQLELNITELWQKLRATDQEMRRERQKERDLEALVKRFKTDLHNCVAYIQEPRLLKEKVRGLFEKYVQRADMVEIAGLNTDLQQEYTRQREHLERNLATLKKKVVKEGELHRTDYVRIMQENVSLIKEINELRRELKFTRSQVYDLEAALKLTKKVRPQEVSETEPSRDMLSTAPTARLNEQEETGRIIEMQRLEIQRLRDQIQEQEQVTGFHTLAGVRLPSLSNSEVDLEVKTN

SEQ ID NO: 9390 - protein, 116 aa, Homo sapiens
MEPSSKVIEEFYNQTWVHRYGESILPTTLTTLWSLSVAIFSVGGMIGSFSVGLFVNRFGRRNSMLMMNLLAFVSAVLMGFSKLGKSFEMLILGRFIIGVYCGLTTGFVPMYVGEVS

SEQ ID NO: 9391 - protein, 475 aa, Homo sapiens
MEMASSAGSWLSGCLIPLVFLRLSVHVSGHAGDAGKFHVALLGGTAELLCPLSLWPGTVPKEVRWLRSPFPQRSQAVHIFRDGKDQDEDLMPEYKGRTVLVRDAQEGSVTLQILDVRLEDQGSYRCLIQVGNLSKEDTVILQVAAPSVGSLSPSAVALAVILPVLVLLIMVCLCLIWKQRRAKEKLLYEHVTEVDNLLSDHAKEKGKLHKAVKKLRSELKLKRAAANSGWRRARLHFVAVTLDPDTAHPKLILSEDQRCVRLGDRRQPVPDNPQRFDFVVSILGSEYFTTGCHYWEVYVGDKTKWILGVCSESVSRKGKVTASPANGHWLLRQSRGNEYEALTSPQTSFRLKEPPRCVGIFLDYEAGVISFYNVTNKSHIFTFTHNFSGPLRPFFEPCLHDGGKNTAPLVICSELHKSEESIVPRPEGKGHANGDVSLKVNSSLLPPKAPELKDIILSLPPDLGPALQELKAPSF

SEQ ID NO: 9392 - protein, 277 aa, Homo sapiens
MASNQEMLQHKDARVKLVTELLSGIRVIKFCGWEQALGARVEACRARELGRLRVIKYLDAACVYLWAALPVVISIVIFITYVLMGHQLTATKVFTALALVRMLILPLNNFPWVINGLLEAKVSLDRIQLFLDLPNHNPQAYYSPDPPAEPSTVLELHGALFSWDPVGTSLETFISHLEVKKGMLVGIVGKVGCGKSSLLAAIAGELHRLRGHVAVRGLSKGFGLATQEPWIQFATIRDNILFGKTFDAQLYKEVLEACALNDDLSILPAGDQTEVGE

SEQ ID NO: 9393 - protein, 1492 aa, Homo sapiens
MERLLAQLCGSSAAWPLPLWEGDTTGHCFTQLVLSALPHALLAVLSACYLGTPRSPDYILPCSPGWRLRLAASFLLSVFPLLDLLPVALPPGAGPGPIGLEVLAGCVAAVAWISHSLALWVLAHSPHGHSRGPLALALVALLPAPALVLTVLWHCQRGTLLPPLLPGPMARLCLLILQLAALLAYALGWAAPGGPREPWAQEPLLPEDQEPEVAEDGESWLSRFSYAWLAPLLARGACGELRQPQDICRLPHRLQPTYLARVFQAHWQEGARLWRALYGAFGRCYLALGLLKLVGTMLGFSGPLLLSLLVGFLEEGQEPLSHGLLYALGLAGGAVLGAVLQNQYGYEVYKVTLQARGAVLNILYCKALQLGPSRPPTGEALNLLGTDSERLLNFAGSFHEAWGLPLQLAITLYLLYQQVGVAFVGGLILALLLVPVNKVIATRIMASNQEMLQHKDARVKLVTELLSGIRVIKFCGWEQALGARVEACRARELGRLRVIKYLDAACVYLWAALPVVISIVIFITYVLMGHQLTATKVFTALALVRMLILPLNNFPWVINGLLEAKVSLDRIQLFLDLPNHNPQAYYSPDPPAEPSTVLELHGALFSWDPVGTSLETFISHLEVKKGMLVGIVGKVGCGKSSLLAAIAGELHRLRGHVAVRGLSKGFGLATQEPWIQFATIRDNILFGKTFDAQLYKEVLEACALNDDLSILPAGDQTEVGEKGVTLSGGQRARIALARAVYQEKELYLLDDPLAAVDADVANHLLHRCILGMLSYTTRLLCTHRTEYLERADAVLLMEAGRLIRAGPPSEILPLVQAVPKAWAENGQESDSATAQSVQNPEKTKEGLEEEQSTSGRLLQEESKKEGAVALHVYQAYWKAVGQGLALAILFSLLLMQATRNAADWWLSHWISQLKAENSSQEAQPSTSPASMGLFSPQLLLFSPGNLYIPVFPLPKAAPNGSSDIRFYLTVYATIAGVNSLCTLLRAVLFAAGTLQAAATLHRRLLHRVLMAPVTFFNATPTGRILNRFSSDVACADDSLPFILNILLANAAGLLGLLAVLGSGLPWLLLLLPPLSIMYYHVQRHYRASSRELRRLGSLTLSPLYSHLADTLAGLSVLRATGATYRFEEENLRLLELNQRCQFATSATMQWLDIRLQLMGAAVVSAIAGIALVQHQQGLANPGLVGLSLSYALSLTGLLSGLVSSFTQTEAMLVSVERLEEYTCDLPQEPQGQPLQLGTGWLTQGGVEFQDVVLAYRPGLPNALDGVTFCVQPGEKLGIVGRTGSGKSSLLLVLFRLLEPSSGRVLLDGVDTSQLELAQLRSQLAIIPQEPFLFSGTVRENLDPQGLHKDRALWQALKQCHLSEVITSMGGLDGELGEGGRSLSLGQRQLLCLARALLTDAKILCIDEATASVDQKTDQLLQQTICKRFANKTVLTIAHRLNTILNSDRVLVLQAGRVVELDSPATLRNQPHSLFQQLLQSSQQGVPASLGGP

SEQ ID NO: 9394 - protein, 404 aa, Homo sapiens
MDFNMKKLASDAGIFFTRAVQFTEEKFGQAEKTELDAHFENLLARADSTKNWTEKILRQTEVLLQPNPSARVEEFLYEKLDRKVPSRVTNGELLAQYMADAASELGPTTPYGKTLIKVAEAEKQLGAAERDFIHTASISFLTPLRNFLEGDWKTISKERRLLQNRRLDLDACKARLKKAKAAEAKATCEGDTVPDFQETRPRNYILSASASALWNDEVDKAEQELRVAQTEFDRQAEVTRLLLEGISSTHVNHLRCLHEFVKSQTTYYAQCYRHMLDLQKQLGSSQGAIFPGTFVGTTEPASPPLSSTSPTTAAATMPVVPSVASLAPPGEASLCLEEVAPPASGTRKARVLYDYEAADSSELALLADELITVYSLPGMDPDWLIGERGNKKGKVPVTYLELLS

SEQ ID NO: 9395 - protein, 395 aa, Homo sapiens
MDFNMKKLASDAGIFFTRAVQFTEEKFGQAEKTELDAHFENLLARADSTKNWTEKILRQTEVLLQPNPSARVEEFLYEKLDRKVPSRVTNGELLAQYMADAASELGPTTPYGKTLIKVAEAEKQLGAAERDFIHTASISFLTPLRNFLEGDWKTISKERRLLQNRRLDLDACKARLKKAKAAEAKATTVPDFQETRPRNYILSASASALWNDEVDKAEQELRVAQTEFDRQAEVTRLLLEGISSTHVNHLRCLHEFVKSQTTYYAQCYRHMLDLQKQLGRFPGTFVGTTEPASPPLSSTSPTTAAATMPVVPSVASLAPPGEASLCLEEVAPPASGTRKARVLYDYEAADSSELALLADELITVYSLPGMDPDWLIGERGNKKGKVPVTYLELLS

SEQ ID NO: 9396 - protein, 204 aa, Homo sapiens
MSWTCPRCQQPVFFAEKVSSLGKNWHRFCLKCERCHSILSPGGHAEHNGRPYCHKPCYGALFGPRGVNIGGVGSYLYNPPTPSPGCTTPLSPSSFSPPRPRTGLPQGKKSPPHMKTFTGETSLCPGCGEPVYFAEKVMSLGRNWHRPCLRCQRCHKTLTAGSHAEHDGVPYCHVPCYGYLFGPKGVNIGDVGCYIYDPVKIKFK

SEQ ID NO: 9397 - protein, 1749 aa, Homo sapiens
MAAAAGGPCVRSSRELWTILLGRSALRELSQIEAELNKHWRRLLEGLSYYKPPSPSSAEKVKANKDVASPLKELGLRISKFLGLDEEQSVQLLQCYLQEDYRGTRDSVKTVLQDERQSQALILKIADYYYEERTCILRCVLHLLTYFQDERHPYRVEYADCVDKLEKELVSKYRQQFEELYKTEAPTWETHGNLMTERQVSRWFVQCLREQSMLLEIIFLYYAYFEMAPSDLLVLTKMFKEQGFGSRQTNRHLVDETMDPFVDRIGYFSALILVEGMDIESLHKCALDDRRELHQFAQDGLICQDMDCLMLTFGDIPHHAPVLLAWALLRHTLNPEETSSVVRKIGGTAIQLNVFQYLTRLLQSLASGGNDCTTSTACMCVYGLLSFVLTSLELHTLGNQQDIIDTACEVLADPSLPELFWGTEPTSGLGIILDSVCGMFPHLLSPLLQLLRALVSGKSTAKKVYSFLDKMSFYNELYKHKPHDVISHEDGTLWRRQTPKLLYPLGGQTNLRIPQGTVGQVMLDDRAYLVRWEYSYSSWTLFTCEIEMLLHVVSTADVIQHCQRVKPIIDLVHKVISTDLSIADCLLPITSRIYMLLQRLTTVISPPVDVIASCVNCLTVLAARNPAKVWTDLRHTGFLPFVAHPVSSLSQMISAEGMNAGGYGNLLMNSEQPQGEYGVTIAFLRLITTLVKGQLGSTQSQGLVPCVMFVLKEMLPSYHKWRYNSHGVREQIGCLILELIHAILNLCHETDLHSSHTPSLQFLCICSLAYTEAGQTVINIMGIGVDTIDMVMAAQPRSDGAEGQGQGQLLIKTVKLAFSVTNNVIRLKPPSNVVSPLEQALSQHGAHGNNLIAVLAKYIYHKHDPALPRLAIQLLKRLATVAPMSVYACLGNDAAAIRDAFLTRLQSKIEDMRIKVMILEFLTVAVETQPGLIELFLNLEVKDGSDGSKEFSLGMWSCLHAVLELIDSQQQDRYWCPPLLHRAAIAFLHALWQDRRDSAMLVLRTKPKFWENLTSPLFGTLSPPSETSEPSILETCALIMKIICLEIYYVVKGSLDQSLKDTLKKFSIEKRFAYWSGYVKSLAVHVAETEGSSCTSLLEYQMLVSAWRMLLIIATTHADIMHLTDSVVRRQLFLDVLDGTKALLLVPASVNCLRLGSMKCTLLLILLRQWKRELGSVDEILGPLTEILEGVLQADQQLMEKTKAKVFSAFITVLQMKEMKVSDIPQYSQLVLNVCETLQEEVIALFDQTRHSLALGSATEDKDSMETDDCSRSRHRDQRDGVCVLGLHLAKELCEVDEDGDSWLQVTRRLPILPTLLTTLEVSLRMKQNLHFTEATLHLLLTLARTQQGATAVAGAGITQSICLPLLSVYQLSTNGTAQTPSASRKSLDAPSWPGVYRLSMSLMEQLLKTLRYNFLPEALDFVGVHQERTLQCLNAVRTVQSLACLEEADHTVGFILQLSNFMKEWHFHLPQLMRDIQVNLGYLCQACTSLLHSRKMLQHYLQNKNGDGLPSAVAQRVQRPPSAASAAPSSSKQPAADTEASEQQALHTVQYGLLKILSKTLAALRHFTPDVCQILLDQSLDLAEYNFLFALSFTTPTFDSEVAPSFGTLLATVNVALNMLGELDKKKEPLTQAVGLSTQAEGTRTLKSLLMFTMENCFYLLISQAMRYLRDPAVHPRDKQRMKQELSSELSTLLSSLSRYFRRGAPSSPATGVLPSPQGKSTSLSKASPESQEPLIQLVQAFVRHMQR

SEQ ID NO: 9398 - protein, 686 aa, Homo sapiens
MKPPFLLALVVCSVVSTNLKMVSKRNSVDGCIDWSVDLKTYMALAGEPVRVKCALFYSYIRTNYSTAQSTGLRLMWYKNKGDLEEPIIFSEVRMSKEEDSIWFHSAEAQDSGFYTCVLRNSTYCMKVSMSLTVAENESGLCYNSRIRYLEKSEVTKRKEISCPDMDDFKKSDQEPDVVWYKECKPKMWRSIIIQKGNALLIQEVQEEDGGNYTCELKYEGKLVRRTTELKVTALLTDKPPKPLFPMENQPSVIDVQLGKPLNIPCKAFFGFSGESGPMIYWMKGEKFIEELAGHIREGEIRLLKEHLGEKEVELALIFDSVVEADLANYTCHVENRNGRKHASVLLRKKDLIYKIELAGGLGAIFLLLVLLVVIYKCYNIELMLFYRQHFGADETNDDNKEYDAYLSYTKVDQDTLDCDNPEEEQFALEVLPDVLEKHYGYKLFIPERDLIPSGTYMEDLTRYVEQSRRLIIVLTPDYILRRGWSIFELESRLHNMLVSGEIKVILIECTELKGKVNCQEVESLKRSIKLLSLIKWKGSKSSKLNSKFWKHLVYEMPIKKKEMLPRCHVLDSAEQGLFGELQPIPSIAMTSTSATLVSSQADLPEFHPSDSMQIRHCCRGYKHEIPATTLPVPSLGNHHTYCNLPLTLLNGQLPLNNTLKDTQEFHRNSSLLPLSSKELSFTSDIW

SEQ ID NO: 9399 - protein, 2406 aa, Homo sapiens
MDPEQSVKGTKKAEGSPRKRLTKGEAIQTSVSSSVPYPGSGTAATQESPAQELLAPQPFPGPSSVLREGSQEKTGQQQKPPKRPPIEASVHISQLPQHPLTPAFMSPGKPEHLLEGSTWQLVDPMRPGPSGSFVAPGLHPQSQLLPSHASIIPPEDLPGVPKVFVPRPSQVSLKPTEEAHKKERKPQKPGKYICQYCSRPCAKPSVLQKHIRSHTGERPYPCGPCGFSFKTKSNLYKHRKSHAHRIKAGLASGMGGEMYPHGLEMERIPGEEFEEPTEGESTDSEEETSATSGHPAELSPRPKQPLLSSGLYSSGSHSSSHERCSLSQSSTAQSLEDPPPFVEPSSEHPLSHKPEDTHTIKQKLALRLSERKKVIDEQAFLSPGSKGSTESGYFSRSESAEQQVSPPNTNAKSYAEIIFGKCGRIGQRTAMLTATSTQPLLPLSTEDKPSLVPLSVPRTQVIEHITKLITINEAVVDTSEIDSVKPRRSSLSRRSSMESPKSSLYREPLSSHSEKTKPEQSLLSLQHPPSTAPPVPLLRSHSMPSAACTISTPHHPFRGSYSFDDHITDSEALSHSSHVFTSHPRMLKRQPAIELPLGGEYSSEEPGPSSKDTASKPSDEVEPKESELTKKTKKGLKTKGVIYECNICGARYKKRDNYEAHKKYYCSELQIAKPISAGTHTSPEAEKSQIEHEPWSQMMHYKLGTTLELTPLRKRRKEKSLGDEEEPPAFESTKSQFGSPGPSDAARNLPLESTKSPAEPSKSVPSLEGPTGFQPRTPKPGSGSESGKERRTTSKEISVIQHTSSFEKSDSLEQPSGLEGEDKPLAQFPSPPPAPHGRSAHSLQPKLVRQPNIQVPEILVTEEPDRPDTEPEPPPKEPEKTEEFQWPQRSQTLAQLPAEKLPPKKKRLRLAEMAQSSGESSFESSVPLSRSPSQESNVSLSGSSRSASFERDDHGKAEAPSPSSDMRPKPLGTHMLTVPSHHPHAREMRRSASEQSPNVSHSAHMTETRSKSFDYGSLSLTGPSAPAPVAPPARVAPPERRKCFLVRQASLSRPPESELEVAPKGRQESEEPQPSSSKPSAKSSLSQISSAATSHGGPPGGKGPGQDRPPLGPTVPYTEALQVFHHPVAQTPLHEKPYLPPPVSLFSFQHLVQHEPGQSPEFFSTQAMSSLLSSPYSMPPLPPSLFQAPPLPLQPTVLHPGQLHLPQLMPHPANIPFRQPPSFLPMPYPTSSALSSGFFLPLQSQFALQLPGDVESHLPQIKTSLAPLATGSAGLSPSTEYSSDIRLPPVAPPASSSAPTSAPPLALPACPDTMVSLVVPVRVQTNMPSYGSAMYTTLSQILVTQSQGSSATVALPKFEEPPSKGTTVCGADVHEVGPGPSGLSEEQSRAFPTPYLRVPVTLPERKGTSLSSESILSLEGSSSTAGGSKRVLSPAGSLELTMETQQQKRVKEEEASKADEKLELVKPCSVVLTSTEDGKRPEKSHLGNQGQGRRELEMLSSLSSDPSDTKEIPPLPHPALSHGTAPGSEALKEYPQPSGKPHRRGLTPLSVKKEDSKEQPDLPSLAPPSSLPLSETSSRPAKSQEGTDSKKVLQFPSLHTTTNVSWCYLNYIKPNHIQHADRRSSVYAGWCISLYNPNLPGVSTKAALSLLRSKQKVSKETYTMATAPHPEAGRLVPSSSRKPRMTEVHLPSLVSPEGQKDLARVEKEEERRGEPEEDAPASQRGEPARIKIFEGGYKSNEEYVYVRGRGRGKYVCEECGIRCKKPSMLKKHIRTHTDVRPYVCKHCHFAFKTKGNLTKHMKSKAHSKKCQETGVLEELEAEEGTSDDLFQDSEGREGSEAVEEHQFSDLEDSDSDSDLDEDEDEDEEESQDELSRPSSEAPPPGPPHALRADSSPILGPQPPDAPASGTEATRGSSVSEAERLTASSCSMSSQSMPGLPWLGPAPLGSVEKDTGSALSYKPVSPRRPWSPSKEAGSRPPLARKHSLTKNDSSPQRCSPAREPQASAPSPPGLHVDPGRGMGALPCGSPRLQLSPLTLCPLGRELAPRAHVLSKLEGTTDPGLPRYSPTRRWSPGQAESPPRSAPPGKWALAGPGSPSAGEHGPGLGLDPRVLFPPAPLPHKLLSRSPETCASPWQKAESRSPSCSPGPAHPLSSRPFSALHDFHGHILARTEENIFSHLPLHSQHLTRAPCPLIPIGGIQMVQARPGAHPTLLPGPTAAWVSGFSGGGSDLTGAREAQERGRWSPTESSSASVSPVAKVSKFTLSSELEGGDYPKERERTGGGPGRPPDWTPHGTGAPAEPTPTHSPCTPPDTLPRPPQGRRAAQSWSPRLESPRAPTNPEPSATPPLDRSSSVGCLAEASARFPARTRNLSGEPRTRQDSPKPSGSGEPRAHPHQPEDRVPPNA

SEQ ID NO: 9400 - protein, 2405 aa, Homo sapiens
MDPEQSVKGTKKAEGSPRKRLTKGEAIQTSVSSSVPYPGSGTAATQESPAQELLAPQPFPGPSSVLREGSQEKTGQQQKPPKRPPIEASVHISQLPQHPLTPAFMSPGKPEHLLEGSTWQLVDPMRPGPSGSFVAPGLHPQSQLLPSHASIIPPEDLPGVPKVFVPRPSQVSLKPTEEAHKKERKPQKPGKYICQYCSRPCAKPSVLQKHIRSHTGERPYPCGPCGFSFKTKSNLYKHRKSHAHRIKAGLASGMGGEMYPHGLEMERIPGEEFEEPTEGESTDSEEETSATSGHPAELSPRPKQPLLSSGLYSSGSHSSSHERCSLSQSSTAQSLEDPPPFVEPSSEHPLSHKPEDTHTIKQKLALRLSERKKVIDEQAFLSPGSKGSTESGYFSRSESAEQQVSPPNTNAKSYAEIIFGKCGRIGQRTAMLTATSTQPLLPLSTEDKPSLVPLSVPRTQVIEHITKLITINEAVVDTSEIDSVKPRRSSLSRRSSMESPKSSLYREPLSSHSEKTKPEQSLLSLQHPPSTAPPVPLLRSHSMPSAACTISTPHHPFRGSYSFDDHITDSEALSHSSHVFTSHPRMLKRQPAIELPLGGEYSSEEPGPSSKDTASKPSDEVEPKESELTKKTKKGLKTKGVIYECNICGARYKKRDNYEAHKKYYCSELQIAKPISAGTHTSPEAEKSQIEHEPWSQMMHYKLGTTLELTPLRKRRKEKSLGDEEEPPAFESTKSQFGSPGPSDAARNLPLESTKSPAEPSKSVPSLEGPTGFQPRTPKPGSGSESGKERRTTSKEISVIQHTSSFEKSDSLEQPSGLEGEDKPLAQFPSPPPAPHGRSAHSLQPKLVRQPNIQVPEILVTEEPDRPDTEPEPPPKEPEKTEEFQWPQRSQTLAQLPAEKLPPKKKRLRLAEMAQSSGESSFESSVPLSRSPSQESNVSLSGSSRSASFERDDHGKAEAPSPSSDMRPKPLGTHMLTVPSHHPHAREMRRSASEQSPNVSHSAHMTETRSKSFDYGSLSLTGPSAPAPVAPPARVAPPERRKCFLVRQASLSRPPESELEVAPKGRQESEEPQPSSSKPSAKSSLSQISSAATSHGGPPGGKGPGQDRPPLGPTVPYTEALQVFHHPVAQTPLHEKPYLPPPVSLFSFQHLVQHEPGQSPEFFSTQAMSSLLSSPYSMPPLPPSLFQAPPLPLQPTVLHPGQLHLPQLMPHPANIPFRQPPSFLPMPYPTSSALSSGFFLPLQSQFALQLPGDVESHLPQIKTSLAPLATGSAGLSPSTEYSSDIRLPPVAPPASSSAPTSAPPLALPACPDTMVSLVVPVRVQTNMPSYGSAMYTTLSQILVTQSQGSSATVALPKFEEPPSKGTTVCGADVHEVGPGPSGLSEEQSRAFPTPYLRVPVTLPERKGTSLSSESILSLEGSSSTAGGSKRVLSPAGSLELTMETQQQKRVKEEEASKADEKLELVKPCSVVLTSTEDGKRPEKSHLGNQGQGRRELEMLSSLSSDPSDTKEIPPLPHPALSHGTAPGSEALKEYPQPSGKPHRRGLTPLSVKKEDSKEQPDLPSLAPPSSLPLSETSSRPAKSQEGTDSKKVLQFPSLHTTTNVSWCYLNYIKPNHIQHADRRSSVYAGWCISLYNPNLPGVSTKAALSLLRSKQKVSKETYTMATAPHPEAGRLVPSSSRKPRMTEVHLPSLVSPEGQKDLARVEKEEERRGEPEEDAPASQRGEPARIKIFEGGYKSNEEYVYVRGRGRGKYVCEECGIRCKKPSMLKKHIRTHTDVRPYVCKHCHFAFKTKGNLTKHMKSKAHSKKCQETGVLEELEAEEGTSDDLFQDSEGREGSEAVEEHQFSDLEDSDSDSDLDEDEDEDEEESQDELSRPSSEAPPPGPPHALRADSSPILGPQPPDAPASGTEATRGSSVSEAERLTASSCSMSSQSMPGLPWLGPAPLGSVEKDTGSALSYKPVSPRRPWSPSKEAGSRPPLARKHSLTKNDSSPQRCSPAREPQASAPSPPGLHVDPGRGMGALPCGSPRLQLSPLTLCPLGRELAPRAHVLSKLEGTTDPGLPRYSPTRRWSPGQAESPPRSAPPGKWALAGPGSPSAGEHGPGLGLDPRVLFPPAPLPHKLLSRSPETCASPWKAESRSPSCSPGPAHPLSSRPFSALHDFHGHILARTEENIFSHLPLHSQHLTRAPCPLIPIGGIQMVQARPGAHPTLLPGPTAAWVSGFSGGGSDLTGAREAQERGRWSPTESSSASVSPVAKVSKFTLSSELEGGDYPKERERTGGGPGRPPDWTPHGTGAPAEPTPTHSPCTPPDTLPRPPQGRRAAQSWSPRLESPRAPTNPEPSATPPLDRSSSVGCLAEASARFPARTRNLSGEPRTRQDSPKPSGSGEPRAHPHQPEDRVPPNA

SEQ ID NO: 9401 - protein, 417 aa, Homo sapiens
MTTLVPATLSFLLLWTLPGQVLLRVALAKEEVKSGTKGSQPMSPSDFLDKLMGRTSGYDARIRPNFKGPPVNVTCNIFINSFSSITKTTMDYRVNVFLRQQWNDPRLSYREYPDDSLDLDPSMLDSIWKPDLFFANEKGANFHEVTTDNKLLRIFKNGNVLYSIRLTLILSCLMDLKNFPMDIQTCTMQLESFGYTMKDLVFEWLEDAPAVQVAEGLTLPQFILRDEKDLGCCTKHYNTGKFTCIEVKFHLERQMGYYLIQMYIPSLLIVILSWVSFWINMDAAPARVGLGITTVLTMTTQSSGSRASLPKVSYVKAIDIWMAVCLLFVFAALLEYAAINFVSRQHKEFIRLRRRQRRQRLEEDIIQESRFYFRGYGLGHCLQARDGGPMEGSGIYSPQPPAPLLREGETTRKLYVD

SEQ ID NO: 9402 - protein, 329 aa, Homo sapiens
MGATGDAEQPRGPSGAERGGLELGDAGAAGQLVLTNPWNIMIKHRQVQRRGRRSQMTTSFTDPAISMDLLRAVLQPSINEEIQTVFNKYMKFFQKAALNVRDNVGEEVDAEQLIQEACRSCLEQAKLLFSDGEKVIPRLTHELPGIKRGRQAEEECAHRGSPLPKKRKGRPPGHILSSDRAAAGMVWKPKSCEPIRREGPKWDPARLNESTTFVLGSRANKALGMGGTRGRIYIKHPHLFKYAADPQDKHWLAEQHHMRATGGKMAYLLIEEDIRDLAASDDYRGCLDLKLEELKSFVLPSWMVEKMRKYMETLRTENEHRAVEAPPQT

SEQ ID NO: 9403 - protein, 2489 aa, Homo sapiens
MVGERHAGDLMVPLGPRLQAYPEELIRQRPGHDGHPEYLIRWSVLKCGEVGKVGVEEGKAEHILMWLSAPEVYANCPGLLGERALSKGLQHEPAGVSGSFPRDPGGLDEVAMGEMEADVQALVRRAARQLAESGTPSLTAAVLHTIHVLSAYASIGPLTGVFRETGALDLLMHMLCNPEPQIRRSAGKMLQALAAHDAGSRAHVLLSLSQQDGIEQHMDFDSRYTLLELFAETTSSEEHCMAFEGIHLPQIPGKLLFSLVKRYLCVTSLLDQLNSSPELGAGDQSSPCATREKSRGQRELEFSMAVGNLISELVRSMGWARNLSEQGMSPPRPTRSIFQPYISGPSLLLPTIVTTPRRQGWVFRQRSEFSSRSGYGEYVQQTLQPGMRVRMLDDYEEISAGDEGEFRQSNNGIPPVQVFWQSTGRTYWVHWHMLEILGPEEATEDKASAAVEKGAGATVLGTAFPSWDWNPMDGLYPLPYLQPEPQKNERVGYLTQAEWWELLFFIKKLDLCEQQPIFQNLWKNLDETLGEKALGEISVSVEMAESLLQVLSSRFEGSTLNDLLNSQIYTKYGLLSNEPSSSSTSRNHSCTPDPEEESKSEASFSEEETESLKAKAEAPKTEAEPTKTRTETPMAQSDSQLFNQLLVTEGMTLPTEMKEAASEMARALRGPGPRSSLDQHVAAVVATVQISSLDTNLQLSGLSALSQAVEEVTERDHPLVRPDRSLREKLVKMLVELLTNQVGEKMVVVQALRLLYLLMTKHEWRPLFAREGGIYAVLVCMQEYKTSVLVQQAGLAALKMLAVASSSEIPTFVTGRDSIHSLFDAQMTREIFASIDSATRPGSESLLLTVPAAVILMLNTEGCSSAARNGLLLLNLLLCNHHTLGDQIITQELRDTLFRHSGIAPRTEPMPTTRTILMMLLNRYSEPPGSPERAALETPIIQGQDGSPELLIRSLVGGPSAELLLDLERVLCREGSPGGAVRPLLKRLQQETQPFLLLLRTLDAPGPNKTLLLSVLRVITRLLDFPEAMVLPWHEVLEPCLNCLSGPSSDSEIVQELTCFLHRLASMHKDYAVVLCCLGAKEILSKVLDKHSAQLLLGCELRDLVTECEKYAQLYSNLTSSILAGCIQMVLGQIEDHRRTHQPINIPFFDVFLRHLCQGSSVEVKEDKCWEKVEVSSNPHRASKLTDHNPKTYWESNGSTGSHYITLHMHRGVLVRQLTLLVASEDSSYMPARVVVFGGDSTSCIGTELNTVNVMPSASRVILLENLNRFWPIIQIRIKRCQQGGIDTRVRGVEVLGPKPTFWPLFREQLCRRTCLFYTIRAQAWSRDIAEDHRRLLQLCPRLNRVLRHEQNFADRFLPDDEAAQALGKTCWEALVSPLVQNITSPDAEGVSALGWLLDQYLEQRETSRNPLSRAASFASRVRRLCHLLVHVEPPPGPSPEPSTRPFSKNSKGRDRSPAPSPVLPSSSLRNITQCWLSVVQEQVSRFLAAAWRAPDFVPRYCKLYEHLQRAGSELFGPRAAFMLALRSGFSGALLQQSFLTAAHMSEQFARYIDQQIQGGLIGGAPGVEMLGQLQRHLEPIMVLSGLELATTFEHFYQHYMADRLLSFGSSWLEGAVLEQIGLCFPNRLPQLMLQSLSTSEELQRQFHLFQLQRLDKLFLEQEDEEEKRLEEEEEEEEEEEAEKELFIEDPSPAISILVLSPRCWPVSPLCYLYHPRKCLPTEFCDALDRFSSFYSQSQNHPVLDMGPHRRLQWTWLGRAELQFGKQILHVSTVQMWLLLKFNQTEEVSVETLLKDSDLSPELLLQALVPLTSGNGPLTLHEGQDFPHGEKDEGRTLEQKRNLLSCLLVRILKAHGEKGLHIDQLVCLVLEAWQKGPNPPGTLGHTVAGGVACTSTDVLSCILHLLGQGYVKRRDDRPQILMYAAPEPMGPCRGQADVPFCGSQSETSKPSPEAVATLASLQLPAGRTMSPQEVEGLMKQTVRQVQETLNLEPDVAQHLLAHSHWGAEQLLQSYSEDPEPLLLAAGLCVHQAQAVPVRPDHCPVCVSPLGCDDDLPSLCCMHYCCKSCWNEYLTTRIEQNLVLNCTCPIADCPAQPTGAFIRAIVSSPEVISKYEKALLRGYVESCSNLTWCTNPQGCDRILCRQGLGCGTTCSKCGWASCFNCSFPEAHYPASCGHMSQWVDDGGYYDGMSVEAQSKHLAKLISKRCPSCQAPIEKNEGCLHMTCAKCNHGFCWRCLKSWKPNHKDYYNCSAMVSKAARQEKRFQDYNERCTFHHQAREFAVNLRNRVSAIHEVPPPRSFTFLNDACQGLEQARKVLAYACVYSFYSQDAEYMDVVEQQTENLELHTNALQILLEETLLRCRDLASSLRLLRADCLSTGMELLRRIQERLLAILQHSAQDFRVGLQSPSVEAWEAKGPNMPGSQPQASSGPEAEEEEEDDEDDVPEWQQDEFDEELDNDSFSYDESENLDQETFFFGDEEEDEDEAYD

SEQ ID NO: 9404 - protein, 267 aa, Homo sapiens
MAPWALLSPGVLVRTGHTVLTWGITLVLFLHDTELRQWEEQGELLLPLTFLLLVLGSLLLYLAVSLMDPGYVNVQPQPQEELKEEQTAMVPPAIPLRRCRYCLVLQPLRARHCRECRRCVRRYDHHCPWMENCVGERNHPLFVVYLALQLVVLLWGLYLAWSGLRFFQPWGQWLRSSGLLFATFLLLSLFSLVASLLLVSHLYLVASNTTTWEFISSHRIAYLRQRPSNPFDRGLTRNLAHFFCGWPSGSWETLWAEEEEEGSSPAV

SEQ ID NO: 9405 - protein, 281 aa, Homo sapiens
MAPWALLSPGVLVRTGHTVLTWGITLVLFLHDTGEPDPERPRTHPIPQLRQWEEQGELLLPLTFLLLVLGSLLLYLAVSLMDPGYVNVQPQPQEELKEEQTAMVPPAIPLRRCRYCLVLQPLRARHCRECRRCVRRYDHHCPWMENCVGERNHPLFVVYLALQLVVLLWGLYLAWSGLRFFQPWGQWLRSSGLLFATFLLLSLFSLVASLLLVSHLYLVASNTTTWEFISSHRIAYLRQRPSNPFDRGLTRNLAHFFCGWPSGSWETLWAEEEEEGSSPAV

SEQ ID NO: 9406 - protein, 313 aa, Homo sapiens
MSTEGGFGGTSSSDAQQSLQSFWPRVMEEIRNLTVKDFRVQELPLARIKKIMKLDEDVKMISAEAPVLFAKAAQIFITELTLRAWIHTEDNKRRTLQRNDIAMAITKFDQFDFLIDIVPRDELKPPKRQEEVRQSVTPAEPVQYYFTLAQQPTAVQVQGQQQGQQTTSSTTTIQPGQIIIAQPQQGQTTPVTMQVGEGQQVQIVQAQPQGQAQQAQSGTGQTMQVMQQIITNTGEIQQIPETGLAVSLRLMKCSGLISAHCSFRLPGSSDSPASASRVAGIIGAAECRPAAVYPLSPACIRHSSCAGTDPDTC

SEQ ID NO: 9407 - protein, 248 aa, Homo sapiens
MAETSLPELGGEDKATPCPSILELEELLRAGKSSCSRVDEVWPNLFIGDAMDSLQKQDLRRPKIHGAVQASPYQPPTLASLQRLLWVRQAATLNHIDEVWPSLFLGDAYAARDKSKLIQLGITHVVNAAAGKFQVDTGAKFYRGMSLEYYGIEADDNPFFDLSVYFLPVARYIRAALSVPQGRVLVHCAMGVSRSATLVLAFLMICENMTLVEAIQTVQAHRNICPNSGFLRQLQVLDNRLGRETGRF

SEQ ID NO: 9408 - protein, 1890 aa, Homo sapiens
MVKLANPLYTEWILEAIQKIKKQKQRPSEERICHAVSTSHGLDKKTVSEQLELSVQDGSVLKVTNKGLASYKDPDNPGRFSSVKPGTFPKSAKGSRGSCNDLRNVDWNKLLRRAIEGLEEPNGSSLKNIEKYLRSQSDLTSTTNNPAFQQRLRLGAKRAVNNGRLLKDGPQYRVNYGSLDGKGAPQYPSAFPSSLPPVSLLPHEKDQPRADPIPICSFCLGTKESNREKKPEELLSCADCGSSGHPSCLKFCPELTTNVKALRWQCIECKTCSACRVQGRNADNMLFCDSCDRGFHMECCDPPLSRMPKGMWICQVCRPKKKGRKLLHEKAAQIKRRYAKPIGRPKNKLKQRLLSVTSDEGSMNAFTGRGSPGRGQKTKVCTTPSSGHAASGKDSSSRLAVTDPTRPGATTKITTTSTYISASTLKVNKKTKGLIDGLTKFFTPSPDGRRSRGEIIDFSKHYRPRKKVSQKQSCTSHVLATDTEIKINIKQESADVNVIGNKDVVTEEDLDVFKQAQELSWEKIECESGVEDCGRYPSVIEFGKYEIQTWYSSPYPQEYARLPKLYLCEFCLKYMKSKNILLRHSKKCGWFHPPANEIYRRKDLSVFEVDGNMSKIYCQNLCLLAKLFLDHKTLYYDVEPFLFYVLTKNDEKGCHLVGYFSKEKLCQQKYNVSCIMIMPQHQRQGFGRFLIDFSYLLSRREGQAGSPEKPLSDLGRLSYLAYWKSVILEYLYHHHERHISIKAISRATGMCPHDIATTLQHLHMIDKRDGRFVIIRREKLILSHMEKLKTCSRANELDPDSLRWTPILISNAAVSEEEREAEKEAERLMEQASCWEKEEQEILSTRANSRQSPAKVQSKNKYLHSPESRPVTGERGQLLELSKESSEEEEEEEDEEEEEEEEEEEEDEEEEEEEEEEEEEENIQSSPPRLTKPQSVAIKRKRPFVLKKKRGRKRRRINSSVTTETISETTEVLNEPFDNSDEERPMPQLEPTCEIEVEEDGRKPVLRKAFQHQPGKKRQTEEEEGKDNHCFKNADPCRNNMNDDSSNLKEGSKDNPEPLKCKQVWPKGTKRGLSKWRQNKERKTGFKLNLYTPPETPMEPDEQVTVEEQKETSEGKTSPSPIRIEEEVKETGEALLPQEENRREETCAPVSPNTSPGEKPEDDLIKPEEEEEEEEEEEEEEEEEEGEEEEGGGNVEKDPDGAKSQEKEEPEISTEKEDSARLDDHEEEEEEDEEPSHNEDHDADDEDDSHMESAEVEKEELPRESFKEVLENQETFLDLNVQPGHSNPEVLMDCGVDLTASCNSEPKELAGDPEAVPESDEEPPPGEQAQKQDQKNSKEVDTEFKEGNPATMEIDSETVQAVQSLTQESSEQDDTFQDCAETQEACRSLQNYTRADQSPQIATTLDDCQQSDHSSPVSSVHSHPGQSVRSVNSPSVPALENSYAQISPDQSAISVPSLQNMETSPMMDVPSVSDHSQQVVDSGFSDLGSIESTTENYENPSSYDSTMGGSICGNGSSQNSCSYSNLTSSSLTQSSCAVTQQMSNISGSCSMLQQTSISSPPTCSVKSPQGCVVERPPSSSQQLAQCSMAANFTPPMQLAEIPETSNANIGLYERMGQSDFGAGHYPQPSATFSLAKLQQLTNTLIDHSLPYSHSAAVTSYANSASLSTPLSNTGLVQLSQSPHSVPGGPQAQATMTPPPNLTPPPMNLPPPLLQRNMAASNIGISHSQRLQTQIASKGHISMRTKSASLSPAAATHQSQIYGRSQTVAMQGPARTLTMQRGMNMSVNLMPAPAYNVNSVNMNMNTLNAMNGYSMSQPMMNSGYHSNHGYMNQTPQYPMQMQMGMMGTQPYAQQPMQTPPHGNMMYTAPGHHGYMNTGMSKQSLNGSYMRR

SEQ ID NO: 9409 - protein, 1781 aa, Homo sapiens
MVKLANPLYTEWILEAIQKIKKQKQRPSEERICHAVSTSHGLDKKTVSEQLELSVQDGSVLKVTNKGLASYKDPDNPGRFSSVKPGTFPKSAKGSRGSCNDLRNVDWNKLLRRAIEGLEEPNGSSLKNIEKYLRSQSDLTSTTNNPAFQQRLRLGAKRAVNNGRLLKDGPQYRVNYGSLDGKGAPQYPSAFPSSLPPVSLLPHEKDQPRADPIPICSFCLGTKESNREKKPEELLSCADCGSSGHPSCLKFCPELTTNVKALRWQCIECKTCSACRVQGRNADNMLFCDSCDRGFHMECCDPPLSRMPKGMWICQVCRPKKKGRKLLHEKAAQIKRRYAKPIGRPKNKLKQRLLSVTSDEGSMNAFTGRGSPDTEIKINIKQESADVNVIGNKDVVTEEDLDVFKQAQELSWEKIECESGVEDCGRYPSVIEFGKYEIQTWYSSPYPQEYARLPKLYLCEFCLKYMKSKNILLRHSKKCGWFHPPANEIYRRKDLSVFEVDGNMSKIYCQNLCLLAKLFLDHKTLYYDVEPFLFYVLTKNDEKGCHLVGYFSKEKLCQQKYNVSCIMIMPQHQRQGFGRFLIDFSYLLSRREGQAGSPEKPLSDLGRLSYLAYWKSVILEYLYHHHERHISIKAISRATGMCPHDIATTLQHLHMIDKRDGRFVIIRREKLILSHMEKLKTCSRANELDPDSLRWTPILISNAAVSEEEREAEKEAERLMEQASCWEKEEQEILSTRANSRQSPAKVQSKNKYLHSPESRPVTGERGQLLELSKESSEEEEEEEDEEEEEEEEEEEEDEEEEEEEEEEEEEENIQSSPPRLTKPQSVAIKRKRPFVLKKKRGRKRRRINSSVTTETISETTEVLNEPFDNSDEERPMPQLEPTCEIEVEEDGRKPVLRKAFQHQPGKKRQTEEEEGKDNHCFKNADPCRNNMNDDSSNLKEGSKDNPEPLKCKQVWPKGTKRGLSKWRQNKERKTGFKLNLYTPPETPMEPDEQVTVEEQKETSEGKTSPSPIRIEEEVKETGEALLPQEENRREETCAPVSPNTSPGEKPEDDLIKPEEEEEEEEEEEEEEEEEEGEEEEGGGNVEKDPDGAKSQEKEEPEISTEKEDSARLDDHEEEEEEDEEPSHNEDHDADDEDDSHMESAEVEKEELPRESFKEVLENQETFLDLNVQPGHSNPEVLMDCGVDLTASCNSEPKELAGDPEAVPESDEEPPPGEQAQKQDQKNSKEVDTEFKEGNPATMEIDSETVQAVQSLTQESSEQDDTFQDCAETQEACRSLQNYTRADQSPQIATTLDDCQQSDHSSPVSSVHSHPGQSVRSVNSPSVPALENSYAQISPDQSAISVPSLQNMETSPMMDVPSVSDHSQQVVDSGFSDLGSIESTTENYENPSSYDSTMGGSICGNGSSQNSCSYSNLTSSSLTQSSCAVTQQMSNISGSCSMLQQTSISSPPTCSVKSPQGCVVERPPSSSQQLAQCSMAANFTPPMQLAEIPETSNANIGLYERMGQSDFGAGHYPQPSATFSLAKLQQLTNTLIDHSLPYSHSAAVTSYANSASLSTPLSNTGLVQLSQSPHSVPGGPQAQATMTPPPNLTPPPMNLPPPLLQRNMAASNIGISHSQRLQTQIASKGHISMRTKSASLSPAAATHQSQIYGRSQTVAMQGPARTLTMQRGMNMSVNLMPAPAYNVNSVNMNMNTLNAMNGYSMSQPMMNSGYHSNHGYMNQTPQYPMQMQMGMMGTQPYAQQPMQTPPHGNMMYTAPGHHGYMNTGMSKQSLNGSYMRR

SEQ ID NO: 9410 - protein, 2472 aa, Homo sapiens
MDPSGVKVLETAEDIQERRQQVLDRYHRFKELSTLRRQKLEDSYRFQFFQRDAEELEKWIQEKLQIASDENYKDPTNLQGKLQKHQAFEAEVQANSGAIVKLDETGNLMISEGHFASETIRTRLMELHRQWELLLEKMREKGIKLLQAQKLVQYLRECEDVMDWINDKEAIVTSEELGQDLEHVEVLQKKFEEFQTDMAAHEERVNEVNQFAAKLIQEQHPEEELIKTKQDEVNAAWQRLKGLALQRQGKLFGAAEVQRFNRDVDETISWIKEKEQLMASDDFGRDLASVQALLRKHEGLERDLAALEDKVKALCAEADRLQQSHPLSATQIQVKREELITNWEQIRTLAAERHARLNDSYRLQRFLADFRDLTSWVTEMKALINADELASDVAGAEALLDRHQEHKGEIDAHEDSFKSADESGQALLAAGHYASDEVREKLTVLSEERAALLELWELRRQQYEQCMDLQLFYRDTEQVDNWMSKQEAFLLNEDLGDSLDSVEALLKKHEDFEKSLSAQEEKITALDEFATKLIQNNHYAMEDVATRRDALLSRRNALHERAMRRRAQLADSFHLQQFFRDSDELKSWVNEKMKTATDEAYKDPSNLQGKVQKHQAFEAELSANQSRIDALEKAGQKLIDVNHYAKDEVAARMNEVISLWKKLLEATELKGIKLREANQQQQFNRNVEDIELWLYEVEGHLASDDYGKDLTNVQNLQKKHALLEADVAAHQDRIDGITIQARQFQDAGHFDAENIKKKQEALVARYEALKEPMVARKQKLADSLRLQQLFRDVEDEETWIREKEPIAASTNRGKDLIGVQNLLKKHQALQAEIAGHEPRIKAVTQKGNAMVEEGHFAAEDVKAKLHELNQKWEALKAKASQRRQDLEDSLQAQQYFADANEAESWMREKEPIVGSTDYGKDEDSAEALLKKHEALMSDLSAYGSSIQALREQAQSCRQQVAPTDDETGKELVLALYDYQEKSPREVTMKKGDILTLLNSTNKDWWKVEVNDRQGFVPAAYVKKLDPAQSASRENLLEEQGSIALRQEQIDNQTRITKEAGSVSLRMKQVEELYHSLLELGEKRKGMLEKSCKKFMLFREANELQQWINEKEAALTSEEVGADLEQVEVLQKKFDDFQKDLKANESRLKDINKVAEDLESEGLMAEEVQAVQQQEVYGMMPRDETDSKTASPWKSARLMVHTVATFNSIKELNERWRSLQQLAEERSQLLGSAHEVQRFHRDADETKEWIEEKNQALNTDNYGHDLASVQALQRKHEGFERDLAALGDKVNSLGETAERLIQSHPESAEDLQEKCTELNQAWSSLGKRADQRKAKLGDSHDLQRFLSDFRDLMSWINGIRGLVSSDELAKDVTGAEALLERHQEHRTEIDARAGTFQAFEQFGQQLLAHGHYASPEIKQKLDILDQERADLEKAWVQRRMMLDQCLELQLFHRDCEQAENWMAAREAFLNTEDKGDSLDSVEALIKKHEDFDKAINVQEEKIAALQAFADQLIAAGHYAKGDISSRRNEVLDRWRRLKAQMIEKRSKLGESQTLQQFSRDVDEIEAWISEKLQTASDESYKDPTNIQSKHQKHQAFEAELHANADRIRGVIDMGNSLIERGACAGSEDAVKARLAALADQWQFLVQKSAEKSQKLKEANKQQNFNTGIKDFDFWLSEVEALLASEDYGKDLASVNNLLKKHQLLEADISAHEDRLKDLNSQADSLMTSSAFDTSQVKDKRDTINGRFQKIKSMAASRRAKLNESHRLHQFFRDMDDEESWIKEKKLLVGSEDYGRDLTGVQNLRKKHKRLEAELAAHEPAIQGVLDTGKKLSDDNTIGKEEIQQRLAQFVEHWKELKQLAAARGQRLEESLEYQQFVANVEEEEAWINEKMTLVASEDYGDTLAAIQGLLKKHEAFETDFTVHKDRVNDVCTNGQDLIKKNNHHEENISSKMKGLNGKVSDLEKAAAQRKAKLDENSAFLQFNWKADVVESWIGEKENSLKTDDYGRDLSSVQTLLTKQETFDAGLQAFQQEGIANITALKDQLLAAKHVQSKAIEARHASLMKRWSQLLANSAARKKKLLEAQSHFRKVEDLFLTFAKKASAFNSWFENAEEDLTDPVRCNSLEEIKALREAHDAFRSSLSSAQADFNQLAELDRQIKSFRVASNPYTWFTMEALEETWRNLQKIIKERELELQKEQRRQEENDKLRQEFAQHANAFHQWIQETRTYLLDGSCMVEESGTLESQLEATKRKHQEIRAMRSQLKKIEDLGAAMEEALILDNKYTEHSTVGLAQQWDQLDQLGMRMQHNLEQQIQARNTTGVTEEALKEFSMMFKHFDKDKSGRLNHQEFKSCLRSLGYDLPMVEEGEPDPEFEAILDTVDPNRDGHVSLQEYMAFMISRETENVKSSEEIESAFRALSSEGKPYVTKEELYQNLTREQADYCVSHMKPYVDGKGRELPTAFDYVEFTRSLFVN

SEQ ID NO: 9411 - protein, 2477 aa, Homo sapiens
MDPSGVKVLETAEDIQERRQQVLDRYHRFKELSTLRRQKLEDSYRFQFFQRDAEELEKWIQEKLQIASDENYKDPTNLQGKLQKHQAFEAEVQANSGAIVKLDETGNLMISEGHFASETIRTRLMELHRQWELLLEKMREKGIKLLQAQKLVQYLRECEDVMDWINDKEAIVTSEELGQDLEHVEVLQKKFEEFQTDMAAHEERVNEVNQFAAKLIQEQHPEEELIKTKQDEVNAAWQRLKGLALQRQGKLFGAAEVQRFNRDVDETISWIKEKEQLMASDDFGRDLASVQALLRKHEGLERDLAALEDKVKALCAEADRLQQSHPLSATQIQVKREELITNWEQIRTLAAERHARLNDSYRLQRFLADFRDLTSWVTEMKALINADELASDVAGAEALLDRHQEHKGEIDAHEDSFKSADESGQALLAAGHYASDEVREKLTVLSEERAALLELWELRRQQYEQCMDLQLFYRDTEQVDNWMSKQEAFLLNEDLGDSLDSVEALLKKHEDFEKSLSAQEEKITALDEFATKLIQNNHYAMEDVATRRDALLSRRNALHERAMRRRAQLADSFHLQQFFRDSDELKSWVNEKMKTATDEAYKDPSNLQGKVQKHQAFEAELSANQSRIDALEKAGQKLIDVNHYAKDEVAARMNEVISLWKKLLEATELKGIKLREANQQQQFNRNVEDIELWLYEVEGHLASDDYGKDLTNVQNLQKKHALLEADVAAHQDRIDGITIQARQFQDAGHFDAENIKKKQEALVARYEALKEPMVARKQKLADSLRLQQLFRDVEDEETWIREKEPIAASTNRGKDLIGVQNLLKKHQALQAEIAGHEPRIKAVTQKGNAMVEEGHFAAEDVKAKLHELNQKWEALKAKASQRRQDLEDSLQAQQYFADANEAESWMREKEPIVGSTDYGKDEDSAEALLKKHEALMSDLSAYGSSIQALREQAQSCRQQVAPTDDETGKELVLALYDYQEKSPREVTMKKGDILTLLNSTNKDWWKVEVNDRQGFVPAAYVKKLDPAQSASRENLLEEQGSIALRQEQIDNQTRITKEAGSVSLRMKQVEELYHSLLELGEKRKGMLEKSCKKFMLFREANELQQWINEKEAALTSEEVGADLEQVEVLQKKFDDFQKDLKANESRLKDINKVAEDLESEGLMAEEVQAVQQQEVYGMMPRDETDSKTASPWKSARLMVHTVATFNSIKELNERWRSLQQLAEERSQLLGSAHEVQRFHRDADETKEWIEEKNQALNTDNYGHDLASVQALQRKHEGFERDLAALGDKVNSLGETAERLIQSHPESAEDLQEKCTELNQAWSSLGKRADQRKAKLGDSHDLQRFLSDFRDLMSWINGIRGLVSSDELAKDVTGAEALLERHQEHRTEIDARAGTFQAFEQFGQQLLAHGHYASPEIKQKLDILDQERADLEKAWVQRRMMLDQCLELQLFHRDCEQAENWMAAREAFLNTEDKGDSLDSVEALIKKHEDFDKAINVQEEKIAALQAFADQLIAAGHYAKGDISSRRNEVLDRWRRLKAQMIEKRSKLGESQTLQQFSRDVDEIEAWISEKLQTASDESYKDPTNIQLSKLLSKHQKHQAFEAELHANADRIRGVIDMGNSLIERGACAGSEDAVKARLAALADQWQFLVQKSAEKSQKLKEANKQQNFNTGIKDFDFWLSEVEALLASEDYGKDLASVNNLLKKHQLLEADISAHEDRLKDLNSQADSLMTSSAFDTSQVKDKRDTINGRFQKIKSMAASRRAKLNESHRLHQFFRDMDDEESWIKEKKLLVGSEDYGRDLTGVQNLRKKHKRLEAELAAHEPAIQGVLDTGKKLSDDNTIGKEEIQQRLAQFVEHWKELKQLAAARGQRLEESLEYQQFVANVEEEEAWINEKMTLVASEDYGDTLAAIQGLLKKHEAFETDFTVHKDRVNDVCTNGQDLIKKNNHHEENISSKMKGLNGKVSDLEKAAAQRKAKLDENSAFLQFNWKADVVESWIGEKENSLKTDDYGRDLSSVQTLLTKQETFDAGLQAFQQEGIANITALKDQLLAAKHVQSKAIEARHASLMKRWSQLLANSAARKKKLLEAQSHFRKVEDLFLTFAKKASAFNSWFENAEEDLTDPVRCNSLEEIKALREAHDAFRSSLSSAQADFNQLAELDRQIKSFRVASNPYTWFTMEALEETWRNLQKIIKERELELQKEQRRQEENDKLRQEFAQHANAFHQWIQETRTYLLDGSCMVEESGTLESQLEATKRKHQEIRAMRSQLKKIEDLGAAMEEALILDNKYTEHSTVGLAQQWDQLDQLGMRMQHNLEQQIQARNTTGVTEEALKEFSMMFKHFDKDKSGRLNHQEFKSCLRSLGYDLPMVEEGEPDPEFEAILDTVDPNRDGHVSLQEYMAFMISRETENVKSSEEIESAFRALSSEGKPYVTKEELYQNLTREQADYCVSHMKPYVDGKGRELPTAFDYVEFTRSLFVN

SEQ ID NO: 9412 - protein, 689 aa, Homo sapiens
MAAATASPRSLLVLLQVVVLALAQIRGPPGERGPPGPPGPPGVPGSDGIDGDNGPPGKAGPPGPKGEPGKAGPDGPDGKPGIDGLTGAKGEPGPMGIPGVKGQPGLPGPPGLPGPGFAGPPGPPGPVGLPGEIGIRGPKGDPGPDGPSGPPGPPGKPGRPGTIQGLEGSADFLCPTNCPPGMKGPPGLQGVKGHAGKRGILGDPGHQGKPGPKGDVGASGEQGIPGPPGPQGIRGYPGMAGPKGETGPHGYKGMVGAIGATGPPGEEGPRGPPGRAGEKGDEGSPGIRGPQGITGPKGATGPPGINGKDGTPGTPGMKGSAGQAGQPGSPGHQGLAGVPGQPGTKGGPGDQGEPGPQGLPGFSGPPGKEGEPGPRGEIGPQGIMGQKGDQGERGPVGQPGPQGRQGPKGEQGPPGIPGPQGLPGVKGDKGSPGKTGPRGKVGDPGVAGLPGEKGEKGESGEPGPKGQQGVRGEPGYPGPSGDAGAPGVQGYPGPPGPRGLAGNRGVPGQPGRQGVEGRDATDQHIVDVALKMLQEQLAEVAVSAKREALGAVGMMGPPGPPGPPGYPGKQGPHGHPGPRGVPGIVGAVGQIGNTGPKGKRGEKGDPGEVGRGHPGMPGPPGIPGLPGRPGQAINGKDGDRGSPGAPGEAGRPGLPGPVGLPGFCEPAACLGASAYASARLTEPGSIKGP

SEQ ID NO: 9413 - protein, 622 aa, Homo sapiens
MRGLLCWPVLLLLLQPWETQLQLTGPRCHTGPLDLVFVIDSSRSVRPFEFETMRQFLMGLLRGLNVGPNATRVGVIQYSSQVQSVFPLRAFSRREDMERAIRDLVPLAQGTMTGLAIQYAMNVAFSVAEGARPPEERVPRVAVIVTDGRPQDRVAEVAAQARARGIEIYAVGVQRADVGSLRAMASPPLDEHVFLVESFDLIQEFGLQFQSRLCGKDQCAEGGHGCQHQCVNAWAMFHCTCNPGYKLAADNKSCLAIDLCAEGTHGCEHHCVNSPGSYFCHCQVGFVLQQDQRSCRAIDYCSFGNHSCQHECVSTPGGPRCHCREGHDLQPDGRSCQVRDLCNGVDHGCEFQCVSEGLSYRCLCPEGRQLQADGKSCNRCREGHVDLVLLVDGSKSVRPQNFELVKRFVNQIVDFLDVSPEGTRVGLVQFSSRVRTEFPLGRYGTAAEVKQAVLAVEYMERGTMTGLALRHMVEHSFSEAQGARPRALNVPRVGLVFTDGRSQDDISVWAARAKEEGIVMYAVGVGKAVEAELREIASEPAELHVSYAPDFGTMTHLLENLRGSICPEEGISAGTELRSPCECESLVEFQGRTLGALESLTLNLAQLTARLEDLENQLANQK

SEQ ID NO: 9414 - protein, 1066 aa, Homo sapiens
MPVFHTRTIESILEPVAQQISHLVIMHEEGEVDGKAIPDLTAPVAAVQAAVSNLVRVGKETVQTTEDQILKRDMPPAFIKVENACTKLVQAAQMLQSDPYSVPARDYLIDGSRGILSGTSDLLLTFDEAEVRKIIRVCKGILEYLTVAEVVETMEDLVTYTKNLGPGMTKMAKMIDERQQELTHQEHRVMLVNSMNTVKELLPVLISAMKIFVTTKNSKNQGIEEALKNRNFTVEKMSAEINEIIRVLQLTSWDEDAWASKDTEAMKRALASIDSKLNQAKGWLRDPSASPGDAGEQAIRQILDEAGKVGELCAGKERREILGTCKMLGQMTDQVADLRARGQGSSPVAMQKAQQVSQGLDVLTAKVENAARKLEAMTNSKQSIAKKIDAAQNWLADPNGGPEGEEQIRGALAEARKIAELCDDPKERDDILRSLGEISALTSKLADLRRQGKGDSPEARALAKQVATALQNLQTKTNRAVANSRPAKAAVHLEGKIEQAQRWIDNPTVDDRGVGQAAIRGLVAEGHRLANVMMGPYRQDLLAKCDRVDQLTAQLADLAARGEGESPQARALASQLQDSLKDLKARMQEAMTQEVSDVFSDTTTPIKLLAVAATAPPDAPNREEVFDERAANFENHSGKLGATAEKAAAVGTANKSTVEGIQASVKTARELTPQVVSAARILLRNPGNQAAYEHFETMKNQWIDNVEKMTGLVDEAIDTKSLLDASEEAIKKDLDKCKVAMANIQPQMLVAGATSIARRANRILLVAKREVENSEDPKFREAVKAASDELSKTISPMVMDAKAVAGNISDPGLQKSFLDSGYRILGAVAKVREAFQPQEPDFPPPPPDLEQLRLTDELAPPKPPLPEGEVPPPRPPPPEEKDEEFPEQKAGEVINQPMMMAARQLHDEARKWSSKGNDIIAAAKRMALLMAEMSRLVRGGSGTKRALIQCAKDIAKASDEVTRLAKEVAKQCTDKRIRTNLLQVCERIPTISTQLKILSTVKATMLGRTNISDEESEQATEMLVHNAQNLMQSVKETVREAEAASIKIRTDAGFTLRWVRKTPWYQ

SEQ ID NO: 9415 - protein, 581 aa, Homo sapiens
MRGLLCWPVLLLLLQPWETQLQLTGPRCHTGPLDLVFVIDSSRSVRPFEFETMRQFLMGLLRGLNVGPNATRVGVIQYSSQVQSVFPLRAFSRREDMERAIRDLVPLAQGTMTGLAIQYAMNVAFSVAEGARPPEERVPRVAVIVTDGRPQDRVAEVAAQARARGIEIYAVGVQRADVGSLRAMASPPLDEHVFLVESFDLIQEFGLQFQSRLCAIDLCAEGTHGCEHHCVNSPGSYFCHCQVGFVLQQDQRSCRAIDYCSFGNHSCQHECVSTPGGPRCHCREGHDLQPDGRSCQVRDLCNGVDHGCEFQCVSEGLSYRCLCPEGRQLQADGKSCNRCREGHVDLVLLVDGSKSVRPQNFELVKRFVNQIVDFLDVSPEGTRVGLVQFSSRVRTEFPLGRYGTAAEVKQAVLAVEYMERGTMTGLALRHMVEHSFSEAQGARPRALNVPRVGLVFTDGRSQDDISVWAARAKEEGIVMYAVGVGKAVEAELREIASEPAELHVSYAPDFGTMTHLLENLRGSICPEEGISAGTELRSPCECESLVEFQGRTLGALESLTLNLAQLTARLEDLENQLANQK

SEQ ID NO: 9416 - protein, 475 aa, Homo sapiens
MGMWASLDALWEMPAEKRIFGAVLLFSWTVYLWETFLAQRQRRIYKTTTHVPPELGQIMDSETFEKSRLYQLDKSTFSFWSGLYSETEGTLILLFGGIPYLWRLSGRFCGYAGFGPEYEITQSLVFLLLATLFSALTGLPWSLYNTFVIEEKHGFNQQTLGFFMKDAIKKFVVTQCILLPVSSLLLYIIKIGGDYFFIYAWLFTLVVSLVLVTIYADYIAPLFDKFTPLPEGKLKEEIEVMAKSIDFPLTKVYVVEGSKRSSHSNAYFYGFFKNKRIVLFDTLLEEYSVLNKDIQEDSGMEPRNEEEGNSEEIKAKVKNKKQGCKNEEVLAVLGHELGHWKLGHTVKNIIISQMNSFLCFFLFAVLIGRKELFAAFGFYDSQPTLIGLLIIFQFIFSPYNEVLSFCLTVLSRRFEFQADAFAKKLGKAKDLYSALIKLNKDNLGFPVSDWLFSMWHYSHPPLLERLQALKTMKQH

SEQ ID NO: 9417 - protein, 431 aa, Homo sapiens
MRALLARLLLCVLVVSDSKGSNELHQVPSNCDCLNGGTCVSNKYFSNIHWCNCPKKFGGQHCEIDKSKTCYEGNGHFYRGKASTDTMGRPCLPWNSATVLQQTYHAHRSDALQLGLGKHNYCRNPDNRRRPWCYVQVGLKLLVQECMVHDCADGKKPSSPPEELKFQCGQKTLRPRFKIIGGEFTTIENQPWFAAIYRRHRGGSVTYVCGGSLISPCWVISATHCFIDYPKKEDYIVYLGRSRLNSNTQGEMKFEVENLILHKDYSADTLAHHNDIALLKIRSKEGRCAQPSRTIQTICLPSMYNDPQFGTSCEITGFGKENSTDYLYPEQLKMTVVKLISHRECQQPHYYGSEVTTKMLCAADPQWKTDSCQGDSGGPLVCSLQGRMTLTGIVSWGRGCALKDKPGVYTRVSHFLPWIRSHTKEENGLAL

SEQ ID NO: 9418 - protein, 516 aa, Homo sapiens
MATTATCTRFTDDYQLFEELGKGAFSVVRRCVKKTSTQEYAAKIINTKKLSARDHQKLEREARICRLLKHPNIVRLHDSISEEGFHYLVFDLVTGGELFEDIVAREYYSEADASHCIHQILESVNHIHQHDIVHRDLKPENLLLASKCKGAAVKLADFGLAIEVQGEQQAWFGFAGTPGYLSPEVLRKDPYGKPVDIWACGVILYILLVGYPPFWDEDQHKLYQQIKAGAYDFPSPEWDTVTPEAKNLINQMLTINPAKRITADQALKHPWVCQRSTVASMMHRQETVECLRKFNARRKLKGAILTTMLVSRNFSVGRQSSAPASPAASAAGLAGQAAKSLLNKKSDGGVKEPQTTVVHNATDGIKGSTESCNTTTEDEDLKVRKQEIIKITEQLIEAINNGDFEAYTKICDPGLTSFEPEALGNLVEGMDFHKFYFENLLSKNSKPIHTTILNPHVHVIGEDAACIAYIRLTQYIDGQGRPRTSQSEETRVWHRRDGKWLNVHYHCSGAPAAPLQ

SEQ ID NO: 9419 - protein, 182 aa, Homo sapiens
MSTSSSSSWDNLLESLSLSTVWNWIQASFLGETSAPQQTSLGLLDNLAPAVQIILRISFLILLGIGIYALWKRSIQSIQKTLLFVITLYKLYKKGSHIFEALLANPEGSGLRIQDNNNLFLSLGLQEKILKKLKTVENKMKNLEGIIVAQKPATKRDCSSEPYCSCSDCQSPLSTSGFTSPI

SEQ ID NO: 9420 - protein, 582 aa, Homo sapiens
MKSIILFVLSLLLILEKQAAVMGQKGGSKGQLPSGSSQFPHGQKGQHYFGQKDQQHTKSKGSFSIQHTYHVDINDHDWTRKSQQYDLNALHKATKSKQHLGGSQQLLNYKQEGRDHDKSKGHFHMIVIHHKGGQAHHGTQNPSQDQGNSPSGKGLSSQCSNTEKRLWVHGLSKEQASASGAQKGRTQGGSQSSYVLQTEELVVNKQQRETKNSHQNKGHYQNVVDVREEHSSKLQTSLHPAHQDRLQHGPKDIFTTQDELLVYNKNQHQTKNLSQDQEHGRKAHKISYPSSRTEERQLHHGEKSVQKDVSKGSISIQTEEKIHGKSQNQVTIHSQDQEHGHKENKISYQSSSTEERHLNCGEKGIQKGVSKGSISIQTEEQIHGKSQNQVRIPSQAQEYGHKENKISYQSSSTEERRLNSGEKDVQKGVSKGSISIQTEEKIHGKSQNQVTIPSQDQEHGHKENKMSYQSSSTEERRLNYGGKSTQKDVSQSSISFQIEKLVEGKSQIQTPNPNQDQWSGQNAKGKSGQSADSKQDLLSHEQKGRYKQESSESHNIVITEHEVAQDDHLTQQYNEDRNPIST

SEQ ID NO: 9421 - protein, 1914 aa, Homo sapiens
MADGKGDAAAVAGAGAEAPAVAGAGDGVETESMVRGHRPVSPAPGASGLRPCLWQLETELREQEVSEVSSLNYCRSFCQTLLQYASNKNASEHIVYLLEVYRLAIQSFASARPYLTTECEDVLLVLGRLVLSCFELLLSVSESELPCEVWLPFLQSLQESHDALLEFGNNNLQILVHVTKEGVWKNPVLLKILSQQPVETEEVNKLIAQEGPSFLQMRIKHLLKSNCIPQATALSKLCAESKEISNVSSFQQAYITCLCSMLPNEDAIKEIAKVDCKEVLDIICNLESEGQDNTAFVLCTTYLTQQLQTASVYCSWELTLFWSKLQRRIDPSLDTFLERCRQFGVIAKTQQHLFCLIRVIQTEAQDAGLGVSILLCVRALQLRSSEDEEMKASVCKTIACLLPEDLEVRRACQLTEFLIEPSLDGFNMLEELYLQPDQKFDEENAPVPNSLRCELLLALKAHWPFDPEFWDWKTLKRHCHQLLGQEASDSDDDLSGYEMSINDTDVLESFLSDYDEGKEDKQYRRRDLTDQHKEKRDKKPIGSSERYQRWLQYKFFCLLCKRECIEARILHHSKMHMEDGIYTCPVCIKKFKRKEMFVPHVMEHVKMPPSRRDRSKKKLLLKGSQKGICPKSPSAIPEQNHSLNDQAKGESHEYVTFSKLEDCHLQDRDLYPCPGTDCSRVFKQFKYLSVHLKAEHQNNDENAKHYLDMKNRREKCTYCRRHFMSAFHLREHEQVHCGPQPYMCVSIDCYARFGSVNELLNHKQKHDDLRYKCELNGCNIVFSDLGQLYHHEAQHFRDASYTCNFLGCKKFYYSKIEYQNHLSMHNVENSNGDIKKSVKLEESATGEKQDCINQPHLLNQTDKSHLPEDLFCAESANSQIDTETAENLKENSDSNSSDQLSHSSSASMNEELIDTLDHSETMQDVLLSNEKVFGPSSLKEKCSSMAVCFDGTKFTCGFDGCGSTYKNARGMQKHLRKVHPYHFKPKKIKTKDLFPSLGNEHNQTTEKLDAEPKPCSDTNSDSPDEGLDHNIHIKCKREHQGYSSESSICASKRPCTEDTMLELLLRLKHLSLKNSITHGSFSGSLQGYPSSGAKSLQSVSSISDLNFQNQDENMPSQYLAQLAAKPFFCELQGCKYEFVTREALLMHYLKKHNYSKEKVLQLTMFQHRYSPFQCHICQRSFTRKTHLRIHYKNKHQIGSDRATHKLLDNEKCDHEGPCSVDRLKGDCSAELGGDPSSNSEKPHCHPKKDECSSETDLESSCEETESKTSDISSPIGSHREEQEGREGRGSRRTVAKGNLCYILNKYHKPFHCIHKTCNSSFTNLKGLIRHYRTVHQYNKEQLCLEKDKARTKRELVKCKKIFACKYKECNKRFLCSKALAKHCSDSHNLDHIEEPKVLSEAGSAARFSCNQPQCPAVFYTFNKLKHHLMEQHNIEGEIHSDYEIHCDLNGCGQIFTHRSNYSQHVYYRHKDYYDDLFRSQKVANERLLRSEKVCQTADTQGHEHQTTRRSFNAKSKKCGLIKEKKAPISFKTRAEALHMCVEHSEHTQYPCMVQGCLSVVKLESSIVRHYKRTHQMSSAYLEQQMENLVVCVKYGTKIKEEPPSEADPCIKKEENRSCESERTEHSHSPGDSSAPIQNTDCCHSSERDGGQKGCIESSSVFDADTLLYRGTLKCNHSSKTTSLEQCNIVQPPPPCKIENSIPNPNGTESGTYFTSFQLPLPRIKESETRQHSSGQENTVKNPTHVPKENFRKHSQPRSFDLKTYKPMGFESSFLKFIQESEEKEDDFDDWEPSEHLTLSNSSQSSNDLTGNVVANNMVNDSEPEVDIPHSSSDSTIHENLTAIPPLIVAETTTVPSLENLRVVLDKALTDCGELALKQLHYLRPVVVLERSKFSTPILDLFPTKKTDELCVGSS

SEQ ID NO: 9422 - protein, 462 aa, Homo sapiens
MKPNIIFVLSLLLILEKQAAVMGQKGGSKGRLPSEFSQFPHGQKGQHYSGQKGKQQTESKGSFSIQYTYHVDANDHDQSRKSQQYDLNALHKTTKSQRHLGGSQQLLHNKQEGRDHDKSKGHFHRVVIHHKGGKAHRGTQNPSQDQGNSPSGKGISSQYSNTEERLWVHGLSKEQTSVSGAQKGRKQGGSQSSYVLQTEELVANKQQRETKNSHQNKGHYQNVVEVREEHSSKVQTSLCPAHQDKLQHGSKDIFSTQDELLVYNKNQHQTKNLNQDQQHGRKANKISYQSSSTEERRLHYGENGVQKDVSQSSIYSQTEEKAQGKSQKQITIPSQEQEHSQKANKISYQSSSTEERRLHYGENGVQKDVSQRSIYSQTEKLVAGKSQIQAPNPKQEPWHGENAKGESGQSTNREQDLLSHEQKGRHQHGSHGGLDIVIIEQEDDSDRHLAQHLNNDRNPLFT

SEQ ID NO: 9423 - protein, 638 aa, Homo sapiens
MESCSVTRLECSGAISAHCSLHLPGSSDSPASASQIAGTTDAIWNEQEKAELFTDKFCQVCGVMLQFESQRISHYEGEKHAQNVSFYFQMHGEQNEVPGKKMKMHVENFQVHRYEGVDKNKFCDLCNMMFSSPLIAQSHYVGKVHAKKLKQLMEEHDQASPSGFQPEMAFSMRTYVCHICSIAFTSLDMFRSHMQGSEHQIKESIVINLVKNSRKTQDSYQNECADYINVQKARGLEAKTCFRKMEESSLETRRYREVVDSRPRHRMFEQRLPFETFRTYAAPYNISQAMEKQLPHSKKTYDSFQDELEDYIKVQKARGLDPKTCFRKMRENSVDTHGYREMVDSGPRSRMCEQRFSHEASQTYQRPYHISPVESQLPQWLPTHSKRTYDSFQDELEDYIKVQKARGLEPKTCFRKIGDSSVETHRNREMVDVRPRHRMLEQKLPCETFQTYSGPYSISQVVENQLPHCLPAHDSKQRLDSISYCQLTRDCFPEKPVPLSLNQQENNSGSYSVESEVYKHLSSENNTADHQAGHKRKHQKRKRHLEEGKERPEKEQSKHKRKKSYEDTDLDKDKSIRQRKREEDRVKVSSGKLKHRKKKKSHDVPSEKEERKHRKEKKKSVEERTEEEMLWDESILGF

SEQ ID NO: 9424 - protein, 441 aa, Homo sapiens
MASVAAARAVPVGSGLRGLQRTLPLVVILGATGTGKSTLALQLGQRLGGEIVSADSMQVYEGLDIITNKVSAQEQRICRHHMISFVDPLVTNYTVVDFRNRATALIEDIFARDKIPIVVGGTNYYIESLLWKVLVNTKPQEMGTEKVIDRKVELEKEDGLVLHKRLSQVDPEMAAKLHPHDKRKVARSLQVFEETGISHSEFLHRQHTEEGGGPLGGPLKFSNPCILWLHADQAVLDERLDKRVDDMLAAGLLEELRDFHRRYNQKNVSENSQDYQHGIFQSIGFKEFHEYLITEGKCTLETSNQLLKKGPGPIVPPVYGLEVSDVSKWEESVLEPALEIVQSFIQGHKPTATPIKMPYNEAENKRSYHLCDLCDRIIIGDREWAAHIKSKSHLNQLKKRRRLDSDAVNTIESQSVSPDHNKEPKEKGSPGQNDQELKCSV

SEQ ID NO: 9425 - protein, 517 aa, Homo sapiens
MAALRLLASVLGRGVPAGGSGLALSQGCARCFATSPRLRAKFYADPVEMVKDISDGATVMIGGFGLCGIPENLIAALLRTRVKDLQVVSSNVGVEDFGLGLLLAARQVRRIVCSYVGENTLCESQYLAGELELELTPQGTLAERIRAGGAGVPAFYTPTGYGTLVQEGGAPIRYTPDGHLALMSQPREVREFNGDHFLLERAIRADFALVKGWKADRAGNVVFRRSARNFNVPMCKAADVTAVEVEEIVEVGAFPPEDIHVPNIYVDRVIKGQKYEKRIERLTILKEEDGDAGKEEDARTRIIRRAALEFEDGMYANLGIGIPLLASNFISPSMTVHLHSENGILGLGPFPTEDEVDADLINAGKQTVTVLPGGCFFASDDSFAMIRGGHIQLTMLGAMQVSKYGDLANWMIPGKKVKGMGGAMDLVSSQKTRVVVTMQHCTKDNTPKIMEKCTMPLTGKRCVDRIITEKAVFDVHRKKELTLRELWEGLTVDDIKKSTGCAFAVSPNLRPMQQVAP

SEQ ID NO: 9426 - protein, 595 aa, Homo sapiens
MRAARAAPLLQLLLLLGPWLEAAGVAESPLPAVVLAILARNAEHSLPHYLGALERLDYPRARMALWCATDHNVDNTTEMLQEWLAAVGDDYAAVVWRPEGEPRFYPDEEGPKHWTKERHQFLMELKQEALTFARNWGADYILFADTDNILTNNQTLRLLMGQGLPVVAPMLDSQTYYSNFWCGITPQGYYRRTAEYFPTKNRQRRGCFRVPMVHSTFLASLRAEGADQLAFYPPHPNYTWPFDDIIVFAYACQAAGVSVHVCNEHRYGYMNVPVKSHQGLEDERVNFIHLILEALVDGPRMQASAHVTRPSKRPSKIGFDEVFVISLARRPDRRERMLASLWEMEISGRVVDAVDGWMLNSSAIRNLGVDLLPGYQDPYSGRTLTKGEVGCFLSHYSIWEEVVARGLARVLVFEDDVRFESNFRGRLERLMEDVEAEKLSWDLIYLGRKQVNPEKETAVEGLPGLVVAGYSYWTLAYALRLAGARKLLASQPLRRMLPVDEFLPIMFDQHPNEQYKAHFWPRDLVAFSAQPLLAAPTHYAGDAEWLSDTETSSPWDDDSGRLISWSGSQKTLRSPRLDLTGSSGHSLQPQPRDEL

SEQ ID NO: 9427 - protein, 517 aa, Homo sapiens
MLQEWLAAVGDDYAAVVWRPEGEPRFYPDEEGPKHWTKERHQFLMELKQEALTFARNWGADYILFADTDNILTNNQTLRLLMGQGLPVVAPMLDSQTYYSNFWCGITPQGYYRRTAEYFPTKNRQRRGCFRVPMVHSTFLASLRAEGADQLAFYPPHPNYTWPFDDIIVFAYACQAAGVSVHVCNEHRYGYMNVPVKSHQGLEDERVNFIHLILEALVDGPRMQASAHVTRPSKRPSKIGFDEVFVISLARRPDRRERMLASLWEMEISGRVVDAVDGWMLNSSAIRNLGVDLLPGYQDPYSGRTLTKGEVGCFLSHYSIWEEVVARGLARVLVFEDDVRFESNFRGRLERLMEDVEAEKLSWDLIYLGRKQVNPEKETAVEGLPGLVVAGYSYWTLAYALRLAGARKLLASQPLRRMLPVDEFLPIMFDQHPNEQYKAHFWPRDLVAFSAQPLLAAPTHYAGDAEWLSDTETSSPWDDDSGRLISWSGSQKTLRSPRLDLTGSSGHSLQPQPRDEL

SEQ ID NO: 9428 - protein, 330 aa, Homo sapiens
MRRPSVRAAGLVLCTLCYLLVGAAVFDALESEAESGRQRLLVQKRGALRRKFGFSAEDYRELERLALQAEPHRAGRQWKFPGSFYFAITVITTIEYGHAAPGTDSGKVFCMFYALLGIPLTLVTFQSLGERLNAVVRRLLLAAKCCLGLRWTCVSTENLVVAGLLACAATLALGAVAFSHFEGWTFFHAYYYCFITLTTIGFGDFVALQSGEALQRKLPYVAFSFLYILLGLTVIGAFLNLVVLRFLVASADWPERAARTPSPRPPGAPESRGLWLPRRPARSVGSASVFCHVHKLERCARDNLGFSPPSSPGVVRGGQAPRLGARWKSI

SEQ ID NO: 9429 - protein, 753 aa, Homo sapiens
METFEPISQEPLSQASYDKAPDPVPELQDSFYAELQRAESLQEKSIKEAKTKCRTIASLLTAAPNPHSKGVLMFKKRRQRAKKYTLVSFGAAAGTGAEEEDGVPPTSESELDEEAFSDARSLTNQSDWDSPYLDMELARAGSRASEGQGSGLGGQLSEVSGRGVQLFEQQRQRADSSTQELARVEPAAMLNGEGLQSPPRAQSAPPEAAVLPPSPLPAPVASPRPFQPGGGAPTPAPSIFNRSARPFTPGLQGQRPTTTSVIFRPLAPKRANDSLGGLSPAPPPFLSSQGPTPLPSFTSGVPSHAPVSGSPSTPRSSGPVTATSSLYIPAPSRPVTPGGAPEPPAPPSAAAMTSTASIFLSAPLRPSARPEAPAPGPGAPEPPSAREQRISVPAARTGILQEARRRGTRKQMFRPGKEETKNSPNPELLSLVQNLDEKPRAGGAESGPEEDALSLGAEACNFMQPVGARSYKTLPHVTPKTPPPMAPKTPPPMTPKTPPPVAPKPPSRGLLDGLVNGAASSAGIPEPPRLQGRGGELFAKRQSRADRYVVEGTPGPGLGPRPRSPSPTPSLPPSWKYSPNIRAPPPIAYNPLLSPFFPQAARTLPKAQSQGPRATPKQGIKALDFMRHQPYQLKTAMFCFDEVPPTPGPIASGSPKTARVQEIRRFSTPAPQPTAEPLAPTVLAPRAATTLDEPIWRTELASAPVPSPAPPPEAPRGLGASPSSCGFQVARPRFSATRTGLQAHVWRPGAGHQ

SEQ ID NO: 9430 - protein, 125 aa, Homo sapiens
MVKLSKEAKQRLQQLFKGSQFAIRWGFIPLVIYLGFKRGADPGMPEPTVLRVWWLTPVISALWKAKVGRSWEDCLKLGVQDQPGQRSETHLYQKKKTYFGDKGLFGLLDLEAISGQHGRCVLWLG

SEQ ID NO: 9431 - protein, 483 aa, Homo sapiens
MAAVILESIFLKRSQQKKKTSPLNFKKRLFLLTVHKLSYYEYDFERGRRGSKKGSIDVEKITCVETVVPEKNPPPERQIPRRGEESSEMEQISIIERFPYPFQVVYDEGPLYVFSPTEELRKRWIHQLKNVIRYNSDLVQKYHPCFWIDGQYLCCSQTAKNAMGCQILENRNGSLKPGSSHRKTKKPLPPTPEEDQILKKPLPPEPAAAPVSTSELKKVVALYDYMPMNANDLQLRKGDEYFILEESNLPWWRARDKNGQEGYIPSNYVTEAEDSIEMYEWYSKHMTRSQAEQLLKQEGKEGGFIVRDSSKAGKYTVSVFAKSTGDPQGVIRHYVVCSTPQSQYYLAARNCLVNDQGVVKVSDFGLSRYVLDDEYTSSVGSKFPVRWSPPEVLMYSKFSSKSDIWAFGVLMWEIYSLGKMPYERFTNSETAEHIAQGLRLYRPHLASEKVYTIMYSCWHEKADERPTFKILLSNILDVMDEES

SEQ ID NO: 9432 - protein, 1755 aa, Homo sapiens
MASELEPEVQAIDRSLLECSAEEIAGKWLQATDLTREVYQHLAHYVPKIYCRGPNPFPQKEDMLAQHVLLGPMEWYLCGEDPAFGFPKLEQANKPSHLCGRVFKVGEPTYSCRDCAVDPTCVLCMECFLGSIHRDHRYRMTTSGGGGFCDCGDTEAWKEGPYCQKHELNTSEIEEEEDPLVHLSEDVIARTYNIFAITFRYAVEILTWEKESELPADLEMVEKSDTYYCMLFNDEVHTYEQVIYTLQKAVNCTQKEAIGFATTVDRDGRRSVRYGDFQYCEQAKSVIVRNTSRQTKPLKVQVMHSSIVAHQNFGLKLLSWLGSIIGYSDGLRRILCQVGLQEGPDGENSSLVDRLMLSDSKLWKGARSVYHQLFMSSLLMDLKYKKLFAVRFAKNYQQLQRDFMEDDHERAVSVTALSVQFFTAPTLARMLITEENLMSIIIKTFMDHLRHRDAQGRFQFERYTALQAFKFRRVQSLILDLKYVLISKPTEWSDELRQKFLEGFDAFLELLKCMQGMDPITRQVGQHIEMEPEWEAAFTLQMKLTHVISMMQDWCASDEKVLIEAYKKCLAVLMQCHGGYTDGEQPITLSICGHSVETIRYCVSQEKVSIHLPVSRLLAGLHVLLSKSEVAYKFPELLPLSELSPPMLIEHPLRCLVLCAQVHAGMWRRNGFSLVNQIYYYHNVKCRREMFDKDVVMLQTGVSMMDPNHFLMIMLSRFELYQIFSTPDYGKRFSSEITHKDVVQQNNTLIEEMLYLIIMLVGERFSPGVGQVNATDEIKREIIHQLSIKPMAHSELVKSLPEDENKETGMESVIEAVAHFKKPGLTGRGMYELKPECAKEFNLYFYHFSRAEQSKAEEAQRKLKRQNREDTALPPPVLPPFCPLFASLVNILQSDVMLCIMGTILQWAVEHNGYAWSESMLQRVLHLIGMALQEEKQHLENVTEEHVVTFTFTQKISKPGEAPKNSPSILAMLETLQNAPYLEVHKDMIRWILKTFNAVKKMRESSPTSPVAETEGTIMEESSRDKDKAERKRKAEIARLRREKIMAQMSEMQRHFIDENKELFQQTLELDASTSAVLDHSPVASDMTLTALGPAQTQVPEQRQFVTCILCQEEQEVKVESRAMVLAAFVQRSTVLSKNRSKFIQDPEKYDPLFMHPDLSCGTHTSSCGHIMHAHCWQRYFDSVQAKEQRRQQRLRLHTSYDVENGEFLCPLCECLSNTVIPLLLPPRNIFNNRLNFSDQPNLTQWIRTISQQIKALQFLRKEESTPNNASTKNSENVDELQLPEGFRPDFRPKIPYSESIKEMLTTFGTATYKVGLKVHPNEEDPRVPIMCWGSCAYTIQSIERILSDEDKPLFGPLPCRLDDCLRSLTRFAAAHWTVASVSVVQGHFCKLFASLVPNDSHEELPCILDIDMFHLLVGLVLAFPALQCQDFSGISLGTGDLHIFHLVTMAHIIQILLTSCTEENGMDQENPPCEEESAVLALYKTLHQYTGSALKEIPSGWHLWRSVRAGIMPFLKCSALFFHYLNGVPSPPDIQVPGTSHFEHLCSYLSLPNNLICLFQENSEIMNSLIESWCRNSEVKRYLEGERDAIRYPRESNKLINLPEDYSSLINQASNFSCPKSGGDKSRAPTLCLVCGSLLCSQSYCCQTELEGEDVGACTAHTYSCGSGVGIFLRVRECQVLFLAGKTKGCFYSPPYLDDYGETDQGLRRGNPLHLCKERFKKIQKLWHQHSVTEEIGHAQEANQTLVGIDWQHL

SEQ ID NO: 9433 - protein, 1755 aa, Homo sapiens
MASELEPEVQAIDRSLLECSAEEIAGKWLQATDLTREVYQHLAHYVPKIYCRGPNPFPQKEDMLAQHVLLGPMEWYLCGEDPAFGFPKLEQANKPSHLCGRVFKVGEPTYSCRDCAVDPTCVLCMECFLGSIHRDHRYRMTTSGGGGFCDCGDTEAWKEGPYCQKHELNTSEIEEEEDPLVHLSEDVIARTYNIFAITFRYAVEILTWEKESELPADLEMVEKSDTYYCMLFNDEVHTYEQVIYTLQKAVNCTQKEAIGFATTVDRDGRRSVRYGDFQYCEQAKSVIVRNTSRQTKPLKVQVMHSSIVAHQNFGLKLLSWLGSIIGYSDGLRRILCQVGLQEGPDGENSSLVDRLMLSDSKLWKGARSVYHQLFMSSLLMDLKYKKLFAVRFAKNYERLQSDYVTDDHDREFSVADLSVQIFTVPSLARMLITEENLMSIIIKTFMDHLRHRDAQGRFQFERYTALQAFKFRRVQSLILDLKYVLISKPTEWSDELRQKFLEGFDAFLELLKCMQGMDPITRQVGQHIEMEPEWEAAFTLQMKLTHVISMMQDWCASDEKVLIEAYKKCLAVLMQCHGGYTDGEQPITLSICGHSVETIRYCVSQEKVSIHLPVSRLLAGLHVLLSKSEVAYKFPELLPLSELSPPMLIEHPLRCLVLCAQVHAGMWRRNGFSLVNQIYYYHNVKCRREMFDKDVVMLQTGVSMMDPNHFLMIMLSRFELYQIFSTPDYGKRFSSEITHKDVVQQNNTLIEEMLYLIIMLVGERFSPGVGQVNATDEIKREIIHQLSIKPMAHSELVKSLPEDENKETGMESVIEAVAHFKKPGLTGRGMYELKPECAKEFNLYFYHFSRAEQSKAEEAQRKLKRQNREDTALPPPVLPPFCPLFASLVNILQSDVMLCIMGTILQWAVEHNGYAWSESMLQRVLHLIGMALQEEKQHLENVTEEHVVTFTFTQKISKPGEAPKNSPSILAMLETLQNAPYLEVHKDMIRWILKTFNAVKKMRESSPTSPVAETEGTIMEESSRDKDKAERKRKAEIARLRREKIMAQMSEMQRHFIDENKELFQQTLELDASTSAVLDHSPVASDMTLTALGPAQTQVPEQRQFVTCILCQEEQEVKVESRAMVLAAFVQRSTVLSKNRSKFIQDPEKYDPLFMHPDLSCGTHTSSCGHIMHAHCWQRYFDSVQAKEQRRQQRLRLHTSYDVENGEFLCPLCECLSNTVIPLLLPPRNIFNNRLNFSDQPNLTQWIRTISQQIKALQFLRKEESTPNNASTKNSENVDELQLPEGFRPDFRPKIPYSESIKEMLTTFGTATYKVGLKVHPNEEDPRVPIMCWGSCAYTIQSIERILSDEDKPLFGPLPCRLDDCLRSLTRFAAAHWTVASVSVVQGHFCKLFASLVPNDSHEELPCILDIDMFHLLVGLVLAFPALQCQDFSGISLGTGDLHIFHLVTMAHIIQILLTSCTEENGMDQENPPCEEESAVLALYKTLHQYTGSALKEIPSGWHLWRSVRAGIMPFLKCSALFFHYLNGVPSPPDIQVPGTSHFEHLCSYLSLPNNLICLFQENSEIMNSLIESWCRNSEVKRYLEGERDAIRYPRESNKLINLPEDYSSLINQASNFSCPKSGGDKSRAPTLCLVCGSLLCSQSYCCQTELEGEDVGACTAHTYSCGSGVGIFLRVRECQVLFLAGKTKGCFYSPPYLDDYGETDQGLRRGNPLHLCKERFKKIQKLWHQHSVTEEIGHAQEANQTLVGIDWQHL

SEQ ID NO: 9434 - protein, 439 aa, Homo sapiens
MASELEPEVQAIDRSLLECSAEEIAGKWLQATDLTREVYQHLAHYVPKIYCRGPNPFPQKEDMLAQHVLLGPMEWYLCGEDPAFGFPKLEQANKPSHLCGRVFKVGEPTYSCRDCAVDPTCVLCMECFLGSIHRDHRYRMTTSGGGGFCDCGDTEAWKEGPYCQKHELNTSEIEEEEDPLVHLSEDVIARTYNIFAITFRYAVEILTWEKESELPADLEMVEKSDTYYCMLFNDEVHTYEQVIYTLQKAVNCTQKEAIGFATTVDRDGRRSVRYGDFQYCEQAKSVIVRNTSRQTKPLKVQVMHSSIVAHQNFGLKLLSWLGSIIGYSDGLRRILCQVGLQEGPDGENSSLVDRLMLSDSKLWKGARSVYHQLFMSSLLMDLKYKKLFAVRFAKNYERLQSDYVTDDHDREFSVADLSVQIFTVPSLFSISAGRSGSPL

SEQ ID NO: 9435 - protein, 7388 aa, Homo sapiens
MSSSDEETLSERSCRSERSCRSERSYRSERSGSLSPCPPGDTLPWNLPLHEQKKRKSQDSVLDPAERAVVRVADERDRVQKKTFTKWVNKHLMKVRKHINDLYEDLRDGHNLISLLEVLSGIKLPREKGRMRFHRLQNVQIALDFLKQRQVKLVNIRNDDITDGNPKLTLGLIWTIILHFQISDIYISGESGDMSAKEKLLLWTQKVTAGYTGIKCTNFSSCWSDGKMFNALIHRYRPDLVDMERVQIQSNRENLEQAFEVAERLGVTRLLDAEDVDVPSPDEKSVITYVSSIYDAFPKVPEGGEGISATEVDSRWQEYQSRVDSLIPWIKQHTILMSDKTFPQNPVELKALYNQYIHFKETEILAKEREKGRIEELYKLLEVWIEFGRIKLPQGYHPNDVEEEWGKLIIEMLEREKSLRPAVERLELLLQIANKIQNGALNCEEKLTLAKNTLQADAAHLESGQPVQCESDVIMYIQECEGLIRQLQVDLQILRDENYYQLEELAFRVMRLQDELVTLRLECTNLYRKGHFTSLELVPPSTLTTTHLKAEPLTKATHSSSTSWFRKPMTRAELVAISSSEDEGNLRFVYELLSWVEEMQMKLERAEWGNDLPSVELQLETQQHIHTSVEELGSSVKEARLYEGKMSQNFHTSYAETLGKLETQYCKLKETSSFRMRHLQSLHKFVSRATAELIWLNEKEEEELAYDWSDNNSNISAKRNYFSELTMELEEKQDVFRSLQDTAELLSLENHPAKQTVEAYSAAVQSQLQWMKQLCLCVEQHVKENTAYFQFFSDARELESFLRNLQDSIKRKYSCDHNTSLSRLEDLLQDSMDEKEQLIQSKSSVASLVGRSKTIVQLKPRSPDHVLKNTISVKAVCDYRQIEITICKNDECVLEDNSQRTKWKVISPTGNEAMVPSVCFLIPPPNKDAIEMASRVEQSYQKVMALWHQLHVNTKSLISWNYLRKDLDLVQTWNLEKLRSSAPGECHQIMKNLQAHYEDFLQDSRDSVLFSVADRLRLEEEVEACKARFQHLMKSMENEDKEETVAKMYISELKNIRLRLEEYEQRVVKRIQSLASSRTDRDAWQDNALRIAEQEHTQEDLQQLRSDLDAVSMKCDSFLHQSPSSSSVPTLRSELNLLVEKMDHVYGLSTVYLNKLKTVDVIVRSIQDAELLVKGYEIKLSQEEVVLADLSALEAHWSTLRHWLSDVKDKNSVFSVLDEEIAKAKVVAEQMSRLTPERNLDLERYQEKGSQLQERWHRVIAQLEIRQSELESIQEVLGDYRACHGTLIKWIEETTAQQEMMKPGQAEDSRVLSEQLSQQTALFAEIERNQTKLDQCQKFSQQYSTIVKDYELQLMTYKAFVESQQKSPGKRRRMLSSSDAITQEFMDLRTRYTALVTLTTQHVKYISDALRRLEEEEKVVEEEKQEHVEKVKELLGWVSTLARNTQGKATSSETKESTDIEKAILEQQVLSEELTTKKEQVSEAIKTSQIFLAKHGHKLSEKEKKQISEQLNALNKAYHDLCDGSANQLQQLQSQLAHQTEQKECRAVAGVIDLGTVEIFPIFKAMQKGLLDQDTGLVLLESQVIMSGLIAPETGENLSLEEGIARNLINPQMYQQLRELQDALALISRLTESRGPLSVVEAIEKRIISETVGLKILEAHLATGGFSLSPSENCINLEEAFHQGLISAWLHSVLESYLRTSKNLIDPNTAEKIGLLDLMQRCIVHQESGFKLLPVKQLAGGMVSLKSGRKVSIFRAVQEGLIDRQVTVRLLEAQLFAGGIVDPRTGHRLTVEEAVRHNLIDQDMACAILIRQLQTGGIIDTVTGQRLTIDEAVSNDLVAAKIALVILESLWSFMGLLWPESGEILPITDALEQGIVSTELAHKILSNRQHIKALFLPATTEILSWKKAIESGILDRDLANNLKSICIPDVMPHMQLADSAEQNINPGAAVLPCSKSHPKATASQSENLLFQLMTHSYINVQNGQRLLLLDKELMETLTSRDEYQTSPPKVVEIGHQRQKTPEGLQESANVKISGTFSSGWTVRLPEFQFSSQNKEYPDREDCTTEKGKKTTVETEDSSVENPEQDLFVEQKERNPNIDALKVINKVKLEVQRQLIGTQREDQTAVSVRENASRGHLLTIPPAEAEGVPLVVDKDVFSVETPKKEHQPLRNTSFTCQNEQAHTLETEYIHDETGGSHIKPQSKKLQVQVKKTLGIKLELKSETDGNVHPLDKKEMLKKTFLAKDDHKESQEAQNIAGGSMMMSEKTDEEDSGREIFLSCSHPLELLEEATLNVLSAQLLDGGIFHEQTGQKLLLNEAISRGIVPSHTAVKLMEKLNMFQGFFDSQTCESLTTEEVINEGLMDEKLLHNVLMADKAISGVLDPRTQTLCSVKDAVTVGLLDKETATRILERQVVTGGIIDLKRGKKVSVTLASTLGLVDVADQPELINLEKASKGRDAEKTVRERLISLQMETTGLIDPDSKAPLTVVQSIDRGLLEREEAVRLLTKQVVDGGIIHHISGMRLSVDNAFRHGLIGEDLAEKLKRVENLNIHQIFNPETKENISLPKAIKLDLITSDLKREIQEVQAFTGNFVDLISGQRLTLAEAKKEGLLTNEAVLSPGMMHGIVDPENCRIVPYSELVKKCKIDIESGQRYLEVIPFSDIKDGVSDKVLTLSQAIQLGKVDFASTLKVLEAQANTGGIIDTATGKRLTLASALEEKLVDENMVRIIASHQVLNGGIVDIFSDQRVTLVEAIEKRLISPELANMIQIDSSEFSDHRAQIEKQEGIEVCALQNEFLGKDMLIACNQTAEMSCNKVEESERLFQVENQSAQEKVKVRVSDGEQAKKSREISLKEFGCKDQRKPRMSSDAKEFISIINPHNLKGKSLGQVSLTHPYSECDFKLKEVARNNMGNDTNEEQEKAVTKIEIISHMKQSTSCLDSEEIRENQGEVILEVQETYCETSGKLPSEQVLQQPMNARVKSKREKREVIVEESIRTCKPAFLSEEKLYQETAIRDEHDSHIKSQPREMTSSEKGKEADTEMGFSITFKIEESSSQVVPQGISVKHLDALTLFSSKQANEGKVNNLSLCLTLKPEENLSREIACGAQSEPFPCMTPRPEGLHYQESDGKAQVTGPSQISKTDKSFQGTTRQETNYQDSWVTSKTKETKHQISSSNECKEKSYQEVSFDPARGLKLEEITVSRPDSKEVRYLEFSDRKDLHHQGSKSDDKLCGTLKSEIATQELTGEKFLEMANPNVAGLEAGSIEDIVTQRGSRVLGSFLPEKLFKGVSQKENTGQQNAIISPTVLETSEEKTVSLTVCSAVKTEKTPQEKLRESPGSEQTPFMTAPEGKGNGGVNPEPFRATQNVFTRQLCLEHDEKLVSYLSLLRNIEMRTKQIQPLELNLAELQDLLCQAKVLERELKDLTTLVSQELECVNQIIISQPQEVPAQLLKALEKDAKNLQKSLSSVSDTWNSRLLHFQNAVEIEKTKVLNQHTQLEGRLQDLRAWVGNKNLILNSKGSNSEIDVDSLNLCLQQYEDLKQPMAERKAQLDALAFDIQFFISEHAQDLSPQQNRQMLRLLNELQRSFQDILEQTAAQVDALQGHLQQMEQEALVKTLQKQQNTCHQQLEDLCSWVGQAERALAGHQGRTTQQDLSALQKNQSDLKDLQDDIQNRATSFATVVKDIEGFMEENQTKLSPRELTALREKLHQAKEQYEALQEETRVAQKELEEAVTSALQQETEKSKAAKELAENKKKIDALLDWVTSVGSSGGQLLTNLPGMEQLSGASLEKGALDTTDGYMGVNQAPEKLDKQCEMMKARHQELLSQQQNFILATQSAQAFLDQHGHNLTPEEQQMLQQKLGELKEQYSTSLAQSEAELKQVQTLQDELQKFLQDHKEFESWLERSEKELENMHKGGSSPETLPSLLKRQGSFSEDVISHKGDLRFVTISGQKVLDMENSFKEGKEPSEIGNLVKDKLKDATERYTALHSKCTRLGSHLNMLLGQYHQFQNSADSLQAWMQACEANVEKLLSDTVASDPGVLQEQLATTKQLQEELAEHQVPVEKLQKVARDIMEIEGEPAPDHRHVQETTDSILSHFQSLSYSLAERSSLLQKAIAQSQSVQESLESLLQSIGEVEQNLEGKQVSSLSSGVIQEALATNMKLKQDIARQKSSLEATREMVTRFMETADSTTAAVLQGKLAEVSQRFEQLCLQQQEKESSLKKLLPQAEMFEHLSGKLQQFMENKSRMLASGNQPDQDITHFFQQIQELNLEMEDQQENLDTLEHLVTELSSCGFALDLCQHQDRVQNLRKDFTELQKTVKEREKDASSCQEQLDEFRKLVRTFQKWLKETEGSIPPTETSMSAKELEKQIEHLKSLLDDWASKGTLVEEINCKGTSLENLIMEITAPDSQGKTGSILPSVGSSVGSVNGYHTCKDLTEIQCDMSDVNLKYEKLGGVLHERQESLQAILNRMEEVHKEANSVLQWLESKEEVLKSMDAMSSPTKTETVKAQAESNKAFLAELEQNSPKIQKVKEALAGLLVTYPNSQEAENWKKIQEELNSRWERATEVTVARQRQLEESASHLACFQAAESQLRPWLMEKELMMGVLGPLSIDPNMLNAQKQQVQFMLKEFEARRQQHEQLNEAAQGILTGPGDVSLSTSQVQKELQSINQKWVELTDKLNSRSSQIDQAIVKSTQYQELLQDLSEKVRAVGQRLSVQSAISTQPEAVKQQLEETSEIRSDLEQLDHEVKEAQTLCDELSVLIGEQYLKDELKKRLETVALPLQGLEDLAADRINRLQAALASTQQFQQMFDELRTWLDDKQSQQAKNCPISAKLERLQSQLQENEEFQKSLNQHSGSYEVIVAEGESLLLSVPPGEEKRTLQNQLVELKNHWEELSKKTADRQSRLKDCMQKAQKYQWHVEDLVPWIEDCKAKMSELRVTLDPVQLESSLLRSKAMLNEVEKRRSLLEILNSAADILINSSEADEDGIRDEKAGINQNMDAVTEELQAKTGSLEEMTQRLREFQESFKNIEKKVEGAKHQLEIFDALGSQACSNKNLEKLRAQQEVLQALEPQVDYLRNFTQGLVEDAPDGSDASQLLHQAEVAQQEFLEVKQRVNSGCVMMENKLEGIGQFHCRVREMFSQLADLDDELDGMGAIGRDTDSLQSQIEDVRLFLNKIHVLKLDIEASEAECRHMLEEEGTLDLLGLKRELEALNKQCGKLTERGKARQEQLELTLGRVEDFYRKLKGLNDATTAAEEAEALQWVVGTEVEIINQQLADFKMFQKEQVDPLQMKLQQVNGLGQGLIQSAGKDCDVQGLEHDMEEINARWNTLNKKVAQRIAQLQEALLHCGKFQDALEPLLSWLADTEELIANQKPPSAEYKVVKAQIQEQKLLQRLLDDRKATVDMLQAEGGRIAQSAELADREKITGQLESLESRWTELLSKAAARQKQLEDILVLAKQFHETAEPISDFLSVTEKKLANSEPVGTQTAKIQQQIIRHKALNEEIVNRKKNVDQAIKNGQALLKQTTGEEVLLIQEKLDGIKTRYADITVTSSKALRTLEQARQLATKFQSTYEELTGWLREVEEELATSGGQSPTGEQIPQFQQRQKELKKEVMEHRLVLDTVNEVSRALLELVPWRAREGLDKLVSDANEQYKLVSDTIGQRVDEIDAAIQRSQQYEQAADAELAWVAETKRKLMALGPIRLEQDQTTAQLQVQKAFSIDIIRHKDSMDELFSHRSEIFGTCGEEQKTVLQEKTESLIQQYEAISLLNSERYARLERAQVLVNQFWETYEELSPWIEETRALIAQLPSPAIDHEQLRQQQEEMRQLRESIAEHKPHIDKLLKIGPQLKELNPEEGEMVEEKYQKAENMYAQIKEEVRQRALALDEAVSQSTQITEFHDKIEPMLETLENLSSRLRMPPLIPAEVDKIRECISDNKSATVELEKLQPSFEALKRRGEELIGRSQGADKDLAAKEIQDKLDQMVFFWEDIKARAEEREIKFLDVLELAEKFWYDMAALLTTIKDTQDIVHDLESPGIDPSIIKQQVEAAETIKEETDGLHEELEFIRILGADLIFACGETEKPEVRKSIDEMNNAWENLNKTWKERLEKLEDAMQAAVQYQDTLQAMFDWLDNTVIKLCTMPPVGTDLNTVKDQLNEMKEFKVEVYQQQIEMEKLNHQGELMLKKATDETDRDIIREPLTELKHLWENLGEKIAHRQHKLEGALLALGQFQHALEELMSWLTHTEELLDAQRPISGDPKVIEVELAKHHVLKNDVLAHQATVETVNKAGNELLESSAGDDASSLRSRLEAMNQCWESVLQKTEEREQQLQSTLQQAQGFHSEIEDFLLELTRMESQLSASKPTGGLPETAREQLDTHMELYSQLKAKEETYNQLLDKGRLMLLSRDDSGSGSKTEQSVALLEQKWHVVSSKMEERKSKLEEALNLATEFQNSLQEFINWLTLAEQSLNIASPPSLILNTVLSQIEEHKVFANEVNAHRDQIIELDQTGNQLKFLSQKQDVVLIKNLLVSVQSRWEKVVQRSIERGRSLDDARKRAKQFHEAWKKLIDWLEDAESHLDSELEISNDPDKIKLQLSKHKEFQKTLGGKQPVYDTTIRTGRALKEKTLLPEDSQKLDNFLGEVRDKWDTVCGKSVERQHKLEEALLFSGQFMDALQALVDWLYKVEPQLAEDQPVHGDLDLVMNLMDAHKVFQKELGKRTGTVQVLKRSGRELIENSRDDTTWVKGQLQELSTRWDTVCKLSVSKQSRLEQALKQAEVFRDTVHMLLEWLSEAEQTLRFRGALPDDTEALQSLIDTHKEFMKKVEEKRVDVNSAVAMGEVILAVCHPDCITTIKHWITIIRARFEEVLTWAKQHQQRLETALSELVANAELLEELLAWIQWAETTLIQRDQEPIPQNIDRVKALIAEHQTFMEEMTRKQPDVDRVTKTYKRKNIEPTHAPFIEKSRSGGRKSLSQPTPPPMPILSQSEAKNPRINQLSARWQQVWLLALERQRKLNDALDRLEELKEFANFDFDVWRKKYMRWMNHKKSRVMDFFRRIDKDQDGKITRQEFIDGILASKFPTTKLEMTAVADIFDRDGDGYIDYYEFVAALHPNKDAYRPTTDADKIEDEVTRQVAQCKCAKRFQVEQIGENKYRFGDSQQLRLVRILRSTVMVRVGGGWMALDEFLVKNDPCRARGRTNIELREKFILPEGASQGMTPFRSRGRRSKPSSRAASPTRSSSSASQSNHSCTSMPSSPATPASGTKVIPSSGSKLKRPTPTFHSSRTSLAGDTSNSSSPASTGAKTNRADPKKSASRPGSRAGSRAGSRASSRRGSDASDFDLLETQSACSDTSESSAAGGQGNSRRGLNKPSKIPTMSKKTTTASPRTPGPKR

SEQ ID NO: 9436 - protein, 956 aa, Homo sapiens
MAQVLHTQSAVMDGAPDSALRQLLSQKPMEPPAPAIPSRYQQVPQQPHPGFTGGLSKPALQVGQHPTQGHLYYDYQQPLAQVPVQGGQPLQAPQMLSQHMQQMQQHQYYPPQQQQQAGQQRISMQEIQTQPQQIRPSQPQPPPQQQQPQQLQLQQRQGSMQIPQYYQPQPMMQHLQEQQQQQMHLQPPSYHRDPHQYTPEQAHTVQLIPLGSMSQYYYQEPQQPYSHPLYQQSHLSQHQQREDSQLKTYSSDRQAQAMLSSHGDLGPPDTGMGDPASSDLTRVSSTLPHRPLLSPSGIHLNNMGPQHQQLSPSAMWPQMHLPDGRAQPGSPESSGQPKGAFGEQFDAKNKLTCSICLKEFKNLPALNGHMRSHGGMRASPNLKQEIPRKHQPSVPKAEEPLKTVQEKKKFRHRPEPLFIPPPPSYNPNPAASYSGATLYQSQLRSPRVLGDHLLLDPTHELPPYTPPPMLSPVRQGSGLFSNVLISGHGPGAHPQLPLTPLTPTPRVLLCRSNSIDGSNVTVTPGPGEQTVDVEPRINIGLRFQAEIPELQDISALAQDTHKATLVWKPWPELENHDLQQRVENLLNLCCSSALPGGGTNSEFALHSLFEAKGDVMVALEMLLLRKPVRLKCHPLANYHYAGSDKWTSLERKLFNKALATYSKDFIFVQKMVKSKTVAQCVEYYYTWKKIMRLGRKHRTRLAEIIDDCVTSEEEEELEEEEEEDPEEDRKSTKEEESEVPKSPEPPPVPVLAPTEGPPLQALGQPSGSFICEMPNCGAVFSSRQALNGHARIHGGTNQVTKARGAIPSGKQKPGGTQSGYCSVKSSPSHSTTSGETDPTTIFPCKECGKVFFKIKSRNAHMKTHRQQEEQQRQKAQKAAFAAEMAATIERTTGPVGAPGLLPLDQLSLIKPIKDVDILDDDVVQQLGGVMEEAEVVDTDLLLDDQDSVLLQGDAEL

SEQ ID NO: 9437 - protein, 1200 aa, Homo sapiens
MGDQQLYKTNHVAHGSENLFYQQPPLGVHSGLNHNYGNAVTGGGMDAPQASPISPHFPQDTRDGLGLPVGSKNLGQMDTSRQGGWGSHAGPGNHVQLRGNLANSNMMWGAPAQAEPTDGYQYTYSQASEIRTQKLTSGVLHKLDSFTQVFANQNLRIQVNNMAQVLHTQSAVMDGAPDSALRQLLSQKPMEPPAPAIPSRYQQVPQQPHPGFTGGLSKPALQVGQHPTQGHLYYDYQQPLAQVPVQGGQPLQAPQMLSQHMQQMQQHQYYPPQQQQQAGQQRISMQEIQTQPQQIRPSQPQPPPQQQQPQQLQLQQRQGSMQIPQYYQPQPMMQHLQEQQQQQMHLQPPSYHRDPHQYTPEQAHTVQLIPLGSMSQYYYQEPQQPYSHPLYQQSHLSQHQQREDSQLKTYSSDRQAQAMLSSHGDLGPPDTGMGDPASSDLTRVSSTLPHRPLLSPSGIHLNNMGPQHQQLSPSAMWPQMHLPDGRAQPGSPESSGQPKGAFGEQFDAKNKLTCSICLKEFKNLPALNGHMRSHGGMRASPNLKQEEGEKVLPPQPQPPLPPPPPPPPPPQLPPEAESLTPMVMPVSVPVKLLPPKPSSQGFTNSTVAAPSARDKPASSMSDDEMPVLEIPRKHQPSVPKAEEPLKTVQEKKKFRHRPEPLFIPPPPSYNPNPAASYSGATLYQSQLRSPRVLGDHLLLDPTHELPPYTPPPMLSPVRQGSGLFSNVLISGHGPGAHPQLPLTPLTPTPRVLLCRSNSIDGSNVTVTPGPGEQTVDVEPRINIGLRFQAEIPELQDISALAQDTHKATLVWKPWPELENHDLQQRVENLLNLCCSSALPGGGTNSEFALHSLFEAKGDVMVALEMLLLRKPVRLKCHPLANYHYAGSDKWTSLERKLFNKALATYSKDFIFVQKMVKSKTVAQCVEYYYTWKKIMRLGRKHRTRLAEIIDDCVTSEEEEELEEEEEEDPEEDRKSTKEEESEVPKSPEPPPVPVLAPTEGPPLQALGQPSGSFICEMPNCGAVFSSRQALNGHARIHGGTNQVTKARGAIPSGKQKPGGTQSGYCSVKSSPSHSTTSGETDPTTIFPCKECGKVFFKIKSRNAHMKTHRQQEEQQRQKAQKAAFAAEMAATIERTTGPVGAPGLLPLDQLSLIKPIKDVDILDDDVVQQLGGVMEEAEVVDTDLLLDDQDSVLLQGDAEL

SEQ ID NO: 9438 - protein, 864 aa, Homo sapiens
MGNRGMEDLIPLVNRLQDAFSAIGQNADLDLPQIAVVGGQSAGKSSVLENFVGRDFLPRGSGIVTRRPLVLQLVNATTEYAEFLHCKGKKFTDFEEVRLEIEAETDRVTGTNKGISPVPINLRVYSPHVLNLTLVDLPGMTKVPVGDQPPDIEFQIRDMLMQFVTKENCLILAVSPANSDLANSDALKVAKEVDPQGQRTIGVITKLDLMDEGTDARDVLENKLLPLRRGYIGVVNRSQKDIDGKKDITAALAAERKFFLSHPSYRHLADRMGTPYLQKVLNQQLTNHIRDTLPGLRNKLQSQLLSIEKEVEEYKNFRPDDPARKTKALLQMVQQFAVDFEKRIEGSGDQIDTYELSGGARINRIFHERFPFELVKMEFDEKELRREISYAIKNIHGIRTGLFTPDMAFETIVKKQVKKIREPCLKCVDMVISELISTVRQCTKKLQQYPRLREEMERIVTTHIREREGRTKEQVMLLIDIELAYMNTNHEDFIGFANAQQRSNQMNKKKTSGNQDEILVIRKGWLTINNIGIMKGGSKEYWFVLTAENLSWYKDDEEKEKKYMLSVDNLKLRDVEKGFMSSKHIFALFNTEQRNVYKDYRQLELACETQEEVDSWKASFLRAGVYPERVGDKEKASETEENGSDSFMHSMDPQLERQVETIRNLVDSYMAIVNKTVRDLMPKTIMHLMINNTKEFIFSELLANLYSCGDQNTLMEESAEQAQRRDEMLRMYHALKEALSIIGDINTTTVSTPMPPPVDDSWLQVQSVPAGRRSPTSSPTPQRRAPAVPPARPGSRGPAPGPPPAGSALGGAPPVPSRPGASPDPFGPPPQVPSRPNRAPPGVPSRSGQASPSRPESPRPPFDL

SEQ ID NO: 9439 - protein, 4433 aa, Homo sapiens
KNTISVKAVCDYRQIEITICKNDECVLEDNSQRTKWKVISPTGNEAMVPSVCFLIPPPNKDAIEMASRVEQSYQKVMALWHQLHVNTKSLISWNYLRKDLDLVQTWNLEKLRSSAPGECHQIMKNLQAHYEDFLQDSRDSVLFSVADRLRLEEEVEACKARFQHLMKSMENEDKEETVAKMYISELKNIRLRLEEYEQRVVKRIQSLASSRTDRDAWQDNALRIAEQEHTQEDLQQLRSDLDAVSMKCDSFLHQSPSSSSVPTLRSELNLLVEKMDHVYGLSTVYLNKLKTVDVIVRSIQDAELLVKGYEIKLSQEEVVLADLSALEAHWSTLRHWLSDVKDKNSVFSVLDEEIAKAKVVAEQMSRLTPERNLDLERYQEKGSQLQERWHRVIAQLEIRQSELESIQEVLGDYRACHGTLIKWIEETTAQQEMMKPGQAEDSRVLSEQLSQQTALFAEIERNQTKLDQCQKFSQQYSTIVKDYELQLMTYKAFVESQQKSPGKRRRMLSSSDAITQEFMDLRTRYTALVTLTTQHVKYISDALRRLEEEEKVVEEEKQEHVEKVKELLGWVSTLARNTQGKATSSETKESTDIEKAILEQQVLSEELTTKKEQVSEAIKTSQIFLAKHGHKLSEKEKKQISEQLNALNKAYHDLCDGSANQLQQLQSQLAHQTEQKTLQKQQNTCHQQLEDLCSWVGQAERALAGHQGRTTQQDLSALQKNQSDLKDLQDDIQNRATSFATVVKDIEGFMEENQTKLSPRELTALREKLHQAKEQYEALQEETRVAQKELEEAVTSALQQETEKSKAAKELAENKKKIDALLDWVTSVGSSGGQLLTNLPGMEQLSGASLEKGALDTTDGYMGVNQAPEKLDKQCEMMKARHQELLSQQQNFILATQSAQAFLDQHGHNLTPEEQQMLQQKLGELKEQYSTSLAQSEAELKQVQTLQDELQKFLQDHKEFESWLERSEKELENMHKGGSSPETLPSLLKRQGSFSEDVISHKGDLRFVTISGQKVLDMENSFKEGKEPSEIGNLVKDKLKDATERYTALHSKCTRLGSHLNMLLGQYHQFQNSADSLQAWMQACEANVEKLLSDTVASDPGVLQEQLATTKQLQEELAEHQVPVEKLQKVARDIMEIEGEPAPDHRHVQETTDSILSHFQSLSYSLAERSSLLQKAIAQSQSVQESLESLLQSIGEVEQNLEGKQVSSLSSGVIQEALATNMKLKQDIARQKSSLEATREMVTRFMETADSTTAAVLQGKLAEVSQRFEQLCLQQQEKESSLKKLLPQAEMFEHLSGKLQQFMENKSRMLASGNQPDQDITHFFQQIQELNLEMEDQQENLDTLEHLVTELSSCGFALDLCQHQDRVQNLRKDFTELQKTVKEREKDASSCQEQLDEFRKLVRTFQKWLKETEGSIPPTETSMSAKELEKQIEHLKSLLDDWASKGTLVEEINCKGTSLENLIMEITAPDSQGKTDLTEIQCDMSDVNLKYEKLGGVLHERQESLQAILNRMEEVHKEANSVLQWLESKEEVLKSMDAMSSPTKTETVKAQAESNKAFLAELEQNSPKIQKVKEALAGLLVTYPNSQEAENWKKIQEELNSRWERATEVTVARQRQLEESASHLACFQAAESQLRPWLMEKELMMGVLGPLSIDPNMLNAQKQQVQFMLKEFEARRQQHEQLNEAAQGILTGPGDVSLSTSQVQKELQSINQKWVELTDKLNSRSSQIDQAIVKSTQYQELLQDLSEKVRAVGQRLSVQSAISTQPEAVKQQLEETSEIRSDLEQLDHEVKEAQTLCDELSVLIGEQYLKDELKKRLETVALPLQGLEDLAADRINRLQAALASTQQFQQMFDELRTWLDDKQSQQAKNCPISAKLERLQSQLQENEEFQKSLNQHSGSYEVIVAEGESLLLSVPPGEEKRTLQNQLVELKNHWEELSKKTADRQSRLKDCMQKAQKYQWHVEDLVPWIEDCKAKMSELRVTLDPVQLESSLLRSKAMLNEVEKRRSLLEILNSAADILINSSEADEDGIRDEKAGINQNMDAVTEELQAKTGSLEEMTQRLREFQESFKNIEKKVEGAKHQLEIFDALGSQACSNKNLEKLRAQQEVLQALEPQVDYLRNFTQGLVEDAPDGSDASQLLHQAEVAQQEFLEVKQRVNSGCVMMENKLEGIGQFHCRVREMFSQLADLDDELDGMGAIGRDTDSLQSQIEDVRLFLNKIHVLKLDIEASEAECRHMLEEEGTLDLLGLKRELEALNKQCGKLTERGKARQEQLELTLGRVEDFYRKLKGLNDATTAAEEAEALQWVVGTEVEIINQQLADFKMFQKEQVDPLQMKLQQVNGLGQGLIQSAGKDCDVQGLEHDMEEINARWNTLNKKVAQRIAQLQEALLHCGKFQDALEPLLSWLADTEELIANQKPPSAEYKVVKAQIQEQKLLQRLLDDRKATVDMLQAEGGRIAQSAELADREKITGQLESLESRWTELLSKAAARQKQLEDILVLAKQFHETAEPISDFLSVTEKKLANSEPVGTQTAKIQQQIIRHKALNEEIVNRKKNVDQAIKNGQALLKQTTGEEVLLIQEKLDGIKTRYADITVTSSKALRTLEQARQLATKFQSTYEELTGWLREVEEELATSGGQSPTGEQIPQFQQRQKELKKEVMEHRLVLDTVNEVSRALLELVPWRAREGLDKLVSDANEQYKLVSDTIGQRVDEIDAAIQRSQQYEQAADAELAWVAETKRKLMALGPIRLEQDQTTAQLQVQKAFSIDIIRHKDSMDELFSHRSEIFGTCGEEQKTVLQEKTESLIQQYEAISLLNSERYARLERAQVLVNQFWETYEELSPWIEETRALIAQLPSPAIDHEQLRQQQEEMRQLRESIAEHKPHIDKLLKIGPQLKELNPEEGEMVEEKYQKAENMYAQIKEEVRQRALALDEAVSQSTQITEFHDKIEPMLETLENLSSRLRMPPLIPAEVDKIRECISDNKSATVELEKLQPSFEALKRRGEELIGRSQGADKDLAAKEIQDKLDQMVFFWEDIKARAEEREIKFLDVLELAEKFWYDMAALLTTIKDTQDIVHDLESPGIDPSIIKQQVEAAETIKEETDGLHEELEFIRILGADLIFACGETEKPEVRKSIDEMNNAWENLNKTWKERLEKLEDAMQAAVQYQDTLQAMFDWLDNTVIKLCTMPPVGTDLNTVKDQLNEMKEFKVEVYQQQIEMEKLNHQGELMLKKATDETDRDIIREPLTELKHLWENLGEKIAHRQHKLEGALLALGQFQHALEELMSWLTHTEELLDAQRPISGDPKVIEVELAKHHVLKNDVLAHQATVETVNKAGNELLESSAGDDASSLRSRLEAMNQCWESVLQKTEEREQQLQSTLQQAQGFHSEIEDFLLELTRMESQLSASKPTGGLPETAREQLDTHMELYSQLKAKEETYNQLLDKGRLMLLSRDDSGSGSKTEQSVALLEQKWHVVSSKMEERKSKLEEALNLATEFQNSLQEFINWLTLAEQSLNIASPPSLILNTVLSQIEEHKVFANEVNAHRDQIIELDQTGNQLKFLSQKQDVVLIKNLLVSVQSRWEKVVQRSIERGRSLDDARKRAKQFHEAWKKLIDWLEDAESHLDSELEISNDPDKIKLQLSKHKEFQKTLGGKQPVYDTTIRTGRALKEKTLLPEDSQKLDNFLGEVRDKWDTVCGKSVERQHKLEEALLFSGQFMDALQALVDWLYKVEPQLAEDQPVHGDLDLVMNLMDAHKVFQKELGKRTGTVQVLKRSGRELIENSRDDTTWVKGQLQELSTRWDTVCKLSVSKQSRLEQALKQAEVFRDTVHMLLEWLSEAEQTLRFRGALPDDTEALQSLIDTHKEFMKKVEEKRVDVNSAVAMGEVILAVCHPDCITTIKHWITIIRARFEEVLTWAKQHQQRLETALSELVANAELLEELLAWIQWAETTLIQRDQEPIPQNIDRVKALIAEHQTFMEEMTRKQPDVDRVTKTYKRKNIEPTHAPFIEKSRSGGRKSLSQPTPPPMPILSQSEAKNPRINQLSARWQQVWLLALERQRKLNDALDRLEELKEFANFDFDVWRKKYMRWMNHKKSRVMDFFRRIDKDQDGKITRQEFIDGILASKFPTTKLEMTAVADIFDRDGDGYIDYYEFVAALHPNKDAYRPTTDADKIEDEVTRQVAQCKCAKRFQVEQIGENKYRFGDSQQLRLVRILRSTVMVRVGGGWMALDEFLVKNDPCRARGRTNIELREKFILPEGASQGMTPFRSRGRRSKPSSRAASPTRSSSSASQSNHSCTSMPSSPATPASGTKVIPSSGSKLKRPTPTFHSSRTSLAGDTSNSSSPASTGAKTNRADPKKSASRPGSRAGSRAGSRASSRRGSDASDFDLLETQSACSDTSESSAAGGQGNSRRGLNKPSKIPTMSKKTTTASPRTPGPKR

SEQ ID NO: 9440 - protein, 522 aa, Homo sapiens
MSPQKRVKNVQAQNRTSQGSSSFQTTLSAWKVKQDPSNSKNISKHGQNNPVGDYEHADDQAEEDALQMAVGYFEKGPIKASQNKDKTLEKHLKTVENVAWKNGLASEEIDILLNIALSGKFGNAVNTRILKCMIPATVISEDSVVKAVSWLCVGKCSGSTKVLFYRWLVAMFDFIDRKEQINLLYGFFFASLQDDALCPYVCHLLYLLTKKENVKPFRVRKLLDLQAKMGMQPHLQALLSLYKFFAPALISVSLPVRKKIYFKNSENLWKTALLAVKQRNRGPSPEPLKLMLGPANVRPLKRKWNSLSVIPVLNSSSYTKECGKKEMSLSDCLNRSGSFPLEQLQSFPQLLQNIHCLELPSQMGSVLNNSLLLHYINCVRDEPVLLRFYYWLSQTLQEECIWYKVNNYEHGKEFTNFLDTIIRAECFLQEGFYSCEAFLYKSLPLWDGLCCRSQFLQLVSWIPFSSFSEVKPLLFDHLAQLFFTSTIYFKCSVLQSLKELLQNWLLWLSMDIHMKPVTNSPL

SEQ ID NO: 9441 - protein, 756 aa, Homo sapiens
MSPQKRVKNVQAQNRTSQGSSSFQTTLSAWKVKQDPSNSKNISKHGQNNPVGDYEHADDQAEEDALQMAVGYFEKGPIKASQNKDKTLEKHLKTVENVAWKNGLASEEIDILLNIALSGKFGNAVNTRILKCMIPATVISEDSVVKAVSWLCVGKCSGSTKVLFYRWLVAMFDFIDRKEQINLLYGFFFASLQDDALCPYVCHLLYLLTKKENVKPFRVRKLLDLQAKMGMQPHLQALLSLYKFFAPALISVSLPVRKKIYFKNSENLWKTALLAVKQRNRGPSPEPLKLMLGPANVRPLKRKWNSLSVIPVLNSSSYTKECGKKEMSLSDCLNRSGSFPLEQLQSFPQLLQNIHCLELPSQMGSVLNNSLLLHYINCVRDEPVLLRFYYWLSQTLQEECIWYKVNNYEHGKEFTNFLDTIIRAECFLQEGFYSCEAFLYKSLPLWDGLCCRSQFLQLVSWIPFSSFSEVKPLLFDHLAQLFFTSTIYFKCSVLQSLKELLQNWLLWLSMDIHMKPVTNSPLETTLGGSMNSVSKLIHYVGWLSTTAMRLESNNTFLLHFILDFYEKVCDIYINYNLPLVVLFPPGIFYSALLSLDTSILNQLCFIMHRYRKNLTAAKKNELVQKTKSEFNFSSKTYQEFNHYLTSMVGCLWTSKPFGKGIYIDPEILEKTGVAEYKNSLNVVHHPSFLSYAVSFLLQESPEERTVNVSSIRGKKWSWYLDYLFSQGLQGLKLFIRSSVHHSSIPRAEGINCNNQY

SEQ ID NO: 9442 - protein, 898 aa, Homo sapiens
MFSQQQQQQLQQQQQQLQQLQQQQLQQQQLQQQQLLQLQQLLQQSPPQAPLPMAVSRGLPPQQPQQPLLNLQGTNSASLLNGSMLQRALLLQQLQGLDQFAMPPATYDTAGLTMPTATLGNLRGYGMASPGLAAPSLTPPQLATPNLQQFFPQATRQSLLGPPPVGVPMNPSQFNLSGRNPQKQARTSSSTTPNRKDSSSQTMPVEDKSDPPEGSEEAAEPRMDTPEDQDLPPCPEDIAKEKRTPAPEPEPCEASELPAKRLRSSEEPTEKEPPGQLQVKAQPQARMTVPKQTQTPDLLPEALEAQVLPRFQPRVLQVQAQVQSQTQPRIPSTDTQVQPKLQKQAQTQTSPEHLVLQQKQVQPQLQQEAEPQKQVQPQVQPQAHSQGPRQVQLQQEAEPLKQVQPQVQPQAHSQPPRQVQLQLQKQVQTQTYPQVHTQAQPSVQPQEHPPAQVSVQPPEQTHEQPHTQPQVSLLAPEQTPVVVHVCGLEMPPDAVEAGGGMEKTLPEPVGTQVSMEEIQNESACGLDVGECENRAREMPGVWGAGGSLKVTILQSSDSRAFSTVPLTPVPRPSDSVSSTPAATSTPSKQALQFFCYICKASCSSQQEFQDHMSEPQHQQRLGEIQHMSQACLLSLLPVPRDVLETEDEEPPPRRWCNTCQLYYMGDLIQHRRTQDHKIAKQSLRPFCTVCNRYFKTPRKFVEHVKSQGHKDKAKELKSLEKEIAGQDEDHFITVDAVGCFEGDEEEEEDDEDEEEIEVEEELCKQVRSRDISREEWKGSETYSPNTAYGVDFLVPVMGYICRICHKFYHSNSGAQLSHCKSLGHFENLQKYKAAKNPSPTTRPVSRRCAINARNALTALFTSSGRPPSQPNTQDKTPSKVTARPSQPPLPRRSTRLKT

SEQ ID NO: 9443 - protein, 842 aa, Homo sapiens
MFSQQQQQQLQQQQQQLQQLQQQQLQQQQLQQQQLLQLQQLLQQSPPQAPLPMAVSRGLPPQQPQQPLLNLQGTNSASLLNGSMLQRALLLQQLQGLDQFAMPPATYDTAGLTMPTATLGNLRGYGMASPGLAAPSLTPPQLATPNLQQFFPQATRQSLLGPPPVGVPMNPSQFNLSGRNPQKQARTSSSTTPNRKDSSSQTMPVEDKSDPPEGSEEAAEPRMDTPEDQDLPPCPEDIAKEKRTPAPEPEPCEASELPAKRLRSSEEPTEKEPPGQLQVKAQPQARMTVPKQTQTPDLLPEALEAQVLPRFQPRVLQVQAQVQSQTQPRIPSTDTQVQPKLQKQAQTQTSPEHLVLQQKQVQPQLQQEAEPQKQVQPQVHTQAQPSVQPQEHPPAQVSVQPPEQTHEQPHTQPQVSLLAPEQTPVVVHVCGLEMPPDAVEAGGGMEKTLPEPVGTQVSMEEIQNESACGLDVGECENRAREMPGVWGAGGSLKVTILQSSDSRAFSTVPLTPVPRPSDSVSSTPAATSTPSKQALQFFCYICKASCSSQQEFQDHMSEPQHQQRLGEIQHMSQACLLSLLPVPRDVLETEDEEPPPRRWCNTCQLYYMGDLIQHRRTQDHKIAKQSLRPFCTVCNRYFKTPRKFVEHVKSQGHKDKAKELKSLEKEIAGQDEDHFITVDAVGCFEGDEEEEEDDEDEEEIEVEEELCKQVRSRDISREEWKGSETYSPNTAYGVDFLVPVMGYICRICHKFYHSNSGAQLSHCKSLGHFENLQKYKAAKNPSPTTRPVSRRCAINARNALTALFTSSGRPPSQPNTQDKTPSKVTARPSQPPLPRRSTRLKT

SEQ ID NO: 9444 - protein, 260 aa, Homo sapiens
MGLLDLCEEVFGTADLYRVLGVRREASDGEVRRGYHKVSLQVHPDRVGEGDKEDATRRFQILGKVYSVLSDREQRAVYDEQGTVDEDSPVLTQDRDWEAYWRLLFKKISLEDIQAFEKTYKGSEEELADIKQAYLDFKGDMDQIMESVLCVQYTEEPRIRNIIQQAIDAGEVPSYNAFVKESKQKMNARKRRAQEEAKEAEMSRKELGLDEGVDSLKAAIQSRQKDRQKEMDNFLAQMEAKYCKSSKGGGKKSALKKEKK

SEQ ID NO: 9445 - protein, 818 aa, Homo sapiens
MFSQQQQQQLQQQQQQLQQLQQQQLQQQQLQQQQLLQLQQLLQQSPPQAPLPMAVSRGLPPQQPQQPLLNLQGTNSASLLNGSMLQRALLLQQLQGNLRGYGMASPGLAAPSLTPPQLATPNLQQFFPQATRQSLLGPPPVGVPMNPSQFNLSGRNPQKQARTSSSTTPNRKDSSSQTMPVEDKSDPPEGSEEAAEPRMDTPEDQDLPPCPEDIAKEKRTPAPEPEPCEASELPAKRLRSSEEPTEKEPPGQLQVKAQPQARMTVPKQTQTPDLLPEALEAQVLPRFQPRVLQVQAQVQSQTQPRIPSTDTQVQPKLQKQAQTQTSPEHLVLQQKQVQPQLQQEAEPQKQVQPQVHTQAQPSVQPQEHPPAQVSVQPPEQTHEQPHTQPQVSLLAPEQTPVVVHVCGLEMPPDAVEAGGGMEKTLPEPVGTQVSMEEIQNESACGLDVGECENRAREMPGVWGAGGSLKVTILQSSDSRAFSTVPLTPVPRPSDSVSSTPAATSTPSKQALQFFCYICKASCSSQQEFQDHMSEPQHQQRLGEIQHMSQACLLSLLPVPRDVLETEDEEPPPRRWCNTCQLYYMGDLIQHRRTQDHKIAKQSLRPFCTVCNRYFKTPRKFVEHVKSQGHKDKAKELKSLEKEIAGQDEDHFITVDAVGCFEGDEEEEEDDEDEEEIEVEEELCKQVRSRDISREEWKGSETYSPNTAYGVDFLVPVMGYICRICHKFYHSNSGAQLSHCKSLGHFENLQKYKAAKNPSPTTRPVSRRCAINARNALTALFTSSGRPPSQPNTQDKTPSKVTARPSQPPLPRRSTRLKT

SEQ ID NO: 9446 - protein, 696 aa, Homo sapiens
MSGGRFDFDDGGAYCGGWEGGKAHGHGLCTGPKGQGEYSGSWNFGFEVAGVYTWPSGNTFEGYWSQGKRHGLGIETKGRWLYKGEWTHGFKGRYGIRQSSSSGAKYEGTWNNGLQDGYGTETYADGGTYQGQFTNGMRHGYGVRQSVPYGMAVVVRSPLRTSLSSLRSEHSNGTVAPDSPASPASDGPALPSPAIPRGGFALSLLANAEAAARAPKGGGLFQRGALLGKLRRAESRTSVGSQRSRVSFLKSDLSSGASDAASTASLGEAAEGADEAAPFEADIDATTTETYMGEWKNDKRSGFGVSERSSGLRYEGEWLDNLRHGYGCTTLPDGHREEGKYRHNVLVKDTKRRMLQLKSNKVRQKVEHSVEGAQRAAAIARQKAEIAASRTSHAKAKAEAAEQAALAANQESNIARTLARELAPDFYQPGPEYQKRRLLQEILENSESLLEPPDRGAGAAGLPQPPRESPQLHERETPRPEGGSPSPAGTPPQPKRPRPGVSKDGLLSPGAWNGEPSGEGSRSVTPSEGAGRRSPARPATERMAIEALQAPPAPSREPEVALYQGYHSYAVRTTPPEPPPFEDQPEPEVSGSESAPSSPATAPLQAPTLRGPEPARETPAKLEPKPIIPKAEPRAKARKTEARGLTKAGAKKKARKEAALAAEAEVEVEEVPNTILICMVILLNIGLAILFVHLLT

SEQ ID NO: 9447 - protein, 242 aa, Homo sapiens
MKSAGGSGRSLLPSPRVCEEQRCEEEVFPLAMNYLDRYLSCVPTRKAQLQLLGAVCMLLASKLRETTPLTIEKLCIYTDHAVSPRQLRDWEVLVLGKLKWDLAAVIAHDFLAFILHRLSLPRDRQALVKKHAQTFLALCATDYTFAMYPPSMIATGSIGAAVQGLGACSMSGDELTELLAGITGTEVDCLRACQEQIEAALRESLREASQTSSSPAPKAPRGSSSQGPSQTSTPTDVTAIHL

SEQ ID NO: 9448 - protein, 211 aa, Homo sapiens
MNYLDRYLSCVPTRKAQLQLLGAVCMLLASKLRETTPLTIEKLCIYTDHAVSPRQLRDWEVLVLGKLKWDLAAVIAHDFLAFILHRLSLPRDRQALVKKHAQTFLALCATDYTFAMYPPSMIATGSIGAAVQGLGACSMSGDELTELLAGITGTEVDCLRACQEQIEAALRESLREASQTSSSPAPKAPRGSSSQGPSQTSTPTDVTAIHL

SEQ ID NO: 9449 - protein, 292 aa, Homo sapiens
MELLCCEGTRHAPRAGPDPRLLGDQRVLQSLLRLEERYVPRASYFQCVQREIKPHMRKMLAYWMLEVCEEQRCEEEVFPLAMNYLDRYLSCVPTRKAQLQLLGAVCMLLASKLRETTPLTIEKLCIYTDHAVSPRQLRDWEVLVLGKLKWDLAAVIAHDFLAFILHRLSLPRDRQALVKKHAQTFLALCATDYTFAMYPPSMIATGSIGAAVQGLGACSMSGDELTELLAGITGTEVDCLRACQEQIEAALRESLREASQTSSSPAPKAPRGSSSQGPSQTSTPTDVTAIHL

SEQ ID NO: 9450 - protein, 182 aa, Homo sapiens
AATMTAAGHHAEVVVDPEDERAIEMFMNKNPPARRTLADIIMEKLTEKQTEVETVMSEVSGFPMPQLDPRVLEVYRGVREVLSKYRSGKLPKAFKIIPALSNWEQILYVTEPEAWTAAAMYQATRIFASNLKERMAQRFYNLVLLPRVRDDVAEYKRLNFHLYMALKKALFKPGAWFKVAAL

SEQ ID NO: 9451 - protein, 235 aa, Homo sapiens
MSLYCGIACRRKFFWCYRLLSTYVTKTRYLFELKEDDDACKKAQQTGAFYLFHSLAPLLQTSAHQYLAPRHSLLELERLLGKFGQDAQRIEDSVLIGCSEQQEAWFALDLGLDSSFSISASLHKPEMETELKGSFIELRKALFQLNARDASLLSTAQALLRWHDAHQFCSRSGQPTKKNVAGSKRVCPSNNIIYYPQVKVWKRPSAEKLQKRWDWRWKACSTMHPSIGPSLVAHS

SEQ ID NO: 9452 - protein, 464 aa, Homo sapiens
MSDGNPELLSTSQTYNGQSENNEDYEIPPITPPNLPEPSLLHLGDHEASYHSLCHGLTPNGLLPAYSYQAMDLPAIMVSNMLAQDSHLLSGQLPTIQEMVHSEVAAYDSGRPGPLLGRPAMLASHMSALSQSQLISQMGIRSSIAHSSPSPPGSKSATPSPSSSTQEEESEVHFKISGEKRPSADPGKKAKNPKKKKKKDPNEPQKPVSAYALFFRDTQAAIKGQNPSATFGDVSKIVASMWDSLGEEQKQAYKRKTEAAKKEYLKALAAYRASLVSKSSPDQGETKSTQANPPAKMLPPKQPMYAMPGLASFLTPSDLQAFRSGASPASLARTLGSKSLLPGLSASPPPPPSFPLSPTLHQQLSLPPHAQGALLSPPVSMSPAPQPPVLPTPMALQVQLAMSPSPPGPQDFPHISEFPSSSGSCSPGPSNPTSSGDWDSSYPSGECGISTCSLLPRDKSLYLT

SEQ ID NO: 9453 - protein, 399 aa, Homo sapiens
MSLQYGAEETPLAGSYGAADSFPKDFGYGVEEEEEEAAAAGGGVGAGAGGGCGPGGADSSKPRILLMGLRRSGKSSIQKVVFHKMSPNETLFLESTNKIYKDDISNSSFVNFQIWDFPGQMDFFDPTFDYEMIFRGTGALIYVIDAQDDYMEALTRLHITVSKAYKVNPDMNFEVFIHKVDGLSDDHKIETQRDIHQRANDDLADAGLEKLHLSFYLTSIYDHSIFEAFSKVVQKLIPQLPTLENLLNIFISNSGIEKAFLFDVVSKIYIATDSSPVDMQSYELCCDMIDVVIDVSCIYGLKEDGSGSAYDKESMAIIKLNNTTVLYLKEVTKFLALVCILREESFERKGLIDYNFHCFRKAIHEVFEVGVTSHRSCGHQTSASSLKALTHNGTPRNAI

SEQ ID NO: 9454 - protein, 640 aa, Homo sapiens
MDRCKHVGRLRLAQDHSILNPQKWCCLECATTESVWACLKCSHVACGRYIEDHALKHFEETGHPLAMEVRDLYVFCYLCKDYVLNDNPEGDLKLLRSSLLAVRGQKQDTPVRRGRTLRSMASGEDVVLPQRAPQGQPQMLTALWYRRQRLLARTLRLWFEKSSRGQAKLEQRRQEEALERKKEEARRRRREVKRRLLEELASTPPRKSARLLLHTPRDAGPAASRPAALPTSRRVPAATLKLRRQPAMAPGVTGLRNLGNTCYMNSILQVLSHLQKFRECFLNLDPSKTEHLFPKATNGKTQLSGKPTNSSATELSLRNDRAEACEREGFCWNGRASISRSLELIQNKEPSSKHISLCRELHTLFRVMWSGKWALVSPFAMLHSVWSLIPAFRGYDQQDAQEFLCELLHKVQQELESEGTTRRILIPFSQRKLTKQVLKVVNTIFHGQLLSQVTCISCNYKSNTIEPFWDLSLEFPERYHCIEKGFVPLNQTECLLTEMLAKFTETEALEGRIYACDQCNSKRRKSNPKPLVLSEARKQLMIYRLPQVLRLHLKRFRWSGRNHREKIGVHVVFDQVLTMEPYCCRDMLSSLDKETFAYDLSAVVMHHGKGFGSGHYTAYCYNTEGGACALLCGVGDTERG

SEQ ID NO: 9455 - protein, 585 aa, Homo sapiens
MDRCKHVGRLRLAQDHSILNPQKWCCLECATTESVWACLKCSHVACGRYIEDHALKHFEETGHPLAMEVRDLYVFCYLCKDYVLNDNPEGDLKLLRSSLLAVRGQKQDTPVRRGRTLRSMASGEDVVLPQRAPQGQPQMLTALWYRRQRLLARTLRLWFEKSSRGQAKLEQRRQEEALERKKEEARRRRREVKRRLLEELASTPPRKSARLLLHTPRDAGPAASRPAALPTSRRVPAATLKLRRQPAMAPGVTGLRNLGNTCYMNSILQVLSHLQKFRECFLNLDPSKTEHLFPKATNGKTQLSGKPTNSSATELSLRNDRAEACEREGFCWNGRASISRSLELIQNKEPSSKHISLCRELHTLFRVMWSGKWALVSPFAMLHSVWSLIPAFRGYDQQDAQEFLCELLHKVQQELESEGTTRRILIPFSQRKLTKQVLKVVNTIFHGQLLSQVTCISCNYKSNTIEPFWDLSLEFPERYHCIEKGFVPLNQTECLLTEMLAKFTETEALEGRIYACDQCNSKRRKSNPKPLVLSEARKQLMIYRLPQVLRLHLKRFRWSGRNHREKIGVHVVFDQVFGSTAMTQS

SEQ ID NO: 9456 - protein, 319 aa, Homo sapiens
MDQSVAIQETLAEGEYCVIAVQGVLCEGDSRQSRLLGLVRYRLEHGGQEHALFLYTHRRMAITGDDVSLDQIVPVSRDFTLEEVSPDGELYILGSDVTVQLDTAELSLVFQLPFGSQTRMFLHEVARACPGFDSATRDPEFLWLSRYRCAELELEMPTPRGCNSALVTWPGYATIGGGRYPSRKKRWGLEEARPQGAGSVLFWGGAMEKTGFRLMERAHGGGFVWGRSARDGRRDEELEEAGREMSAAAGSRERNTAGSAGGGKLGWGAGPGAAVRPALGWAGSAVWPVDARGEDQSPGGPLEAGTLGQKFCDVLLRRA

SEQ ID NO: 9457 - protein, 993 aa, Homo sapiens
MDQSVAIQETLAEGEYCVIAVQGVLCEGDSRQSRLLGLVRYRLEHGGQEHALFLYTHRRMAITGDDVSLDQIVPVSRDFTLEEVSPDGELYILGSDVTVQLDTAELSLVFQLPFGSQTRMFLHEVARACPGFDSATRDPEFLWLSRYRCAELELEMPTPRGCNSALVTWPGYATIGGGRYPSRKKRWGLEEARPQGAGSVLFWGGAMEKTGFRLMERAHGGGFVWGRSARDGRRDEELEEAGREMSAAAGSRERNTAGGSNFDGLRPNGKGVPMDQSSRGQDKPESLQPRQNKSKSEITDMVRSSTITVSDKAHILSMQKFGLRDTIVKSHLLQKEEDYTYIQNFRFFAGTYNVNGQSPKECLRLWLSNGIQAPDVYCVGFQELDLSKEAFFFHDTPKEEEWFKAVSEGLHPDAKYAKVKLIRLVGIMLLLYVKQEHAAYISEVEAETVGTGIMGRMGNKGGVAIRFQFHNTSICVVNSHLAAHIEEYERRNQDYKDICSRMQFCQPDPSLPPLTISNHDVILWLGDLNYRIEELDVEKVKKLIEEKDFQMLYAYDQLKIQVAAKTVFEGFTEGELTFQPTYKYDTGSDDWDTSEKCRAPAWCDRILWKGKNITQLSYQSHMALKTSDHKPVSSVFDIGVRVVNDELYRKTLEEIVRSLDKMENANIPSVSLSKREFCFQNVKYMQLKVESFTIHNGQVPCHFEFINKPDEESYCKQWLNANPSRGFLLPDSDVEIDLELFVNKMTATKLNSGEDKIEDILVLHLDRGKDYFLSVSGNYLPSCFGSPIHTLCYMREPILDLPLETISELTLMPVWTGDDGSQLDSPMEIPKELWMMVDYLYRNAVQQEDLFQQPGLRSEFEHIRDCLDTGMIDNLSASNHSVAEALLLFLESLPEPVICYSTYHNCLECSGNYTASKQVISTLPIFHKNVFHYLMAFLRELLKNSAKNHLDENILASIFGSLLLRNPAGHQKLDMTEKKKAQEFIHQFLCNPL

SEQ ID NO: 9458 - protein, 913 aa, Homo sapiens
MDQSVAIQETLAEGEYCVIAVQGVLCEGDSRQSRLLGLVRYRLEHGGQEHALFLYTHRRMAITGDDVSLDQIVPVSRDFTLEEVSPDGELYILGSDVTVQLDTAELSLVFQLPFGSQTRMFLHEVARACPGFDSATRDPEFLWLSRYRCAELELEMPTPRGCNSALVTWPGYATIGGGGSNFDGLRPNGKGVPMDQSSRGQDKPESLQPRQNKSKSEITDMVRSSTITVSDKAHILSMQKFGLRDTIVKSHLLQKEEDYTYIQNFRFFAGTYNVNGQSPKECLRLWLSNGIQAPDVYCVGFQELDLSKEAFFFHDTPKEEEWFKAVSEGLHPDAKYAKVKLIRLVGIMLLLYVKQEHAAYISEVEAETVGTGIMGRMGNKGGVAIRFQFHNTSICVVNSHLAAHIEEYERRNQDYKDICSRMQFCQPDPSLPPLTISNHDVILWLGDLNYRIEELDVEKVKKLIEEKDFQMLYAYDQLKIQVAAKTVFEGFTEGELTFQPTYKYDTGSDDWDTSEKCRAPAWCDRILWKGKNITQLSYQSHMALKTSDHKPVSSVFDIGVRVVNDELYRKTLEEIVRSLDKMENANIPSVSLSKREFCFQNVKYMQLKVESFTIHNGQVPCHFEFINKPDEESYCKQWLNANPSRGFLLPDSDVEIDLELFVNKMTATKLNSGEDKIEDILVLHLDRGKDYFLSVSGNYLPSCFGSPIHTLCYMREPILDLPLETISELTLMPVWTGDDGSQLDSPMEIPKELWMMVDYLYRNAVQQEDLFQQPGLRSEFEHIRDCLDTGMIDNLSASNHSVAEALLLFLESLPEPVICYSTYHNCLECSGNYTASKQVISTLPIFHKNVFHYLMAFLRELLKNSAKNHLDENILASIFGSLLLRNPAGHQKLDMTEKKKAQEFIHQFLCNPL

SEQ ID NO: 9459 - protein, 749 aa, Homo sapiens
MSAAAGSRERNTAGGSNFDGLRPNGKGVPMDQSSRGQDKPESLQPRQNKSKSEITDMVRSSTITVSDKAHILSMQKFGLRDTIVKSHLLQKEEDYTYIQNFRFFAGTYNVNGQSPKECLRLWLSNGIQAPDVYCVGFQELDLSKEAFFFHDTPKEEEWFKAVSEGLHPDAKYAKVKLIRLVGIMLLLYVKQEHAAYISEVEAETVGTGIMGRMGNKGGVAIRFQFHNTSICVVNSHLAAHIEEYERRNQDYKDICSRMQFCQPDPSLPPLTISNHDVILWLGDLNYRIEELDVEKVKKLIEEKDFQMLYAYDQLKIQVAAKTVFEGFTEGELTFQPTYKYDTGSDDWDTSEKCRAPAWCDRILWKGKNITQLSYQSHMALKTSDHKPVSSVFDIGVRVVNDELYRKTLEEIVRSLDKMENANIPSVSLSKREFCFQNVKYMQLKVESFTIHNGQVPCHFEFINKPDEESYCKQWLNANPSRGFLLPDSDVEIDLELFVNKMTATKLNSGEDKIEDILVLHLDRGKDYFLSVSGNYLPSCFGSPIHTLCYMREPILDLPLETISELTLMPVWTGDDGSQLDSPMEIPKELWMMVDYLYRNAVQQEDLFQQPGLRSEFEHIRDCLDTGMIDNLSASNHSVAEALLLFLESLPEPVICYSTYHNCLECSGNYTASKQVISTLPIFHKNVFHYLMAFLRELLKNSAKNHLDENILASIFGSLLLRNPAGHQKLDMTEKKKAQEFIHQFLCNPL

SEQ ID NO: 9460 - protein, 437 aa, Homo sapiens
MEKELRSTILFNAYKKEIFTTNNGYKSMQKKLRSNWKIQSLKDEITSEKLNGVKLWITAGPREKFTAAEFEILKKYLDTGGDVFVMLGEGGESRFDTNINFLLEEYGIMVNNDAVVRNVYHKYFHPKEALVSSGVLNREISRAAGKAVPGIIDEESSGNNAQALTFVYPFGATLSVMKPAVAVLSTGSVCFPLNRPILAFYHSKNQGGKLAVLGSCHMFSDQYLDKEENSKIMDVVFQWLTTGDIHLNQIDAEDPEISDYMMLPYTATLSKRNRECLQESDEIPRDFTTLFDLSIFQLDTTSFHSVIEAHEQLNVKHEPLQLIQPQFETPLPTLQPAVFPPSFRELPPPPLELFDLDETFSSEKARLAQITNKCTEEDLEFYVRKCGDILGVTSKLPKDQQDAKHILEHVFFQVVEFKKLNQEHDIDTSETAFQNNF

SEQ ID NO: 9461 - protein, 1148 aa, Homo sapiens
MESLLLPVLLLLAILWTQAAALINLKYSVEEEQRAGTVIANVAKDAREAGFALDPRQASAFRVVSNSAPHLVDINPSSGLLVTKQKIDRDLLCRQSPKCIISLEVMSSSMEICVIKVEIKDLNDNAPSFPAAQIELEISEAASPGTRIPLDSAYDPDSGSFGVQTYELTPNELFGLEIKTRGDGSRFAELVVEKSLDRETQSHYSFRITALDGGDPPRLGTVGLSIKVTDSNDNNPVFSESTYAVSVPENSPPNTPVIRLNASDPDEGTNGQVVYSFYGYVNDRTRELFQIDPHSGLVTVTGALDYEEGHVYELDVQAKDLGPNSIPAHCKVTVSVLDTNDNPPVINLLSVNSELVEVSESAPPGYVIALVRVSDRDSGLNGRVQCRLLGNVPFRLQEYESFSTILVDGRLDREQHDQYNLTIQARDGGVPMLQSAKSFTVLITDENDNHPHFSKPYYQVIVQENNTPGAYLLSVSARDPDLGLNGSVSYQIVPSQVRDMPVFTYVSINPNSGDIYALRSFNHEQTKAFEFKVLAKDGGLPSLQSNATVRVIILDVNDNTPVITAPPLINGTAEVYIPRNSGIGYLVTVVKAEDYDEGENGRVTYDMTEGDRGFFEIDQVNGEVRTTRTFGESSKSSYELIVVAHDHGKTSLSASALVLIYLSPALDAQESMGSVNLSLIFIIALGSIAGILFVTMIFVAIKCKRDNKEIRTYNCSNCLTITCLLGCFIKGQNSKCLHCISVSPISEEQDKKTEEKVSLRGKRIAEYSYGHQKKSSKKKKISKNDIRLVPRDVEETDKMNVVSCSSLTSSLNYFDYHQQTLPLGCRRSESTFLNVENQNTRNTSANHIYHHSFNSQGPQQPDLIINGVPLPETENYSFDSNYVNSRAHLIKSSSTFKDLEGNSLKDSGHEESDQTDSEHDVQRSLYCDTAVNDVLNTSVTSMGSQMPDHDQNEGFHCREECRILGHSDRCWMPRNPMPIRSKSPEHVRNIIALSIEATAADVEAYDDCGPTKRTFATFGKDVSDHPAEERPTLKGKRTVDVTICSPKVNSVIREAGNGCEAISPVTSPLHLKSSLPTKPSVSYTIALAPPARDLEQYVNNVNNGPTRPSEAEPRGADSEKVMHEVSPILKEGRNKESPGVKRLKDIVL

SEQ ID NO: 9462 - protein, 1008 aa, Homo sapiens
METCAGPHPLRLFLCRMQLCLALLLGPWRPGTAEEVILLDSKASQAELGWTALPSNGWEEISGVDEHDRPIRTYQVCNVLEPNQDNWLQTGWISRGRGQRIFVELQFTLRDCSSIPGAAGTCKETFNVYYLETEADLGRGRPRLGGSRPRKIDTIAADESFTQGDLGERKMKLNTEVREIGPLSRRGFHLAFQDVGACVALVSVRVYYKQCRATVRGLATFPATAAESAFSTLVEVAGTCVAHSEGEPGSPPRMHCGADGEWLVPVGRCSCSAGFQERGDFCEACPPGFYKVSPRRPLCSPCPEHSRALENASTFCVCQDSYARSPTDPPSASCTRPPSAPRDLQYSLSRSPLVLRLRWLPPADSGGRSDVTYSLLCLRCGREGPAGACEPCGPRVAFLPRQAGLRERAATLLHLRPGARYTVRVAALNGVSGPAAAAGTTYAQVTVSTGPGAPWEEDEIRRDRVEPQSVSLSWREPIPAGAPGANDTEYEIRYYEKGQSEQTYSMVKTGAPTVTVTNLKPATRYVFQIRAASPGPSWEAQSFNPSIEVQTLGEAASGSRDQSPAIVVTVVTISALLVLGSVMSVLAIWRRPCSYGKGGGDAHDEEELYFHFKVPTRRTFLDPQSCGDLLQAVHLFAKELDAKSVTLERSLGGGRFGELCCGCLQLPGRQELLVAVHMLRDSASDSQRLGFLAEALTLGQFDHSHIVRLEGVVTRGSTLMIVTEYMSHGALDGFLRRHEGQLVAGQLMGLLPGLASAMKYLSEMGYVHRGLAARHVLVSSDLVCKISGFGRGPRDRSEAVYTTMSGRSPALWAAPETLQFGHFSSASDVWSFGIIMWEVMAFGERPYWDMSGQDVIKAVEDGFRLPPPRNCPNLLHRLMLDCWQKDPGERPRFSQIHSILSKMVQDPEPPKCALTTCPRPPTPLADRAFSTFPSFGSVGAWLEALDLCRYKDSFAAAGYGSLEAVAEMTAQDLVSLGISLAEHREALLSGISALQARVLQLQGQGVQV

SEQ ID NO: 9463 - protein, 1096 aa, Homo sapiens
MEQPGAAASGAGGGSEEPGGGRSNKRSAGNRAANEEETKNKPKLNIQIKTLADDVRDRITSFRKSTVKKEKPLIQHPIDSQVAMSEFPAAQPLYDERSLNLSEKEVLDLFEKMMEDMNLNEEKKAPLRNKDFTTKREMVVQYISATAKSGGLKNSKHECTLSSQEYVHELRSGISDEKLLNCLESLRVSLTSNPVSWVNNFGHEGLGLLLDELEKLLDKKQQENIDKKNQYKLIQCLKAFMNNKFGLQRILGDERSLLLLARAIDPKQPNMMTEIVKILSAICIVGEENILDKLLGAITTAAERNNRERFSPIVEGLENQEALQLQVACMQFINALVTSPYELDFRIHLRNEFLRSGLKTMLPDLKEKENDELDIQLKVFDENKEDDLTELSHRLNDIRAEMDDMNEVYHLLYNMLKDTAAENYFLSILQHFLLIRNDYYIRPQYYKIIEECVSQIVLHCSGMDPDFKYRQRLDIDLTHLIDSCVNKAKVEESEQKAAEFSKKFDEEFTARQEAQAELQKRDEKIKELEAEIQQLRTQAQVLSSSSGIPGPPAAPPLPGVGPPPPPPAPPLPGGAPLPPPPPPLPGMMGIPPPPPPPLLFGGPPPPPPLGGVPPPPGISLNLPYGMKQKKMYKPEVSMKRINWSKIEPTELSENCFWLRVKEDKFENPDLFAKLALNFATQIKVQKNAEALEEKKTGPTKKKVKELRILDPKTAQNLSIFLGSYRMPYEDIRNVILEVNEDMLSEALIQNLVKHLPEQKILNELAELKNEYDDLCEPEQFGVVMSSVKMLQPRLSSILFKLTFEEHINNIKPSIIAVTLACEELKKSESFNRLLELVLLVGNYMNSGSRNAQSLGFKINFLCKIRDTKSADQKTTLLHFIADICEEKYRDILKFPEELEHVESASKVSAQILKSNLASMEQQIVHLERDIKKFPQAENQHDKFVEKMTSFTKTAREQYEKLSTMHNNMMKLYENLGEYFIFDSKTVSIEEFFGDLNNFRTLFLEAVRENNKRREMEEKTRRAKLAKEKAEQEKLERQKKKKQLIDINKEGDETGVMDNLLEALQSGAAFRDRRKRIPRNPVVNHPCATRANPRSAT

SEQ ID NO: 9464 - protein, 351 aa, Homo sapiens
MAAAAGRSLLLLLSSRGGGGGGAGGCGALTAGCFPGLGVSRHRQQQHHRTVHQRIASWQNLGAVYCSTVVPSDDVTVVYQNGLPVISVRLPSRRERCQFTLKPISDSVGVFLRQLQEEDRGIDRVAIYSPDGVRVAASTGIDLLLLDDFKLVINDLTYHVRPPKRDLLSHENAATLNDVKTLVQQLYTTLCIEQHQLNKERELIERLEDLKEQLAPLEKVRIEISRKAEKRTTLVLWGGLAYMATQFGILARLTWWEYSWDIMEPVTYFITYGSAMAMYAYFVMTRQEYVYPEARDRQYLLFFHKGAKKSRFDLEKYNQLKDAIAQAEMDLKRLRDPLQVHLPLRQIGEKD

SEQ ID NO: 9465 - protein, 1103 aa, Homo sapiens [sequence omitted]

SEQ ID NO: 9466 - protein, 678 aa, Homo sapiens
MMVESASETIRSAPSGQNGVGSLSGQADGSSGGATGTTASGTGREVTTGADSNGEMSPAELLHFQQQQALQVARQFLLQQASGLSSPGNNDSKQSASAVQVPVSVAMMSPQMLTPQQMQQILSPPQLQALLQQQQALMLQQEYYKKQQEQLHLQLLTQQQAGKPQPKEALGNKQLAFQQQLLQMQQLQQQHLLNLQRQGLVSLQPNQASGPLQTLPQAAVCPTDLPQLWKGEGAPGQPAEDSVKQEGLDLTGTAATATSFAAPPKVSPPLSHHTLPNGQPTVLTSRRDSSSHEETPGSHPLYGHGECKWPGCETLCEDLGQFIKHLNTEHALDDRSTAQCRVQMQVVQQLEIQLAKESERLQAMMAHLHMRPSEPKPFSQPLNPVPGSSSFSKVTVSAADSFPDGLVHPPTSAAAPVTPLRPPGLGSASLHGGGPARRRSSDKFCSPISSELAQNHEFYKNADVRPPFTYASLIRQAILETPDRQLTLNEIYNWFTRMFAYFRRNTATWKNAVRHNLSLHKCFVRVENVKGAVWTVDEREYQKRRPPKMTGSPTLVKNMISGLSYGALNASYQAALAESSFPLLNSPGMLNPGSASSLLPLSHDDVGAPVEPLPSNGSSSPPRLSPPQYSHQVQVKEEPAEAEEDRQPGPPLGAPNPSASGPPEDRDLEEELPGEELS

SEQ ID NO: 9467 - protein, 1101 aa, Homo sapiens [sequence omitted]

SEQ ID NO: 9468 - protein, 731 aa, Homo sapiens
MVKPKYKGRSTINPSKASTNPDRVQGAGGQNMRDRATIRRLNMYRQKERRNSRGKIIKPLQYQSTVASGTVARVEPNIKWFGNTRVIKQSSLQKFQEEMDTVMKDPYKVVMKQSKLPMSLLHDRIRPHNLKVHILDTESFETTFGPKSQRKRPNLFASDMQSLIENAEMSTESYDQGKDRDLVTEDTGVRNEAQEEIYKKGQSKRIWGELYKVIDSSDVVVQVLDARDPMGTRSPHIETYLKKEKPWKHLIFVLNKCDLVPTWATKRWVAVLSQDYPTLAFHASLTNPFGKGAFIQLLRQFGKLHTDKKQISVGFIGYPNVGKSSVINTLRSKKVCNVAPIAGETKVWQYITLMRRIFLIDCPGVVYPSEDSETDIVLKGVVQVEKIKSPEDHIGAVLERAKPEYISKTYKIDSWENAEDFLEKLAFRTGKLLKGGEPDLQTVGKMVLNDWQRGRIPFFVKPPNAEPLVAPQLLPSSSLEVVPEAAQNNPGEEVTETAGEGSESIIKEETEENSHCDANTEMQQILTRVRQNFGKINVVPQFSGDDLVPVEVSDLEEELESFSDEEEEEQEQQRDDAEESSSEPEEENVGNDTKAVIKALDEKIAKYQKFLDKAKAKKFSAVRISKGLSEKIFAKPEEQRKTLEEDVDDRAPSKKGKKRKAQREEEQEHSNKAPRALTSKERRRAVRQQRPKKVGVRYYETHNVKNRNRNKKKTNDSEGQKHKRKKFRQKQ

SEQ ID NO: 9469 - protein, 667 aa, Homo sapiens
MMVESASETIRSAPSGQNGVGSLSGQADGSSGGATGTTASGTGREVTTGADSNGEMSPAELLHFQQQQALQVARQFLLQQASGLSSPGNNDSKQSASAVQVPVSVAMMSPQMLTPQQMQQILSPPQLQALLQQQQALMLQQLQEYYKKQQEQLHLQLLTQQQAGKPQPKEALGNKQLAFQQQLLQMQQLQQQHLLNLQRQGLVSLQPNQASGPLQTLPQAVCPTDLPQLWKGEGAPGQPAEDSVKQEGLDLTGTAATATSFAAPPKVSPPLSHHTLPNGQPTVLTSRRDSSSHEETPGSHPLYGHGECKWPGCETLCEDLGQFIKHLNTEHALDDRSTAQCRVQMQVVQQLEIQLAKESERLQAMMAHLHMRPSEPKPFSQPVTVSAADSFPDGLVHPPTSAAAPVTPLRPPGLGSASLHGGGPARRRSSDKFCSPISSELAQNHEFYKNADVRPPFTYASLIRQAILETPDRQLTLNEIYNWFTRMFAYFRRNTATWKNAVRHNLSLHKCFVRVENVKGAVWTVDEREYQKRRPPKMTGSPTLVKNMISGLSYGALNASYQAALAESSFPLLNSPGMLNPGSASSLLPLSHDDVGAPVEPLPSNGSSSPPRLSPPQYSHQVQVKEEPAEAEEDRQPGPPLGAPNPSASGPPEDRDLEEELPGEELS

SEQ ID NO: 9470 - protein, 358 aa, Homo sapiens
MNSSPAGTPSPQPSRANGNINLGPSANPNAQPTDFDFLKVIGKGNYGKVLLAKRKSDGAFYAVKVLQKKSILKKKEQSHIMAERSVLLKNVRHPFLVGLRYSFQTPEKLYFVLDYVNGGELFFHLQRERRFLEPRARFYAAEVASAIGYLHSLNIIYRDLKPENILLDCQGHVVLTDFGLCKEGVEPEDTTSTFCGTPEYLAPEVLRKEPYDRAVDWWCLGAVLYEMLHGLPPFYSQDVSQMYENILHQPLQIPGGRTVAACDLLQSLLHKDQRQRLGSKADFLEIKNHVFFSPINWDDLYHKRLTPPFNPNVDTLGPGTRKASFRWDFKKTVKIMSNLYPGERTIHGILGRDEWTLE

SEQ ID NO: 9471 - protein, 506 aa, Homo sapiens
MAEADFKMVSEPVAHGVAEEEMASSTSDSGEESDSSSSSSSTSDSSSSSSTSGSSSGSGSSSSSSGSTSSRSRLYRKKRVPEPSRRARRAPLGTNFVDRLPQAVRNRVQALRNIQDECDKVDTLFLKAIHDLERKYAELNKPLYDRRFQIINAEYEPTEEECEWNSEDEEFSSDEEVQDNTPSEMPPLEGEEEENPKENPEVKAEEKEVPKEIPEVKDEEKEVPKEIPEVKAEEKADSKDCMEATPEVKEDPKEVPQVKADDKEQPKATEAKARAAVRETHKRVPEERLQDSVDLKRARKGKPKREDPKGIPDYWLIVLKNVDKLGPMIQKYDEPILKFLSDVSLKFSKPGQPVSYTFEFHFLPNPYFRNEVLVKTYIIKAKPDHNDPFFSWGWEIEDCKGCKIDWRRGKDVTVTTTQSRTTATGEIEIQPRVVPNASFFNFFSPPEIPMIGKLEPREDAILDEDFEIGQILHDNVILKSIYYYTGEVNGTYYQFGKHYGNKKYRK

SEQ ID NO: 9472 - protein, 599 aa, Homo sapiens
MSGPCGEKPVLEASPTMSLWEFEDSHSRQGTPRPGQELAAEEASALELQMKVDFFRKLGYSSTEIHSVLQKLGVQADTNTVLGELVKHGTATERERQTSPDPCPQLPLVPRGGGTPKAPNLEPPLPEEEKEGSDLRPVVIDGSNVAMSHGNKEVFSCRGILLAVNWFLERGHTDITVFVPSWRKEQPRPDVPITDQHILRELEKKKILVFTPSRRVGGKRVVCYDDRFIVKLAYESDGIVVSNDTYRDLQGERQEWKRFIEERLLMYSFVNDKFMPPDDPLGRHGPSLDNFLRKKPLTLEHRKQPCPYGRKCTYGIKCRFFHPERPSCPQRSVADELRANALLSPPRAPSKDKNGRRPSPSSQSSSLLTESEQCSLDGKKLGAQASPGSRQEGLTQTYAPSGRSLAPSGGSGSSFGPTDWLPQTLDSLPYVSQDCLDSGIGSLESQMSELWGVRGGGPGEPGPPRAPYTGYSPYGSELPATAAFSAFGRAMGAGHFSVPADYPPAPPAFPPREYWSEPYPLPPPTSVLQEPPVQSPGAGRSPWGRAGSLAKEQASVYTKLCGVFPPHLVEAVMGRFPQLLDPQQLAAEILSYKSQHPSE

SEQ ID NO: 9473 - protein, 919 aa, Homo sapiens [sequence omitted]

SEQ ID NO: 9474 - protein, 872 aa, Homo sapiens
MTAPWRRLRSLVWEYWAGLLVCAFWIPDSRGMPHVIRIGGIFEYADGPNAQVMNAEEHAFRFSANIINRNRTLLPNTTLTYDIQRIHFHDSFEATKKACDQLALGVVAIFGPSQGSCTNAVQSICNALEVPHIQLRWKHHPLDNKDTFYVNLYPDYASLSHAILDLVQYLKWRSATVVYDDSTGLIRLQELIMAPSRYNIRLKIRQLPIDSDDSRPLLKEMKRGREFRIIFDCSHTMAAQILKQAMAMGMMTEYYHFIFTTLDLYALDLEPYRYSGVNLTGFRILNVDNPHVSAIVEKWSMERLQAAPRSESGLLDGVMMTDAALLYDAVHIVSVCYQRAPQMTVNSLQCHRHKAWRFGGRFMNFIKEAQWEGLTGRIVFNKTSGLRTDFDLDIISLKEDGLEKVGVWSPADGLNITEVAKGRGPNVTDSLTNRSLIVTTVLEEPFVMFRKSDRTLYGNDRFEGYCIDLLKELAHILGFSYEIRLVEDGKYGAQDDKGQWNGMVKELIDHKADLAVAPLTITHVREKAIDFSKPFMTLGVSILYRKPNGTNPSVFSFLNPLSPDIWMYVLLAYLGVSCVLFVIARFSPYEWYDAHPCNPGSEVVENNFTLLNSFWFGMGSLMQQGSELMPKALSTRIIGGIWWFFTLIIISSYTANLAAFLTVERMESPIDSADDLAKQTKIEYGAVKDGATMTFFKKSKISTFEKMWAFMSSKPSALVKNNEEGIQRALTADYALLMESTTIEYVTQRNCNLTQIGGLIDSKGYGIGTPMGSPYRDKITIAILQLQEEDKLHIMKEKWWRGSGCPEEENKEASALGIQKIGGIFIVLAAGLVLSVLVAVGEFVYKLRKTAEREQVSLRAWSLHRMGNGDSR

SEQ ID NO: 9475 - protein, 367 aa, Homo sapiens
MNSSPAGTPSPQPSRANGNINLGPSANPNAQPTDFDFLKVIGKGNYGKVLLAKRKSDGAFYAVKVLQKKSILKKKEQSHIMAERSVLLKNVRHPFLVGLRYSFQTPEKLYFVLDYVNGGELFFHLQRERRFLEPRARFYAAEVASAIGYLHSLNIIYRDLKPENILLDCQGHVVLTDFGLCKEGVEPEDTTSTFCGTPEYLAPEVLRKEPYDRAVDWWCLGAVLYEMLHGLPPFYSQDVSQMYENILHQPLQIPGGRTVAACDLLQSLLHKDQRQRLGSKADFLEIKNHVFFSPINWDDLYHKRLTPPFNPNVTGPADLKHFDPEFTQEAVSKSIGCTPDTVASSSGASSAFLGFSYAPEDDDILDC

SEQ ID NO: 9476 - protein, 863 aa, Homo sapiens
MARLGNCSLTWAALIILLLPGSLEECGHISVSAPIVHLGDPITASCIIKQNCSHLDPEPQILWRLGAELQPGGRQQRLSDGTQESIITLPHLNHTQAFLSCCLNWGNSLQILDQVELRAGYPPAIPHNLSCLMNLTTSSLICQWEPGPETHLPTSFTLKSFKSRGNCQTQGDSILDCVPKDGQSHCCIPRKHLLLYQNMGIWVQAENALGTSMSPQLCLDPMDVVKLEPPMLRTMDPSPEAAPPQAGCLQLCWEPWQPGLHINQKCELRHKPQRGEASWALVGPLPLEALQYELCGLLPATAYTLQIRCIRWPLPGHWSDWSPSLELRTTERAPTVRLDTWWRQRQLDPRTVQLFWKPVPLEEDSGRIQGYVVSWRPSGQAGAILPLCNTTELSCTFHLPSEAQEVALVAYNSAGTSRPTPVVFSESRGPALTRLHAMARDPHSLWVGWEPPNPWPQGYVIEWGLGPPSASNSNKTWRMEQNGRATGFLLKENIRPFQLYEIIVTPLYQDTMGPSQHVYAYSQEMAPSHAPELHLKHIGKTWAQLEWVPEPPELGKSPLTHYTIFWTNAQNQSFSAILNASSRGFVLHGLEPASLYHIHLMAASQAGATNSTVLTLMTLTPEGSELHIILGLFGLLLLLTCLCGTAWLCCSPNRKNPLWPSVPDPAHSSLGSWVPTIMEELPGPRQGQWLGQTSEMSRALTPHPCVQDAFQLPGLGTPPITKLTVLEEDEKKPVPWESHNSSETCGLPTLVQTYVLQGDPRAVSTQPQSQSGTSDQVLYGQLLGSPTSPGPGHYLRCDSTQPLLAGLTPSPKSYENLWFQASPLGTLVTPAPSQEDDCVFGPLLNFPLLQGIRVHGMEALGSF

SEQ ID NO: 9477 - protein, 230 aa, Homo sapiens
MEPLRLLILLFVTELSGAHNTTVFQGVAGQSLQVSCPYDSMKHWGRRKAWCRQLGEKGPCQRVVSTHNLWLLSFLRRWNGSTAITDDTLGGTLTITLRNLQPHDAGLYQCQSLHGSEADTLRKVLVEVLADPLDHRDAGDLWFPGESESFEDAHVEHSISRSLLEGEIPFPPTSILLLLACIFLIKILAASALWAAAWHGQKPGTHPPSELDCGHDPGYQLQTLPGLRDT

SEQ ID NO: 9478 - protein, 720 aa, Homo sapiens
MSVSGKKEFDVKQILRLRWRWFSHPFQGSTNTGSCLQQEGYEHRGTPVQGRLKSHSRDRNGLKKSNSPVHHNILAPVPGPAPAHQRAVQNLQQHNLIVHFQANEDTPKSVPEKNLFKEACEKRAQDLEMMADDNIEDSTARLDTQHSEDMNATRSEEQFHVINHAEQTLRKMENYLKEKQLCDVLLIAGHLRIPAHRLVLSAVSDYFAAMFTNDVLEAKQEEVRMEGVDPNALNSLVQYAYTGVLQLKEDTIESLLAAACLLQLTQVIDVCSNFLIKQLHPSNCLGIRSFGDAQGCTELLNVAHKYTMEHFIEVIKNQEFLLLPANEISKLLCSDDINVPDEETIFHALMQWVGHDVQNRQGELGMLLSYIRLPLLPPQLLADLETSSMFTGDLECQKLLMEAMKYHLLPERRSMMQSPRTKPRKSTVGALYAVGGMDAMKGTTTIEKYDLRTNSWLHIGTMNGRRLQFGVAVIDNKLYVVGGRDGLKTLNTVECFNPVGKIWTVMPPMSTHRHGLGVATLEGPMYAVGGHDGWSYLNTVERWDPEGRQWNYVASMSTPRSTVGVVALNNKLYAIGGRDGSSCLKSMEYFDPHTNKWSLCAPMSKRRGGVGVATYNGFLYVVGGHDAPASNHCSRLSDCVERYDPKGDSWSTVAPLSVPRDAVAVCPLGDKLYVVGGYDGHTYLNTVESYDAQRNEWKESMQELLQNFYTTQKLKETLGH

SEQ ID NO: 9479 - protein, 479 aa, Homo sapiens
MEKGLTLPQDCRDFVHSLKMRSKYALFLVFVVIVFVFIEKENKIISRVSDKLKQIPQALADANSTDPALILAENASLLSLSELDSAFSQLQSRLRNLSLQLGVEPAMEAAGEEEEEQRKEEEPPRPAVAGPRRHVLLMATTRTGSSFVGEFFNQQGNIFYLFEPLWHIERTVSFEPGGANAAGSALVYRDVLKQLFLCDLYVLEHFITPLPEDHLTQFMFRRGSSRSLCEDPVCTPFVKKVFEKYHCKNRRCGPLNVTLAAEACRRKEHMALKAVRIRQLEFLQPLAEDPRLDLRVIQLVRDPRAVLASRMVAFAGKYKTWKKWLDDEGQDGLREEEVQRLRGNCESIRLSAELGLRQPAWLRGRYMLVRYEDVARGPLQKAREMYRFAGIPLTPQVEDWIQKNTQAAHDGSGIYSTQKNSSEQFEKWRFSMPFKLAQVVQAACGPAMRLFGYKLARDAAALTNRSVSLLEERGTFWVT

SEQ ID NO: 9480 - protein, 257 aa, Homo sapiens
MLRVAWRTLSLIRTRAVTQVLVPGLPGGGSAKFPFNQWGLQPRSLLLQAARGYVVRKPAQSRLDDDPPPSTLLKDYQNVPGIEKVDDVVKRLLSLEMANKKEMLKIKQEQFMKKIVANPEDTRSLEARIIALSVKIRSYEEHLEKHRKDKAHKRYLLMSIDQRKKMLKNLRNTNYDVFEKICWGLGIEYTFPPLYYRRAHRRFVTKKALCIRVFQETQKLKKRRRALKAAAAAQKQAKRRNPDSPAKAIPKTLKDSQ

SEQ ID NO: 9481 - protein, 718 aa, Homo sapiens
MSVSGKKEFDVKQILRLRWRWFSHPFQGSTNTGSCLQQEGYEHRGTPVQGRLKSHSRDRNGLKKSNSPVHHNILAPVPGPAPAHQRAVQNLQQHNLIVHFQANEDTPKSVPEKNLFKEACEKRAQDLEMMADDNIEDSTARLDTQHSEDMNATRSEEQFHVINHAEQTLRKMENYLKEKQLCDVLLIAGHLRIPAHRLVLSAVSDYFAAMFTNDVLEAKQEEVRMEGVDPNALNSLVQYAYTGVLQLKEDTIESLLAAACLLQLTQVIDVCSNFLIKQLHPSNCLGIRSFGDAQGCTELLNVAHKYTMEHFIEVIKNQEFLLLPANEISKLLCSDDINVPDEETIFHALMQWVGHDVQNRQGELGMLLSYIRLPLLPPQLLADLETSSMFTGDLECQKLLMEAMKYHLLPERRSMMQSPRTKPRKSTVGALYAVGGMDAMKGTTTIEKYDLRTNSWLHIGTMNGRRLQFGVAVIDNKLYVVGGRDGLKTLNTVECFNPVGKIWTVMPPMSTHRHGLGVATLEGPMYAVGGHDGWSYLNTVERWDPEGRQWNYVASMSTPRSTVGVVALNNKLYAIGGRDGSSCLKSMEYFDPHTNKWSLCAPMSKRRGGVGVATYNGFLYVVGGHDAPASNHCSRLSDCVERYDPKGDSWSTVAPLSVPRDAVAVCPLGDKLYVVGGYDGHTYLNTVESYDAQRNEWKEEVPVNIGRAGACVVVVKLP

SEQ ID NO: 9482 - protein, 222 aa, Homo sapiens
MEPLRLLILLFVTELSGAHNTTVFQGVAGQSLQVSCPYDSMKHWGRRKAWCRQLGEKGPCQRVVSTHNLWLLSFLRRWNGSTAITDDTLGGTLTITLRNLQPHDAGLYQCQSLHGSEADTLRKVLVEVLADPLDHRDAGDLWFPGESESFEDAHVEHSISRPSQGSHLPSCLSKEPLGRRNPLPTHFHPSPPGLHLSHQDSSSQRPLGCSLAWTEARDTSTQ

SEQ ID NO: 9483 - protein, 599 aa, Homo sapiens
MAVSASPVISATSSGAGVPGGLFRAEPLYSTPREPPRLTPNMINSFVVNNHSNSAGGGGRGNTNTNECRMVDMHGMKVASFLMDGQELICLPQVFDLFLKHLVGGLHTVYTKLKRLDISPVVCTVEQVRILRGLGAIQPGVNRCKLITRKDFETLFTDCTNARRKRQMTRKQAVNSSRPGRPPKRSLGVLQENARLLTHAVPGLLSPGLITPTGITAAAMAEAMKLQKMKLMAMNTLQGNGSQNGTESEPDDLNSNTGGSESSWDKDKMQSPFAAPGPQHGIAHAALAGQPGIGGAPTLNPLQQNHLLTNRLDLPFMMMPHPLLPVSLPPASVAMAMNQMNHLNTIANMAAAAQIHSPLSRAGTSVIKERIPESPSPAPSLEENHRPGSQTSSHTSSSVSSSPSQMDHHLERMEEVPVQIPIMKSPLDKIQLTPGQALPAGFPGPFIFADSLSSVETLLTNIQGLLKVALDNARIQEKQIQQEKKELRLELYREREIRENLERQLAVELQSRTTMQKRLKKEKKTKRKLQEALEFESKRREQVEQALKQATTSDSGLRMLKDTGIPDIEIENNGTPHDSAAMQGGNYYCLEMAQQLYSA

SEQ ID NO: 9484 - protein, 571 aa, Homo sapiens
MAVSASPVISATSSGAGVPGGLFRAEPLYSTPREPPRLTPNMINSFVVNNHSNSAGGGGRGNTNTNECRMVDMHGMKVASFLMDGQELICLPQVFDLFLKHLVGGLHTVYTKLKRLDISPVVCTVEQVRILRGLGAIQPGVNRCKLITRKDFETLFTDCTNASSRPGRPPKRSLGVLQENARLLTHAVPGLLSPGLITPTGITAAAMAEAMKLQKMKLMAMNTLQGNGSQNGTESEPDDLNSNTGGSESSWDKDKMQSPFAAPGPQHGIAHAALAGQPGIGGAPTLNPLQQNHLLTNRLDLPFMMMPHPLLPVSLPPASVAMAMNQMNHLNTIANMAAAAQIHSPLSRAGTSVIKERIPESPSPAPSLEENHRPGSQTSSHTSSSVSSSPSQMDHHLERMEEVPVQIPIMKSPLDKIQLTPGQALPAGFPGPFIFADSLSSVETLLTNIQGLLKVALDNARIQEKQIQQEKKELRLELYREREIRENLERQLAVELQSRTTMQKRLKKEKKTKRKLQEALEFESKRREQVEQALKQATTSDSGLRMLKDTGIPDIEIENNGTPHDSAAMQA

SEQ ID NO: 9485 - protein, 743 aa, Homo sapiens
MRRREGHGTDSEMGQGPVRESQSSDPPALQFRISEYKPLNMAGVEQPPSPELRQEGVTEYEDGGAPAGDGEAGPQQAEDHPQNPPEDPNQDPPEDDSTCQCQACGPHQAAGPDLGSSNDGCPQLFQERSVIVENSSGSTSASELLKPMKKRKRREYQSPSEEESEPEAMEKQEEGKDPEGQPTASTPESEEWSSSQPATGEKKECWSWESYLEEQKAITAPVSLFQDSQAVTHNKNGFKLGMKLEGIDPQHPSMYFILTVAEVCGYRLRLHFDGYSECHDFWVNANSPDIHPAGWFEKTGHKLQPPKGYKEEEFSWSQYLRSTRAQAAPKHLFVSQSHSPPPLGFQVGMKLEAVDRMNPSLVCVASVTDVVDSRFLVHFDNWDDTYDYWCDPSSPYIHPVGWCQKQGKPLTPPQDYPDPDNFCWEKYLEETGASAVPTWAFKVRPPHSFLVNMKLEAVDRRNPALIRVASVEDVEDHRIKIHFDGWSHGYDFWIDADHPDIHPAGWCSKTGHPLQPPLGPREPSSASPGGCPPLSYRSLPHTRTSKYSFHHRLFFPRKCPTPGCDGSGHVTGKFTAHHCLSGCPLAERNQSRLKAELSDSEASARKKNLSGFSPRKKPRHHGRIGRPPKYRKIPQEDFQTLTPDVVHQSLFMSALSAHPDRSLSVCWEQHCKLLPGVAGISASTVAKWTIDEVFGFVQTLTGCEDQARLFKDEVRCKCRVGDRAGVTVLKTAGSRCPPQRHFC

SEQ ID NO: 9486 - protein, 772 aa, Homo sapiens
MRRREGHGTDSEMGQGPVRESQSSDPPALQFRISEYKPLNMAGVEQPPSPELRQEGVTEYEDGGAPAGDGEAGPQQAEDHPQNPPEDPNQDPPEDDSTCQCQACGPHQAAGPDLGSSNDGCPQLFQERSVIVENSSGSTSASELLKPMKKRKRREYQSPSEEESEPEAMEKQEEGKDPEGQPTASTPESEEWSSSQPATGEKKECWSWESYLEEQKAITAPVSLFQDSQAVTHNKNGFKLGMKLEGIDPQHPSMYFILTVAEVCGYRLRLHFDGYSECHDFWVNANSPDIHPAGWFEKTGHKLQPPKGYKEEEFSWSQYLRSTRAQAAPKHLFVSQSHSPPPLGFQVGMKLEAVDRMNPSLVCVASVTDVVDSRFLVHFDNWDDTYDYWCDPSSPYIHPVGWCQKQGKPLTPPQDYPDPDNFCWEKYLEETGASAVPTWAFKVRPPHSFLVNMKLEAVDRRNPALIRVASVEDVEDHRIKIHFDGWSHGYDFWIDADHPDIHPAGWCSKTGHPLQPPLGPREPSSASPGGCPPLSYRSLPHTRTSKYSFHHRKCPTPGCDGSGHVTGKFTAHHCLSGCPLAERNQSRLKAELSDSEASARKKNLSGFSPRKKPRHHGRIGRPPKYRKIPQEDFQTLTPDVVHQSLFMSALSAHPDRSLSVCWEQHCKLLPGVAGISASTVAKWTIDEVFGFVQTLTGCEDQARLFKDEARIVRVTHVSGKTLVWTVAQLGDLVCSDHLQEGKGILETGVHSLLCSLPTHLLAKLSFASDSQY

SEQ ID NO: 9487 - protein, 299 aa, Homo sapiens
MSSNKEQRSAVFVILFALITILILYSSNSANEVFHYGSLRGRSRRPVNLKKWSITDGYVPILGNKTLPSRCHQCVIVSSSSHLLGTKLGPEIERAECTIRMNDAPTTGYSADVGNKTTYRVVAHSSVFRVLRRPQEFVNRTPETVFIFWGPPSKMQKPQGSLVRVIQRAGLVFPNMEAYAVSPGRMRQFDDLFRGETGKDREKSHSWLSTGWFTMVIAVELCDHVHVYGMVPPNYCSQRPRLQRMPYHYYEPKGPDECVTYIQNEHSRKGNHHRFITEKRVFSSWAQLYGITFSHPSWT

SEQ ID NO: 9488 - protein, 374 aa, Homo sapiens
MACSRPPSQCEPTSLPPGPPAGRRHLPLSRRRREMSSNKEQRSAVFVILFALITILILYSSNSANEVFHYGSLRGRSRRPVNLKKWSITDGYVPILGNKTLPSRCHQCVIVSSSSHLLGTKLGPEIERAECTIRMNDAPTTGYSADVGNKTTYRVVAHSSVFRVLRRPQEFVNRTPETVFIFWGPPSKMQKPQGSLVRVIQRAGLVFPNMEAYAVSPGRMRQFDDLFRGETGKDREKSHSWLSTGWFTMVIAVELCDHVHVYGMVPPNYCSGPASSACPTTTTSPRGRTNVSPTSRMSTVARATTTASSPRKGSSHRGPSCMASPSPTPPGPRPPSLWDLRRVRGEAASAQPLGQGPSSGQSRLAGVSPSQSGP

SEQ ID NO: 9489 - protein, 595 aa, Homo sapiens
MSSSYWSETSSSSCGTQQLPEVLQCQPQHYHCYHQSSQAQQPPEKNVVYERVRTYSGPMNKVVQALDPFNSREVLSPLKTTSSYQNLVWSDHSQELHSPTLKISTCAPSTLHITQNTEQELHSPTVKLTTYPQTTIRKYVVQNPEQEPLSQFLRGSHFFPGNNVIYEKTIRKVEKLNTDQGCHPQAQCHHHIIQQPQVIHSAHWQQPDSSQQIQAITGNNPISTHIGNELCHSGSSQICEQVIIQDDGPEKLDPRYFGELLADLSRKNTDLYHCLLEHLQRIGGSKQDFESTDESEDIESLIPKGLSEFTKQQIRYILQMRGMSDKSLRLVLSTFSNIREELGHLQNDMTSLENDKMRLEKDLSFKDTQLKEYEELLASVRANNHQQQQGLQDSSSKCQALEENNLSLRHTLSDMEYRLKELEYCKRNLEQENQNLRMQVSETCTGPMLQAKMDEIGNHYTEMVKNLRMEKDREICRLRSQLNQYHKDVSKREGSCSDFQFKLHELTSLLEEKDSLIKRQSEELSKLRQEIYSSHNQPSTGGRTTITTKKYRTQYPILGLLYDDYEYIPPGSETQTIVIEKTEDKYTCVSSLGHF

SEQ ID NO: 9490 - protein, 808 aa, Homo sapiens
MESGPRAELGAGAPPAVVARTPPEPRPSPEGDPSPPPPPMSALVPDTPPDTPPAMKNATSSKQLPLEPESPSGQVGPRPAPPQEESPSSEAKSRGPTPPAMGPRDARPPRRSSQPSPTAVPASDSPPTKQEVKKAGERHKLAKERREERAKYLAAKKAVWLEKEEKAKALREKQLQERRRRLEEQRLKAEQRRAALEERQRQKLEKNKERYEAAIQRSVKKTWAEIRQQRWSWAGALHHSSPGHKTSGSRCSVSAVNLPKHVDSIINKRLSKSSATLWNSPSRNRSLQLSAWESSIVDRLMTPTLSFLARSRSAVTLPRNGRDQAVPVCPRSASASPLTPCSVTRSVHRCAPAGERGERRKPNAGGSPAPVRRRPEASPVQKKEKKDKERENEKEKSALARERSLKKRQSLPASPRARLSASTASELSPKSKARPSSPSTSWHRPASPCPSPGPGHTLPPKPPSPRGTTASPKGRVRRKEEAKESPSAAGPEDKSQSKRRASNEKESAAPASPAPSPAPSPTPAPPQKEQPPAETPTDAAVLTSPPAPAPPVTPSKPMAGTTDREEATRLLAEKRRQAREQREREEQERRLQAERDKRMREEQLAREAEARAEREAEARRREEQEAREKAQAEQEEQERLQKQKEEAEARSREEAERQRLEREKHFQQQEQERQERRKRLEEIMKRTRKSEVSETKKQDSKEANANGSSPEPVKAVEARSPGLQKEAVQKEEPIPQEPQWSLPSKELPASLVNGLQPLPAHQENGFSTNGPSGDKSLSRTPETLLPFAEAEAFLKKAVVQSPQVTEVL

SEQ ID NO: 9491 - protein, 841 aa, Homo sapiens
MESGPRAELGAGAPPAVVARTPPEPRPSPEGDPSPPPPPMSALVPDTPPDTPPAMKNATSSKQLPLEPESPSGQVGPRPAPPQEESPSSEAKSRGPTPPAMGPRDARPPRRSSQPSPTAVPASDSPPTKQEVKKAGERHKLAKERREERAKYLAAKKAVWLEKEEKAKALREKQLQERRRRLEEQRLKAEQRRAALEERQRQKLEKNKERYEAAIQRSVKKTWAEIRQQRWSWAGALHHSSPGHKTSGSRCSVSAVNLPKHVDSIINKRLSKSSATLWNSPSRNRSLQLSAWESSIVDRLMTPTLSFLARSRSAVTLPRNGRDQGRGCDPGRGPTWGRAGASLARGPQPDRTHPSAAVPVCPRSASASPLTPCSVTRSVHRCAPAGERGERRKPNAGGSPAPVRRRPEASPVQKKEKKDKERENEKEKSALARERSLKKRQSLPASPRARLSASTASELSPKSKARPSSPSTSWHRPASPCPSPGPGHTLPPKPPSPRGTTASPKGRVRRKEEAKESPSAAGPEDKSQSKRRASNEKESAAPASPAPSPAPSPTPAPPQKEQPPAETPTDAAVLTSPPAPAPPVTPSKPMAGTTDREEATRLLAEKRRQAREQREREEQERRLQAERDKRMREEQLAREAEARAEREAEARRREEQEAREKAQAEQEEQERLQKQKEEAEARSREEAERQRLEREKHFQQQEQERQERRKRLEEIMKRTRKSEVSETKQKQDSKEANANGSSPEPVKAVEARSPGLQKEAVQKEEPIPQEPQWSLPSKELPASLVNGLQPLPAHQENGFSTNGPSGDKSLSRTPETLLPFAEAEAFLKKAVVQSPQVTEVL

SEQ ID NO: 9492 - protein, 557 aa, Homo sapiens
IGRALLWTTENLFPETPYLRKHKVIFVVSAGENYERKEFVKMMALRAKCQGYVIFVISLGSTRKDDMEELASYPLDQHLIQLGRIHKPDLNYIAKFLKPFLYSVRRGFNQYPPPMLEDACRLINLGGENIQNDGFQFVTELQEDFLGGNGFIGQELNSGRESPFVKTEDNGSDYLVYLPSQMFEPQKLMINYEKDQKSAEIASLTSGHENYGRKEEPDHTYEPGDVSLQEYYMDVAFLIDASQRVGSDEFKEVKAFITSVLDYFHIAPTPLTSTLGDRVAVLSYSPPGYMPNTEECPVYLEFDLVTYNSIHQMKHHLQDSQQLNGDVFIGHALQWTIDNVFVGTPNLRKNKVIFVISAGETNSLDKDVLRNVSLRAKCQGYSIFVFSFGPKHNDKELEELASHPLDHHLVQLGRTHKPDWNYIIKFVKPFVHLIRRAINKYPTEDMKATCVNMTSPNPENGGTENTVLLLPGIYEIKTENGDLFDEFDSQAQHLLVLGNNHSSGSETATDLMQKLYLLFSTEKLAMKDKEKAHLEEISALVVDKQQEKEDGEDTRSS

SEQ ID NO: 9493 - protein, 1451 aa, Homo sapiens
MASLAALALSLLLRLQLPPLPGARAQSAAGGCSFDEHYSNCGYSVALGTNGFTWEQINTWEKPMLDQAVPTGSFMMVNSSGRASGQKAHLLLPTLKENDTHCIDFHYYFSSRDRSSPGALNVYVKVNGGPQGNPVWNVSGVVTEGWVKAELAISTFWPHFYQVIFESVSLKGHPGYIAVDEVRVLAHPCRKAPHFLRLQNVEVNVGQNATFQCIAGGKWSQHDKLWLQQWNGRDTALMVTRVVNHRRFSATVSVADTAQRSVSKYRCVIRSDGGSGVSNYAELIVKEPPTPIAPPELLAVGATYLWIKPNANSIIGDGPIILKEVEYRTTTGTWAETHIVDSPNYKLWHLDPDVEYEIRVLLTRPGEGGTGPPGPPLTTRTKCADPVHGPQNVEIVDIRARQLTLQWEPFGYAVTRCHSYNLTVQYQYVFNQQQYEAEEVIQTSSHYTLRGLRPFMTIRLRLLLSNPEGRMESEELVVQTEEDVPGAVPLESIQGGPFEEKIYIQWKPPNETNGVITLYEINYKAVGSLDPSADLSSQRGKVFKLRNETHHLFVGLYPGTTYSFTIKASTAKGFGPPVTTRIATKISAPSMPEYDTDTPLNETDTTITVMLKPAQSRGAPVSVYQLVVKEERLQKSRRAADIIECFSVPVSYRNASSLDSLHYFAAELKPANLPVTQPFTVGDNKTYNGYWNPPLSPLKSYSIYFQALSKANGETKINCVRLATKGASTQNSNTVEPEKQVDNTVKMAGVIAGLLMFIIILLGVMLTIKRRKLAKKQKETQSGAQREMGPVASADKPTTKLSASRNDEGFSSSSQDVNGFTDGSRGELSQPTLTIQTHPYRTCDPVEMSYPRDQFQPAIRVADLLQHITQMKRGQGYGFKEEYEALPEGQTASWDTAKEDENRNKNRYGNIISYDHSRVRLLVLDGDPHSDYINANYIDGYHRPRHYIATQGPMQETVKDFWRMIWQENSASIVMVTNLVEVGRHPAEHTVGNATLGRAASPGMVKCVRYWPDDTEVYGDIKVTLIETEPLAEYVIRTFTVQKKGYHEIRELRLFHFTSWPDHGVPCYATGLLGFVRQVKFLNPPEAGPIVVHCSAGAGRTGCFIAIDTMLDMAENEGVVDIFNCVRELRAQRVNLVQTEEQYVFVHDAILEACLCGNTAIPVCEFRSLYYNISRLDPQTNSSQIKDEFQTLNIVTPRVRPEDCSIGLLPRNHDKNRSMDVLPLDRCLPFLISVDGESSNYINAALMDSHKQPAAFVVTQHPLPNTVADFWRLVFDYNCSSVVMLNEMDTAQFCMQYWPEKTSGCYGPIQVEFVSADIDEDIIHRIFRICNMARPQDGYRIVQHLQYIGWPAYRDTPPSKRSLLKVVRRLEKWQEQYDGREGRTVVHCLNGGGRSGTFCAICSVCEMIQQQNIIDVFHIVKTLRNNKSNMVETLEQYKFVYEVALEYLSSF

SEQ ID NO: 9494 - protein, 1441 aa, Homo sapiens
MASLAALALSLLLRLQLPPLPGARAQSAAGGCSFDEHYSNCGYSVALGTNGFTWEQINTWEKPMLDQAVPTGSFMMVNSSGRASGQKAHLLLPTLKENDTHCIDFHYYFSSRDRSSPGALNVYVKVNGGPQGNPVWNVSGVVTEGWVKAELAISTFWPHFYQVIFESVSLKGHPGYIAVDEVRVLAHPCRKAPHFLRLQNVEVNVGQNATFQCIAGGKWSQHDKLWLQQWNGRDTALMVTRVVNHRRFSATVSVADTAQRSVSKYRCVIRSDGGSGVSNYAELIVKEPPTPIAPPELLAVGATYLWIKPNANSIIGDGPIILKEVEYRTTTGTWAETHIVDSPNYKLWHLDPDVEYEIRVLLTRPGEGGTGPPGPPLTTRTKCADPVHGPQNVEIVDIRARQLTLQWEPFGYAVTRCHSYNLTVQYQYVFNQQQYEAEEVIQTSSHYTLRGLRPFMTIRLRLLLSNPEGRMESEELVVQTEEDVPGAVPLESIQGGPFEEKIYIQWKPPNETNGVITLYEINYKAVGSLDPSADLSSQRGKVFKLRNETHHLFVGLYPGTTYSFTIKASTAKGFGPPVTTRIATKISAPSMPEYDTDTPLNETDTTITVMLKPAQSRGAPVSVYQLVVKEERLQKSRRAADIIECFSVPVSYRNASSLDSLHYFAAELKPANLPVTQPFTVGDNKTYNGYWNPPLSPLKSYSIYFQALSKANGETKINCVRLATKGASTQNSNTVEPEKQVDNTVKMAGVIAGLLMFIIILLGVMLTIKRRRNAYSYSYYLKLAKKQKETQSGAQREMGPVASADKPTTKLSASRNDEGFSSSSQDVNGFTDGSRGELSQPTLTIQTHPYRTCDPVEMSYPRDQFQPAIRVADLLQHITQMKRGQGYGFKEEYEALPEGQTASWDTAKEDENRNKNRYGNIISYDHSRVRLLVLDGDPHSDYINANYIDGYHRPRHYIATQGPMQETVKDFWRMIWQENSASIVMVTNLVEVGRVKCVRYWPDDTEVYGDIKVTLIETEPLAEYVIRTFTVQKKGYHEIRELRLFHFTSWPDHGVPCYATGLLGFVRQVKFLNPPEAGPIVVHCSAGAGRTGCFIAIDTMLDMAENEGVVDIFNCVRELRAQRVNLVQTEEQYVFVHDAILEACLCGNTAIPVCEFRSLYYNISRLDPQTNSSQIKDEFQTLNIVTPRVRPEDCSIGLLPRNHDKNRSMDVLPLDRCLPFLISVDGESSNYINAALMDSHKQPAAFVVTQHPLPNTVADFWRLVFDYNCSSVVMLNEMDTAQFCMQYWPEKTSGCYGPIQVEFVSADIDEDIIHRIFRICNMARPQDGYRIVQHLQYIGWPAYRDTPPSKRSLLKVVRRLEKWQEQYDGREGRTVVHCLNGGGRSGTFCAICSVCEMIQQQNIIDVFHIVKTLRNNKSNMVETLEQYKFVYEVALEYLSSF

SEQ ID NO: 9495 - protein, 475 aa, Homo sapiens
MAVVSEDDFQHSSNSTYRTTSSSLRADQEALLEKLLDRPPPGLQRPEDRFCGTYIIFFSLGIGSLLPWNFFITAKEYWMFKLRNSSSPATGEDPEGSDILNYFESYLAVASTVPSMLCLVANFLLVNRVAVHIRVLASLTVILAIFMVITALVKVDTSSWTRGFFAVTIVCMVILSGASTVFSSSIYGMTGSFPMRNSQALISGGAMGGTVSAVASLVDLAASSDVRNSALAFFLTATVFLVLCMGLYLLLSRLEYARYYMRPVLAAHVFSGEEELPQDSLSAPSVASRFIDSHTPPLRPILKKTASLGFCVTYVFFITSLIYPAICTNIESLNKGSGSLWTTKFFIPLTTFLLYNFADLCGRQLTAWIQVPGPNSKALPGFVLLRTCLIPLFVLCNYQPRVHLKTVVFQSDVYPALLSSLLGLSNGYLSTLALLYGPKIVPRELAEATGVVMSFYVCLGLTLGSACSTLLVHLI

SEQ ID NO: 9496 - protein, 1440 aa, Homo sapiens
MASLAALALSLLLRLQLPPLPGARAQSAAGGCSFDEHYSNCGYSVALGTNGFTWEQINTWEKPMLDQAVPTGSFMMVNSSGRASGQKAHLLLPTLKENDTHCIDFHYYFSSRDRSSPGALNVYVKVNGGPQGNPVWNVSGVVTEGWVKAELAISTFWPHFYQVIFESVSLKGHPGYIAVDEVRVLAHPCRKAPHFLRLQNVEVNVGQNATFQCIAGGKWSQHDKLWLQQWNGRDTALMVTRVVNHRRFSATVSVADTAQRSVSKYRCVIRSDGGSGVSNYAELIVKEPPTPIAPPELLAVGATYLWIKPNANSIIGDGPIILKEVEYRTTTGTWAETHIVDSPNYKLWHLDPDVEYEIRVLLTRPGEGGTGPPGPPLTTRTKCADPVHGPQNVEIVDIRARQLTLQWEPFGYAVTRCHSYNLTVQYQYVFNQQQYEAEEVIQTSSHYTLRGLRPFMTIRLRLLLSNPEGRMESEELVVQTEEDVPGAVPLESIQGGPFEEKIYIQWKPPNETNGVITLYEINYKAVGSLDPSADLSSQRGKVFKLRNETHHLFVGLYPGTTYSFTIKASTAKGFGPPVTTRIATKISAPSMPEYDTDTPLNETDTTITVMLKPAQSRGAPVSVYQLVVKEERLQKSRRAADIIECFSVPVSYRNASSLDSLHYFAAELKPANLPVTQPFTVGDNKTYNGYWNPPLSPLKSYSIYFQALSKANGETKINCVRLATKGASTQNSNTVEPEKQVDNTVKMAGVIAGLLMFIIILLGVMLTIKRRRNAYSYSYYLKLAKKQKETQSGAQREMGPVASADKPTTKLSASRNDEGFSSSSQDVNGFNGSRGELSQPTLTIQTHPYRTCDPVEMSYPRDQFQPAIRVADLLQHITQMKRGQGYGFKEEYEALPEGQTASWDTAKEDENRNKNRYGNIISYDHSRVRLLVLDGDPHSDYINANYIDGYHRPRHYIATQGPMQETVKDFWRMIWQENSASIVMVTNLVEVGRVKCVRYWPDDTEVYGDIKVTLIETEPLAEYVIRTFTVQKKGYHEIRELRLFHFTSWPDHGVPCYATGLLGFVRQVKFLNPPEAGPIVVHCSAGAGRTGCFIAIDTMLDMAENEGVVDIFNCVRELRAQRVNLVQTEEQYVFVHDAILEACLCGNTAIPVCEFRSLYYNISRLDPQTNSSQIKDEFQTLNIVTPRVRPEDCSIGLLPRNHDKNRSMDVLPLDRCLPFLISVDGESSNYINAALMDSHKQPAAFVVTQHPLPNTVADFWRLVFDYNCSSVVMLNEMDTAQFCMQYWPEKTSGCYGPIQVEFVSADIDEDIIHRIFRICNMARPQDGYRIVQHLQYIGWPAYRDTPPSKRSLLKVVRRLEKWQEQYDGREGRTVVHCLNGGGRSGTFCAICSVCEMIQQQNIIDVFHIVKTLRNNKSNMVETLEQYKFVYEVALEYLSSF

SEQ ID NO: 9497 - protein, 860 aa, Homo sapiens
MEIGSAGPAGAQPLLMVPRRPGYGTMGKPIKLLANCFQVEIPKIDVYLYEVDIKPDKCPRRVNREVVDSMVQHFKVTIFGDRRPVYDGKRSLYTANPLPVATTGVDLDVTLPGEGGKDRPFKVSIKFVSRVSWHLLHEVLTGRTLPEPLELDKPISTNPVHAVDVVLRHLPSMKYTPVGRSFFSAPEGYDHPLGGGREVWFGFHQSVRPAMWKMMLNIDVSATAFYKAQPVIQFMCEVLDIHNIDEQPRPLTDSHRVKFTKEIKGLKVEVTHCGTMRRKYRVCNVTRRPASHQTFPLQLENGQTVERTVAQYFREKYTLQLKYPHLPCLQVGQEQKHTYLPLEVCNIVAGQRCIKKLTDNQTSTMIKATARSAPDRQEEISRLVRSANYETDPFVQEFQFKVRDEMAHVTGRVLPAPMLQYGGRNRTVATPSHGVWDMRGKQFHTGVEIKMWAIACFATQRQCREEILKGFTDQLRKISKDAGMPIQGQPCFCKYAQGADSVEPMFRHLKNTYSGLQLIIVILPGKTPVYAEVKRVGDTLLGMATQCVQVKNVIKTSPQTLSNLCLKINVKLGGINNILVPHQRPSVFQQPVIFLGADVTHPPAGDGKKPSIAAVVGSMDAHPSRYCATVRVQRPRQEIIQDLASMVRELLIQFYKSTRFKPTRIIFYRDGVSEGQFRQVLYYELLAIREACISLEKDYQPGITYIVVQKRHHTRLFCADRTERVGRSGNIPAGTTVDTDITHPYEFDFYLCSHAGIQGTSRPSHYHVLWDDNCFTADELQLLTYQLCHTYVRCTRSVSIPAPAYYAHLVAFRARYHLVDKEHDSAEGSHVSGQSNGRDPQALAKAVQIHQDTLRTMYFA

SEQ ID NO: 9498 - protein, 934 aa, Homo sapiens
MGARSGARGALLLALLLCWDPRLSQAGTDSGSEVLPDSFPSAPAEPLPYFLQEPQDAYIVKNKPVELRCRAFPATQIYFKCNGEWVSQNDHVTQEGLDEATGLRVREVQIEVSRQQVEELFGLEDYWCQCVAWSSAGTTKSRRAYVRIAYLRKNFDQEPLGKEVPLDHEVLLQCRPPEGVPVAEVEWLKNEDVIDPTQDTNFLLTIDHNLIIRQARLSDTANYTCVAKNIVAKRRSTTATVIVYVNGGWSSWAEWSPCSNRCGRGWQKRTRTCTNPAPLNGGAFCEGQAFQKTACTTICPVDGAWTEWSKWSACSTECAHWRSRECMAPPPQNGGRDCSGTLLDSKNCTDGLCMQMLEASGDAALYAGLVVAIFVVVAILMAVGVVVYRRNCRDFDTDITDSSAALTGGFHPVNFKTARPSNPQLLHPSVPPDLTASAGIYRGPVYALQDSTDKIPMTNSPLLDPLPSLKVKVYSSSTTGSGPGLADGADLLGVLPPGTYPSDFARDTHFLHLRSASLGSQQLLGLPRDPGSSVSGTFGCLGGRLSIPGTGVSLLVPNGAIPQGKFYEMYLLINKAESTLPLSEGTQTVLSPSVTCGPTGLLLCRPVILTMPHCAEVSARDWIFQLKTQAHQGHWEEVVTLDEETLNTPCYCQLEPRACHILLDQLGTYVFTGESYSRSAVKRLQLAVFAPALCTSLEYSLRVYCLEDTPVALKEVLELERTLGGYLVEEPKPLMFKDSYHNLRLSLHDLPHAHWRSKLLAKYQEIPFYHIWSGSQKALHCTFTLERHSLASTELTCKICVRQVEGEGQIFQLHTTLAETPAGSLDTLCSAPGSTVTTQLGPYAFKIPLSIRQKICNSLDAPNSRGNDWRMLAQKLSMDRYLNYFATKASPTGVILDLWEALQQDDGDLNSLASALEEMGKSEMLVAVATDGDC

SEQ ID NO: 9499 - protein, 1463 aa, Homo sapiens
MASLAALALSLLLRLQLPPLPGARAQSAAGGCSFDEHYSNCGYSVALGTNGFTWEQINTWEKPMLDQAVPTGSFMMVNSSGRASGQKAHLLLPTLKENDTHCIDFHYYFSSRDRSSPGALNVYVKVNGGPQGNPVWNVSGVVTEGWVKAELAISTFWPHFYQVIFESVSLKGHPGYIAVDEVRVLAHPCRKAPHFLRLQNVEVNVGQNATFQCIAGGKWSQHDKLWLQQWNGRDTALMVTRVVNHRRFSATVSVADTAQRSVSKYRCVIRSDGGSGVSNYAELIVKEPPTPIAPPELLAVGATYLWIKPNANSIIGDGPIILKEVEYRTTTGTWAETHIVDSPNYKLWHLDPDVEYEIRVLLTRPGEGGTGPPGPPLTTRTKCADPVHGPQNVEIVDIRARQLTLQWEPFGYAVTRCHSYNLTVQYQYVFNQQQYEAEEVIQTSSHYTLRGLRPFMTIRLRLLLSNPEGRMESEELVVQTEEDVPGAVPLESIQGGPFEEKIYIQWKPPNETNGVITLYEINYKAVGSLDPSADLSSQRGKVFKLRNETHHLFVGLYPGTTYSFTIKASTAKGFGPPVTTRIATKISAPSMPEYDTDTPLNETDTTITVMLKPAQSRGAPVSVYQLVVKEERLQKSRRAADIIECFSVPVSYRNASSLDSLHYFAAELKPANLPVTQPFTVGDNKTYNGYWNPPLSPLKSYSIYFQALSKANGETKINCVRLATKAPMGSAQVTPGTPLCLLTTGASTQNSNTVEPEKQVDNTVKMAGVIAGLLMFIIILLGVMLTIKRRRNAYSYSYYLSQRKLAKKQKETQSGAQREMGPVASADKPTTKLSASRNDEGFSSSSQDVNGFTDGSRGELSQPTLTIQTHPYRTCDPVEMSYPRDQFQPAIRVADLLQHITQMKRGQGYGFKEEYEALPEGQTASWDTAKEDENRNKNRYGNIISYDHSRVRLLVLDGDPHSDYINANYIDGYHRPRHYIATQGPMQETVKDFWRMIWQENSASIVMVTNLVEVGRVKCVRYWPDDTEVYGDIKVTLIETEPLAEYVIRTFTVQKKGYHEIRELRLFHFTSWPDHGVPCYATGLLGFVRQVKFLNPPEAGPIVVHCSAGAGRTGCFIAIDTMLDMAENEGVVDIFNCVRELRAQRVNLVQTEEQYVFVHDAILEACLCGNTAIPVCEFRSLYYNISRLDPQTNSSQIKDEFQTLNIVTPRVRPEDCSIGLLPRNHDKNRSMDVLPLDRCLPFLISVDGESSNYINAALMDSHKQPAAFVVTQHPLPNTVADFWRLVFDYNCSSVVMLNEMDTAQFCMQYWPEKTSGCYGPIQVEFVSADIDEDIIHRIFRICNMARPQDGYRIVQHLQYIGWPAYRDTPPSKRSLLKVVRRLEKWQEQYDGREGRTVVHCLNGGGRSGTFCAICSVCEMIQQQNIIDVFHIVKTLRNNKSNMVETLEQYKFVYEVALEYLSSF

SEQ ID NO: 9500 - protein, 533 aa, Homo sapiens
MPEEGVPLTPKANLLTTEEILTLARLFVKEGIDKIRLTGGEPLIRPDVVDIVAQLQRLEGLRTIGVTTNGINLARLLPQLQKAGLSAINISLDTLVPAKFEFIVRRKGFHKVMEGIHKAIELGYNPVKVNCVVMRGLNEDELLDFAALTEGLPLDVRFIEYMPFDGNKWNFKKMVSYKEMLDTVRQQWPELEKVPEEESSTAKAFKIPGFQGQISFITSMSEHFCGTCNRLRITADGNLKVCLFGNSEVSLRDHLRAGASEQELLRIIGAAVGRKKRQHAELFLMFPNSPPANPSIFSWDPLHVQGLRPRMSFSSQVATLWKGCRVPQTPPLAQQRLGSGSFQRHYTSRADSDANSKCLSPGSWASAAPSGPQLTSEQLTHVDSEGRAAMVDVGRKPDTERVAVASAVVLLGPVAFKLVQQNQLKKGDALVVAQLAGVQAAKVTSQLIPLCHHVALSHIQVQLELDSTRHAVKIQASCRARGPTGVEMEALTSAAVAALTLYDMCKAVSRDIVLEEIKLISKTGGQRGDFHRA

SEQ ID NO: 9501 - protein, 1460 aa, Homo sapiens
MASLAALALSLLLRLQLPPLPGARAQSAAGGCSFDEHYSNCGYSVALGTNGFTWEQINTWEKPMLDQAVPTGSFMMVNSSGRASGQKAHLLLPTLKENDTHCIDFHYYFSSRDRSSPGALNVYVKVNGGPQGNPVWNVSGVVTEGWVKAELAISTFWPHFYQVIFESVSLKGHPGYIAVDEVRVLAHPCRKAPHFLRLQNVEVNVGQNATFQCIAGGKWSQHDKLWLQQWNGRDTALMVTRVVNHRRFSATVSVADTAQRSVSKYRCVIRSDGGSGVSNYAELIVKEPPTPIAPPELLAVGATYLWIKPNANSIIGDGPIILKEVEYRTTTGTWAETHIVDSPNYKLWHLDPDVEYEIRVLLTRPGEGGTGPPGPPLTTRTKCADPVHGPQNVEIVDIRARQLTLQWEPFGYAVTRCHSYNLTVQYQYVFNQQQYEAEEVIQTSSHYTLRGLRPFMTIRLRLLLSNPEGRMESEELVVQTEEDVPGAVPLESIQGGPFEEKIYIQWKPPNETNGVITLYEINYKAVGSLDPSADLSSQRGKVFKLRNETHHLFVGLYPGTTYSFTIKASTAKGFGPPVTTRIATKISAPSMPEYDTDTPLNETDTTITVMLKPAQSRGAPVSVYQLVVKEERLQKSRRAADIIECFSVPVSYRNASSLDSLHYFAAELKPANLPVTQPFTVGDNKTYNGYWNPPLSPLKSYSIYFQALSKANGETKINCVRLATKAPMGSAQVTPGTPLCLLTTGASTQNSNTVEPEKQVDNTVKMAGVIAGLLMFIIILLGVMLTIKRRRNAYSYSYYLKLAKKQKETQSGAQREMGPVASADKPTTKLSASRNDEGFSSSSQDVNGFTDGSRGELSQPTLTIQTHPYRTCDPVEMSYPRDQFQPAIRVADLLQHITQMKRGQGYGFKEEYEALPEGQTASWDTAKEDENRNKNRYGNIISYDHSRVRLLVLDGDPHSDYINANYIDGYHRPRHYIATQGPMQETVKDFWRMIWQENSASIVMVTNLVEVGRVKCVRYWPDDTEVYGDIKVTLIETEPLAEYVIRTFTVQKKGYHEIRELRLFHFTSWPDHGVPCYATGLLGFVRQVKFLNPPEAGPIVVHCSAGAGRTGCFIAIDTMLDMAENEGVVDIFNCVRELRAQRVNLVQTEEQYVFVHDAILEACLCGNTAIPVCEFRSLYYNISRLDPQTNSSQIKDEFQTLNIVTPRVRPEDCSIGLLPRNHDKNRSMDVLPLDRCLPFLISVDGESSNYINAALMDSHKQPAAFVVTQHPLPNTVADFWRLVFDYNCSSVVMLNEMDTAQFCMQYWPEKTSGCYGPIQVEFVSADIDEDIIHRIFRICNMARPQDGYRIVQHLQYIGWPAYRDTPPSKRSLLKVVRRLEKWQEQYDGREGRTVVHCLNGGGRSGTFCAICSVCEMIQQQNIIDVFHIVKTLRNNKSNMVETLEQYKFVYEVALEYLSSF

SEQ ID NO: 9502 - protein, 1431 aa, Homo sapiens
MASLAALALSLLLRLQLPPLPGARAQSAAGGCSFDEHYSNCGYSVALGTNGFTWEQINTWEKPMLDQAVPTGSFMMVNSSGRASGQKAHLLLPTLKENDTHCIDFHYYFSSRDRSSPGALNVYVKVNGGPQGNPVWNVSGVVTEGWVKAELAISTFWPHFYQVIFESVSLKGHPGYIAVDEVRVLAHPCRKAPHFLRLQNVEVNVGQNATFQCIAGGKWSQHDKLWLQQWNGRDTALMVTRVVNHRRFSATVSVADTAQRSVSKYRCVIRSDGGSGVSNYAELIVKEPPTPIAPPELLAVGATYLWIKPNANSIIGDGPIILKEVEYRTTTGTWAETHIVDSPNYKLWHLDPDVEYEIRVLLTRPGEGGTGPPGPPLTTRTKCADPVHGPQNVEIVDIRARQLTLQWEPFGYAVTRCHSYNLTVQYQYVFNQQQYEAEEVIQTSSHYTLRGLRPFMTIRLRLLLSNPEGRMESEELVVQTEEDVPGAVPLESIQGGPFEEKIYIQWKPPNETNGVITLYEINYKAVGSLDPSADLSSQRGKVFKLRNETHHLFVGLYPGTTYSFTIKASTAKGFGPPVTTRIATKISAPSMPEYDTDTPLNETDTTITVMLKPAQSRGAPVSVYQLVVKEERLQKSRRAADIIECFSVPVSYRNASSLDSLHYFAAELKPANLPVTQPFTVGDNKTYNGYWNPPLSPLKSYSIYFQALSKANGETKINCVRLATKGASTQNSNTVEPEKQVDNTVKMAGVIAGLLMFIIILLGVMLTIKRRKLAKKQKETQSGAQREMGPVASADKPTTKLSASRNDEGFSSSSQDVNGFTDGSRGELSQPTLTIQTHPYRTCDPVEMSYPRDQFQPAIRVADLLQHITQMKRGQGYGFKEEYEALPEGQTASWDTAKEDENRNKNRYGNIISYDHSRVRLLVLDGDPHSDYINANYIDGYHRPRHYIATQGPMQETVKDFWRMIWQENSASIVMVTNLVEVGRVKCVRYWPDDTEVYGDIKVTLIETEPLAEYVIRTFTVQKKGYHEIRELRLFHFTSWPDHGVPCYATGLLGFVRQVKFLNPPEAGPIVVHCSAGAGRTGCFIAIDTMLDMAENEGVVDIFNCVRELRAQRVNLVQTEEQYVFVHDAILEACLCGNTAIPVCEFRSLYYNISRLDPQTNSSQIKDEFQTLNIVTPRVRPEDCSIGLLPRNHDKNRSMDVLPLDRCLPFLISVDGESSNYINAALMDSHKQPAAFVVTQHPLPNTVADFWRLVFDYNCSSVVMLNEMDTAQFCMQYWPEKTSGCYGPIQVEFVSADIDEDIIHRIFRICNMARPQDGYRIVQHLQYIGWPAYRDTPPSKRSLLKVVRRLEKWQEQYDGREGRTVVHCLNGGGRSGTFCAICSVCEMIQQQNIIDVFHIVKTLRNNKSNMVETLEQYKFVYEVALEYLSSF

SEQ ID NO: 9503 - protein, 658 aa, Homo sapiens
MDRGTLPLAVALLLASCSLSPTSLAETVHCDLQPVGPERGEVTYTTSQVSKGCVAQAPNAILEVHVLFLEFPTGPSQLELTLQASKQNGTWPREVLLVLSVNSSVFLHLQALGIPLHLAYNSSLVTFQEPPGVNTTELPSFPKTQILEWAAERGPITSAAELNDPQSILLRLGQAQGSLSFCMLEASQDMGRTLEWRPRTPALVRGCHLEGVAGHKEAHILRVLPGHSAGPRTVTVKVELSCAPGDLDAVLILQGPPYVSWLIDANHNMQIWTTGEYSFKIFPEKNIRGFKLPDTPQGLLGEARMLNASIVASFVELPLASIVSLHASSCGGRLQTSPAPIQTTPPKDTCSPELLMSLIQTKCADDAMTLVLKKELVAHLKCTITGLTFWDPSCEAEDRGDKFVLRSAYSSCGMQVSASMISNEAVVNILSSSSPQRKKVHCLNMDSLSFQLGLYLSPHFLQASNTIEPGQQSFVQVRVSPSVSEFLLQLDSCHLDLGPEGGTVELIQGRAAKGNCVSLLSPSPEGDPRFSFLLHFYTVPIPKTGTLSCTVALRPKTGSQDQEVHRTVFMRLNIISPDLSGCTSKGLVLPAVLGITFGAFLIGALLTAALWYIYSHTRSPSKREPVVAVAAPASSESSSTNHSIGSTQSTPCSTSSMA

SEQ ID NO: 9504 - protein, 1223 aa, Homo sapiens
MAPLRALLSYLLPLHCALCAAAGSRTPELHLSGKLSDYGVTVPCSTDFRGRFLSHVVSGPAAASAGSMVVDTPPTLPRHSSHLRVARSPLHPGGTLWPGRVGRHSLYFNVTVFGKELHLRLRPNRRLVVPGSSVEWQEDFRELFRQPLRQECVYTGGVTGMPGAAVAISNCDGLAGLIRTDSTDFFIEPLERGQQEKEASGRTHVVYRREAVQQEWAEPDGDLHNEAFGLGDLPNLLGLVGDQLGDTERKRRHAKPGSYSIEVLLVVDDSVVRFHGKEHVQNYVLTLMNIVDEIYHDESLGVHINIALVRLIMVGYRQSLSLIERGNPSRSLEQVCRWAHSQQRQDPSHAEHHDHVVFLTRQDFGPSGYAPVTGMCHPLRSCALNHEDGFSSAFVIAHETGHVLGMEHDGQGNGCADETSLGSVMAPLVQAAFHRFHWSRCSKLELSRYLPSYDCLLDDPFDPAWPQPPELPGINYSMDEQCRFDFGSGYQTCLAFRTFEPCKQLWCSHPDNPYFCKTKKGPPLDGTECAPGKWCFKGHCIWKSPEQTYGQDGGWSSWTKFGSCSRSCGGGVRSRSRSCNNPSPAYGGRLCLGPMFEYQVCNSEECPGTYEDFRAQQCAKRNSYYVHQNAKHSWVPYEPDDDAQKCELICQSADTGDVVFMNQVVHDGTRCSYRDPYSVCARGECVPVGCDKEVGSMKADDKCGVCGGDNSHCRTVKGTLGKASKQAGALKLVQIPAGARHIQIEALEKSPHRIVVKNQVTGSFILNPKGKEATSRTFTAMGLEWEDAVEDAKESLKTSGPLPEAIAILALPPTEGGPRSSLAYKYVIHEDLLPLIGSNNVLLEEMDTYEWALKSWAPCSKACGGGIQFTKYGCRRRRDHHMVQRHLCDHKKRPKPIRRRCNQHPCSQPVWVTEEWGACSRSCGKLGVQTRGIQCLLPLSNGTHKVMPAKACAGDRPEARRPCLRVPCPAQWRLGAWSQCSATCGEGIQQRQVVCRTNANSLGHCEGDRPDTVQVCSLPACGGNHQNSTVRADVWELGTPEGQWVPQSEPLHPINKISSTEPCTGDRSVFCQMEVLDRYCSIPGYHRLCCVSCIKKASGPNPGPDPGPTSLPPFSTPGSPLPGPQDPADAAEPPGKPTGSEDHQHGRATQLPGALDTSSPGTQHPFAPETPIPGASWSISPTTPGGLPWGWTQTPTPVPEDKGQPGEDLRHPGTSLPAASPVT

SEQ ID NO: 9505 - protein, 1226 aa, Homo sapiens
MAPLRALLSYLLPLHCALCAAAGSRTPELHLSGKLSDYGVTVPCSTDFRGRFLSHVVSGPAAASAGSMVVDTPPTLPRHSSHLRVARSPLHPGGTLWPGRVGRHSLYFNVTVFGKELHLRLRPNRRLVVPGSSVEWQEDFRELFRQPLRQECVYTGGVTGMPGAAVAISNCDGLAGLIRTDSTDFFIEPLERGQQEKEASGRTHVVYRREAVQQEWAEPDGDLHNEAFGLGDLPNLLGLVGDQLGDTERKRRHAKPGSYSIEVLLVVDDSVVRFHGKEHVQNYVLTLMNIVDEIYHDESLGVHINIALVRLIMVGYRQSLSLIERGNPSRSLEQVCRWAHSQQRQDPSHAEHHDHVVFLTRQDFGPSGMQGYAPVTGMCHPLRSCALNHEDGFSSAFVIAHETGHVLGMEHDGQGNGCADETSLGSVMAPLVQAAFHRFHWSRCSKLELSRYLPSYDCLLDDPFDPAWPQPPELPGINYSMDEQCRFDFGSGYQTCLAFRTFEPCKQLWCSHPDNPYFCKTKKGPPLDGTECAPGKWCFKGHCIWKSPEQTYGQDGGWSSWTKFGSCSRSCGGGVRSRSRSCNNPSPAYGGRLCLGPMFEYQVCNSEECPGTYEDFRAQQCAKRNSYYVHQNAKHSWVPYEPDDDAQKCELICQSADTGDVVFMNQVVHDGTRCSYRDPYSVCARGECVPVGCDKEVGSMKADDKCGVCGGDNSHCRTVKGTLGKASKQAGALKLVQIPAGARHIQIEALEKSPHRIVVKNQVTGSFILNPKGKEATSRTFTAMGLEWEDAVEDAKESLKTSGPLPEAIAILALPPTEGGPRSSLAYKYVIHEDLLPLIGSNNVLLEEMDTYEWALKSWAPCSKACGGGIQFTKYGCRRRRDHHMVQRHLCDHKKRPKPIRRRCNQHPCSQPVWVTEEWGACSRSCGKLGVQTRGIQCLLPLSNGTHKVMPAKACAGDRPEARRPCLRVPCPAQWRLGAWSQCSATCGEGIQQRQVVCRTNANSLGHCEGDRPDTVQVCSLPACGGNHQNSTVRADVWELGTPEGQWVPQSEPLHPINKISSTEPCTGDRSVFCQMEVLDRYCSIPGYHRLCCVSCIKKASGPNPGPDPGPTSLPPFSTPGSPLPGPQDPADAAEPPGKPTGSEDHQHGRATQLPGALDTSSPGTQHPFAPETPIPGASWSISPTTPGGLPWGWTQTPTPVPEDKGQPGEDLRHPGTSLPAASPVT

SEQ ID NO: 9506 - protein, 861 aa, Homo sapiens
MEALGPGPPASLFQPPRRPGLGTVGKPIRLLANHFQVQIPKIDVYHYDVDIKPEKRPRRVNREVVDTMVRHFKMQIFGDRQPGYDGKRNMYTAHPLPIGRDRVDMEVTLPGEGKDQTFKVSVQWVSVVSLQLLLEALAGHLNEVPDDSVQALDVITRHLPSMRYTPVGRSFFSPPEGYYHPLGGGREVWFGFHQSVRPAMWNMMLNIDVSATAFYRAQPIIEFMCEVLDIQNINEQTKPLTDSQRVKFTKEIRGLKVEVTHCGQMKRKYRVCNVTRRPASHQTFPLQLENGQAMECTVAQYFKQKYSLQLKYPHLPCLQVGQEQKHTYLPLEVCNIVAGQRCIKKLTDNQTSTMIKATARSAPDRQEEISRLVKSNSMVGGPDPYLKEFGIVVHNEMTELTGRVLPAPMLQYGGRNKTVATPNQGVWDMRGKQFYAGIEIKVWAVACFAPQKQCREDLLKSFTDQLRKISKDAGMPIQGQPCFCKYAQGADSVEPMFKHLKMTYVGLQLIVVILPGKTPVYAEVKRVGDTLLGMATQCVQVKNVVKTSPQTLSNLCLKINAKLGGINNVLVPHQRPSVFQQPVIFLGADVTHPPAGDGKKPSIAAVVGSMDGHPSRYCATVRVQTSRQEISQELLYSQEVIQDLTNMVRELLIQFYKSTRFKPTRIIYYRGGVSEGQMKQVAWPELIAIRKACISLEEDYRPGITYIVVQKRHHTRLFCADKTERVGKSGNVPAGTTVDSTITHPSEFDFYLCSHAGIQGTSRPSHYQVLWDDNCFTADELQLLTYQLCHTYVRCTRSVSIPAPAYYARLVAFRARYHLVDKDHDSAEGSHVSGQSNGRDPQALAKAVQIHHDTQHTMYFA

SEQ ID NO: 9507 - protein, 1275 aa, Homo sapiens
MTGEVGSEVHLEINDPNVISQEEADSPSDSGQGSYETIGPLSEGDSDEEIFVSKKLKNRKVLQDSDSETEDTNASPEKTTYDSAEEENKENLYAGKNTKIKRIYKTVADSDESYMEKSLYQENLEAQVKPCLELSLQSGNSTDFTTDRKSSKKHIHDKEGTAGKAKVKSKRRLEKEERKMEKIRQLKKKETKNQEDDVEQPFNDSGCLLVDKDLFETGLEDENNSPLEDEESLESIRAAVKNKVKKHKKKEPSLESGVHSFEEGSELSKGTTRKERKAARLSKEALKQLHSETQRLIRESALNLPYHMPENKTIHDFFKRKPRPTCHGNAMALLKSSKYQSSHHKEIIDTANTTEMNSDHHSKGSEQTTGAENEVETNALPVVSKETQIITGSDESCRKDLVKNEELEIQEKQKQSDIRPSPGDSSVLQQESNFLGNNHSEECQVGGLVAFEPHALEGEGPQNPEETDEKVEEPEQQNKSSAVGPPEKVRRFTLDRLKQLGVDVSIKPRLGADEDSFVILEPETNRGEKLQVLKAKLQEAMKLRRFEERQKRQALFKLDNEDGFEEEEEEEEEMTDESEEDGEEKVEKEEKEEELEEEEEKEEEEEEEGNQETAEFLLSSEEIETKDEKEMDKENNDGSSEIGKAVGFLSVPKSLSSDSTLLLFKDSSSKMGYFPTEEKSETDENSGKQPSKLDEDDSCSLLTKESSHNSSFELIGSTIPSYQPCNRQTGRGTSFFPTAGGFRSPSPGLFRASLVSSASKSSGKLSEPSLPIEDSQDLYNASPEPKTLFLGAGDFQFCLEDDTQSQLLDADGFLNVRNHRNQYQALKPRLPLASMDENAMDANMDELLDLCTGKFTSQAEKHLPRKSDKKENMEELLNLCSGKFTSQDASTPASSELNKQEKESSMGDPMEEALALCSGSFPTDKEEEDEEEEFGDFRLVSNDNEFDSDEDEHSDSGNDLALEDHEDDDEEELLKRSEKLKRQMRLRKYLEDEAEVSGSDVGSEDEYDGEEIDEYEEDVIDEVLPSDEELQSQIKKIHMKTMLDDDKRQLRLYQERYLADGDLHSDGPGRMRKFRWKNIDDASQMDLFHRDSDDDQTEEQLDESEARWRKERIEREQWLRDMAQQGKITAEEEEEIGEDSQFMILAKKVTAKALQKNASRPMVIQESKSLLRNPFEAIRPGSAQQVKTGSLLNQPKAVLQKLAALSDHNPSAPRNSRNFVFHTLSPVKAEAAKESSKSQVKKRGPSFMTSPSPKHLKTDDSTSGLTRSIFKYLES

SEQ ID NO: 9508 - protein, 373 aa, Homo sapiens
MCQSHMIGFCTSSVNEETETQGDQISCPNPTTLVFRTQISSLPSLQLSNLKVLNHSPMSDASVNFDYKSPSPFDCSTDQEEKIEDVASHCLPQKDLYTAEEEAATLFPRKMTSHNGMEDSGGGGTGVKKKRKKKEPGDQEGAAKGSKDREPKPKRKREPKEPKEPRKAKEPKKAKEHKEPKQKDGAKKARKPREASGTKEAKEKRSCTDSAARTKSRKASKEQGPTPVEKKKKGKRKSETTVESLELDQGLTNPSLRSPEESTESTDSQKRRSGRQVKRRKYNEDLDFKVVDDDGETIAVLGAGRTSALSASTLAWQAEEPPEDDANIIEKILASKTVQEVHPGEPPFDLELFYVKYRNLYVYLKYSLYLGFI

SEQ ID NO: 9509 - protein, 332 aa, Homo sapiens
MYRPRARAAPEGRVRGCAVPSTVLLLLAYLAYLALGTGVFWTLEGRAAQDSSRSFQRDKWELLQNFTCLDRPALDSLIRDVVQAYKNGASLLSNTTSMGRWELVGSFFFSVSTITTIGYGNLSPNTMAARLFCIFFALVGIPLNLVVLNRLGHLMQQGVNHWASRLGGTWQDPDKARWLAGSGALLSGLLLFLLLPPLLFSHMEGWSYTEGFYFAFITLSTVGFGDYVIGMNPSQRYPLWYKNMVSLWILFGMAWLALIIKLILSQLETPGRVCSCCHHSSKEDFKSQSWRQGPDREPESHSPQQGCYPEGPMGIIQHLEPSAHAAGCGKDS

SEQ ID NO: 9510 - protein, 2715 aa, Homo sapiens
MKMKIQKKEKQLSNLKVLNHSPMSDASVNFDYKSPSPFDCSTDQEEKIEDVASHCLPQKDLYTAEEEAATLFPRKMTSHNGMEDSGGGGTGVKKKRKKKEPGDQEGAAKGSKDREPKPKRKREPKEPKEPRKAKEPKKAKEHKEPKQKDGAKKARKPREASGTKEAKEKRSCTDSAARTKSRKASKEQGPTPVEKKKKGKRKSETTVESLELDQGLTNPSLRSPEESTESTDSQKRRSGRQVKRRKYNEDLDFKVVDDDGETIAVLGAGRTSALSASTLAWQAEEPPEDDANIIEKILASKTVQEVHPGEPPFDLELFYVKYRNFSYLHCKWATMEELEKDPRIAQKIKRFRNKQAQMKHIFTEPDEDLFNPDYVEVDRILEVAHTKDAETGEEVTHYLVKWCSLPYEESTWELEEDVDPAKVKEFESLQVLPEIKHVERPASDSWQKLEKSREYKNSNQLREYQLEGMNWLLFNWYNRKNCILADEMGLGKTIQSITFLSEIFLRGIHGPFLIIAPLSTITNWEREFRTWTEMNAIVYHGSQISRQMIQQYEMVYRDAQGNPLSGVFKFHVVITTFEMILADCPELKKIHWSCVIIDEAHRLKNRNCKLLEGLKLMALEHKVLLTGTPLQNSVEELFSLLNFLEPSQFPSETAFLEEFGDLKTEEQVKKLQSILKPMMLRRLKDDVEKNLAPKQETIIEVELTNIQKKYYRAILEKNFSFLTKGANQHNMPNLINTMMELRKCCNHPYLINGAEEKILEDFRKTHSPDAPDFQLQAMIQAAGKLVLIDKLLPKLIAGGHKVLIFSQMVRCLDILEDYLIQRRYTYERIDGRVRGNLRQAAIDRFCKPDSDRFVFLLCTRAGGLGINLTAADTCIIFDSDWNPQNDLQAQARCHRIGQSKAVKVYRLITRNSYEREMFDKASLKLGLDKAVLQDINRKGGTNGVQQLSKMEVEDLLRKGAYGALMDEEDEGSKFCEEDIDQILQRRTHTITIQSEGKGSTFAKASFVASGNRTDISLDDPNFWQKWAKIAELDTEAKNEKESLVIDRPRVRKQTKHYNSFEEDELMEFSELDSDSDERPTRSRRLNDKARRYLRAECFRVEKNLLIFGWGRWKDILTHGRFKWHLNEKDMEMICRALLVYCVKHYKGDEKIKSFIWELITPTKDGQAQTLQNHSGLSAPVPRGRKGKKTKNQLLIPELKDADWLATCNPEVVLHDDGYKKHLKQHCNKVLLRVRMLYYLKAEILGEAAEKAFEGSPARELDVPLPDIDYMEIPVDWWDAEADKSLLIGVFKHGYERYNAMRADPALCFLEKVGMPDEKSLSAEQGVTDGTSDIPERGNTDKEDNAEDKVDGLQKQTESSSDGGDGVFSEKKDDSRAAQDGSDPDKSPWPVSSALTARLRRLVTVYQRCNRKELCRPEILGPGNQGYWVQEEMFRRTSEMDLINKEAQKRWTRREQADFYRTVSSFGVVYDQEKKTFDWTQFRIISRLDKKSDESLEQYFYSFVAMCRNVCRLPTWKDGGPPDTTIYVEPITEERAARTLYRIELLRKVREQVLKCPQLHERLQLCRPSLYLPVWWECGKHDRDLLIGTAKHGLNRTDCYIMNDPQLSFLDAYRNYAQHKRSGTQAPGNLCCLYQTNSKLYESLTYSQMSRTSESLENEPENLVRVESRDDHLSLPDVTCENFISKVQDVISINHDESLLPESLESMMYGKKVLSQEPSSFQESPSTNTESRKDVITISISKDGNCQSGGPEAEIASGPTFMGSLEAGGVAQANIKNGKHLLMSISKEGELCCSEAGQRPENIGQLEAKCLASPSLNPGNESGFVDMCSLSVCDSKRNLSSDQQLIDLLENKSLESKLILSQNHSDEEEEEEENEEENLAMAVGMGERPEVLHLTEPTTNISREKNQGFQDETKKGSLEVANQTPGLQRAFPAPAACQCHCKHMERWMHGLENDEFEIEKPKAYIPDLFKSKTNTIAMEGEPTAIPSQPFKVKHELLKEPWKESAEGQNVFPTYPLEGSELKSEDMDFENKDDYDRDGNCHSQDYPGKYSEEESKSSTSGITGDIGDELQEARAPTIAQLLQEKTLYSFSEWPKDRVIINRLDNICHVVLKGKWPSSQQYEPSGTLPTPVLTSSAGSRTSLSEPEAAEHSFSNGAALAAQIHKESFLAPVFTKDEQKHRRPYEFEVERDAKARGLEQFSATHGHTPIILNGWHGESAMDLSCSSEGSPGATSPFPVSASTPKIGAISSLQGALGMDLSGILQAGLIHPVTGQIVNGSLRRDDAATRRRRGRRKHVEGGMDLIFLKEQTLQAGILEVHEDPGQATLSTTHPEGPGPATSAPEPATAASSQAEKSIPSKSLLDWLRQQADYSLEVPGFGANFSDKPKQRRPRCKEPGKLDVSSLSGEERVPAIPKEPGLRGFLPENKFNHTLAEPILRDTGPRRRGRRPRSELLKAPSIVADSPSGMGPLFMNGLIAGMDLVGLQNMRNMPGIPLTGLVGFPAGFATMPTGEEVKSTLSMLPMMLPGMAAVPQMFGVGGLLSPPMATTCTSTAPASLSSTTKSGTAVTEKTAEDKPSSHDVKTDTLAEDKPGPGPFSDQSEPAITTSSPVAFNPFLIPGVSPGLIYPSMFLSPGMGMALPAMQQARHSEIVGLESQKRKKKKTKGDNPNSHPEPAPSCEREPSGDENCAEPSAPLPAEREHGAQAGEGALKDSNNDTN

SEQ ID NO: 9511 - protein, 463 aa, Homo sapiens
MAGAPGPLRLALLLLGMVGRAGPRPQGATVSLWETVQKWREYRRQCQRSLTEDPPPATDLFCNRTFDEYACWPDGEPGSFVNVSCPWYLPWASSVPQGHVYRFCTAEGLWLQKDNSSLPWRDLSECEESKRGERSSPEEQLLFLYIIYTVGYALSFSALVIASAILLGFRHLHCTRNYIHLNLFASFILRALSVFIKDAALKWMYSTAAQQHQWDGLLSYQDSLSCRLVFLLMQYCVAANYYWLLVEGVYLYTLLAFSVLSEQWIFRLYVSIGWGVPLLFVVPWGIVKYLYEDEGCWTRNSNMNYWLIIRLPILFAIGVNFLIFVRVICIVVSKLKANLMCKTDIKCRLAKSTLTLIPLLGTHEVIFAFVMDEHARGTLRFIKLFTELSFTSFQGLMVAILYCFVNNEVQLEFRKSWERWRLEHLHIQRDSSMKPLKCPTSSLSSGATAGSSMYTATCQASCS

SEQ ID NO: 9512 - protein, 851 aa, Homo sapiens
MNYVGQLAETVFGTVKELYRGLNPATLSGGIDVLVVKQVDGSFRCSPFHVRFGKLGVLRSREKVVDIELNGEPVDLHMKLGDSGEAFFVQELESDDEHVPPGLCTSPIPWGGLSGFPSDSQLGTASEPEGLVMAGTASTGRRKRRRRRKPKQKEDAVATDSSPEELEAGAESELSLPEKLRPEPPGVQLEEKSSLQPKDIYPYSDGEWPPQASLSAGELTSPKSDSELEVRTPEPSPLRAESHMQWAWGRLPKVARAERPESSVVLEGRAGATSPPRGGPSTPSTSVAGGVDPLGLPIQQTEAGADLQPDTEDPTLVGPPLHTPETEESKTQSSGDMGLPPASKSWSWATLEVPVPTGQPERVSRGKGSPKRSQHLGPSDIYLDDLPSLDSENAALYFPQSDSGLGARRWSEPSSQKSLRDPNPEHEPEPTLDTVDTIALSLCGGLADSRDISLEKFNQHSVSYQDLTKNPGLLDDPNLVVKINGKHYNWAVAAPMILSLQAFQKNLPKSTMDKLEREKMPRKGGRWWFSWRRRDFLAEERSAQKEKTAAKEQQGEKTEVLSSDDDAPDSPVILEIPSLPPSTPPSTPTYKKSLRLSSDQIRRLNLQEGANDVVFSVTTQYQGTCRCKATIYLWKWDDKVVISDIDGTITKSDALGHILPQLGKDWTHQGITSLYHKIQLNGYKFLYCSARAIGMADLTKGYLQWVSEGGCSLPKGPILLSPSSLFSALHREVIEKKPEVFKVACLSDIQQLFLPHGQPFYAAFGNRPNDVFAYRQVGLPESRIFTVNPRGELIQELIKNHKSTYERLGEVVELLFPPVARGPSTDLANPEYSNFCYWREPLPAVDLDTLD

SEQ ID NO: 9513 - protein, 1290 aa, Homo sapiens
MAGAASPCANGCGPGAPSDAEVLHLCRSLEVGTVMTLFYSKKSQRPERKTFQVKLETRQITWSRGADKIEGAIDIREIKEIRPGKTSRDFDRYQEDPAFRPDQSHCFVILYGMEFRLKTLSLQATSEDEVNMWIKGLTWLMEDTLQAPTPLQIERWLRKQFYSVDRNREDRISAKDLKNMLSQVNYRVPNMRFLRERLTDLEQRSGDITYGQFAQLYRSLMYSAQKTMDLPFLEASTLRAGERPELCRVSLPEFQQFLLDYQGELWAVDRLQVQEFMLSFLRDPLREIEEPYFFLDEFVTFLFSKENSVWNSQLDAVCPDTMNNPLSHYWISSSHNTYLTGDQFSSESSLEAYARCLRMGCRCIELDCWDGPDGMPVIYHGHTLTTKIKFSDVLHTIKEHAFVASEYPVILSIEDHCSIAQQRNMAQYFKKVLGDTLLTKPVEISADGLPSPNQLKRKILIKHKKLAEGSAYEEVPTSMMYSENDISNSIKNGILYLEDPVNHEWYPHYFVLTSSKIYYSEETSSDQGNEDEEEPKEVSSSTELHSNEKWFHGKLGAGRDGRHIAERLLTEYCIETGAPDGSFLVRESETFVGDYTLSFWRNGKVQHCRIHSRQDAGTPKFFLTDNLVFDSLYDLITHYQQVPLRCNEFEMRLSEPVPQTNAHESKEWYHASLTRAQAEHMLMRVPRDGAFLVRKRNEPNSYAISFRAEGKIKHCRVQQEGQTVMLGNSEFDSLVDLISYYEKHPLYRKMKLRYPINEEALEKIGTAEPDYGALYEGRNPGFYVEANPMPTFKCAVKALFDYKAQREDELTFIKSAIIQNVEKQEGGWWRGDYGGKKQLWFPSNYVEEMVNPVALEPEREHLDENSPLGDLLRGVLDVPACQIAIRPEGKNNRLFVFSISMASVAHWSLDVAADSQEELQDWVKKIREVAQTADARLTEGKIMERRKKIALELSELVVYCRPVPFDEEKIGTERACYRDMSSFPETKAEKYVNKAKGKKFLQYNRLQLSRIYPKGQRLDSSNYDPLPMWICGSQLVALNFQTPDKPMQMNQALFMTGRHCGYVLQPSTMRDEAFDPFDKSSLRGLEPCAISIEVLGARHLPKNGRGIVCPFVEIEVAGAEYDSTKQKTEFVVDNGLNPVWPAKPFHFQISNPEFAFLRFVVYEEDMFSDQNFLAQATFPVKGLKTGYRAVPLKNNYSEDLELASLLIKIDIFPAKENGDLSPFSGTSLRERGSDASGQLFHGRAREGSFESRYQQPFEDFRISQEHLADHFDSRERRAPRRTRVNGDNRL

SEQ ID NO: 9514 - protein, 1802 aa, Homo sapiens
MAAAPTQIEAELYYLIARFLQSGPCNKSAQVLVQELEEHQLIPRRLDWEGKEHRRSFEDLVAANAHIPPDYLLKICERIGPLLDKEIPQSVPGVQTLLGVGRQSLLRDAKDCKSTLWNGSAFAALHRGRPPELPVNYVKPPNVVNITSARQLTGCSRFGHIFPSSAYQHIKMHKRILGHLSSVYCVAFDRSGRRIFTGSDDCLVKIWATDDGRLLATLRGHSAEISDMAVNYENTLIAAGSCDKVVRVWCLRTCAPVAVLQGHSASITSIQFCPSTKGTNRYLTSTGADGTICFWQWHVKTMKFRDRPVKFTERSRPGVQISCSSFSSGGMFITTGSTDHVIRIYYLGSEVPEKIAELESHTDKVVAVQFCNNGDSLRFVSGSRDGTARIWQYQQQEWKSIVLDMATKMTGNNLPSGEDKITKLKVTMVAWDRYDTTVITAVNNFLLKVWNSITGQLLHTLSGHDDEVFVLEAHPFDQRIILSAGHDGNIFIWDLDRGTKIRNYFNMIEGQGHGAVFDCKFSPDGNHFACTDSHGHLLLFGFGCSKYYEKIPDQMFFHTDYRPLIRDANNYVLDEQTQQAPHLMPPPFLVDVDGNPHPTKFQRLVPGRENCKDEQLIPQLGYVANGDGEVVEQVIGQQTNDQDESILDGIIRELQREQDLRLINEGDVPHLPVNRAYSVNGALRSPNMDISSSPNIRLRRHSSQIEGVRQMHNNAPRSQMATERDLMAWSRRVVVNELNNGVSRVQEECRTAKGDIEISLYTVEKKKKPSYTTQRNDYEPSCGRSLRRTQRKRQHTYQTRSNIEHNSQASCQNSGVQEDSDSSSEEDETVGTSDASVEDPVVEWQSESSSSDSSSEYSDWTADAGINLQPPKRQTRQTTRKICSSSDEENLKSLEERQKKPKQTRKKKGGLVSIAGEPNEEWFAPQWILDTIPRRSPFVPQMGDELIYFRQGHEAYVRAVRKSKIYSVNLQKQPWNKMDLREQEFVKIVGIKYEVGPPTLCCLKLAFLDPISGKMTGESFSIKYHDMPDVIDFLVLHQFYNEAKERNWQIGDRFRSIIDDAWWFGTVESQQPFQPEYPDSSFQCYSVHWDNNEREKMSPWDMEPIPEGTAFPDEVGAGVPVSQEELTALLYKPQEGEWGAHSRDEECERVIQGINHLLSLDFASPFAVPVDLSAYPLYCTVVAYPTDLNTIRRRLENRFYRRISALMWEVRYIEHNARTFNEPDSPIVKAAKIVTDVLLRFIGDQSCTDILDTYNKIKAEERNSTDAEEDTEIVDLDSDGPGTSSGRKVKCRGRRQSLKCNPDAWKKQCKELLSLIYEREDSEPFRQPADLLSYPGHQEQEGESSESVVPERQQDSSLSEDYQDVIDTPVDFSTVKETLEAGNYGSPLEFYKDVRQIFNNSKAYTSNKKSRIYSMMLRLSALFESHIKNIISEYKSAIQSQKRRRPRYRKRLRSSSSSLSSSGAPSPKGKQKQMKLQPKNDQNTSVSHARTSSPFSSPVSDAAEGLSLYLLDDEPDGPFSSSSFGGYSRSGNSHDPGKAKSFRNRVLPVKQDHSLDGPLTNGDGREPRTGIKRKLLSASEEDENMGGEDKEKKETKEKSHLSTSESGELGSSLSSESTCGSDSDSESTSRTDQDYVDGDHDYSKFIQTRPKRKLRKQHGNGKRNWKTRGTGGRGRWGRWGRWSRGGRGRGGRGRGSRGRGGGGTRGRGRGRGGRGASRGATRAKRARIADDEFDTMFSGRFSRLPRIKTRNQGRRTVLYNDDSDNDNFVSTEDPLNLGTSRSGRVRKMTEKARVSHLMGWNY

SEQ ID NO: 9515 - protein, 647 aa, Homo sapiens
MGEIEGTYRVLQTAGMRLGAQTPVGVSTLEPGQTLLPRMQEKHLHLRVKLLDNTMEIFDIEPKCDGQVLLTQVWKRLNLVECDYFGMEFQNTQSYWIWLEPMKPIIRQIRRPKNVVLRLAVKFFPPDPGQLQEEYTRYLFALQLKRDLLEERLTCADTTAALLTSHLLQSEIGDYDETLDREHLKVNEYLPGQQHCLEKILEFHQKHVGQTPAESDFQVLEIARKLEMYGIRFHMASDREGTKIQLAVSHMGVLVFQGTTKINTFNWSKVRKLSFKRKRFLIKLHPEVHGPYQDTLEFLLGSRDECKNFWKICVEYHTFFRLLDQPKPKAKAVFFSRGSSFRYSGRTQKQLVDYFKDSGMKRIPYERRHSKTHTSVRALTADLPKQSISFPEGLRTPASPSSANAFYSLSPSTLVPSGLPEFKDSSSSLTDPQVSYVKSPAAERRSGAVAGGPDTPSAQPLGPPALQPGPGLSTKSPQPSPSSRKSPLSLSPAFQVPLGPAEQGSSPLLSPVLSDAGGAGMDCEEPRHKRVPADEAYFIVKEILATERTYLKDLEVITVWFRSAVVKEDAMPATLMTLLFSNIDPIYEFHRGFLREVEQRLALWEGPSKAHTKGSHQRIGDILLRNMRQLKVFQLHEGHVAGVTKME

SEQ ID NO: 9516 - protein, 873 aa, Homo sapiens
MTDSDEDALKVDQGPSRDIPKPWVIPAPKGILQHIFGTSHVFQSICDVKPKVTGLTVPLKVREYYSRGQQCLEQADWETAVLLFSRALHLDPQLVDFYALRAEAYLQLCDFSSAAQNLRRAYSLQQDNCKHLERLTFVLYLQGQCLFEQCAFLDALNVFSHAAELQPEKPCFRYRCMACLLALKQHQACLTLITNELKQDTTNADVYIFRARLYNFLQKPHLCYRDLHSALLLNPKHPQARMLLQKMVAQAQQARQDAGILAVQGKLQHALQRINRAIENNPLDPSLFLFRGTMYRRLQEFDGAVEDFLKVLDMVTEDQEDMVRQAQRQLLLTYNDFAVHCYRQGAYQEGVLLLNKALRDEQQEKGLYINRGDCFFQLGNLAFAEADYQQALALSPQDEGANTRMGLLQEKMGFCEQRRKQFQKAENHFSTAIRHNPQKAQYYLYRAKSRQLLQNIFGARQDVATVLLLNPKQPKLSLLMTNLFPGMSVEEVLSTQIAHLARLQLEQMVEGSLQAGSPQGIVGMLKRHELERQKALALQHSWKQGEPLIATSEELKATPEIPQVKPGSSEGEAEAPEEEEEKEKEKKEEKKSELIPSKVASLSDSYLDQTSSASSMSFRTTGTSETEMSAICQEYRSTSATAVTFSDSSLLKTQSSDSGNNREALSHGPRKIKATQGQRQSLSKTEPTQSQRRNSSKTKATIHKRNSSKTKATQSQRRNSSKTRATQGQGQSSSKTEATQGQRQSSSEIEATQGPRQEPSKTKTTRSPRQRPRKVKAARGRSWRPSKVDATQGRSRGLLRSSTKTEAFYDSNWSLSKTEYAQGQGQRSSKAEGAQGKSQGMSSTSSKAESTWGPSPSLSKTEVDQDLTYYEAV

SEQ ID NO: 9517 - protein, 294 aa, Homo sapiens
MPRGDSEQVRYCARFSYLWLKFSLIIYSTVFWLIGALVLSVGIYAEVERQKYKTLESAFLAPAIILILLGVVMFMVSFIGVLASLRDNLYLLQAFMYILGICLIMELIGGVVALTFRNQTIDFLNDNIRRGIENYYDDLDFKNIMDFVQKKFKCCGGEDYRDWSKNQYHDCSAPGPLACGVPYTCCIRNTTEVVNTMCGYKTIDKERFSVQDVIYVRGCTNAVIIWFMDNYTIMAGILLGILLPQFLGVLLTLLYITRVEDIIMEHSVTDGLLGPGAKPSVEAAGTGCCLCYPN

SEQ ID NO: 9518 - protein, 972 aa, Homo sapiens
GLSIMVSGKLDAVMKARKDIVARLQTQASATVAIPKEHHRFVIGKNGEKLQDLELKTATKIQIPRPDDPSNQIKITGTKEGIEKARHEVLLISAEQDKRAVERLEVEKAFHPFIAGPYNRLVGEIMQETGTRINIPPPSVNRTEIVFTGEKEQLAQAVARIKKIYEEKANSFTVSSVAAPSWLHRFIIGKKGQNLAKITQQMPKVHIEFTEGEDKITLEGPTEDVNVAQEQIEGMVKDLINRMDYVEINIDHKFHRHLIGKSGANINRIKDQYKVSVRIPPDSEKSNLIRIEGDPQGVQQAKRELLELASRMENERTKDLIIEQRFHRTIIGQKGERIREIRDKFPEVIINFPDPAQKSDIVQLRGPKNEVEKCTKYMQKMVADLVENSYSISVPIFKQFHKNIIGKGGANIKKIREESNTKIDLPAENSNSETIIITGKRANCEAARSRILSIQKDLANIAEVEVSIPAKLHNSLIGTKGRLIRSIMEECGGVHIHFPVEGSGSDTVVIRGPSSDVEKAKKQLLHLAEEKQTKSFTVDIRAKPEYHKFLIGKGGGKIRKVRDSTGARVIFPAAEDKDQDLITIIGKEDAVREAQKELEALIQNLDNVVEDSMLVDPKHHRHFVIRRGQVLREIAEEYGGVMVSFPRSGTQSDKVTLKGAKDCVEAAKKRIQEIIEDLEAQVTLECAIPQKFHRSVMGPKGSRIQQITRDFSVQIKFPDREENAVHSTEPVVQENGDEAGEGREAKDCDPGSPRRCDIIIISGRKEKCEAAKEALEALVPVTIEVEVPFDLHRYVIGQKGSGIRKMMDEFEVNIHVPAPELQSDIIAITGLAANLDRAKAGLLERVKELQAEQEDRALRSFKLSVTVDPKYHPKIIGRKGAVITQIRLEHDVNILNLEEEYLADVVDSEALQVYMKPPAHEEAKAPSRGFVVRDAPWTASSSEKAPDMSSSEEFPSFGAQVAPKTLPWGPKR

SEQ ID NO: 9519 - protein, 520 aa, Homo sapiens
MALSSRARAFSVEALVGRPSKRKLQDPIQAEQPELREKKGGEEEEERRSSAAGKSEPLEKQPKTEPSTSASSGCGSDSGYGNSSESLEEKDIQMELQGSELWKRFHDIGTEMIITKAGRRMFPSVRVKVKGLDPGKQYHVAIDVVPVDSKRYRYVYHSSQWMVAGNTDHLCIIPRFYVHPDSPCSGETWMRQIISFDRMKLTNNEMDDKGHIILQSMHKYKPRVHVIEQGSSVDLSQIQSLPTEGVKTFSFKETEFTTVTAYQNQQITKLKIERNPFAKGFRDTGRNRGVLDGLLETYPWRPSFTLDFKTFGADTQSGSSGSSPVTSSGGAPSPLNSLLSPLCFSPMFHLPTSSLGMPCPEAYLPNVNLPLCYKICPTNFWQQQPLVLPAPERLASSNSSQSLAPLMMEVPMLSSLGVTNSKSGSSEDSSDQYLQAPNSTNQMLYGLQSPGNIFLPNSITPEALSCSFHPSYDFYRYNFSMPSRLISGSNHLKVNDDSQVSFGEGKCNHVHWYPAINHYL

SEQ ID NO: 9520 - protein, 263 aa, Homo sapiens
MVKIAFNTPTAVQKEEARQDVEALLSRTVRTQILTGKELRVATQEKEGSSGRCMLTLLGLSFILAGLIVGGACIYKYFMPKSTIYRGEMCFFDSEDPANSLRGGEPNFLPVTEEADIREDDNIAIIDVPVPSFSDSDPAAIIHDFEKGMTAYLDLLLGNCYLMPLNTSIVMPPKNLVELFGKLASGRYLPQTYVVREDLVAVEEIRDVSNLGIFIYQLCNNRKSFRLRRRDLLLGFNKRAIDKCWKIRHFPNEFIVETKICQE

SEQ ID NO: 9521 - protein, 337 aa, Homo sapiens
MDETGNLTVSSATCHDTIDDFRNQVYSTLYSMISVVGFFGNGFVLYVLIKTYHKKSAFQVYMINLAVADLLCVCTLPLRVVYYVHKGIWLFGDFLCRLSTYALYVNLYCSIFFMTAMSFFRCIAIVFPVQNINLVTQKKARFVCVGIWIFVILTSSPFLMAKPQKDEKNNTKCFEPPQDNQTKNHVLVLHYVSLFVGFIIPFVIIIVCYTMIILTLLKKSMKKNLSSHKKAIGMIMVVTAAFLVSFMPYHIQRTIHLHFLHNETKPCDSVLRMQKSVVITLSLAASNCCFDPLLYFFSGGNFRKRLSTFRKHSLSSVTYVPRKKASLPEKGEEICKV

SEQ ID NO: 9522 - protein, 746 aa, Homo sapiens
MGDVLSTHLDDARRQHIAEKTGKILTEFLQFYEDQYGVALFNSMRHEIEGTGLPQAQLLWRKVPLDERIVFSGNLFQHQEDSKKWRNRFSLVPHNYGLVLYENKAAYERQVPPRAVINSAGYKILTSVDQYLELIGNSLPGTTAKSGSAPILKCPTQFPLILWHPYARHYYFCMMTEAEQDKWQAVLQDCIRHCNNGIPEDSKVEGPAFTDAIRMYRQSKELYGTWEMLCGNEVQILSNLVMEELGPELKAELGPRLKGKPQERQRQWIQISDAVYHMVYEQAKARFEEVLSKVQQVQPAMQAVIRTDMDQIITSKEHLASKIRAFILPKAEVCVRNHVQPYIPSILEALMVPTSQGFTEVRDVFFKEVTDMNLNVINEGGIDKLGEYMEKLSRLAYHPLKMQSCYEKMESLRLDGLQQRFDVSSTSVFKQRAQIHMREQMDNAVYTFETLLHQELGKGPTKEELCKSIQRVLERVLKKYDYDSSSVRKRFFREALLQISIPFLLKKLAPTCKSELPRFQELIFEDFARFILVENTYEEVVLQTVMKDILQAVKEAAVQRKHNLYRDSMVMHNSDPNLHLLAEGAPIDWGEEYSNSGGGGSPSPSTPESATLSEKRRRAKQVVSVVQDEEVGLPFEASPESPPPASPDGVTEIRGLLAQGLRPESPPPAGPLLNGAPAGESPQPKAAPEASSPPASPLQHLLPGKAVDLGPPKPSDQETGEQVSSPSSHPALHTTTEDSAGVQTEF

SEQ ID NO: 9523 - protein, 323 aa, Homo sapiens
MAAELSMGPELPTSPLAMEYVNDFDLLKFDVKKEPLGRAERPGRPCTRLQPAGSVSSTPLSTPCSSVPSSPSFSPTEQKTHLEDLYWMASNYQQMNPEALNLTPEDAVEALIGSHPVPQPLQSFDSFRGAHHHHHHHHPHPHHAYPGAGVAHDELGPHAHPHHHHHHQASPPPSSAASPAQQLPTSHPGPGPHATASATAAGGNGSVEDRFSDDQLVSMSVRELNRHLRGFTKDEVIRLKQKRRTLKNRGYAQSCRYKRVQQKHHLENEKTQLIQQVEQLKQEVSRLARERDAYKVKCEKLANSGFREAGSTSDSPSSPEFFL

SEQ ID NO: 9524 - protein, 733 aa, Homo sapiens
MGWMGEKTGKILTEFLQFYEDQYGVALFNSMRHEIEGTGLPQAQLLWRKVPLDERIVFSGNLFQHQEDSKKWRNRFSLVPHNYGLVLYENKAAYERQVPPRAVINSAGYKILTSVDQYLELIGNSLPGTTAKSGSAPILKCPTQFPLILWHPYARHYYFCMMTEAEQDKWQAVLQDCIRHCNNGIPEDSKVEGPAFTDAIRMYRQSKELYGTWEMLCGNEVQILSNLVMEELGPELKAELGPRLKGKPQERQRQWIQISDAVYHMVYEQAKARFEEVLSKVQQVQPAMQAVIRTDMDQIITSKEHLASKIRAFILPKAEVCVRNHVQPYIPSILEALMVPTSQGFTEVRDVFFKEVTDMNLNVINEGGIDKLGEYMEKLSRLAYHPLKMQSCYEKMESLRLDGLQQRFDVSSTSVFKQRAQIHMREQMDNAVYTFETLLHQELGKGPTKEELCKSIQRVLERVLKKYDYDSSSVRKRFFREALLQISIPFLLKKLAPTCKSELPRFQELIFEDFARFILVENTYEEVVLQTVMKDILQAVKEAAVQRKHNLYRDSMVMHNSDPNLHLLAEGAPIDWGEEYSNSGGGGSPSPSTPESATLSEKRRRAKQVVSVVQDEEVGLPFEASPESPPPASPDGVTEIRGLLAQGLRPESPPPAGPLLNGAPAGESPQPKAAPEASSPPASPLQHLLPGKAVDLGPPKPSDQETGEQVSSPSSHPALHTTTEDSAGVQTEF

SEQ ID NO: 9525 - protein, 720 aa, Homo sapiens
MEGAHASLSLEDEVSGAGSRQRPLEGKGGETPAAEEPGSLKNYAVFATRDVSAAPEKEEEEAEGPLRAQDLRESYIQLVQGVQEWQDGCMYQGEFGLNMKLGYGKFSWPTGESYHGQFYRDHCHGLGTYMWPDGSSFTGTFYLSHREGYGTMYMKTRLFQTHCHNDIVNLLLDCGADVNKCSDEGLTALSMCFLLHYPAQSFKPNVAERTIPEPQEPPKFPVVPILSSSFMDTNLESLYYEVNVPSQGSYELRPPPAPLLLPRVSGSHEGGHFQDTGQCGGSIDHRSSSLKGDSPLVKGSLGHVESGLEDVLGNTDRGSLCSAETKFESNVCVCDFSIELSQAMLERSAQSHSLLKMASPSPCTSSFDKGTMRRMALSMIERRKRWRTIKLLLRRGADPNLCCVPMQVLFLAVKAGDVDGVRLLLEHGARTDICFPPQLSTLTPLHIAAALPGEEGVQIVELLLHAITDVDAKASDEDDTYKPGKLDLLPSSLKLSNEPGPPQAYYSTDTALPEEGGRTALHMACEREDDNKIDRLISHGADILKPVMLRQGEKEAVGTAVDYGYFRFFQDRRIARCPFHTLMPAERETFLARKRLLEYMGLQLRQAVFAKESQWDPTWLYLCKRAELIPSHRMKKKGPSLPRGLDVKEQGQIPFFKFCYQCGRSIGVRLLPCPRCYGILTCSKYCKTKAWTEFHKKDCGDLVAIVTQLEQVSRRREEFQ

SEQ ID NO: 9526 - protein, 672 aa, Homo sapiens
MAAPVGPVKFWRPGTEGPGVSISEERQSLAENSGTTVVYNPYAALSIEQQRQKLPVFKYLAEAGWTAEGRVVGVTQPRRVAAVTVAGRVAEERGAVLGHEVGYCIRFDDCTDQLATRIKFLTDGMLVREMMVDPLLTKYSVIMLDEAHERTLYTDIAIGLLKKIQKKRGDLRLIVASATLDADKFRDFFNQNETSDPARDTCVILTVEGRTFPVDIFYLQSPVPDYIKSTVETVVKIHQTEGDGDVLAFLTGQEEVETVVSMLIEQARALARTGMKRHLRVLPMYAGLPSFEQMKVFERVSRSVRKVIVATNVAETSITISGIVYVIDCGFVKLRAYNPRTAIECLVVVPVSQASANQRAGRGGRSRSGKCYRLYTEEAFDKLPQSTVPEMQRSNLAPVILQLKALGIDNVLRFHFMSPPPAQSMVQALELLYALGGLDKDCRLTEPLGMRIAEFPLNPMFAKMLLESGNFGCSQEILSIAAMMQIQNIFVVPPNQKSHAIRVHRKFAVEEGDHLTMLNIYEAFIKHNKDSKWCQEHFLNYKGLVRAATVREQLKKLLVKFQVPRKSSEGDPDLVLRCIVSGFFANAARFHSTGAYRTIRDDHELHIHPASVLYAEKPPRWVIYNEVIQTSKYYMRDVTAIESAWLLELAPHFYQQGTHLSLKAKRAKVQDP

SEQ ID NO: 9527 - protein, 696 aa, Homo sapiens
MPLFFRKRKPSEEARKRLEYQMCLAKEAGADDILDISKCELSEIPFGAFATCKVLQKKVLIVHTNHLTSLLPKSCSLLSLATIKVLDLHDNQLTALPDDLGQLTALQVLNVERNQLMQLPRSIGNLTQLQTLNVKDNKLKELPDTVGELRSLRTLNISGNEIQRLPQMLAHVRTLEMLSLDASAMVYPPREVCGAGTAAILQFLCKESGLEYYPPSQYLLPILEQDGIENSRDSPDGPTDRFSREELEWQNRFSDYEKRKEQKMLEKLEFERRLELGQREHTQLLQQSSSQKDEILQTVKEEQSRLEQGLSEHQRHLNAERQRLQEQLKQTEQNISSRIQKLLQDNQRQKKSSEILKSLENERIRMEQLMSITQEETESLRRRDVASAMQQMLTESCKNRLIQMAYESQRQNLVQQACSSMAEMDERFQQILSWQQMDQNKAISQILQESAMQKAAFEALQVKKDLMHRQIRSQEMISEQRWALSSLLQQLLKEKQQREEELREILTELEAKSETRQENYWLIQYQRLLNQKPLSLKLQEEGMERQLVALLEELSAEHYLPIFAHHRLSLDLLSQMSPGDLAKVGVSEAGLQHEILRRVQELLDAARIQPELKPPMGEVVTPTAPQEPPESVRPSAPPAELEVQASECVVCLEREAQMIFLNCGHVCCCQQCCQPLRTCPLCRQDIAQRLRIYHSS

SEQ ID NO: 9528 - protein, 679 aa, Homo sapiens
MAAPVGPVKFWRPGTEGPGVSISEERQSLAENSGTTVVYNPYAALSIEQQRQKLPVFKLRNHILYLIENYQTVVIVGETGCGKSTQIPQYLAEAGWTAEGRVVGVTQPRRVAAVTVAGRVAEERGAVLGHEVGYCIRFDDCTDQLATRIKFLTDGMLVREMMVDPLLTKYSVIMLDEAHERTLYTDIAIGLLKKIQKKRGDLRLIVASATLDADKFRDFFNQNETSDPARDTCVILTVEGRTFPVDIFYLQSPVPDYIKSTVETVVKIHQTEGDGDVLAFLTGQEEVETVVSMLIEQARALARTGMKRHLRVLPMYAGLPSFEQMKVFERVSRSVRKVIVATNVAETSITISGIVYVIDCGFVKLRAYNPRTAIECLVVVPVSQASANQRAGRGGRSRSGKCYRLYTEEAFDKLPQSTVPEMQRSNLAPVILQLKALGIDNVLRFHFMSPPPAQSMVQALELLYALGGLDKDCRLTEPLGMRIAEFPLNPMFAKMLLESGNFGCSQEILSIAAMMQIQNIFVVPPNQKSHAIRVHRKFAVEEGDHLTMLNIYEAFIKHNKDSKWCQEHFLNYKGLVRAATVREQLKKLLVKFQVPRKSSEGDPDLVLRCIVSGFFANAARFHSTGAYRVIYNEVIQTSKYYMRDVTAIESAWLLELAPHFYQQGTHLSLKAKRAKVQDP

SEQ ID NO: 9529 - protein, 691 aa, Homo sapiens
MNAAVVRRTQEALGKVIRRPPLTEKLLSKPPFRYLHDIITEVIRMTGFMKGLYTDAEMKSDNVKDKDAKISFLQKAIDVVVMVSGEPLLAKPARIVAGHEPERTNELLQIIGKCCLNKLSSDDAVRRVLAGEKGEVKGRASLTSRSQELDNKNVREEESRVHKNTEDRGDAEIKERSTSRDRKQKEELKEDRKPREKDKDKEKAKENGGNRHREGERERAKARARPDNERQKDRGNRERDRDSERKKETERKSEGGKEKERLRDRDRERDRDKGKDRDRRRVKNGEHSWDLDREKNREHDKPEKKSASSGEMSKKLSDGTFKDSKAETETEISTRASKSLTTKTSKRRSKNSVEGRKEDNISAKSLDSIVSGINNEPNQETTTSEIGTKEANINSTSISDDNSASLRCENIQPNPTEKQKGDSTSDAEGDAGPAGQDKSEVPETPEIPNELSSNIRRIPRPGSARPAPPRVKRQDSMEALQMDRSGSGKTVSNVITESHNSDNEEDDQFVVEAAPQLSEMSEIEMVTAVELEEEEKHGGLVKKILETKKDYEKLQQSPKPGEKERSLFESAWKKEKDIVSKEIEKLRTSIQTLCKSALPLGKIMDYIQEDVDAMQNELQMWHSENRQHAEALQQEQRITDCAVEPLKAELAELEQLIKDQQDKICAVKANILKNEEKIQKMVYSINLTSRR

SEQ ID NO: 9530 - protein, 525 aa, Homo sapiens
MASHVDLLTELQLLEKVPTLERLRAAQKRRAQQLKKWAQYEQDLQHRKRKHERKRSTGGRRKKVSFEASVALLEASLRNDAEEVRYFLKNKVSPDLCNEDGLTALHQCCIDNFEEIVKLLLSHGANVNAKDNELWTPLHAAATCGHINLVKILVQYGADLLAVNSDGNMPYDLCEDEPTLDVIETCMAYQGITQEKINEMRVAPEQQMIADIHCMIAAGQDLDWIDAQGATLMQMAELLVSHGASLSARTSMDEMPIDLCEEEEFKVLLLELKHKHDVIMKSQLRHKSSLSRRTSSAGSRGKVVRRASLSDRTNLYRKEYEGEAILWQRSAAEDQRTSTYNGDIRETRTDQENKDPNPRLEKPVLLSEFPTKIPRGELDMPVENGLRAPVSAYQYALANGDVWKVHEVPDYSMAYGNPGVADATPPWSSYKEQSPQTLLELKRQRAAAKLLSHPFLSTHLGSSMARTGESSSEGKAPLIGGRTSPYSSNGTSVYYTVTSGDPPLLKFKAPIEEMEEKVHGCCRIS

SEQ ID NO: 9531 - protein, 2492 aa, Homo sapiens
MTAEPMSESKLNTLVQKLHDFLAHSSEESEETSSPPRLAMNQNTDKISGSGSNSDMMENSKEEGTSSSEKSKSSGSSRSKRKPSIVTKYVESDDEKPLDDETVNEDASNENSENDITMQSLPKGTVIVQPEPVLNEDKDDFKGPEFRSRSKMKTENLKKRGEDGLHGIVSCTACGQQVNHFQKDSIYRHPSLQVLICKNCFKYYMSDDISRDSDGMDEQCRWCAEGGNLICCDFCHNAFCKKCILRNLGRKELSTIMDENNQWYCYICHPEPLLDLVTACNSVFENLEQLLQQNKKKIKVDSEKSNKVYEHTSRFSPKKTSSNCNGEEKKLDDSCSGSVTYSYSALIVPKEMIKKAKKLIETTANMNSSYVKFLKQATDNSEISSATKLRQLKAFKSVLADIKKAHLALEEDLNSEFRAMDAVNKEKNTKEHKVIDAKFETKARKGEKPCALEKKDISKSEAKLSRKQVDSEHMHQNVPTEEQRTNKSTGGEHKKSDRKEEPQYEPANTSEDLDMDIVSVPSSVPEDIFENLETAMEVQSSVDHQGDGSSGTEQEVESSSVKLNISSKDNRGGIKSKTTAKVTKELYVKLTPVSLSNSPIKGADCQEVPQDKDGYKSCGLNPKLEKCGLGQENSDNEHLVENEVSLLLEESDLRRSPRVKTTPLRRPTETNPVTSNSDEECNETVKEKQKLSVPVRKKDKRNSSDSAIDNPKPNKLPKSKQSETVDQNSDSDEMLAILKEVSRMSHSSSSDTDINEIHTNHKTLYDLKTQAGKDDKGKRKRKSSTSGSDFDTKKGKSAKSSIISKKKRQTQSESSNYDSELEKEIKSMSKIGAARTTKKRIPNTKDFDSSEDEKHSKKGMDNQGHKNLKTSQEGSSDDAERKQERETFSSAEGTVDKDTTIMELRDRLPKKQQASASTDGVDKLSGKEESFTSLEVRKVAETKEKSKHLKTKTCKKVQDGLSDIAEKFLKKDQSDETSEDDKKQSKKGTEEKKKPSDFKKKVIKMEQQYESSSDGTEKLPEREEICHFPKGIKQIKNGTTDGEKKSKKIRDKTSKKKDELSDYAEKSTGKGDSCDSSEDKKSKNGAYGREKKRCKLLGKSSRKRQDCSSSDTEKYSMKEDGCNSSDKRLKRIELRERRNLSSKRNTKEIQSGSSSSDAEESSEDNKKKKQRTSSKKKAVIVKEKKRNSLRTSTKRKQADITSSSSSDIEDDDQNSIGEGSSDEQKIKPVTENLVLSSHTGFCQSSGDEALSKSVPVTVDDDDDDNDPENRIAKKMLLEEIKANLSSDEDGSSDDEPEEGKKRTGKQNEENPGDEEAKNQVNSESDSDSEESKKPRYRHRLLRHKLTVSDGESGEEKKTKPKEHKEVKGRNRRKVSSEDSEDSDFQESGVSEEVSESEDEQRPRTRSAKKAELEENQRSYKQKKKRRRIKVQEDSSSENKSNSEEEEEEKEEEEEEEEEEEEEEEDENDDSKSPGKGRKKIRKILKDDKLRTETQNALKEEEERRKRIAEREREREKLREVIEIEDASPTKCPITTKLVLDEDEETKEPLVQVHRNMVIKLKPHQVDGVQFMWDCCCESVKKTKKSPGSGCILAHCMGLGKTLQVVSFLHTVLLCDKLDFSTALVVCPLNTALNWMNEFEKWQEGLKDDEKLEVSELATVKRPQERSYMLQRWQEDGGVMIIGYEMYRNLAQGRNVKSRKLKEIFNKALVDPGPDFVVCDEGHILKNEASAVSKAMNSIRSRRRIILTGTPLQNNLIEYHCMVNFIKENLLGSIKEFRNRFINPIQNGQCADSTMVDVRVMKKRAHILYEMLAGCVQRKDYTALTKFLPPKHEYVLAVRMTSIQCKLYQYYLDHLTGVGNNSEGGRGKAGAKLFQDFQMLSRIWTHPWCLQLDYISKENKGYFDEDSMDEFIASDSDETSMSLSSDDYTKKKKKGKKGKKDSSSSGSGSDNDVEVIKVWNSRSRGGGEGNVDETGNNPSVSLKLEESKATSSSNPSSPAPDWYKDFVTDADAEVLEHSGKMVLLFEILRMAEEIGDKVLVFSQSLISLDLIEDFLELASREKTEDKDKPLIYKGEGKWLRNIDYYRLDGSTTAQSRKKWAEEFNDETNVRGRLFIISTKAGSLGINLVAANRVIIFDASWNPSYDIQSIFRVYRFGQTKPVYVYRFLAQGTMEDKIYDRQVTKQSLSFRVVDQQQVERHFTMNELTELYTFEPDLLDDPNSEKKKKRDTPMLPKDTILAELLQIHKEHIVGYHEHDSLLDHKEEEELTEEERKAAWAEYEAEKKGLTMRFNIPTGTNLPPVSFNSQTPYIPFNLGALSAMSNQQLEDLINQGREKVVEATNSVTAVRIQPLEDIISAVWKENMNLSEAQVQALALSRQASQELDVKRREAIYNDVLTKQQMLISCVQRILMNRRLQQQYNQQQQQQMTYQQATLGHLMMPKPPNLIMNPSNYQQIDMRGMYQPVAGGMQPPPLQRAPPPMRSKNPGPSQGKSM

SEQ ID NO: 9532 - protein, 622 aa, Homo sapiens
MDQLPQKNLLRLHPAGSAGCSTGVESSSMDGFWMEVEQIQQRDELREEDSGGNEGQLPEEGEAESQWLQDTGLSGLLGGLGLDGDHQELLSTLTQTQVAAVCRRLDIYARSVRRQHKTPVRDVRDVFGVFNSGKMSSENGDSGMKGAQLSSGASKFPPAAEPGGLQEQAGREEAFNMDSAYSEQAAVLLQRSRPSRGGTSAWGKCSLPKFTVPKGRLGVTRIGDLSLQDMRKVPSLALIELTALCDILGLDLKRSKAGKWKAAETRLFGVPLDSLLEADHKVLPSTQVPLVLQALLSCLEKRGLDMEGILRVPGSQARVKGLEQKLERDFYAGLFSWDEVHHNDASDLLKRFIRKLPTPLLTAEYLPAFAVVPNIPNLKQRLQVLHLLILILPEPNRNALKALLEFLRKVVAREQHNKMTLRNVSTVMAPNLFLHQGRPPKLPKGKEKQLAEGAAEVVQIMVHYQDLLWTVASFLVAQVRKLNDSSSRRPQLCDAGLKTWLRRMHADRDKAGDGLEATPKVAKIQVVWPIKDPLKVPLTPSTKVAHVLRQFTEHLSPGSKGQEDSEDMDSLLLHHRSMESANILLYEVGGNINEHRLDPDAYLLDLYRANPHGEWVLKQNPT

SEQ ID NO: 9533 - protein, 153 aa, Homo sapiens
TVASFLVAQVRKLNDSSSRRPQLCDAGLKTWLRRMHADRDKAGDGLEATPKVAKIQVVWPIKDPLKVPLTPSTKVAHVLRQFTEHLSPGSKGQEDSEDMDSLLLHHRSMESANILLYEVGGNINEHRLDPDAYLLDLYRANPHGEWVLKQNPT

SEQ ID NO: 9534 - protein, 214 aa, Homo sapiens
MAFQQLSGVNAVMFYAETIFEEAKFKDSSLASVVVGVIQVLFTAVAALIMDRAGRRLLLVLSGVVMVFSTSAFGAYFKLTQGGPGNSSHVAISAPVSAQPVDASVGLAWLAVGSMCLFIAGFAVGWGPIPWLLMSEIFPLHVKGVATGICVLTNWLMAFLVTKEFSSLMEVLRPYGAFWLASAFCIFSVLFTLFCVPETKGKTLEQITAHFEGR

SEQ ID NO: 9535 - protein, 523 aa, Homo sapiens
MSLVSQNARHCSAEITADYGDGRGEIQATNASGSPTSMLVVDAPQCPQAPINSQCVNTSQAVQDPNDLEVLIDEQSRRLGALRVHDPLEDRSIALVNFMRMKSQTEGSIQQSEMLEFLREYSDQFPEILRRASAHLDQVFGLNLRVIDPQADTYNLVSKRGFQITDRIAESLDMPKASLLALVLGHILLNGNRAREASIWDLLLKVDMWDKPQRINNLFGNTRNLLTTDFVCMRFLEYWPVYGTNPLEFEFLWGSRAHREITKMEALKFVSDAHDEEPWSWPEEYNKALEGDKTKERSLTAGLEFWSEDTMNDKANDLVQLAISVTEEMLPIHQDELLAHTGKEFEDVFPNILNRATLILDMFYGLSLIEVDTSEHIYLLVQQPESEEEQVMLESLGRPTQEYVMPILGLIFLMGNRVKEANVWNLLRRFSVDVGRKHSITRKLMRQRYLECRPLSYSNPVEYELLWGPRAHHETIKMKVLEYMARLYRKRPQNWPEQYREAVEDEEARAKSEATIMFFLDPT

SEQ ID NO: 9536 - protein, 337 aa, Homo sapiens
MRRGWKMALSGGLRCCRRVLSWVPVLVIVLVVLWSYYAYVFELCLVTVLSPAEKVIYLILYHAIFVFFTWTYWKSIFTLPQQPNQKFHLSYTDKERYENEERPEVQKQMLVDMAKKLPVYTRTGSGAVRFCDRCHLIKPDRCHHCSVCAMCVLKMDHHCPWVNNCIGFSNYKFFLQFLAYSVLYCLYIATTVFSYFIKYWRGELPSVRSKFHVLFLLFVACMFFVSLVILFGYHCWLVSRNKTTLEAFCTPVFTSGPEKNGFNLGFIKNIQQVFGDKKKFWLIPIGSSPGDGHSFPMRSMNESQNPLLANEETWEDNEDDNQDYPEGSSSLAVETET

SEQ ID NO: 9537 - protein, 477 aa, Homo sapiens
MTPEDPEETQPLLGPPGGSAPRGRRVFLAAFAAALGPLSFGFALGYSSPAIPSLQRAAPPAPRLDDAAASWFGAVVTLGAAAGGVLGGWLVDRAGRKLSLLLCSVPFVAGFAVITAAQDVWMLLGGRLLTGLACGVASLVAPVYISEIAYPAVRGLLGSCVQLMVVVGILLAYLAGWVLEWRWLAVLGCVPPSLMLLLMCFMPETPRFLLTQHRRQEAMAALRFLWGSEQGWEDPPIGAEQSFHLALLRQPGIYKPFIIGVSLMAFQQLSGVNAVMFYAETIFEEAKFKDSSLASVVVGVIQVLFTAVAALIMDRAGRRLLLVLSGVVMVFSTSAFGAYFKLTQGGPGNSSHVAISAPVSAQPVDASVGLAWLAVGSMCLFIAGFAVGWGPIPWLLMSEIFPLHVKGVATGICVLTNWLMAFLVTKEFSSLMEVLRPYGAFWLASAFCIFSVLFTLFCVPETKGKTLEQITAHFEGR

SEQ ID NO: 9538 - protein, 408 aa, Homo sapiens
MPVISSRQDCDSATSTVTDILCAAEVKSSKGTEDRGRILGDSNLQVSKLLSQFPLKSTETSKVPDNKNVLDKTRVTKDFLQDNLFSGPGPKEPTGLSPFLLLPPRPPPARPDKLPELPAQKRQLPVFAKICSKPKADPAVERHHLMEWSPGTKEPKKGQGSLFLSQWPQSQKDACGEEGCCDAVGTASLTLPPKKPTCPAEKNLLYEFLGATKNPSGQPRLRNKVEVDGPELKFNAPVTVADKNNPKYTGNVFTPHFPTAMTSATLNQPLWLNLNYPPPPVFTNHSTFLQYQGLYPQQAARMPYQQALHPQLGCYSQQVMPYNPQQMGQQIFRSSYTPLLSYIPFVQPNYPYPQRTPPKMSANPRDPPLMAGDGPQYLFPQGYGFGSTSGGPLMHSPYFSSSGNGINF

SEQ ID NO: 9539 - protein, 426 aa, Homo sapiens
MLGSFSGTTVPALLNSTSNQLYLHFYSDISVSAAGFHLEYKTVGLSSCPEPAVPSNGVKTGERYLVNDVVSFQCEPGYALQGHAHISCMPGTVRRWNYPPPLCIAQCGGTVEEMEGVILSPGFPGNYPSNMDCSWKIALPVGFGAHIQFLNFSTEPNHDYIEIRNGPYETSRMMGRFSGSELPSSLLSTSHETTVYFHSDHSQNRPGFKLEYQAYELQECPDPEPFANGIVRGAGYNVGQSVTFECLPGYQLTGHPVLTCQHGTNRNWDHPLPKCEVPCGGNITSSNGTVYSPGFPSPYSSSQDCVWLITVPIGHGVRLNLSLLQTEPSGDFITIWDGPQQTAPRLGVFTRSMAKKTVQSSSNQVLLKFHRDAATGGIFAIAFSDHCRYFNQKSGKLDFTPSSTLGQLCKTLHRSLPHLRLQFLHL

SEQ ID NO: 9540 - protein, 1167 aa, Homo sapiens
MVIVILFPAECGNSVTGTQGTLLSPNFPVNYNNNHECIYSIQTQPGKGIQLKARAFELSEGDVLKVYDGNNNSARLLGVFSHSEMMGVTLNSTSSSLWLDFITDAENTSKGFELHFSSFELIKCEDPGTPKFGYKVHDEGHFAGSSVSFSCDPGYSLRGSEELLCLSGERRTWDRPLPTCVAECGGTVRGEVSGQVLSPGYPAPYEHNLNCIWTIEAEAGCTIGLHFLVFDTEEVHDVLRIWDGPVESGVLLKELSGPALPKDLHSTFNSVVLQFSTDFFTSKQGFAIQFSVSTATSCNDPGIPQNGSRSGDSWEAGDSTVFQCDPGYALQGSAEISCVKIENRFFWQPSPPTCIAPCGGDLTGPSGVILSPNYPEPYPPGKECDWKVTVSPDYVIALVFNIFNLEPGYDFLHIYDGRDSLSPLIGSFYGSQLPGRIESSSNSLFLAFRSDASVSNAGFVIDYTENPRESCFDPGSIKNGTRVGSDLKLGSSVTYYCHGGYEVEGTSTLSCILGPDGKPVWNNPRPVCTAPCGGQYVGSDGVVLSPNYPQNYTSGQICLYFVTVPKDYVVFGQFAFFHTALNDVVEVHDGHSQHSRLLSSLSGSHTGESLPLATSNQVLIKFSAKGLAPARGFHFVYQAVPRTSATQCSSVPEPRYGKRLGSDFSVGAIVRFECNSGYALQGSPEIECLPVPGALAQWNVSAPTCVVPCGGNLTERRGTILSPGFPEPYLNSLNCVWKIVVPEGAGIQIQVVSFVTEQNWDSLEVFDGADNTVTMLGSFSGTTVPALLNSTSNQLYLHFYSDISVSAAGFHLEYKTVGLSSCPEPAVPSNGVKTGERYLVNDVVSFQCEPGYALQGHAHISCMPGTVRRWNYPPPLCIAQCGGTVEEMEGVILSPGFPGNYPSNMDCSWKIALPVGFGAHIQFLNFSTEPNHDYIEIRNGPYETSRMMGRFSGSELPSSLLSTSHETTVYFHSDHSQNRPGFKLEYQAYELQECPDPEPFANGIVRGAGYNVGQSVTFECLPGYQLTGHPVLTCQHGTNRNWDHPLPKCEVPCGGNITSSNGTVYSPGFPSPYSSSQDCVWLITVPIGHGVRLNLSLLQTEPSGDFITIWDGPQQTAPRLGVFTRSMAKKTVQSSSNQVLLKFHRDAATGGIFAIAFSGHLAAVCTL

SEQ ID NO: 9541 - protein, 3631 aa, Homo sapiens
MPRSRGRELGRCGCPAGRARGETGISALVPGAGSRWGRPPPPTPPPLLLLLGCGLLSVSAAAGQNCTFQLHGPNGTVESPGFPYGYPNYANCTWTITAEEQHRIQLVFQSFALEEDFDVLSVFDGPPQPENLRTRLTGFQLPATIVSAATTLSLRLISDYAVSAQGFHATYEVLPSHTCGNPGRLPNGIQQGSTFNLGDKVRYSCNLGFFLEGHAVLTCHAGSENSATWDFPLPSCRADDACGGTLRGQSGIISSPHFPSEYHNNADCTWTILAELGDTIALVFIDFQLEDGYDFLEVTGTEGSSLWFTGASLPAPVISSKNWLRLHFTSDGNHRQRGFSAQYQVKKQIELKSRGVKLMPSKDNSQKTSVLTQVGVSQGHNMCPDPGIPERGKRLGSDFRLGSSVQFTCNEGYDLQGSKRITCMKVSDMFAAWSDHRPVCRARMCDAHLRGPSGIITSPNFPIQYDNNAHCVWIITALNPSKVIKLAFEEFDLERGYDTLTVGDGGQDGDQKTVLYILTGTSVPDLIVSTNHQMWLLFQTDGSGSSLGFKASYEEIEQGSCGDPGIPAYGRREGSRFHHGDTLKFECQPAFELVGQKAITCQKNNQWSAKKPGCVFSCFFNFTSPSGVVLSPNYPEDYGNHLHCVWLILARPESRIHLAFNDIDVEPQFDFLVIKDGATAEAPVLGTFSGNQLPSSITSSGHVARLEFQTDHSTGKRGFNITFTTFRHNECPDPGVPVNGKRFGDSLQLGSSISFLCDEGFLGTQGSETITCVLKEGSVVWNSAVLRCEAPCGGHLTSPSGTILSPGWPGFYKDALSCAWVIEAQPGYPIKITFDRFKTEVNYDTLEVRDGRTYSAPLIGVYHGTQVPQFLISTSNYLYLLFSTDKSHSDIGFQLRYETITLQSDHCLDPGIPVNGQRHGNDFYVGALVTFSCDSGYTLSDGEPLECEPNFQWSRALPSCEALCGGFIQGSSGTILSPGFPDFYPNNLNCTWIIETSHGKGVFFTFHTFHLESGHDYLLITENGSFTQPLRQLTGSRLPAPISAGLYGNFTAQVRFISDFSMSYEGFNITFSEYDLEPCEEPEVPAYSIRKGLQFGVGDTLTFSCFPGYRLEGTARITCLGGRRRLWSSPLPRCVAECGNSVTGTQGTLLSPNFPVNYNNNHECIYSIQTQPGKGIQLKARAFELSEGDVLKVYDGNNNSARLLGVFSHSEMMGVTLNSTSSSLWLDFITDAENTSKGFELHFSSFELIKCEDPGTPKFGYKVHDEGHFAGSSVSFSCDPGYSLRGSEELLCLSGERRTWDRPLPTCVAECGGTVRGEVSGQVLSPGYPAPYEHNLNCIWTIEAEAGCTIGLHFLVFDTEEVHDVLRIWDGPVESGVLLKELSGPALPKDLHSTFNSVVLQFSTDFFTSKQGFAIQFSVSTATSCNDPGIPQNGSRSGDSWEAGDSTVFQCDPGYALQGSAEISCVKIENRFFWQPSPPTCIAPCGGDLTGPSGVILSPNYPEPYPPGKECDWKVTVSPDYVIALVFNIFNLEPGYDFLHIYDGRDSLSPLIGSFYGSQLPGRIESSSNSLFLAFRSDASVSNAGFVIDYTENPRESCFDPGSIKNGTRVGSDLKLGSSVTYYCHGGYEVEGTSTLSCILGPDGKPVWNNPRPVCTAPCGGQYVGSDGVVLSPNYPQNYTSGQICLYFVTVPKDYVVFGQFAFFHTALNDVVEVHDGHSQHSRLLSSLSGSHTGESLPLATSNQVLIKFSAKGLAPARGFHFVYQAVPRTSATQCSSVPEPRYGKRLGSDFSVGAIVRFECNSGYALQGSPEIECLPVPGALAQWNVSAPTCVVPCGGNLTERRGTILSPGFPEPYLNSLNCVWKIVVPEGAGIQIQVVSFVTEQNWDSLEVFDGADNTVTMLGSFSGTTVPALLNSTSNQLYLHFYSDISVSAAGFHLEYKTVGLSSCPEPAVPSNGVKTGERYLVNDVVSFQCEPGYALQGHAHISCMPGTVRRWNYPPPLCIAQCGGTVEEMEGVILSPGFPGNYPSNMDCSWKIALPVGFGAHIQFLNFSTEPNHDYIEIRNGPYETSRMMGRFSGSELPSSLLSTSHETTVYFHSDHSQNRPGFKLEYQAYELQECPDPEPFANGIVRGAGYNVGQSVTFECLPGYQLTGHPVLTCQHGTNRNWDHPLPKCEVPCGGNITSSNGTVYSPGFPSPYSSSQDCVWLITVPIGHGVRLNLSLLQTEPSGDFITIWDGPQQTAPRLGVFTRSMAKKTVQSSSNQVLLKFHRDAATGGIFAIAFSAYPLTKCPPPTILPNAEVVTENEEFNIGDIVRYRCLPGFTLVGNEILTCKLGTYLQFEGPPPICEVHCPTNELLTDSTGVILSQSYPGSYPQFQTCSWLVRVEPDYNISLTVEYFLSEKQYDEFEIFDGPSGQSPLLKALSGNYSAPLIVTSSSNSVYLRWSSDHAYNRKGFKIRYSAPYCSLPRAPLHGFILGQTSTQPGGSIHFGCNAGYRLVGHSMAICTRHPQGYHLWSEAIPLCQALSCGLPEAPKNGMVFGKEYTVGTKAMYSCSEGYHLQAGAEATAECLDTGLWSNRNVPPQCVPVTCPDVSSISVEHGRWRLIFETQYQFQAQLMLICDPGYYYTGQRVIRCQANGKWSLGDSTPTCRIISCGELPIPPNGHRIGTLSVYGATAIFSCNSGYTLVGSRVRECMANGLWSGSEVRCLATQTKLHSIFYKLLFDVLSSPSLTKAGHCGTPEPIVNGHINGENYSYRGSVVYQCNAGFRLIGMSVRICQQDHHWSGKTPFCVPITCGHPGNPVNGLTQGNQFNLNDVVKFVCNPGYMAEGAARSQCLASGQWSDMLPTCRIINCTDPGHQENSVRQVHASGPHRFSFGTTVSYRCNHGFYLLGTPVLSCQGDGTWDRPRPQCLLVSCGHPGSPPHSQMSGDSYTVGAVVRYSCIGKRTLVGNSTRMCGLDGHWTGSLPHCSGTSVGVCGDPGIPAHGIRLGDSFDPGTVMRFSCEAGHVLRGSSERTCQANGSWSGSQPECGVISCGNPGTPSNARVVFSDGLVFSSSIVYECREGYYATGLLSRHCSVNGTWTGSDPECLVINCGDPGIPANGLRLGNDFRYNKTVTYQCVPGYMMESHRVSVLSCTKDRTWNGTKPVCKALMCKPPPLIPNGKVVGSDFMWGSSVTYACLEGYQLSLPAVFTCEGNGSWTGELPQCFPVFCGDPGVPSRGRREDRGFSYRSSVSFSCHPPLVLVGSPRRFCQSDGTWSGTQPSCIDPTLTTCADPGVPQFGIQNNSQGYQVGSTVLFRCQKGYLLQGSTTRTCLPNLTWSGTPPDCVPHHCRQPETPTHANVGALDLPSMGYTLIYSCQEGFSLKGGSEHRTCKADGSWTGKPPICLEVRPSGRPINTAREPPLTQALIPGDVFAKNSLWKGAYEYQGKKQPAMLRVTGFQVANSKVNATMIDHSGVELHLAGTYKKEDFHLLLQVYQITGPVEIFMNKFKDDHWALDGHVSSESSGATFIYQGSVKGQGFGQFGFQRLDLRLLESDPESIGRHFASNSSSVAAAILVPFIALIIAGFVLYLYKHRRRPKVPFNGYAGHENTNVRATFENPMYDRNIQPTDIMASEAEFTVSTVCTAV

SEQ ID NO: 9542 - protein, 802 aa, Homo sapiens
MKHFCSSSVSEDLGCRRGDFSRKHYGSVELLISSDADGAIQRAGRFRVENGSSDENATALPGTWRRTDVHLENPEYHTRWYFKYFLGQVHQNYIGNDAEKSPFFLSVTLSDQNNQRVPQYRAILWRKTGTQKICLPYSPTKTLSVKSILSAMNLDKFEKGPREIFHPEIQKDLLVLEEQEGSVNFKFGVLFAKDGQLTDDEMFSNEIGSEPFQKFLNLLGDTITLKGWTGYRGGLDTKNDTTGIHSVYTVYQGHEIMFHVSTMLPYSKENKQQVERKRHIGNDIVTIVFQEGEESSPAFKPSMIRSHFTHIFALVRYNQQNDNYRLKIFSEESVPLFGPPLPTPPVFTDHQEFRDFLLVKLINGEKATLETPTFAQKRRRTLDMLIRSLHQDLMPDLHKNMLNRRSFSDVLPESPKSARKKEEARQAEFVRIGQALKLKSIVRGDAPSSLAASGICKKEPWEPQCFCSNFPHEAVCADPWGQALLVSTDAGVLLVDDDLPSVPVFDRTLPVKQMHVLETLDLLVLRADKGKDARLFVFRLSALQKGLEGKQAGKSRSDCRENKLEKTKGCHLYAINTHHSRELRIVVAIRNKLLLITRKHNKPSGVTSTSLLSPLSESPVEEFQYIREICLSDSPMVMTLVDGPAEESDNLICVAYRHQFDVVNESTGEAFRLHHVEANRVNFVAAIDVYEDGEAGLLLCYNYSCIYKKVCPFNGGSFLVQPSASDFQFCWNQAPYAIVCAFPYLLAFTTDSMEIRLVVNGNLVHTAVVPQLQLVASRVKFNQKICTRFHLETSWAEASNDL

SEQ ID NO: 9543 - protein, 1013 aa, Homo sapiens
MVVDFCRRFVARSLCIILMKHFCSSSVSEDLGCRRGDFSRKHYGSVELLISSDADGAIQRAGRFRVENGSSDENATALPGTWRRTDVHLENPEYHTRWYFKYFLGQVHQNYIGNDAEKSPFFLSVTLSDQNNQRVPQYRAILWRKTGTQKICLPYSPTKTLSVKSILSAMNLDKFEKGPREIFHPEIQKDLLVLEEQEGSVNFKFGVLFAKDGQLTDDEMFSNEIGSEPFQKFLNLLGDTITLKGWTGYRGGLDTKNDTTGIHSVYTVYQGHEIMFHVSTMLPYSKENKQQVERKRHIGNDIVTIVFQEGEESSPAFKPSMIRSHFTHIFALVRYNQQNDNYRLKIFSEESVPLFGPPLPTPPVFTDHQEFRDFLLVKLINGEKATLETPTFAQKRRRTLDMLIRSLHQDLMPDLHKNMLNRRSFSDVLPESPKSARKKEEARQAEFVRIGQALKLKSIVRGDAPSSLAASGICKKEPWEPQCFCSNFPHEAVCADPWGQALLVSTDAGVLLVDDDLPSVPVFDRTLPVKQMHVLETLDLLVLRADKGKDARLFVFRLSALQKGLEGKQAGKSRSDCRENKLEKTKGCHLYAINTHHSRELRIVVAIRNKLLLITRKHNKPSGVTSTSLLSPLSESPVEEFQYIREICLSDSPMVMTLVDGPAEESDNLICVAYRHQFDVVNESTGEAFRLHHVEANRVNFVAAIDVYEDGEAGLLLCYNYSCIYKKVCPFNGGSFLVQPSASDFQFCWNQAPYAIVCAFPYLLAFTTDSMEIRLVVNGNLVHTAVVPQLQLVASRSDIYFTATAAVNEVSSGGSSKGASARNSPQTPPGRDTPVFPSSLGEGEIQSKNLYKIPLRNLVGRSIERPLKSPLVSKVITPPTPISVGLAAIPVTHSLSLSRMEIKEIASRTRRELLGLSDEGGPKSEGAPKAKSKPRKRLEESQGGPKPGAVRSSSSDRIPSGSLESASTSEANPEGHSASSDQDPVADREGSPVSGSSPFQLTAFSDEDIIDLK

SEQ ID NO: 9544 - protein, 752 aa, Homo sapiens
MALLAMHSWRWAAAAAAFEKRRHSAILIRPLVSVSGSGPQWRPHQLGALGTARAYQIPESLKSITWQRLGKGNSGQFLDAAKALQVWPLIEKRTCWHGHAGGGLHTDPKEGLKDVDTRKIIKAMLSYVWPKDRPDLRARVAISLGFLGGAKAMNIVVPFMFKYAVDSLNQMSGNMLNLSDAPNTVATMATAVLIGYGVSRAGAAFFNEVRNAVFGKVAQNSIRRIAKNVFLHLHNLDLGFHLSRQTGALSKAIDRGTRGISFVLSALVFNLLPIMFEVMLVSGVLYYKCGAQFALVTLGTLGTYTAFTVAVTRWRTRFRIEMNKADNDAGNAAIDSLLNYETVKYFNNERYEAQRYDGFLKTYETASLKSTSTLAMLNFGQSAIFSVGLTAIMVLASQGIVAGTLTVGDLVMVNGLLFQLSLPLNFLGTVYRETRQALIDMNTLFTLLKVDTQIKDKVMASPLQITPQTATVAFDNVHFEYIEGQKVLSGISFEVPAGKKVAIVGGSGSGKSTIVRLLFRFYEPQKGSIYLAGQNIQDVSLESLRRAVGVVPQDAVLFHNTIYYNLLYGNISASPEEVYAVAKLAGLHDAILRMPHGYDTQVGERGLKLSGGEKQRVAIARAILKDPPVILYDEATSSLDSITEETILGAMKDVVKHRTSIFIAHRLSTVVDADEIIVLDQGKVAERGTHHGLLANPHSIYSEMWHTQSSRVQNHDNPKWEAKKENISKEEERKKLQEEIVNSVKGCGNCSC

SEQ ID NO: 9545 - protein, 534 aa, Homo sapiens
MARGLQVPLPRLATGLLLLLSVQPWAESGKVLVVPTDGSPWLSMREALRELHARGHQAVVLTPEVNMHIKEEKFFTLTAYAVPWTQKEFDRVTLGYTQGFFETEHLLKRYSRSMAIMNNVSLALHRCCVELLHNEALIRHLNATSFDVVLTDPVNLCGAVLAKYLSIPAVFFWRYIPCDLDFKGTQCPNPSSYIPKLLTTNSDHMTFLQRVKNMLYPLALSYICHTFSAPYASLASELFQREVSVVDLVSYASVWLFRGDFVMDYPRPIMPNMVFIGGINCANGKPLSQEFEAYINASGEHGIVVFSLGSMVSEIPEKKAMAIADALGKIPQTVLWRYTGTRPSNLANNTILVKWLPQNDLLGHPMTRAFITHAGSHGVYESICNGVPMVMMPLFGDQMDNAKRMETKGAGVTLNVLEMTSEDLENALKAVINDKSYKENIMRLSSLHKDRPVEPLDLAVFWVEFVMRHKGAPHLRPAAHDLTWYQYHSLDVIGFLLAVVLTVAFITFKCCAYGYRKCLGKKGRVKKAHKSKTH

SEQ ID NO: 9546 - protein, 534 aa, Homo sapiens
MATGLQVPLPQLATGLLLLLSVQPWAESGKVLVVPTDGSHWLSMREALRDLHARGHQVVVLTLEVNMYIKEENFFTLTTYAISWTQDEFDRLLLGHTQSFFETEHLLMKFSRRMAIMNNMSLIIHRSCVELLHNEALIRHLHATSFDVVLTDPFHLCAAVLAKYLSIPAVFFLRNIPCDLDFKGTQCPNPSSYIPRLLTTNSDHMTFLQRVKNMLYPLALSYLCHAVSAPYASLASELFQREVSVVDLVSHASVWLFRGDFVMDYPRPIMPNMVFIGGINCANGKPLSQEFEAYINASGEHGIVVFSLGSMVSEIPEKKAMAIADALGKIPQTVLWRYTGTRPSNLANNTILVKWLPQNDLLGHPMTRAFITHAGSHGVYESICNGVPMVMMPLFGDQMDNAKRMETKGAGVTLNVLEMTSEDLENALKAVINDKSYKENIMRLSSLHKDRPVEPLDLAVFWVEFVMRHKGAPHLRPAAHDLTWYQYHSLDVIGFLLAVVLTVAFITFKCCAYGYRKCLGKKGRVKKAHKSKTH

SEQ ID NO: 9547 - protein, 530 aa, Homo sapiens
MARAGWTGLLPLYVCLLLTCGFAKAGKLLVVPMDGSHWFTMQSVVEKLILRGHEVVVVMPEVSWQLGRSLNCTVKTYSTSYTLEDQDREFMVFADARWTAPLRSAFSLLTSSSNGIFDLFFSNCRSLFNDRKLVEYLKESCFDAVFLDPFDACGLIVAKYFSLPSVVFARGIFCHYLEEGAQCPAPLSYVPRLLLGFSDAMTFKERVWNHIMHLEEHLFCPYFFKNVLEIASEILQTPVTAYDLYSHTSIWLLRTDFVLEYPKPVMPNMIFIGGINCHQGKPVPMEFEAYINASGEHGIVVFSLGSMVSEIPEKKAMAIADALGKIPQTVLWRYTGTRPSNLANNTILVKWLPQNDLLGHPMTRAFITHAGSHGVYESICNGVPMVMMPLFGDQMDNAKRMETKGAGVTLNVLEMTSEDLENALKAVINDKSYKENIMRLSSLHKDRPVEPLDLAVFWVEFVMRHKGAPHLRPAAHDLTWYQYHSLDVIGFLLAVVLTVAFITFKCCAYGYRKCLGKKGRVKKAHKSKTH

SEQ ID NO: 9548 - protein, 420 aa, Homo sapiens
MSRSSPSGKGHSRMAEPRFNNPYFWPPPPTMPSQLDNLVLINKIKEQLMAEKIRPPHLPPTSASSQQPLLVPPAPAESSQAVMSLPKLQQVPGLHPQAVPQPDVALHARPATSTVTGLGLSTRTPSVSTSESSAGAGTGTGTSTPSTPTTTSQSRLIASSPTLISGITSPPLLDSIKTIQGHGLLGPPKSERGRKKIKAENPGGPPVLVVPYPILASGETAKEGKTYRCKVCPLTFFTKSEMQIHSKSHTEAKPHKCPHCSKSFANASYLAQHLRIHLGVKPYHCSYCDKSFRQLSHLQQHTRIHTGDRPYKCPHPGCEKAFTQLSNLQSHQRQHNKDKPYKCPNCYRAYSDSASLQIHLSAHAIKHAKAYCCSMCGRAYTSETYLMKHMSKHTVVEHLVSHHSPQRTESPGIPVRISLI

SEQ ID NO: 9549 - protein, 480 aa, Homo sapiens
MAGYLSESDFVMVEEGFSTRDLLKELTLGASQATTDEVAAFFVADLGAIVRKHFCFLKCLPRVRPFYAVKCNSSPGVLKVLAQLGLGFSCANKAEMELVQHIGIPASKIICANPCKQIAQIKYAAKHGIQLLSFDNEMELAKVVKSHPSAKMVLCIATDDSHSLSCLSLKFGVSLKSCRHLLENAKKHHVEVVGVSFHIGSGCPDPQAYAQSIADARLVFEMGTELGHKMHVLDLGGGFPGTEGAKVRFEEIASVINSALDLYFPEGCGVDIFAELGRYYVTSAFTVAVSIIAKKEVLLDQPGREAPLPPPHIATCAASEPSPPAEENGSTSKTIVYHLDEGVYGIFNSVLFDNICPTPILQKKPSTEQPLYSSSLWGPAVDGCDCVAEGLWLPQLHVGDWLVFDNMGAYTVGMGSPFWGTQACHITYAMSRVAWEALRRQLMAAEQEDDVEGVCKPLSCGWEITDTLCVGPVFTPASIM

SEQ ID NO: 9550 - protein, 441 aa, Homo sapiens
MARAGWTSPVPLCVCLLLTCGFAEAGKLLVVPMDGSHWFTMQSVVEKLILRGHEVVVVMPEVSWQLERSLNCTVKTYSTSYTLEDQNREFMVFAHAQWKAQAQSIFSLLMSSSSGFLDLFFSHCRSLFNDRKLVEYLKESSFDAVFLDPFDTCGLIVAKYFSLPSVVFTRGIFCHHLEEGAQCPAPLSYVPNDLLGFSDAMTFKERVWNHIVHLEDHLFCQYLFRNALEIASEILQTPVTAYDLYSHTSIWLLRTDFVLDYPKPVMPNMIFIGGINCHQGKPLPMEFEAYINASGEHGIVVFSLGSMVSEIPEKKAMAIADALGKIPQTVLWRYTGTRPSNLANNTILVKWLPQNDLLGHPMTRAFITHAGSHGVYESICNGVPMVMMPLFGDQMDNAKRMETKGAGVTLNVLEMTSEDLENALKAVINDKRKKQQSGRQM

SEQ ID NO: 9551 - protein, 1089 aa, Homo sapiens
MAVFDTPEEAFGVLRPVCVQLTKTQTVENVEHLQTRLQAVSDSALQELQQYILFPLRFTLKTPGPKRERLIQSVVECLTFVLSSTCVKEQELLQELFSELSACLYSPSSQKPAAVSEELKLAVIQGLSTLMHSAYGDIILTFYEPSILPRLGFAVSLLLGLAEQEKSKQIKIAALKCLQVLLLQCDCQDHPRSLDELEQKQLGDLFASFLPGISTALTRLITGDFKQGHSIVVSSLKIFYKTVSFIMADEQLKRISKVQAKPAVEHRVAELMVYREADWVKKTGDKLTILIKKIIECVSVHPHWKVRLELVELVEDLLLKCSQSLVECAGPLLKALVGLVNDESPEIQAQCNKVLRHFADQKVVVGNKALADILSESLHSLATSLPRLMNSQDDQGKFSTLSLLLGYLKLLGPKINFVLNSVAHLQRLSKALIQVLELDVADIKIVEERRWNSDDLNASPKTSATQPWNRIQRRYFRFFTDERIFMLLRQVCQLLGYYGNLYLLVDHFMELYHQSVVYRKQAAMILNELVTGAAGLEVEDLHEKHIKTNPEELREIVTSILEEYTSQENWYLVTCLETEEMGEELMMEHPGLQAITSGEHTCQVTSFLAFSKPSPTICSMNSNIWQICIQLEGIGQFAYALGKDFCLLLMSALYPVLEKAGDQTLLISQVATSTMMDVCRACGYDSLQHLINQNSDYLVNGISLNLRHLALHPHTPKVLEVMLRNSDANLLPLVADVVQDVLATLDQFYDKRAASFVSVLHALMAALAQWFPDTGNLGHLQEQSLGEEGSHLNQRPAALEKSTTTAEDIEQFLLNYLKEKDVADGNVSDFDNEEEEQSVPPKVDENDTRPDVEPPLPLQIQIAMDVMERCIHLLSDKNLQIRLKVLDVLDLCVVVLQSHKNQLLPLAHQAWPSLVHRLTRDAPLAVLRAFKVLRTLGSKCGDFLRSRFCKDVLPKLAGSLVTQAPISARAGPVYSHTLAFKLQLAVLQGLGPLCERLDLGEGDLNKVADACLIYLSVKQPVKLQEAARSVFLHLMKVDPDSTWFLLNELYCPVQFTPPHPSLHPVQLHGASGQQNPYTTNVLQLLKELQ

SEQ ID NO: 9552 - protein, 530 aa, Homo sapiens
MARTGWTSPIPLCVSLLLTCGFAEAGKLLVVPMDGSHWFTMQSVVEKLILRGHEVVVVMPEVSWQLGKSLNCTVKTYSTSYTLEDLDREFMDFADAQWKAQVRSLFSLFLSSSNGFFNLFFSHCRSLFNDRKLVEYLKESSFDAVFLDPFDACGLIVAKYFSLPSVVFARGIACHYLEEGAQCPAPLSYVPRILLGFSDAMTFKERVRNHIMHLEEHLFCQYFSKNALEIASEILQTPVTAYDLYSHTSIWLLRTDFVLDYPKPVMPNMIFIGGINCHQGKPLPMEFEAYINASGEHGIVVFSLGSMVSEIPEKKAMAIADALGKIPQTVLWRYTGTRPSNLANNTILVKWLPQNDLLGHPMTRAFITHAGSHGVYESICNGVPMVMMPLFGDQMDNAKRMETKGAGVTLNVLEMTSEDLENALKAVINDKSYKENIMRLSSLHKDRPVEPLDLAVFWVEFVMRHKGAPHLRPAAHDLTWYQYHSLDVIGFLLAVVLTVAFITFKCCAYGYRKCLGKKGRVKKAHKSKTH

SEQ ID NO: 9553 - protein, 835 aa, Homo sapiens
MKRRTDPECTAPIKKQKKRVAELALSLSSTSDDEPPSSVSHGAKASTTSLSGSDSETEGKQHSSDSFDDAFKADSLVEGTSSRYSMYNSVSQKLMAKMGFREGEGLGKYSQGRKDIVEASSQKGRRGLGLTLRGFDQELNVDWRDEPEPSACEQVSWFPECTTEIPDTQEMSDWMVVGKRKMIIEDETEFCGEELLHSVLQCKSVFDVLDGEEMRRARTRANPYEMIRGVFFLNRAAMKMANMDFVFDRMFTNPRDSYGKPLVKDREAELLYFADVCAGPGGFSEYVLWRKKWHAKGFGMTLKGPNDFKLEDFYSASSELFEPYYGEGGIDGDGDITRPENISAFRNFVLDNTDRKGVHFLMADGGFSVEGQENLQEILSKQLLLCQFLMALSIVRTGGHFICKTFDLFTPFSVGLVYLLYCCFERVCLFKPITSRPANSERYVVCKGLKVGIDDVRDYLFAVNIKLNQLRNTDSDVNLVVPLEVIKGDHEFTDYMIRSNESHCSLQIKALAKIHAFVQDTTLSEPRQAEIRKECLRLWGIPDQARVAPSSSDPKSKFFELIQGTEIDIFSYKPTLLTSKTLEKIRPVFDYRCMVSGSEQKFLIGLGKSQIYTWDGRQSDRWIKLDLKTELPRDTLLSVEIVHELKGEGKAQRKISAIHILDVLVLNGTDVREQHFNQRIQLAEKFVKAVSKPSRPDMNPIRVKEVYRLEEMEKIFVRLEMKIIKGSSGTPKLSYTGRDDRHFVPMGLYIVRTVNEPWTMGFSKSFKKKFFYNKKTKDSTFDLPADSIAPFHICYYGRLFWEWGDGIRVHDSQKPQDQDKLSKEDVLSFIQMHRA

SEQ ID NO: 9554 - protein, 500 aa, Homo sapiens
MDSSSFIQFDVPEYSSTVLSQLNELRLQGKLCDIIVHIQGQPFRAHKAVLAASSPYFRDHSALSTMSGLSISVIKNPNVFEQLLSFCYTGRMSLQLKDVVSFLTAASFLQMQCVIDKCTQILESIHSKISVGDVDSVTVGAEENPESRNGVKDSSFFANPVEISPPYCSQGRQPTASSDLRMETTPSKALRSRLQEEGHSDRGSSGSVSEYEIQIEGDHEQGDLLVRESQITEVKVKMEKSDRPSCSDSSSLGDDGYHTEMVDGEQVVAVNVGSYGSVLQHAYSYSQAASQPTNVSEAFGSLSNSSPSRSMLSCFRGGRARQKRALSVHLHSDLQGLVQGSDSEAMMNNPGYESSPRERSARGHWYPYNERLICIYCGKSFNQKGSLDRHMRLHMGITPFVCKFCGKKYTRKDQLEYHIRGHTDDKPFRCEICGKCFPFQGTLNQHLRKNHPGVAEVRSRIESPERTDVYVEQKLENDASASEMGLDSRMEIHTVSDAPD

SEQ ID NO: 9555 - protein, 402 aa, Homo sapiens
MDIATGPESLERCFPRGQTDCAKMLDGIKMEEHALRPGPATLGVLLGSDCPHPAVCEGCQRPISDRFLMRVNESSWHEECLQCAACQQALTTSCYFRDRKLYCKQDYQQLFAAKCSGCMEKIAPTEFVMRALECVYHLGCFCCCVCERQLRKGDEFVLKEGQLLCKGDYEKEKDLLSSVSPDESDSVKSEDEDGDMKPAKGQGSQSKGSGDDGKDPRRPKRPRTILTTQQRRAFKASFEVSSKPCRKVRETLAAETGLSVRVVQVWFQNQRAKMKKLARRHQQQQEQQNSQRLGQEVLSSRMEGMMASYTPLAPPQQQIVAMEQSPYGSSDPFQQGLTPPQMPGDHMNPYGNDSIFHDIDSDTSLTSLSDCFLGSSDVGSLQARVGNPIDRLYSMQSSYFAS

SEQ ID NO: 9556 - protein, 485 aa, Homo sapiens
MGEPGFFVTGDRAGGRSWCLRRVGMSAGWLLLEDGCEVTVGRGFGVTYQLVSKICPLMISRNHCVLKQNPEGQWTIMDNKSLNGVWLNRARLEPLRVYSIHQGDYIQLGVPLENKENAEYEYEVTEEDWETIYPCLSPKNDQMIEKNKELRTKRKFSLDELAGPGAEGPSNLKSKINKVSCESGQPVKSQGKGEVASTPSDNLDPKLTALEPSKTTGAPIYPGFPKVTEVHHEQKASNSSASQRSLQMFKVTMSRILRLKIQMQEKHEAVMNVKKQTQKGNSKKVVQMEQELQDLQSQLCAEQAQQQARVEQLEKTFQEEEQHLQGLEIAQGEKDLKQQLAQALQEHWALMEELNRSKKDFEAIIQAKNKELEQTKEEKEKMQAQKEEVLSHMNDVLENELQCIICSEYFIEAVTLNCAHSFCSYCINEWMKRKIECPICRKDIKSKTYSLVLDNCINKMVNNLSSEVKERRIVLIRERKAKRLF

SEQ ID NO: 9557 - protein, 1035 aa, Homo sapiens
MVVFVGRRLPALLGLFKKKGSAKAENDKHLSVGPGQGPGSAVDEHQDNVFFPSGRPPHLEELHTQAQEGLRSLQHQEKQKLNKGGWDHGDTQSIQSSRTGPDEDNISFCSQTTSYVAESSTAEDALSIRSEMIQRKGSTFRPHDSFPKSGKSGRRRRERRSTVLGLPQHVQKELGLRNEREAPGTPRAPGARDAVRIPTVDGRPRGTSGMGARVSLQALEAEAEAGAETEAMLQRHIDRVYRDDTFVGRSTGTRAPPLTRPMSLAVPGLTGGAGPAEPLSPAMSISPQATYLSKLIPHAVLPPTVDVVALGRCSLRTLSRCSLHSASPASVRSLGRFSSVSSPQPRSRHPSSSSDTWSHSQSSDTIVSDGSTLSSKGGSEGQPESSTASNSVVPPPQGGSGRGSPSGGSTAEASDTLSIRSSGQLSGRSVSLRKLKRPPPPPRRTHSLHQRGLAVPDGPLGLPPKPERKQQPQLPRPPTTGGSEGAGAAPCPPNPANSWVPGLSPGGSRRPPRSPERTLSPSSGYSSQSGTPTLPPKGLAGPPASPGKAQPPKPERVTSLRSPGASVSSSLTSLCSSSSDPAPSDRSGPQILTPLGDRFVIPPHPKVPAPFSPPPSKPRSPNPAAPALAAPAVVPGPVSTTDASPQSPPTPQTTLTPLQESPVISKDQSPPPSPPPSYHPPPPPTKKPEVVVEAPSASETAEEPLQDPNWPPPPPPAPEEQDLSMADFPPPEEAFFSVASPEPAGPSGSPELVSSPAASSSSATALQIQPPGSPDPPPAPPAPAPASSAPGHVAKLPQKEPVGCSKGGGPPREDVGAPLVTPSLLQMVRLRSVGAPGGAPTPALGPSAPQKPLRRALSGRASPVPAPSSGLHAAVRLKACSLAASEGLSSAQPNGPPEAEPRPPQSPASTASFIFSKGSRKLQLERPVSPETQADLQRNLVAELRSISEQRPPQAPKKSPKAPPPVARKPSVGVPPPASPSYPRAEPLTAPPTNGLPHTQDRTKRELAENGGVLQLVGPEEKMGLPGSDSQKELA

SEQ ID NO: 9558 - protein, 1046 aa, Homo sapiens
MGNSHHKRKAPSGPRVRSFWRFGRSAKRPAGSAKAENDKHLSVGPGQGPGSAVDEHQDNVFFPSGRPPHLEELHTQAQEGLRSLQHQEKQKLNKGGWDHGDTQSIQSSRTGPDEDNISFCSQTTSYVAESSTAEDALSIRSEMIQRKGSTFRPHDSFPKSGKSGRRRRERRSTVLGLPQHVQKELGLRNEREAPGTPRAPGARDAVRIPTVDGRPRGTSGMGARVSLQALEAEAEAGAETEAMLQRHIDRVYRDDTFVGRSTGTRAPPLTRPMSLAVPGLTGGAGPAEPLSPAMSISPQATYLSKLIPHAVLPPTVDVVALGRCSLRTLSRCSLHSASPASVRSLGRFSSVSSPQPRSRHPSSSSDTWSHSQSSDTIVSDGSTLSSKGGSEGQPESSTASNSVVPPPQGGSGRGSPSGGSTAEASDTLSIRSSGQLSGRSVSLRKLKRPPPPPRRTHSLHQRGLAVPDGPLGLPPKPERKQQPQLPRPPTTGGSEGAGAAPCPPNPANSWVPGLSPGGSRRPPRSPERTLSPSSGYSSQSGTPTLPPKGLAGPPASPGKAQPPKPERVTSLRSPGASVSSSLTSLCSSSSDPAPSDRSGPQILTPLGDRFVIPPHPKVPAPFSPPPSKPRSPNPAAPALAAPAVVPGPVSTTDASPQSPPTPQTTLTPLQESPVISKDQSPPPSPPPSYHPPPPPTKKPEVVVEAPSASETAEEPLQDPNWPPPPPPAPEEQDLSMADFPPPEEAFFSVASPEPAGPSGSPELVSSPAASSSSATALQIQPPGSPDPPPAPPAPAPASSAPGHVAKLPQKEPVGCSKGGGPPREDVGAPLVTPSLLQMVRLRSVGAPGGAPTPALGPSAPQKPLRRALSGRASPVPAPSSGLHAAVRLKACSLAASEGLSSAQPNGPPEAEPRPPQSPASTASFIFSKGSRKLQLERPVSPETQADLQRNLVAELRSISEQRPPQAPKKSPKAPPPVARKPSVGVPPPASPSYPRAEPLTAPPTNGLPHTQDRTKRELAENGGVLQLVGPEEKMGLPGSDSQKELA

SEQ ID NO: 9559 - protein, 455 aa, Homo sapiens
MDDQSRMLQTLAGVNLAGHSVQGGMALPPPPHGHEGADGDGRKQDIGDILHQIMTITDQSLDEAQAKKHALNCHRMKPALFSVLCEIKEKTGLSIRGAQEEDPPDPQLMRLDNMLLAEGVSGPEKGGGSAAAAAAAAASGGSSDNSIEHSDYRAKLTQIRQIYHTELEKYEQACNEFTTHVMNLLREQSRTRPISPKEIERMVGIIHRKFSSIQMQLKQSTCEAVMILRSRFLDARRKRRNFSKQATEILNEYFYSHLSNPYPSEEAKEELAKKCSITVSQSLVKDPKERGSKGSDIQPTSVVSNWFGNKRIRYKKNIGKFQEEANLYAAKTAVTAAHAVAAAVQNNQTNSPTTPNSGSSGSFNLPNSGDMFMNMQSLNGDSYQGSQVGANVQSQVDTLRHVINQTGGYSDGLGGNSLYSPHNLNANGGWQDATTPSSVTSPTEGPGSVHSDTSN

SEQ ID NO: 9560 - protein, 434 aa, Homo sapiens
MDDQSRMLQTLAGVNLAGHSVQGGMALPPPPHGHEGADGDGRKQDIGDILHQIMTITDQSLDEAQAKKHALNCHRMKPALFSVLCEIKEKTGLSIRGAQEEDPPDPQLMRLDNMLLAEGVSGPEKGGGSAAAAAAAAASGGSSDNSIEHSDYRAKLTQIRQIYHTELEKYEQACNEFTTHVMNLLREQSRTRPISPKEIERMVGIIHRKFSSIQMQLKQSTCEAVMILRSRFLDARRKRRNFSKQATEILNEYFYSHLSNPYPSEEAKEELAKKCSITVSQVSNWFGNKRIRYKKNIGKFQEEANLYAAKTAVTAAHAVAAAVQNNQTNSPTTPNSGSSGSFNLPNSGDMFMNMQSLNGDSYQGSQVGANVQSQVDTLRHVINQTGGYSDGLGGNSLYSPHNLNANGGWQDATTPSSVTSPTEGPGSVHSDTSN

SEQ ID NO: 9561 - protein, 313 aa, Homo sapiens
MLLSKINSLAHLRAAPCNDLHATKLAPGKEKEPLESQYQVGPLLGSGGFGSVYSGIRVSDNLPVAIKHVEKDRISDWGELPNGTRVPMEVVLLKKVSSGFSGVIRLLDWFERPDSFVLILERPEPVQDLFDFITERGALQEELARSFFWQVLEAVRHCHNCGVLHRDIKDENILIDLNRGELKLIDFGSGALLKDTVYTDFDGTRVYSPPEWIRYHRYHGRSAAVWSLGILLYDMVCGDIPFEHDEEIIRGQVFFRQRVSSECQHLIRWCLALRPSDRPTFEEIQNHPWMQDVLLPQETAEIHLHSLSPGPSK

SEQ ID NO: 9562 - protein, 284 aa, Homo sapiens
MYGSCLLEKEAGMYPGTLMSPGGDGTAGTGGTGGGGSPMPASNFAAAPAFSHYMGYPHMPSMDPHWPSLGVWGSPYSPPREDWSVYPGPSSTMGTVPVNDVTSSPAAFCSTDYSNLGPVGGGTSGSSLPGQAGGSLVPTDAGAAKASSPSRSRHSPYAWMRKTVQVTGKTRTKEKYRVVYTDHQRLELEKEFHCNRYITIQRKSELAVNLGLSERQVKIWFQNRRAKERKMIKKKISQFENSGGSVQSDSDSISPGELPNTFFTTPSAVRGFQPIEIQQVIVSE

SEQ ID NO: 9563 - protein, 428 aa, Homo sapiens
MSSGLRAADFPRWKRHISEQLRRRDRLQRQAFEEIILQYNKLLEKSDLHSVLAQKLQAEKHDVPNRHEIRRRQARLQKELAEAAKEPLPVEQDDDIEVIVDETSDHTEETSPVRAISRAATKRLSQPAGGLLDSITNIFGRRSVSSFPVPQDNVDTHPGSGKEVRVPATALCVFDAHDGEVNAVQFSPGITSIEFDSAGSYLLAASNDFASRIWTVDDYRLRHTLTGHSGKVLSAKFLLDNARIVSGSHDRTLKLWDLRSKVCIKTVFAGSSCNDIVCTEQCVMSGHFDKKIRFWDIRSESIVREMELLGKITALDLNPERTELLSCSRDDLLKVIDLRTNAIKQTFSAPGFKCGSDWTRVVFSPDGSYVAAGSAEGSLYIWSVLTGKVEKVLSKQHSSSINAVAWSPSGSHVVSVDKGCKAVLWAQY

SEQ ID NO: 9564 - protein, 268 aa, Homo sapiens
MEDFLLSNGYQLGKTIGEGTYSKVKEAFSKKHQRKVAIKVIDKMGGPEEFIQRFLPRELQIVRTLDHKNIIQVYEMLESADGKICLVMELAEGGDVFDCVLNGGPLPESRAKALFRQMVEAIRYCHGCGVAHRDLKCENALLQGFNLKLTDFGFAKVLPKSHRELSQTFCGSTAYAAPEVLQGIPHDSKKGDVWSMGVVLYVMLCASLPFDDTDIPKMLWQQQKGVSFPTHLSISADCQDLLKRLLEPDMILRPSIEEVSWHPWLAST

SEQ ID NO: 9565 - protein, 1240 aa, Homo sapiens
MRSRSNSGVRLDGYARLVQQTILCHQNPVTGLLPASYDQKDAWVRDNVYSILAVWGLGLAYRKNADRDEDKAKAYELEQSVVKLMRGLLHCMIRQVDKVESFKYSQSTKDSLHAKYNTKTCATVVGDDQWGHLQLDATSVYLLFLAQMTASGLHIIHSLDEVNFIQNLVFYIEAAYKTADFGIWERGDKTNQGISELNASSVGMAKAALEALDELDLFGVKGGPQSVIHVLADEVQHCQSILNSLLPRASTSKEVDASLLSVVSFPAFAVEDSQLVELTKQEIITKLQGRYGCCRFLRDGYKTPKEDPNRLYYEPAELKLFENIECEWPLFWTYFILDGVFSGNAEQVQEYKEALEAVLIKGKNGVPLLPELYSVPPDRVDEEYQNPHTVDRVPMGKLPHMWGQSLYILGSLMAEGFLAPGEIDPLNRRFSTVPKPDVVVQVSILAETEEIKTILKDKGIYVETIAEVYPIRVQPARILSHIYSSLGCNNRMKLSGRPYRHMGVLGTSKLYDIRKTIFTFTPQFIDQQQFYLALDNKMIVEMLRTDLSYLCSRWRMTGQPTITFPISHSMLDEDGTSLNSSILAALRKMQDGYFGGARVQTGKLSEFLTTSCCTHLSFMDPGPEGKLYSEDYDDNYDYLESGNWMNDYDSTSHARCGDEVARYLDHLLAHTAPHPKLAPTSQKGGLDRFQAAVQTTCDLMSLVTKAKELHVQNVHMYLPTKLFQASRPSFNLLDSPHPRQENQVPSVRVEIHLPRDQSGEVDFKALVLQLKETSSLQEQADILYMLYTMKGPDWNTELYNERSATVRELLTELYGKVGEIRHWGLIRYISGILRKKVEALDEACTDLLSHQKHLTVGLPPEPREKTISAPLPYEALTQLIDEASEGDMSISILTQEIMVYLAMYMRTQPGLFAEMFRLRIGLIIQVMATELAHSLRCSAEEATEGLMNLSPSAMKNLLHHILSGKEFGVERSVRPTDSNVSPAISIHEIGAVGATKTERTGIMQLKSEIKQVEFRRLSISAESQSNGGHPLGIDLMSPSFMSPGTSMTPSSGSFPSAYDQQSSKDSRQGQWQRRRRLDGALNRVPVGFYQKVWKVLQKCHGLSVEGFVLPSSTTREMTPGEIKFSVHVESVLNRVPQPEYRQLLVEAILVLTMLADIEIHSIGSIIAVEKIVHIANDLFLQEQKTLGADDTMLAKDPASGICTLLYDSAPSGRFGTMTYLSKAAATYVQEFLPHSICAMQ

SEQ ID NO: 9566 - protein, 1223 aa, Homo sapiens
MRSRSNSGVRLDGYARLVQQTILCHQNPVTGLLPASYDQKDAWVRDNVYSILAVWGLGLAYRKNADRDEDKAKAYELEQSVVKLMRGLLHCMIRQVDKVESFKYSQSTKDSLHAKYNTKTCATVVGDDQWGHLQLDATSVYLLFLAQMTASGLHIIHSLDEVNFIQNLVFYIEAAYKTADFGIWERGDKTNQGISELNASSVGMAKAALEALDELDLFGVKGGPQSVIHVLADEVQHCQSILNSLLPRASTSKEVDASLLSVVSFPAFAVEDSQLVELTKQEIITKLQGRYGCCRFLRDGYKTPKEDPNRLYYEPAELKLFENIECEWPLFWTYFILDGVFSGNAEQVQEYKEALEAVLIKGKNGVPLLPELYSVPPDRVDEEYQNPHTVDRVPMGKLPHMWGQSLYILGSLMAEGFLAPGEIDPLNRRFSTVPKPDVVVQVSILAETEEIKTILKDKGIYVETIAEVYPIRVQPARILSHIYSSLGCNNRMKLSGRPYRHMGVLGTSKLYDIRKTIFTFTPQFIDQQQFYLALDNKMIVEMLRTDLSYLCSRWRMTGQPTITFPISHSMLDEDGTSLNSSILAALRKMQDGYFGGARVQTGKLSEFLTTSCCTHLSFMDPGPEGKLYSEDYDDNYDYLESGNWMNDYDSTSHARCGDEVARYLDHLLAHTAPHPKLAPTSQKGGLDRFQAAVQTTCDLMSLVTKAKELHVQNVHMYLPTKLFQASRPSFNLLDSPHPRQENQVPSVRVEIHLPRDQSGEVDFKALVLQLKETSSLQEQADILYMLYTMKGPDWNTELYNERSATVRELLTELYGKVGEIRHWGLIRYISGILRKKVEALDEACTDLLSHQKHLTVGLPPEPREKTISAPLPYEALTQLIDEASEGDMSISILTQEIMVYLAMYMRTQPGLFAEMFRLRIGLIIQVMATELAHSLRCSAEEATEGLMNLSPSAMKNLLHHILSGKEFGVERSVRPTDSNVSPAISIHEIGAVGATKTERTGIMQLKSEIKQVEFRRLSISAESQSPGTSMTPSSGSFPSAYDQQSSKDSRQGQWQRRRRLDGALNRVPVGFYQKVWKVLQKCHGLSVEGFVLPSSTTREMTPGEIKFSVHVESVLNRVPQPEYRQLLVEAILVLTMLADIEIHSIGSIIAVEKIVHIANDLFLQEQKTLGADDTMLAKDPASGICTLLYDSAPSGRFGTMTYLSKAAATYVQEFLPHSICAMQ

SEQ ID NO: 9567 - protein, 1181 aa, Homo sapiens
MRSRSNSGVRLDGYARLVQQTILCHQNPVTGLLPASYDQKDAWVRDNVYSILAVWGLGLAYRKNADRDEDKAKAYELEQSVVKLMRGLLHCMIRQVDKVESFKYSQSTKDSLHAKYNTKTCATVVGDDQWGHLQLDATSVYLLFLAQMTASGLHIIHSLDEVNFIQNLVFYIEAAYKTADFGIWERGDKTNQGISELNASSVGMAKAALEALDELDLFGVKGGPQSVIHVLADEVQHCQSILNSLLPRASTSKEVDASLLSVVSFPAFAVEDSQLVELTKQEIITKLQGRYGCCRFLRDGYKTPKEDPNRLYYEPAELKLFENIECEWPLFWTYFILDGVFSGNAEQVQEYKEALEAVLIKGKNGVPLLPELYSVPPDRVDEEYQNPHTVDRVPMGKLPHMWGQSLYILGSLMAEGFLAPGEIDPLNRRFSTVPKPDVVVQVSILAETEEIKTILKDKGIYVETIAEVYPIRVQPARILSHIYSSLGCNNRMKLSGRPYRHMGVLGTSKLYDIRKTIFTFTPQFIDQQQFYLALDNKMIVEMLRTDLSYLCSRWRMTGQPTITFPISHSMLDEDGTSLNSSILAALRKMQDGYFGGARVQTGKLSEFLTTSCCTHLSFMDPGPEGKLYSEDYDDNYDYLESGNWMNDYDSTSHDVHMYLPTKLFQASRPSFNLLDSPHPRQENQVPSVRVEIHLPRDQSGEVDFKALVLQLKETSSLQEQADILYMLYTMKGPDWNTELYNERSATVRELLTELYGKVGEIRHWGLIRYISGILRKKVEALDEACTDLLSHQKHLTVGLPPEPREKTISAPLPYEALTQLIDEASEGDMSISILTQEIMVYLAMYMRTQPGLFAEMFRLRIGLIIQVMATELAHSLRCSAEEATEGLMNLSPSAMKNLLHHILSGKEFGVERSVRPTDSNVSPAISIHEIGAVGATKTERTGIMQLKSEIKQVEFRRLSISAESQSNGGHPLGIDLMSPSFMSPGTSMTPSSGSFPSAYDQQSSKDSRQGQWQRRRRLDGALNRVPVGFYQKVWKVLQKCHGLSVEGFVLPSSTTREMTPGEIKFSVHVESVLNRVPQPEYRQLLVEAILVLTMLADIEIHSIGSIIAVEKIVHIANDLFLQEQKTLGADDTMLAKDPASGICTLLYDSAPSGRFGTMTYLSKAAATYVQEFLPHSICAMQ

SEQ ID NO: 9568 - protein, 305 aa, Homo sapiens
MAPLDLDKYVEIARLCKYLPENDLKRLCDYVCDLLLEESNVQPVSTPVTVCGDIHGQFYDLCELFRTGGQVPDTNYIFMGDFVDRGYYSLETFTYLLALKAKWPDRITLLRGNHESRQITQVYGFYDECQTKYGNANAWRYCTKVFDMLTVAALIDEQILCVHGGLSPDIKTLDQIRTIERNQEIPHKGAFCDLVWSDPEDVDTWAISPRGAGWLFGAKVTNEFVHINNLKLICRAHQLVHEGYKFMFDEKLVTVWSAPNYCYRCGNIASIMVFKDVNTREPKLFRAVPDSERVIPPRTTTPYFL

SEQ ID NO: 9569 - protein, 629 aa, Homo sapiens
MVRGARQPQQPRSRLAPRLTGTVEKPPRKRRSSIRGSGDSSHSQSQGERYQHFTEKTEFALKEIMSSGGAEDDIPQGERKTVTDFCYLLDKSKQLFNGLRDLPQYGQKQWQSYFGRTFDVYTKLWKFQQQHRQVLDNRYGLKRWQIGEIASKIGQLYYHYYLRTSETSYLNEAFSFYSAIRQRSYYSQVNKEDRPELVVKKLRYYARFIVVCLLLNKMDVVKDLVKELSDEIEDYTHRFNTEDQVEWNLVLQEVAAFIEADPVMVLNDDNTIVITSNRLAETGAPLLEQGMIVGQLSLADALIIGNCNNQVKFSELTVDMFRMLQALEREPMNLASQMNKPGMQESADKPTRRENPHKYLLYKPTFSQLYTFLAASFKELPANSVLLIYLSATGVFPTGRSDSEGPYDFGGVLTNSNRDIINGDAIHKRNQSHKEMHCLHPGDLYPFTRKPLFIIVDSSNSVAYKNFTNLFGQPLVCLLSPTAYPKALQDQSQRGSLFTLFLNNPLMAFLFVSGLSSMRRGLWEKCQEYLRKINRDIAQLLTHSRSIDQAFLQFFGDEFLRLLLTRFIFCSATMRMHKIFRETRNYPESYPQLPRDETVENPHLQKHILELASILDVRNVFFENTIDDY

SEQ ID NO: 9570 - protein, 618 aa, Homo sapiens
MELLAAAFSAACAVDHDSSTSESDARDSAAGHLPGSESSSTPGNGATPEEWPALADSPTTLTEALRMIHPIPADSWRNLIEQIGLLYQEYRDKSTLQEIETRRQQDAEIEDNTNGSPASEDTPEEEEEEEEEEEPASPPERKTLPQICLLSNPHSRFNLWQDLPEIRSSGVLEILQPEEIKLQEAMFELVTSEASYYKSLNLLVSHFMENERIRKILHPSEAHILFSNVLDVLAVSERFLLELEHRMEENIVISDVCDIVYRYAADHFSVYITYVSNQTYQERTYKQLLQEKAAFRELIAQLELDPKCRGLPFSSFLILPFQRITRLKLLVQNILKRVEERSERECTALDAHKELEMVVKACNEGVRKMSRTEQMISIQKKMEFKIKSVPIISHSRWLLKQGELQQMSGPKTSRTLRTKKLFHEIYLFLFNDLLVICRQIPGDKYQVFDSAPRGLLRVEELEDQGQTLANVFILRLLENADDREATYMLKASSQSEMKRWMTSLAPNRRTKFVSFTSRLLDCPQVQCVHPYVAQQPDELTLELADILNILDKTDDGWIFGERLHDQERGWFPSSMTEEILNPKIRSQNLKECFRVHKMDDPQRSQNKDRRKLGSRNRQ

SEQ ID NO: 9571 - protein, 139 aa, Homo sapiens
MEEPEEPADSGQSLVPVYIYSPEYVSMCDSLAKIPKRASMVHSLIEAYALHKQMRDEASGFCYLNDAVLGILRLRRKFERILYVDLDLHHGDGTGDVSDVGLGKGRYYSVNVPIQDGIQDEKYYQICERYEPPAPNPGL

SEQ ID NO: 9572 - protein, 1299 aa, Homo sapiens
MAAETQTLNFGPEWLRALSSGGSITSPPLSPALPKYKLADYRYGREEMLALFLKDNKIPSDLLDKEFLPILQEEPLPPLALVPFTEEEQRNFSMSVNSAAVLRLTGRGGGGTVVGAPRGRSSSRGRGRGRGECGFYQRSFDEVEGVFGRGGGREMHRSQSWEERGDRRFEKPGRKDVGRPNFEEGGPTSVGRKHEFIRSESENWRIFREEQNGEDEDGGWRLAGSRRDGERWRPHSPDGPRSAGWREHMERRRRFEFDFRDRDDERGYRRVRSGSGSIDDDRDSLPEWCLEDAEEEMGTFDSSGAFLSLKKVQKEPIPEEQEMDFRPVDEGEECSDSEGSHNEEAKEPDKTNKKEGEKTDRVGVEASEETPQTSSSSARPGTPSDHQSQEASQFERKDEPKTEQTEKAEEETRMENSLPAKVPSRGDEMVADVQQPLSQIPSDTASPLLILPPPVPNPSPTLRPVETPVVGAPGMGSVSTEPDDEEGLKHLEQQAEKMVAYLQDSALDDERLASKLQEHRAKGVSIPLMHEAMQKWYYKDPQGEIQGPFNNQEMAEWFQAGYFTMSLLVKRACDESFQPLGDIMKMWGRVPFSPGPAPPPHMGELDQERLTRQQELTALYQMQHLQYQQFLIQQQYAQVLAQQQKAALSSQQQQQLALLLQQFQTLKMRISDQNIIPSVTRSVSVPDTGSIWELQPTASQPTVWEGGSVWDLPLDTTTPGPALEQLQQLEKAKAAKLEQERREAEMRAKREEEERKRQEELRRQQEEILRRQQEEERKRREEEELARRKQEEALRRQREQEIALRRQREEEERQQQEEALRRLEERRREEEERRKQEELLRKQEEEAAKWAREEEEAQRRLEENRLRMEEEAARLRHEEEERKRKELEVQRQKELMRQRQQQQEALRRLQQQQQQQQLAQMKLPSSSTWGQQSNTTACQSQATLSLAEIQKLEEERERQLREEQRRQQRELMKALQQQQQQQQQKLSGWGNVSKPSGTTKSLLEIQQEEARQMQKQQQQQQQHQQPNRARNNTHSNLHTSIGNSVWGSINTGPPNQWASDLVSSIWSNADTKNSNMGFWDDAVKEVGPRNSTNKNKNNASLSKSVGVSNRQNKKVEEEEKLLKLFQGVNKAQDGFTQWCEQMLHALNTANNLDVPTFVSFLKEVESPYEVHDYIRAYLGDTSEAKEFAKQFLERRAKQKANQQRQQQQLPQQQQQQPPQQPPQQPQQQDSVWGMNHSTLHSVFQTNQSNNQQSNFEAVQSGKKKKKQKMVRADPSLLGFSVNASSERLNMGEIETLDDY

SEQ ID NO: 9573 - protein, 516 aa, Homo sapiens
MGCGCSSHPEDDWMENIDVCENCHYPIVPLDGKGTLLIRNGSEVRDPLVTYEGSNPPASPLQGDPRQQGLKDKACGSLAVGFHLSPTYFLPGLAFLVPHPVTPGFLPIPARFSLMPLVFTDNLVIALHSYEPSHDGDLGFEKGEQLRILEQSGEWWKAQSLTTGQEGFIPFNFVAKANSLEPEPWFFKNLSRKDAERQLLAPGNTHGSFLIRESESTAGSFSLSVRDFDQNQGEVVKHYKIRNLDNGGFYISPRITFPGLHELVRHYTRYYNGHTKVAVKSLKQGSMSPDAFLAEANLMKQLQHQRLVRLYAVVTQEPIYIITEYMENGSLVDFLKTPSGIKLTINKLLDMAAQIAEGMAFIEERNYIHRDLRAANILVSDTLSCKIADFGLARLIEDNEYTAREGAKFPIKWTAPEAINYGTFTIKSDVWSFGILLTEIVTHGRIPYPGMTNPEVIQNLERGYRMVRPDNCPEELYQLMRLCWKERPEDRPTFDYLRSVLEDFFTATEGQYQPQP

SEQ ID NO: 9574 - protein, 417 aa, Homo sapiens
MEEPEEPADSGQSLVPVYIYSPEYVSMCDSLAKIPKRASMVHSLIEAYALHKQMRIVKPKVASMEEMATFHTDAYLQHLQKVSQEGDDDHPDSIEYGLGYDCPATEGIFDYAAAIGGATITAAQCLIDGMCKVAINWSGGWHHAKKDEASGFCYLNDAVLGILRLRRKFERILYVDLDLHHGDGVEDAFSFTSKVMTVSLHKFSPGFFPGTGDVSDVGLGKGRYYSVNVPIQDGIQDEKYYQICESVLKEVYQAFNPKAVVLQLGADTIAGDPMCSFNMTPVGIGKCLKYILQWQLATLILGGGGYNLANTARCWTYLTGVILGKTLSSEIPDHEFFTAYGPDYVLEITPSCRPDRNEPHRIQQILNYIKGEHRPSRPALLVPPSLWWPISGGFLKYHLPFGKLIISLTWKGNLFLA

SEQ ID NO: 9575 - protein, 253 aa, Homo sapiens
MEEPEEPADSGQSLVPVYIYSPEYVSMCDSLAKIPKRASMVHSLIEAYALHKQMRIVKPKVASMEEMATFHTDAYLQHLQKVSQEGDDDHPDSIEYGLGYDCPATEGIFDYAAAIGGATITAAQCLIDGMCKVAINWSGGWHHAKKDEASGFCYLNDAVLGILRLRRKFERILYVDLDLHHGDGVEDAFSFTSKVMTVSLHKFSPGFFPGTGDVSDVGLGKGRYYSVNVPIQDGIQDEKYYQICERALFIRTP

SEQ ID NO: 9576 - protein, 377 aa, Homo sapiens
MEEPEEPADSGQSLVPVYIYSPEYVSMCDSLAKIPKRASMVHSLIEAYALHKQMRIVKPKVASMEEMATFHTDAYLQHLQKVSQEGDDDHPDSIEYGLGYDCPATEGIFDYAAAIGGATITAAQCLIDGMCKVAINWSGGWHHAKKDEASGFCYLNDAVLGILRLRRKFERILYVDLDLHHGDGVEDAFSFTSKVMTVSLHKFSPGFFPGTGDVSDVGLGKGRYYSVNVPIQDGIQDEKYYQICESVLKEVYQAFNPKAVVLQLGADTIAGDPMCSFNMTPVGIGKCLKYILQWQLATLILGGGGYNLANTARCWTYLTGVILGKTLSSEIPDHEFFTAYGPDYVLEITPSCRPDRNEPHRIQQILNYIKGNLKHVV

SEQ ID NO: 9577 - protein, 652 aa, Homo sapiens
MAAAALPPRPLLLLPLVLLLSGRPTRADSKVFGDLDQVRMTSEGSDCRCKCIMRPLSKDACSRVRSGRARVEDFYTVETVSSGTDCRCSCTAPPSSLNPCENEWKMEKLKKQAPELLKLQSMVDLLEGTLYSMDLMKVHAYVHKVASQMNTLEESIKANLSRENEVVKDSVRHLSEQLRHYENHSAIMLGIKKELSRLGLQLLQKDAAAAPATPATGTGSKAQDTARGKGKDISKYGSVQKSFADRGLPKPPKEKLLQVEKLRKESGKGSFLQPTAKPRALAQQQAVIRGFTYYKAGKQEVTEAVADNTLQGTSWLEQLPPKVEGRSNSAEPNSAEQDEAEPRSSERVDLASGTPTSIPATTTTATTTPTPTTSLLPTEPPSGPEVSSQGREASCEGTLRAVDPPVRHHSYGRHEGAWMKDPAARDDRIYVTNYYYGNSLVEFRNLENFKQGRWSNMYKLPYNWIGTGHVVYQGAFYYNRAFTKNIIKYDLRQRFVASWALLPDVVYEDTTPWKWRGHSDIDFAVDESGLWVIYPAVDDRDEAQPEVIVLSRLDPGDLSVHRETTWKTRLRRNSYGNCFLVCGILYAVDTYNQQEGQVAYAFDTHTGTDARPQLPFLNEHAYTTQIDYNPKERVLYAWDNGHQLTYTLHFVV

SEQ ID NO: 9578 - protein, 351 aa, Homo sapiens
MEEPEEPADSGQSLVPVYIYSPEYVSMCDSLAKIPKRASMVHSLIEAYALHKQMRIVKPKVASMEEMATFHTDAYLQHLQKVSQEGDDDHPDSIEYGLGYDCPATEGIFDYAAAIGGATITAAQCLIDGMCKVAINWSGGWHHAKKDEASGFCYLNDAVLGILRLRRKFERILYVDLDLHHGDGTGDVSDVGLGKGRYYSVNVPIQDGIQDEKYYQICESVLKEVYQAFNPKAVVLQLGADTIAGDPMCSFNMTPVGIGKCLKYILQWQLATLILGGGGYNLANTARCWTYLTGVILGKTLSSEIPDHEFFTAYGPDYVLEITPSCRPDRNEPHRIQQILNYIKGNLKHVV

SEQ ID NO: 9579 - protein, 737 aa, Homo sapiens
MPGKLLWGDIMELEAPLEESESQKKERQKSDRRKSRHHYDSDEKSETRENGVTDDLDAPKAKKSKMKEKLNGDTEEGFNRLSDEFSKSHKSRRKDLPNGDIDEYEKKSKRVSSLDTSTHKSSDNKLEETLTREQKEGAFSNFPISEETIKLLKGRGVTYLFPIQVKTFGPVYEGKDLIAQARTGTGKTFSFAIPLIERLQRNQETIKKSRSPKVLVLAPTRELANQVAKDFKDITRKLSVACFYGGTSYQSQINHIRNGIDILVGTPGRIKDHLQSGRLDLSKLRHVVLDEVDQMLDLGFAEQVEDIIHESYKTDSEDNPQTLLFSATCPQWVYKVAKKYMKSRYEQVDLVGKMTQKAATTVEHLAIQCHWSQRPAVIGDVLQVYSGSEGRAIIFCETKKNVTEMAMNPHIKQNAQCLHGDIAQSQREITLKGFREGSFKVLVATNVAARGLDIPEVDLVIQSSPPQDVESYIHRSGRTGRAGRTGICICFYQPRERGQLRYVEQKAGITFKRVGVPSTMDLVKSKSMDAIRSLASVSYAAVDFFRPSAQRLIEEKGAVDALAAALAHISGASSFEPRSLITSDKGFVTMTLESLEEIQDVSCAWKELNRKLSSNAVSQITRMCLLKGNMGVCFDVPTTESERLQAEWHDSDWILSVPAKLPEIEEYYDGNTSSNSRQRSGWSSGRSGRSGRSGGRSGGRSGRQSRQGSRSGSRQDGRRRSGNRNRSRSGGHKRSFD

SEQ ID NO: 9580 - protein, 325 aa, Homo sapiens
MKPILLQGHERSITQIKYNREGDLLFTVAKDPIVNVWYSVNGERLGTYMGHTGAVWCVDADWDTKHVLTGSADNSCRLWDCETGKQLALLKTNSAVRTCGFDFGGNIIMFSTDKQMGYQCFVSFFDLRDPSQIDNNEPYMKIPCNDSKITSAVWGPLGECIIAGHESGELNQYSAKSGEVLVNVKEHSRQINDIQLSRDMTMFVTASKDNTAKLFDSTTLEHQKTFRTERPVNSAALSPNYDHVVLGGGQEAMDVTTTSTRIGKFEARFFHLAFEEEFGRVKGHFGPINSVAFHPDGKSYSSGGEDGYVRIHYFDPQYFEFEFEA

SEQ ID NO: 9581 - protein, 286 aa, Homo sapiens
MEEPEEPADSGQSLVPVYIYSPEYVSMCDSLAKIPKRASMVHSLIEAYALHKQMRDEASGFCYLNDAVLGILRLRRKFERILYVDLDLHHGDGVEDAFSFTSKVMTVSLHKFSPGFFPGTGDVSDVGLGKGRYYSVNVPIQDGIQDEKYYQICESVLKEVYQAFNPKAVVLQLGADTIAGDPMCSFNMTPVGIGKCLKYILQWQLATLILGGGGYNLANTARCWTYLTGVILGKTLSSEIPDHEFFTAYGPDYVLEITPSCRPDRNEPHRIQQILNYIKGNLKHVV

SEQ ID NO: 9582 - protein, 200 aa, Homo sapiens
MDDKKKKRSPKPCLAQPAQAPGTLRRVPVPTSHSGSLALGLPHLPSPKQRAKFKRVGKEKCRPVLAGGGSGSAGTPLQHSFLTEVTDVYEMEGGLLNLLNDFHSGRLQAFGKECSFEQLEHVREMQEKLARLHFSLDVCGEEEDDEEEEDGVTEGLPEEQKKTMADRNLDQLLSNLEDLSNSIQKLHLAENAEPEEQSAA

SEQ ID NO: 9583 - protein, 546 aa, Homo sapiens
MKNQDKKNGAAKQSNPKSSPGQPEAGPEGAQERPSQAAPAVEAEGPGSSQAPRKPEGAQARTAQSGALRDVSEELSRQLEDILSTYCVDNNQGGPGEDGAQGEPAEPEDAEKSRTYVARNGEPEPTPVVNGEKEPSKGDPNTEEIRQSDEVGDRDHRRPQEKKKAKGLGKEITLLMQTLNTLSTPEEKLAALCKKYAELLEEHRNSQKQMKLLQKKQSQLVQEKDHLRGEHSKAVLARSKLESLCRELQRHNRSLKEEGVQRAREEEEKRKEVTSHFQVTLNDIQLQMEQHNERNSKLRQENMELAERLKKLIEQYELREEHIDKVFKHKDLQQQLVDAKLQQAQEMLKEAEERHQREKDFLLKEAVESQRMCELMKQQETHLKQQLALYTEKFEEFQNTLSKSSEVFTTFKQEMEKMTKKIKKLEKETTMYRSRWESSNKALLEMAEEKTVRDKELEGLQVKIQRLEKLCRALQTERNDLNKRVQDLSAGGQGSLTDSGPERRPEGPGAQAPSSPRVTEAPCYPGAPSTEASGQTGPQEPTSARA

SEQ ID NO: 9584 - protein, 406 aa, Homo sapiens
MLFHSLSGPEVHGVIDEMDRRAKSEAPAISSAIDRGDTETTMPSISSDRAALCAGCGGKISDRYYLLAVDKQWHMRCLKCCECKLNLESELTCFSKDGSIYCKEDYYRRFSVQRCARCHLGISASEMVMRARDLVYHLNCFTCTTCNKMLTTGDHFGMKDSLVYCRLHFEALLQGEYPAHFNHADVAAAAAAAAAAKSAGLGAAGANPLGLPYYNGVGTVQKGRPRKRKSPGPGADLAAYNAALSCNENDAEHLDRDQPYPSSQKTKRMRTSFKHHQLRTMKSYFAINHNPDAKDLKQLAQKTGLTKRVLQVWFQNARAKFRRNLLRQENTGVDKSTDAALQTGTPSGPASELSNASLSPSSTPTTLTDLTSPTLPTVTSVLTSVPGNLEGHEPHSPSQTTLTNLF

SEQ ID NO: 9585 - protein, 1285 aa, Homo sapiens
MALARPGTPDPQALASVLLLLLWAPALSLLAGTVPSEPPSACASDPCAPGTECQATESGGYTCGPMEPRGCATQPCHHGALCVPQGPDPTGFRCYCVPGFQGPRCELDIDECASRPCHHGATCRNLADRYECHCPLGYAGVTCEMEVDECASAPCLHGGSCLDGVGSFRCVCAPGYGGTRCQLDLDECQSQPCAHGGTCHDLVNGFRCDCAGTGYEGTHCEREVLECASAPCEHNASCLEGLGSFRCLCWPGYSGELCEVDEDECASSPCQHGGRCLQRSDPALYGGVQAAFPGAFSFRHAAGFLCHCPPGFEGADCGVEVDECASRPCLNGGHCQDLPNGFQCHCPDGYAGPTCEEDVDECLSDPCLHGGTCSDTVAGYICRCPETWGGRDCSVQLTGCQGHTCPLAATCIPIFESGVHSYVCHCPPGTHGPFCGQNTTFSVMAGSPIQASVPAGGPLGLALRFRTTLPAGTLATRNDTKESLELALVAATLQATLWSYSTTVLVLRLPDLALNDGHWHQVEVVLHLATLELRLWHEGCPARLCVASGPVALASTASATPLPAGISSAQLGDATFAGCLQDVRVDGHLLLPEDLGENVLLGCERREQCRPLPCVHGGSCVDLWTHFRCDCARPHRGPTCADEIPAATFGLGGAPSSASFLLQELPGPNLTVSFLLRTRESAGLLLQFANDSAAGLTVFLSEGRIRAEVPGSPAVVLPGRWDDGLRHLVMLSFGPDQLQDLGQHVHVGGRLLAADSQPWGGPFRGCLQDLRLDGCHLPFFPLPLDNSSQPSELGGRQSWNLTAGCVSEDMCSPDPCFNGGTCLVTWNDFHCTCPANFTGPTCAQQLWCPGQPCLPPATCEEVPDGFVCVAEATFREGPPAAFSGHNASSGRLLGGLSLAFRTRDSEAWLLRAAAGALEGVWLAVRNGSLAGGVRGGHGLPGAVLPIPGPRVADGAWHRVRLAMERPAATTSRWLLWLDGAATPVALRGLASDLGFLQGPGAVRILLAENFTGCLGRVALGGLPLPLARPRPGAAPGAREHFASWPGTPAPILGCRGAPVCAPSPCLHDGACRDLFDAFACACGPGWEGPRCEAHVDPCHSAPCARGRCHTHPDGRFECRCPPGFGGPRCRLPVPSKECSLNVTCLDGSPCEGGSPAANCSCLEGLAGQRCQVPTLPCEANPCLNGGTCRAAGGVSECICNARFSGQFCEVAKGLPLPLPFPLLEVAVPAACACLLLLLLGLLSGILAARKRRQSEGTYSPSQQEVAGARLEMDSVLKVPPEERLI

SEQ ID NO: 9586 - protein, 922 aa, Homo sapiens
MITSAAGIISLLDEDEPQLKEFALHKLNAVVNDFWAEISESVDKIEVLYEDEGFRSRQFAALVASKVFYHLGAFEESLNYALGAGDLFNVNDNSEYVETIIAKCIDHYTKQCVENADLPEGEKKPIDQRLEGIVNKMFQRCLDDHKYKQAIGIALETRRLDVFEKTILESNDVPGMLAYSLKLCMSLMQNKQFRNKVLRVLVKIYMNLEKPDFINVCQCLIFLDDPQAVSDILEKLVKEDNLLMAYQICFDLYESASQQFLSSVIQNLRTVGTPIASVPGSTNTGTVPGSEKDSDSMETEEKTSSAFVGKTPEASPEPKDQTLKMIKILSGEMAIELHLQFLIRNNNTDLMILKNTKDAVRNSVCHTATVIANSFMHCGTTSDQFLRDNLEWLARATNWAKFTATASLGVIHKGHEKEALQLMATYLPKDTSPGSAYQEGGGLYALGLIHANHGGDIIDYLLNQLKNASNDIVRHGGSLGLGLAAMGTARQDVYDLLKTNLYQDDAVTGEAAGLALGLVMLGSKNAQAIEDMVGYAQETQHEKILRGLAVGIALVMYGRMEEADALIESLCRDKDPILRRSGMYTVAMAYCGSGNNKAIRRLLHVAVSDVNDDVRRAAVESLGFILFRTPEQCPSVVSLLSESYNPHVRYGAAMALGICCAGTGNKEAINLLEPMTNDPVNYVRQGALIASALIMIQQTEITCPKVNQFRQLYSKVINDKHDDVMAKFGAILAQGILDAGGHNVTISLQSRTGHTHMPSVVGVLVFTQFWFWFPLSHFLSLAYTPTCVIGLNKDLKVSTAVLSITAKAKKKEKEKEKKEEEKMEVDEAEKKEEKEKKKEPEPNFQLLDNPARVMPAQLKVLTMPETCRYQPFKPLSIGGIIILKDTSEDIEELVEPVAAHGPKIEEEEQEPEPPEPFEYIDD

SEQ ID NO: 9587 - protein, 2136 aa, Homo sapiens
MSRSRHARPSRLVRKEDVNKKKKNSQLRKTTKGANKNVASVKTLSPGKLKQLIQERDVKKKTEPKPPVPVRSLLTRAGAARMNLDRTEVLFQNPESLTCNGFTMALRSTSLSRRLSQPPLVVAKSKKVPLSKGLEKQHDCDYKILPALGVKHSENDSVPMQDTQVLPDIETLIGVQNPSLLKGKSQETTQFWSQRVEDSKINIPTHSGPAAEILPGPLEGTRCGEGLFSEETLNDTSGSPKMFAQDTVCAPFPQRATPKVTSQGNPSIQLEELGSRVESLKLSDSYLDPIKSEHDCYPTSSLNKVIPDLNLRNCLALGGSTSPTSVIKFLLAGSKQATLGAKPDHQEAFEATANQQEVSDTTSFLGQAFGAIPHQWELPGADPVHGEALGETPDLPEIPGAIPVQGEVFGTILDQQETLGMSGSVVPDLPVFLPVPPNPIATFNAPSKWPEPQSTVSYGLAVQGAIQILPLGSGHTPQSSSNSEKNSLPPVMAISNVENEKQVHISFLPANTQGFPLAPERGLFHASLGIAQLSQAGPSKSDRGSSQVSVTSTVHVVNTTVVTMPVPMVSTSSSSYTTLLPTLEKKKRKRCGVCEPCQQKTNCGECTYCKNRKNSHQICKKRKCEELKKKPSVVVPLEVIKENKRPQREKKPKVLKADFDNKPVNGPKSESMDYSRCGHGEEQKLELNPHTVENVTKNEDSMTGIEVEKWTQNKKSQLTDHVKGDFSANVPEAEKSKNSEVDKKRTKSPKLFVQTVRNGIKHVHCLPAETNVSFKKFNIEEFGKTLENNSYKFLKDTANHKNAMSSVATDMSCDHLKGRSNVLVFQQPGFNCSSIPHSSHSIINHHASIHNEGDQPKTPENIPSKEPKDGSPVQPSLLSLMKDRRLTLEQVVAIEALTQLSEAPSENSSPSKSEKDEESEQRTASLLNSCKAILYTVRKDLQDPNLQGEPPKLNHCPSLEKQSSCNTVVFNGQTTTLSNSHINSATNQASTKSHEYSKVTNSLSLFIPKSNSSKIDTNKSIAQGIITLDNCSNDLHQLPPRNNEVEYCNQLLDSSKKLDSDDLSCQDATHTQIEEDVATQLTQLASIIKINYIKPEDKKVESTPTSLVTCNVQQKYNQEKGTIQQKPPSSVHNNHGSSLTKQKNPTQKKTKSTPSRDRRKKKPTVVSYQENDRQKWEKLSYMYGTICDIWIASKFQNFGQFCPHDFPTVFGKISSSTKIWKPLAQTRSIMQPKTVFPPLTQIKLQRYPESAEEKVKVEPLDSLSLFHLKTESNGKAFTDKAYNSQVQLTVNANQKAHPLTQPSSPPNQCANVMAGDDQIRFQQVVKEQLMHQRLPTLPGISHETPLPESALTLRNVNVVCSGGITVVSTKSEEEVCSSSFGTSEFSTVDSAQKNFNDYAMNFFTNPTKNLVSITKDSELPTCSCLDRVIQKDKGPYYTHLGAGPSVAAVREIMENRYGQKGNAIRIEIVVYTGKEGKSSHGCPIAKWVLRRSSDEEKVLCLVRQRTGHHCPTAVMVVLIMVWDGIPLPMADRLYTELTENLKSYNGHPTDRRCTLNENRTCTCQGIDPETCGASFSFGCSWSMYFNGCKFGRSPSPRRFRIDPSSPLHEKNLEDNLQSLATRLAPIYKQYAPVAYQNQVEYENVARECRLGSKEGRPFSGVTACLDFCAHPHRDIHNMNNGSTVVCTLTREDNRSLGVIPQDEQLHVLPLYKLSDTDEFGSKEGMEAKIKSGAIEVLAPRRKKRTCFTQPVPRSGKKRAAMMTEVLAHKIRAVEKKPIPRIKRKNNSTTTNNSKPSSLPTLGSNTETVQPEVKSETEPHFILKSSDNTKTYSLMPSAPHPVKEASPGFSWSPKTASATPAPLKNDATASCGFSERSSTPHCTMPSGRLSGANAAAADGPGISQLGEVAPLPTLSAPVMEPLINSEPSTGVTEPLTPHQPNHQPSFLTSPQDLASSPMEEDEQHSEADEPPSDEPLSDDPLSPAEEKLPHIDEYWSDSEHIFLDANIGGVAIAPAHGSVLIECARRELHATTPVEHPNRNHPTRLSLVFYQHKNLNKPQHGFELNKIKFEAKEAKNKKMKASEQKDQAANEGPEQSSEVNELNQIPSHKALTLTHDNVVTVSPYALTHVAGPYNHWV

SEQ ID NO: 9588 - protein, 1069 aa, Homo sapiens
MDDKASVGKISVSSDSVSTLNSEDFVLVSRQGDETPSTNNGSDDEKTGLKIVGNGSEQQLQKELADVLMDPPMDDQPGEKELVKRSQLDGEGDGPLSNQLSASSTINPVPLVGLQKPEMSLPVKPGQGDSEASSPFTPVADEDSVVFSKLTYLGCASVNAPRSEVEALRMMSILRSQCQISLDVTLSVPNVSEGIVRLLDPQTNTEIANYPIYKILFCVRGHDGTPESDCFAFTESHYNAELFRIHVFRCEIQEAVSRILYSFATAFRRSAKQTPLSATAAPQTPDSDIFTFSVSLEIKEDDGKGYFSAVPKDKDRQCFKLRQGIDKKIVIYVQQTTNKELAIERCFGLLLSPGKDVRNSDMHLLDLESMGKSSDGKSYVITGSWNPKSPHFQVVNEETPKDKVLFMTTAVDLVITEVQEPVRFLLETKVRVCSPNERLFWPFSKRSTTENFFLKLKQIKQRERKNNTDTLYEVVCLESESERERRKTTASPSVRLPQSGSQSSVIPSPPEDDEEEDNDEPLLSGSGDVSKECAEKILETWGELLSKWHLNLNVRPKQLSSLVRNGVPEALRGEVWQLLAGCHNNDHLVEKYRILITKESPQDSAITRDINRTFPAHDYFKDTGGDGQDSLYKICKAYSVYDEEIGYCQGQSFLAAVLLLHMPEEQAFSVLVKIMFDYGLRELFKQNFEDLHCKFYQLERLMQEYIPDLYNHFLDISLEAHMYASQWFLTLFTAKFPLYMVFHIIDLLLCEGISVIFNVALGLLKTSKDDLLLTDFEGALKFFRVQLPKRYRSEENAKKLMELACNMKISQKKLKKYEKEYHTMREQQAQQEDPIERFERENRRLQEANMRLEQENDDLAHELVTSKIALRKDLDNAEEKADALNKELLMTKQKLIDAEEEKRRLEEESAQLKEMCRRELDKAESEIKKNSSIIGDYKQICSQLSERLEKQQTANKVEIEKIRQKVDDCERCREFFNKEGRVKGISSTKEVLDEDTDEEKETLKNQLREMELELAQTKLQLVEAECKIQDLEHHLGLALNEVQAAKKTWFNRTLSSIKTATGVQGKETC

SEQ ID NO: 9589 - protein, 1584 aa, Homo sapiens
MENTGWMGKGHRMTPACPLLLSVILSLRLATAFDPAPSACSALASGVLYGAFSLQDLFPTIASGCSWTLENPDPTKYSLYLRFNRQEQVCAHFAPRLLPLDHYLVNFTCLRPSPEEAVAQAESEVGRPEEEEAEAAAGLELCSGSGPFTFLHFDKNFVQLCLSAEPSEAPRLLAPAALAFRFVEVLLINNNNSSQFTCGVLCRWSEECGRAAGRACGFAQPGCSCPGEAGAGSTTTTSPGPPAAHTLSNALVPGGPAPPAEADLHSGSSNDLFTTEMRYGEEPEEEPKVKTQWPRSADEPGLYMAQTGDPAAEEWSPWSVCSLTCGQGLQVRTRSCVSSPYGTLCSGPLRETRPCNNSATCPVHGVWEEWGSWSLCSRSCGRGSRSRMRTCVPPQHGGKACEGPELQTKLCSMAACPVEGQWLEWGPWGPCSTSCANGTQQRSRKCSVAGPAWATCTGALTDTRECSNLECPATDSKWGPWNAWSLCSKTCDTGWQRRFRMCQATGTQGYPCEGTGEEVKPCSEKRCPAFHEMCRDEYVMLMTWKKAAAGEIIYNKCPPNASGSASRRCLLSAQGVAYWGLPSFARCISHEYRYLYLSLREHLAKGQRMLAGEGMSQVVRSLQELLARRTYYSGDLLFSVDILRNVTDTFKRATYVPSADDVQRFFQVVSFMVDAENKEKWDDAQQVSPGSVHLLRVVEDFIHLVGDALKAFQSSLIVTDNLVISIQREPVSAVSSDITFPMRGRRGMKDWVRHSEDRLFLPKEVLSLSSPGKPATSGAAGSPGRGRGPGTVPPGPGHSHQRLLPADPDESSYFVIGAVLYRTLGLILPPPRPPLAVTSRVMTVTVRPPTQPPAEPLITVELSYIINGTTDPHCASWDYSRADASSGDWDTENCQTLETQAAHTRCQCQHLSTFAVLAQPPKDLTLELAGSPSVPLVIGCAVSCMALLTLLAIYAAFWRFIKSERSIILLNFCLSILASNILILVGQSRVLSKGVCTMTAAFLHFFFLSSFCWVLTEAWQSYLAVIGRMRTRLVRKRFLCLGWGLPALVVAVSVGFTRTKGYGTSSYCWLSLEGGLLYAFVGPAAVIVLVNMLIGIIVFNKLMARDGISDKSKKQRAGSERCPWASLLLPCSACGAVPSPLLSSASARNAMASLWSSCVVLPLLALTWMSAVLAMTDRRSVLFQALFAVFNSAQGFVITAVHCFLRREVQDVVKCQMGVCRADESEDSPDSCKNGQLQILSDFEKDVDLACQTVLFKEVNTCNPSTITGTLSRLSLDEDEEPKSCLVGPEGSLSFSPLPGNILVPMAASPGLGEPPPPQEANPVYMCGEGGLRQLDLTWLRPTEPGSEGDYMVLPRRTLSLQPGGGGGGGEDAPRARPEGTPRRAAKTVAHTEGYPSFLSVDHSGLGLGPAYGSLQNPYGMTFQPPPPTPSARQVPEPGERSRTMPRTVPGSTMKMGSLERKKLRYSDLDFEVMHTRKRHSELYHELNQKFHTFDRYRSQSTAKREKRWSVSSGGAAERSVCTDKPSPGERPSLSQHRRHQSWSTFKSMTLGSLPPKPRERLTLHRAAAWEPTEPPDGDFQTEV

SEQ ID NO: 9590 - protein, 1127 aa, Homo sapiens
MGLGKTVQIIAFLSGMFDASLVNHVLLIMPTNLINTWVKEFIKWTPGMRVKTFHGPSKDERTRNLNRIQQRNGVIITTYQMLINNWQQLSSFRGQEFVWDYVILDEAHKIKTSSTKSAICARAIPASNRLLLTGTPIQNNLQELWSLFDFACQGSLLGTLKTFKMEYENPITRAREKDATPGEKALGFKISENLMAIIKPYFLRRTKEDVQKKKSSNPEARLNEKNPDVDAICEMPSLSRKNDLIIWIRLVPLQEEIYRKFVSLDHIKELLMETRSPLAELGVLKKLCDHPRLLSARACCLLNLGTFSAQDGNEGEDSPDVDHIDQVTDDTLMEESGKMIFLMDLLKRLRDEGHQTLVFSQSRQILNIIERLLKNRHFKTLRIDGTVTHLLEREKRINLFQQNKDYSVFLLTTQVGGVGLTLTAATRVVIFDPSWNPATDAQAVDRVYRIGQKENVVVYRLITCGTVEEKIYRRQVFKDSLIRQTTGEKKNPFRYFSKQELRELFTIEDLQNSVTQLQLQSLHAAQRKSDIKLDEHIAYLQSLGIAGISDHDLMYTCDLSVKEELDVVEESHYIQQRVQKAQFLVEFESQNKEFLMEQQRTRNEGAWLREPVFPSSTKKKCPKLNKPQPQPSPLLSTHHTQEEDISSKMASVVIDDLPKEGEKQDLSSIKVNVTTLQDGKGTGSADSIATLPKGFGSVEELCTNSSLGMEKSFATKNEAVQKETLQEGPKQEALQEDPLESFNYVLSKSTKADIGPNLDQLKDDEILRHCNPWPIISITNESQNAESNVSIIEIADDLSASHSALQDAQASEAKLEEEPSASSPQYACDFNLFLEDSADNRQNFSSQSLEHVEKENSLCGSAPNSRAGFVHSKTCLSWEFSEKDDEPEEVVVKAKIRSKARRIVSDGEDEDDSFKDTSSINPFNTSLFQFSSVKQFDASTPKNDISPPGRFFSSQIPSSVNKSMNSRRSLASRRSLINMVLDHVEDMEERLDDSSEAKGPEDYPEEGVEESSGEASKYTEEDPSGETLSSENKSSWLMTSKPSALAQETSLGAPEPLSGEQLVGSPQDKAAEATNDYETLVKRGKELKECGKIQEALNCLVKALDIKSADPEVMLLTLSLYKQLNNN

SEQ ID NO: 9591 - protein, 1585 aa, Homo sapiens
MENTGWMGKGHRMTPACPLLLSVILSLRLATAFDPAPSACSALASGVLYGAFSLQDLFPTIASGCSWTLENPDPTKYSLYLRFNRQEQVCAHFAPRLLPLDHYLVNFTCLRPSPEEAVAQAESEVGRPEEEEAEAAAGLELCSGSGPFTFLHFDKNFVQLCLSAEPSEAPRLLAPAALAFRFVEVLLINNNNSSQFTCGVLCRWSEECGRAAGRACGFAQPGCSCPGEAGAGSTTTTSPGPPAAHTLSNALVPGGPAPPAEADLHSGSSNDLFTTEMRYGEEPEEEPKVKTQWPRSADEPGLYMAQTGDPAAEEWSPWSVCSLTCGQGLQVRTRSCVSSPYGTLCSGPLRETRPCNNSATCPVHGVWEEWGSWSLCSRSCGRGSRSRMRTCVPPQHGGKACEGPELQTKLCSMAACPVEGQWLEWGPWGPCSTSCANGTQQRSRKCSVAGPAWATCTGALTDTRECSNLECPATDSKWGPWNAWSLCSKTCDTGWQRRFRMCQATGTQGYPCEGTGEEVKPCSEKRCPAFHEMCRDEYVMLMTWKKAAAGEIIYNKCPPNASGSASRRCLLSAQGVAYWGLPSFARCISHEYRYLYLSLREHLAKGQRMLAGEGMSQVVRSLQELLARRTYYSGDLLFSVDILRNVTDTFKRATYVPSADDVQRFFQVVSFMVDAENKEKWDDAQQVSPGSVHLLRVVEDFIHLVGDALKAFQSSLIVTDNLVISIQREPVSAVSSDITFPMRGRRGMKDWVRHSEDRLFLPKEVLSLSSPGKPATSGAAGSPGRGRGPGTVPPGPGHSHQRLLPADPDESSYFVIGAVLYRTLGLILPPPRPPLAVTSRVMTVTVRPPTQPPAEPLITVELSYIINGTTDPHCASWDYSRADASSGDWDTENCQTLETQAAHTRCQCQHLSTFAVLAQPPKDLTLELAGSPSVPLVIGCAVSCMALLTLLAIYAAFWRFIKSERSIILLNFCLSILASNILILVGQSRVLSKGVCTMTAAFLHFFFLSSFCWVLTEAWQSYLAVIGRMRTRLVRKRFLCLGWGLPALVVAVSVGFTRTKGYGTSSYCWLSLEGGLLYAFVGPAAVIVLVNMLIGIIVFNKLMARDGISDKSKKQRAGSERCPWASLLLPCSACGAVPSPLLSSASARNAMASLWSSCVVLPLLALTWMSAVLAMTDRRSVLFQALFAVFNSAQGFVITAVHCFLRREVQDVVKCQMGVCRADESEDSPDSCKNGQLQILSDFEKDVDLACQTVLFKEVNTCNPSTITGTLSRLSLDEDEEPKSCLVGPEGSLSFSPLPGNILVPMAASPGLGEPPPPQEANPVYMCGEGGLRQLDLTWLRPTEPGSEGDYMVLPRRTLSLQPGGGGGGGEDAPRARPEGTPRRAAKTVAHTEGYPSFLSVDHSGLGLGPAYGSLQNPYGMTFQPPPPTPSARQVPEPGERSRTMPRTVPGSTMKMGSLERKKLRYSDLDFEKVMHTRKRHSELYHELNQKFHTFDRYRSQSTAKREKRWSVSSGGAAERSVCTDKPSPGERPSLSQHRRHQSWSTFKSMTLGSLPPKPRERLTLHRAAAWEPTEPPDGDFQTEV

SEQ ID NO: 9592 - protein, 1068 aa, Homo sapiens
MFEDKPHAEGAAVVAAAGEALQALCQELNLDEGSAAEALDDFTAIRGNYSLEGEVTHWLACSLYVACRKSIIPTVGKGIMEGNCVSLTRILRSAKLSLIQFFSKMKKWMDMSNLPQEFRERIERLERNFEVSTVIFKKYEPIFLDIFQNPYEEPPKLPRSRKQRRIPCSVKDLFNFCWTLFVYTKGNFRMIGDDLVNSYHLLLCCLDLIFANAIMCPNRQDLLNPSFKGLPSDFHTADFTASEEPPCIIAVLCELHDGLLVEAKGIKEHYFKPYISKLFDRKILKGECLLDLSSFTDNSKAVNKEYEEYVLTVGDFDERIFLGADAEEEIGTPRKFTRDTPLGKLTAQANVEYNLQQHFEKKRSFAPSTPLTGRRYLREKEAVITPVASATQSVSRLQSIVAGLKNAPSDQLINIFESCVRNPVENIMKILKGIGETFCQHYTQSTDEQPGSHIDFAVNRLKLAEILYYKILETVMVQETRRLHGMDMSVLLEQDIFHRSLMACCLEIVLFAYSSPRTFPWIIEVLNLQPFYFYKVIEVVIRSEEGLSRDMVKHLNSIEEQILESLAWSHDSALWEALQVSANKVPTCEEVIFPNNFETGNGGNVQGHLPLMPMSPLMHPRVKEVRTDSGSLRRDMQPLSPISVHERYSSPTAGSAKRRLFGEDPPKEMLMDKIITEGTKLKIAPSSSITAENVSILPGQTLLTMATAPVTGTTGHKVTIPLHGVANDAGEITLIPLSMNTNQESKVKSPVSLTAHSLIGASPKQTNLTKAQEVHSTGINRPKRTGSLALFYRKVYHLASVRLRDLCLKLDVSNELRRKIWTCFEFTLVHCPDLMKDRHLDQLLLCAFYIMAKVTKEERTFQEIMKSYRNQPQANSHVYRSVLLKSIPREVVAYNKNINDDFEMIDCDLEDATKTPDCSSGPVKEERGDLIKFYNTIYVGRVKSFALKYDLANQDHMMDAPPLSPFPHIKQQPGSPRRISQQHSIYISPHKNGSGLTPRSALLYKFNGSPSKSLKDINNMIRQGEQRTKKRVIAIDSDAESPAKRVCQENDDVLLKRLQDVVSERANH

SEQ ID NO: 9593 - protein, 369 aa, Homo sapiens
MKLKSLLLRYYPPGIMLEYEKHGELKTKSIDLLDLGPSTDVSALVEEIQKAEPLLTASRTEQVKLLIQRLQEKLGQNSNHTFYLFKVLKAHILPLTNVALNKSGSCFITGSYDRTCKLWDTASGEELNTLEGHRNVVYAIAFNNPYGDKIATGSFDKTCKLWSVETGKCYHTFRGHTAEIVCLSFNPQSTLVATGSMDTTAKLWDIQNGEEVYTLRGHSAEIISLSFNTSGDRIITGSFDHTVVVWDADTGRKVNILIGHCAEISSASFNWDCSLILTGSMDKTCKLWDATNGKCVATLTGHDDEILDSCFDYTGKLIATASADDGVSLCRPGWSAVARSWLTATCASQVQAILLPQPPELCHVLGNHV

SEQ ID NO: 9594 - protein, 966 aa, Homo sapiens
MWVSWAPGLWLLGLWATFGHGANTGAQCPPSQQEGLKLEHSSSLPANVTGFNLIHRLSLMKTSAIKKIRNPKGPLILRLGAAPVTQPTRRVFPRGLPEEFALVLTLLLKKHTHQKTWYLFQVTDANGYPQISLEVNSQERSLELRAQGQDGDFVSCIFPVPQLFDLRWHKLMLSVAGRVASVHVDCSSASSQPLGPRRPMRPVGHVFLGLDAEQGKPVSFDLQQVHIYCDPELVLEEGCCEILPAGCPPETSKARRDTQSNELIEINPQSEGKVYTRCFCLEEPQNSEVDAQLTGRISQKAERGAKVHQETAADECPPCVHGARDSNVTLAPSGPKGGKGERGLPGPPGSKGEKGARGNDCVRISPDAPLQCAEGPKGEKGESGALGPSGLPGSTGEKGQKGEKGDGGIKGVPGKPGRDGRPGEICVIGPKGQKGDPGFVGPEGLAGEPGPPGLPGPPGIGLPGTPGDPGGPPGPKGDKGSSGIPGKEGPGGKPGKPGVKGEKGDPCEVCPTLPEGFQNFVGLPGKPGPKGEPGDPVPARGDPGIQGIKGEKGEPCLSCSSVVGAQHLVSSTGASGDVGSPGFGLPGLPGRAGVPGLKGEKGNFGEAGPAGSPGPPGPVGPAGIKGAKGEPCEPCPALSNLQDGDVRVVALPGPSGEKGEPGPPGFGLPGKQGKAGERGLKGQKGDAGNPGDPGTPGTTGRPGLSGEPGVQGPAGPKGEKGDGCTACPSLQGTVTDMAGRPGQPGPKGEQGPEGVGRPGKPGQPGLPGVQGPPGLKGVQGEPGPPGRGVQGPQGEPGAPGLPGIQGLPGPRGPPGPTGEKGAQGSPGVKGATGPVGPPGASVSGPPGRDGQQGQTGLRGTPGEKGPRGEKGEPGECSCPSQGDLIFSGMPGPPGIPGPPGPPGVPGLQVKGEKRMRSLGGRAHGSGWLLPAGPQGCCSPTPKTQTCHFSLLCLPASQGGKEGPLSL

SEQ ID NO: 9595 - protein, 1604 aa, Homo sapiens
MWVSWAPGLWLLGLWATFGHGANTGAQCPPSQQEGLKLEHSSSLPANVTGFNLIHRLSLMKTSAIKKIRNPKGPLILRLGAAPVTQPTRRVFPRGLPEEFALVLTLLLKKHTHQKTWYLFQVTDANGYPQISLEVNSQERSLELRAQGQDGDFVSCIFPVPQLFDLRWHKLMLSVAGRVASVHVDCSSASSQPLGPRRPMRPVGHVFLGLDAEQGKPVSFDLQQVHIYCDPELVLEEGCCEILPAGCPPETSKARRDTQSNELIEINPQSEGKVYTRCFCLEEPQNSEVDAQLTGRISQKAERGAKVHQETAADECPPCVHGARDSNVTLAPSGPKGGKGERGLPGPPGSKGEKGARGNDCVRISPDAPLQCAEGPKGEKGESGALGPSGLPGSTGEKGQKGEKGDGGIKGVPGKPGRDGRPGEICVIGPKGQKGDPGFVGPEGLAGEPGPPGLPGPPGIGLPGTPGDPGGPPGPKGDKGSSGIPGKEGPGGKPGKPGVKGEKGDPCEVCPTLPEGFQNFVGLPGKPGPKGEPGDPVPARGDPGIQGIKGEKGEPCLSCSSVVGAQHLVSSTGASGDVGSPGFGLPGLPGRAGVPGLKGEKGNFGEAGPAGSPGPPGPVGPAGIKGAKGEPCEPCPALSNLQDGDVRVVALPGPSGEKGEPGPPGFGLPGKQGKAGERGLKGQKGDAGNPGDPGTPGTTGRPGLSGEPGVQGPAGPKGEKGDGCTACPSLQGTVTDMAGRPGQPGPKGEQGPEGVGRPGKPGQPGLPGVQGPPGLKGVQGEPGPPGRGVQGPQGEPGAPGLPGIQGLPGPRGPPGPTGEKGAQGSPGVKGATGPVGPPGASVSGPPGRDGQQGQTGLRGTPGEKGPRGEKGEPGECSCPSQGDLIFSGMPGAPGLWMGSSWQPGPQGPPGIPGPPGPPGVPGLQGVPGNNGLPGQPGLTAELGSLPIEQHLLKSICGDCVQGQRAHPGYLVEKGEKGDQGIPGVPGLDNCAQCFLSLERPRAEEARGDNSEGDPGCVGSPGLPGPPGLPGQRGEEGPPGMRGSPGPPGPIGPPGFPGAVGSPGLPGLQGERGLTGLTGDKGEPGPPGQPGYPGATGPPGLPGIKGERGYTGSAGEKGEPGPPGSEGLPGPPGPAGPRGERGPQGNSGEKGDQGFQGQPGFPGPPGPPGFPGKVGSPGPPGPQAEKGSEGIRGPSGLPGSPGPPGPPGIQGPAGLDGLDGKDGKPGLRGDPGPAGPPGLMGPPGFKGKTGHPGLPGPKGDCGKPGPPGSTGRPGAEGEPGAMGPQGRPGPPGHVGPPGPPGQPGPAGISAVGLKGDRGATGERGLAGLPGQPGPPGHPGPPGEPGTDGAAGKEGPPGKQGFYGPPGPKGDPGAAGQKGQAGEKGRAGMPGGPGKSGSMGPVGPPGPAGERGHPGAPGPSGSPGLPGVPGSMGDMVNYDEIKRFIRQEIIKMFDERMAYYTSRMQFPMEMAAAPGRPGPPGKDGAPGRPGAPGSPGLPGQIGREGRQGLPGVRGLPGTKGEKGDIGIGIAGENGLPGPPGPQGPPGYGKMGATGPMGQQGIPGIPGPPGPMGQPGKAGHCNPSDCFGAMPMEQQYPPMKTMKGPFG

SEQ ID NO: 9596 - protein, 507 aa, Homo sapiens
MQDDSIEASTSISQLLRESYLAETRHRGNNERSRAEPSSNPCHFGSPSGAAEGGGGQDDLPDLSAFLSQEELDESVNLARLAINYDPLEKADETQARKRLSPDQMKHSPNLSFEPNFCQDNPRSPTSSKESPQEAKRPQYCSETQSKKVFLNKAADFIEELSSLFKSHSSKRIRPRACKNHKSKLESQNKVMQENSSSFSDLSERRERSSVPIPIPADTRDNEVNHALEQQEAKRREAEQAASEAAGGDTTPGSSPSSLYYEEPLGQPPRFTQKLRSREVPEGTRVQLDCIVVGIPPPQVRWYCEGKELENSPDIHIVQAGNLHSLTIAEAFEEDTGRYSCFASNIYGTDSTSAEIYIEGVSSSDSEGDPNKEEMNRIQKPNEVSSPPTTSAVIPPAVPQAQHLVAQPRVATIQQCQSPTNYLQGLDGKPIIAAPVFTKMLQNLSASEGQLVVFECRVKGAPSPKVEWYREGTLIEDSPDFRILQKKPRSMAEPGKDDFNFNLLVYE

SEQ ID NO: 9597 - protein, 320 aa, Homo sapiens
MNSENLTRAAVAPAEFVLLGITNRWDLRVALFLTCLPVYLVSLLGNMGMALLIRMDARLHTPMYFFLANLSLLDACYSSAIGPKMLVDLLLPRATIPYTACALQMFVFAGLADTECCLLAAMAYDRYVAIRNPLLYTTAMSQRLCLALLGASGLGGAVSAFVHTTLTFRLSFCRSRKINSFFCDIPPLLAISCSDTSLNELLLFAICGFIQTATVLAITVSYGFIAGAVIHMRSVEGSRRAASTGGSHLTAVAMMYGTLIFMYLRPSSSYALDTDKMASVFYTLVIPSLNPLIYSLRNKEVKEALRQTWSRFHCPGQGSQ

SEQ ID NO: 9598 - protein, 360 aa, Homo sapiens
MERNHNPDNCNVLNFFFADKKNKRRNFGQIVSDVGRICYSVSLSLGEPTTMGRNNLTRPSEFILLGLSSRPEDQKPLFAVFLPIYLITVIGNLLIILAIRSDTRLQTPMYFFLSILSFVDICYVTVIIPKMLVNFLSETKTISYSECLTQMYFFLAFGNTDSYLLAAMAIDRYVAICNPFHYITIMSHRCCVLLLVLSFCIPHFHSLLHILLTNQLIFCASNVIHHFFCDDQPVLKLSCSSHFVKEITVMTEGLAVIMTPFSCIIISYLRILITVLKIPSAAGKRKAFSTCGSHLTVVTLFYGSISYLYFQPLSNYTVKDQIATIIYTVLTPMLNPFIYSLRNKDMKQGLAKLMHRMKCQ

SEQ ID NO: 9599 - protein, 316 aa, Homo sapiens
MGKPGRVNQTTVSDFLLLGLSEWPEEQPLLFGIFLGMYLVTMVGNLLIILAISSDPHLHTPMYFFLANLSLTDACFTSASIPKMLANIHTQSQIISYSGCLAQLYFLLMFGGLDNCLLAVMAYDRYVAICQPLHYSTSMSPQLCALMLGVCWVLTNCPALMHTLLLTRVAFCAQKAIPHFYCDPSALLKLACSDTHVNELMIITMGLLFLTVPLLLIVFSYVRIFWAVFVISSPGGRWKAFSTCGSHLTVVLLFYGSLMGVYLLPPSTYSTERESRAAVLYMVIIPTLNPFIYSLRNRDMKEALGKLFVSGKTFFL

SEQ ID NO: 9600 - protein, 691 aa, Homo sapiens
MDGCKKELPRLQEPEEDEDCYILNVQSSSDDTSGSSVARRAPKRQASCILNVQSRSGDTSGSSVARRAPKRQASSVVVIDSDSDEECHTHEEKKAKLLEINSDDESPECCHVKPAIQEPPIVISDDDNDDDNGNDLEVPDDNSDDSEAPDDNSDDSEAPDDNSDDSEAPDDNSDDSEAPDDNSDDSDVPDDNSDDSSDDNSDDSSDDNSDDSDVPDDKSDDSDVPDDSSDDSDVPDDSSDDSEAPDDSSDDSEAPDDSSDDSEAPDDSSDDSEAPDDSSDDSEASDDSSDDSEASDDSSDDSEAPDDKSDDSDVPEDKSDDSDVPDDNSDDLEVPVPAEDLCNEGQIASDEEELVEAAAAVSQHDSSDDAGEQDLGENLSKPPSDPEANPEVSERKLPTEEEPAPVVEQSGKRKSKTKTIVEPPRKRQTKTKNIVEPPRKRQTKTKNIVEPLRKRKAKTKNVSVTPGHKKRGPSKKKPGAAKVEKRKTRTPKCKVPGCFLQDLEKSKKYSGKNLKRNKDELVQRIYDLFNRSVCDKKLPEKLRIGWNNKMVKTAGLCSTGEMWYPKWRRFAKIQIGLKVCDSADRIRDTLIHEMCHAASWLIDGIHDSHGDAWKYYARKSNRIHPELPRVTRCHNYKINYKVHYECTGCKTRIGCYTKSLDTSRFICAKCKGSLVMVPLTQKDGTRIVPHV

SEQ ID NO: 9601 - protein, 490 aa, Homo sapiens
MLMRLVLTVRSNLIPSPPTYNSAHDYISWESFSNVSYYTRILPSVPKDCPTPMGTKGKKQLPDAQLLARRFLLRRKFIPDPQGTNLMFAFFAQHFTHQFFKTSGKMGPGFTKALGHGVDLGHIYGDNLERQYQLRLFKDGKLKYQVLDGEMYPPSVEEAPVLMHYPRGIPPQSQMAVGQEVFGLLPGLMLYATLWLREHNRVCDLLKAEHPTWGDEQLFQTTRLILIGETIKIVIEEYVQQLSGYFLQLKFDPELLFGVQFQYRNRIAMEFNHLYHWHPLMPDSFKVGSQEYSYEQFLFNTSMLVDYGVEALVDAFSRQIAGRIGGGRNMDHHILHVAVDVIRESREMRLQPFNEYRKRFGMKPYTSFQELVGEKEMAAELEELYGDIDALEFYPGLLLEKCHPNSIFGESMIEIGAPFSLKGLLGNPICSPEYWKPSTFGGEVGFNIVKTATLKKLVCLNTKTCPYVSFRVPDASQDDGPAVERPSTEL

SEQ ID NO: 9602 - protein, 166 aa, Homo sapiens
MAAIPPDSWQPPNVYLETSMGIIVLELYWKHAPKTCKNFAELARRGYYNGTKFHRIIKDFMIQGGDPTGTGRGGASIYGKQFEDELHPDLKFTGAGILAMANAGPDTNGSQFFVTLAPTQWLDGKHTIFGRVCQGIGMVNRVGMVETNSQDRPVDDVKIIKAYPSG

SEQ ID NO: 9603 - protein, 1049 aa, Homo sapiens
MLCWGNASFGQLGLGGIDEEIVLEPRKSDFFINKRVRDVGCGLRHTVFVLDDGTVYTCGCNDLGQLGHEKSRKKPEQVVALDAQNIVAVSCGEAHTLALNDKGQVYAWGLDSDGQLGLVGSEECIRVPRNIKSLSDIQIVQVACGYYHSLALSKASEVFCWGQNKYGQLGLGTDCKKQTSPQLLKSLLGIPFMQVAAGGAHSFVLTLSGAIFGWGRNKFGQLGLNDENDRYVPNLLKSLRSQKIVYICCGEDHTAALTKEGGVFTFGAGGYGQLGHNSTSHEINPRKVFELMGSIVTEIACGRQHTSAFVPSSGRIYSFGLGGNGQLGTGSTSNRKSPFTVKGNWYPYNGQCLPDIDSEEYFCVKRIFSGGDQSFSHYSSPQNCGPPDDFRCPNPTKQIWTVNEALIQKWLSYPSGRFPVEIANEIDGTFSSSGCLNGSFLAVSNDDHYRTGTRFSGVDMNAARLLFHKLIQPDHPQISQQVAASLEKNLIPKLTSSLPDVEALRFYLTLPECPLMSDSNNFTTIAIPFGTALVNLEKAPLKVLENWWSVLEPPLFLKIVELFKEVVVHLLKLYKIGIPPSERRIFNSFLHTALKVLEILHRVNEKMGQIIQYDKFYIHEVQELIDIRNDYINWVQQQAYGMLADIPVTICTYPFVFDAQAKTTLLQTDAVLQMQMAIDQAHRQNVSSLFLPVIESVNPCLILVVRRENIVGDAMEVLRKTKNIDYKKPLKVIFVGEDAVDAGGVRKEFFLLIMRELLDPKYGMFRYYEDSRLIWFSDKTFEDSDLFHLIGVICGLAIYNCTIVDLHFPLALYKKLLKKKPSLDDLKELMPDVGRSMQQLLDYPEDDIEETFCLNFTITVENFGATEVKELVLNGADTAVNKQNRQEFVDAYVDYIFNKSVASLFDAFHAGFHKVCGGKVLLLFQPNELQAMVIGNTNYDWKELEKNTEYKGEYWAEHPTIKIFWEVFHELPLEKKKQFLLFLTGSDRIPILGMKSLKLVIQSTGGGEEYLPVSHTCFNLLDLPKYTEKETLRSKLIQAIDHNEGFSLI

SEQ ID NO: 9604 - protein, 1036 aa, Homo sapiens
MASSVGNVADSTGLAELAHREYQAGDFEAAERHCMQLWRQEPDNTGVLLLLSSIHFQCRRLDRSAHFSTLAIKQNPLLAEAYSNLGNVYKERGQLQEAIEHYRHALRLKPDFIDGYINLAAALVAAGDMEGAVQAYVSALQYNPDLYCVRSDLGNLLKALGRLEEAKACYLKAIETQPNFAVAWSNLGCVFNAQGEIWLAIHHFEKAVTLDPNFLDAYINLGNVLKEARIFDRAVAAYLRALSLSPNHAVVHGNLACVYYEQGLIDLAIDTYRRAIELQPHFPDAYCNLANALKEKGSVAEAEDCYNTALRLCPTHADSLNNLANIKREQGNIEEAVRLYRKALEVFPEFAAAHSNLASVLQQQGKLQEALMHYKEAIRISPTFADAYSNMGNTLKEMQDVQGALQCYTRAIQINPAFADAHSNLASIHKDSGNIPEAIASYRTALKLKPDFPDAYCNLAHCLQIVCDWTDYDERMKKLVSIVADQLEKNRLPSVHPHHSMLYPLSHGFRKAIAERHGNLCLDKINVLHKPPYEHPKDLKLSDGRLRVGYVSSDFGNHPTSHLMQSIPGMHNPDKFEVFCYALSPDDGTNFRVKVMAEANHFIDLSQIPCNGKAADRIHQDGIHILVNMNGYTKGARNELFALRPAPIQAMWLGYPGTSGALFMDYIITDQETSPAEVAEQYSEKLAYMPHTFFIGDHANMFPHLKKKAVIDFKSNGHIYDNRIVLNGIDLKAFLDSLPDVKIVKMKCPDGGDNADSSNTALNMPVIPMNTIAEAVIEMINRGQIQITINGFSISNGLATTQINNKAATGEEVPRTIIVTTRSQYGLPEDAIVYCNFNQLYKIDPSTLQMWANILKRVPNSVLWLLRFPAVGEPNIQQYAQNMGLPQNRIIFSPVAPKEEHVRRGQLADVCLDTPLCNGHTTGMDVLWAGTPMVTMPGETLASRVAASQLTCLGCLELIAKNRQEYEDIAVKLGTDLEYLKKVRGKVWKQRISSPLFNTKQYTMELERLYLQMWEHYAAGNKPDHMIKPVEVTESA

SEQ ID NO: 9605 - protein, 425 aa, Homo sapiens
MEPSATPGAQMGVPPGSREPSPVPPDYEDEFLRYLWRDYLYPKQYEWVLIAAYVAVFVVALVGNTLVCLAVWRNHHMRTVTNYFIVNLSLADVLVTAICLPASLLVDITESWLFGHALCKVIPYLQAVSVSVAVLTLSFIALDRWYAICHPLLFKSTARRARGSILGIWAVSLAIMVPQAAVMECSSVLPELANRTRLFSVCDERWADDLYPKIYHSCFFIVTYLAPLGLMAMAYFQIFRKLWGRQIPGTTSALVRNWKRPSDQLGDLEQGLSGEPQPRARAFLAEVKQMRARRKTAKMLMVVLLVFALCYLPISVLNVLKRVFGMFRQASDREAVYACFTFSHWLVYANSAANPIIYNFLSGKFREQFKAAFSCCLPGLGPCGSLKAPSPRSSASHKSLSLQSRCSISKISEHVVLTSVTTVLP

SEQ ID NO: 9606 - protein, 1046 aa, Homo sapiens
MASSVGNVADSTEPTKRMLSFQGLAELAHREYQAGDFEAAERHCMQLWRQEPDNTGVLLLLSSIHFQCRRLDRSAHFSTLAIKQNPLLAEAYSNLGNVYKERGQLQEAIEHYRHALRLKPDFIDGYINLAAALVAAGDMEGAVQAYVSALQYNPDLYCVRSDLGNLLKALGRLEEAKACYLKAIETQPNFAVAWSNLGCVFNAQGEIWLAIHHFEKAVTLDPNFLDAYINLGNVLKEARIFDRAVAAYLRALSLSPNHAVVHGNLACVYYEQGLIDLAIDTYRRAIELQPHFPDAYCNLANALKEKGSVAEAEDCYNTALRLCPTHADSLNNLANIKREQGNIEEAVRLYRKALEVFPEFAAAHSNLASVLQQQGKLQEALMHYKEAIRISPTFADAYSNMGNTLKEMQDVQGALQCYTRAIQINPAFADAHSNLASIHKDSGNIPEAIASYRTALKLKPDFPDAYCNLAHCLQIVCDWTDYDERMKKLVSIVADQLEKNRLPSVHPHHSMLYPLSHGFRKAIAERHGNLCLDKINVLHKPPYEHPKDLKLSDGRLRVGYVSSDFGNHPTSHLMQSIPGMHNPDKFEVFCYALSPDDGTNFRVKVMAEANHFIDLSQIPCNGKAADRIHQDGIHILVNMNGYTKGARNELFALRPAPIQAMWLGYPGTSGALFMDYIITDQETSPAEVAEQYSEKLAYMPHTFFIGDHANMFPHLKKKAVIDFKSNGHIYDNRIVLNGIDLKAFLDSLPDVKIVKMKCPDGGDNADSSNTALNMPVIPMNTIAEAVIEMINRGQIQITINGFSISNGLATTQINNKAATGEEVPRTIIVTTRSQYGLPEDAIVYCNFNQLYKIDPSTLQMWANILKRVPNSVLWLLRFPAVGEPNIQQYAQNMGLPQNRIIFSPVAPKEEHVRRGQLADVCLDTPLCNGHTTGMDVLWAGTPMVTMPGETLASRVAASQLTCLGCLELIAKNRQEYEDIAVKLGTDLEYLKKVRGKVWKQRISSPLFNTKQYTMELERLYLQMWEHYAAGNKPDHMIKPVEVTESA

SEQ ID NO: 9607 - protein, 264 aa, Homo sapiens
MQEGELAISPISPVAAMPPLGTHVQARCEAQINLLGEGGICKLPGRLRIQPALWSREDVLHWLRWAEQEYSLPCTAEHGFEMNGRALCILTKDDFRHRAPSSGDVLYELLQYIKTQRRALVCGPFFGGIFRLKTPTQHSPVPPEDCRLLWDYVYQLLLDTRYEPYIKWEDKDAKIFRVVDPNGLARLWGNHKNRVNMTYEKMSRALRHYYKLNIIKKEPGQKLLFRFLKTPGKMVQDKHSHLEPLESQEQDRIEFKDKRPEISP

SEQ ID NO: 9608 - protein, 1224 aa, Homo sapiens
MPLPPPGPGPEPIPGCTAPTQSPVGRHVVGVKGVGGMSVACVLKRKAVLWQDSFSPHLKHHPQEPANPNMPVVLTSGTGSQAQPQPAANQALAAGTHSSPVPGSIGVAGRSQDDAMVDYFFQRQHGEQLGGGGSGGGGYNNSKHRWPTGDNIHAEHQVRSMDELNHDFQALALEGRAMGEQLLPGKKFWETDESSKDGPKGIFLGDQWRDSAWGTSDHSVSQPIMVQRRPGQSFHVNSEVNSVLSPRSESGGLGVSMVEYVLSSSPGDSCLRKGGFGPRDADSDENDKGEKKNKGTFDGDKLGDLKEEGDVMDKTNGLPVQNGIDADVKDFSRTPGNCQNSANEVDLLGPNQNGSEGLAQLTSTNGAKPVEDFSNMESQSVPLDPMEHVGMEPLQFDYSGTQVPVDSAAATVGLFDYNSQQQLFQRPNALAVQQLTAAQQQQYALAAAHQPHIGLAPAAFVPNPYIISAAPPGTDPYTAGLAAAATLGPAVVPHQYYGVTPWGVYPASLFQQQAAAAAAATNSANQQTTPQAQQGQQQVLRGGASQRPLTPNQNQQGQQTDPLVAAAAVNSALAFGQGLAAGMPGYPVLAPAAYYDQTGALVVNAGARNGLGAPVRLVAPAPVIISSSAAQAAVAAAAASANGAAGGLAGTTNGPFRPLGTQQPQPQPQQQPNNNLASSSFYGNNSLNSNSQSSSLFSQGSAQPANTSLGFGSSSSLGATLGSALGGFGTAVANSNTGSGSRRDSLTGSSDLYKRTSSSLTPIGHSFYNGLSFSSSPGPVGMPLPSQGPGHSQTPPPSLSSHGSSSSLNLGGLTNGSGRYISAAPGAEAKYRSASSASSLFSPSSTLFSSSRLRYGMSDVMPSGRSRLLEDFRNNRYPNLQLREIAGHIMEFSQDQHGSRFIQLKLERATPAERQLVFNEILQAAYQLMVDVFGNYVIQKFFEFGSLEQKLALAERIRGHVLSLALQMYGCRVIQKALEFIPSDQQVINEMVRELDGHVLKCVKDQNGNHVVQKCIECVQPQSLQFIIDAFKGQVFALSTHPYGCRVIQRILEHCLPDQTLPILEELHQHTEQLVQDQYGNYVIQHVLEHGRPEDKSKIVAEIRGNVLVLSQHKFASNVVEKCVTHASRTERAVLIDEVCTMNDGPHSALYTMMKDQYANYVVQKMIDVAEPGQRKIVMHKIRPHIATLRKYTYGKHILAKLEKYYMKNGVDLGPICGPPNGII

SEQ ID NO: 9609 - protein, 1127 aa, Homo sapiens
MPLPPPGPGPEPIPGCTAPTQSPVGRHVVGVKGVGGMSVACVLKRKAVLWQDSFSPHLKHHPQEPANPNMPVVLTSGTGSQAQPQPAANQALAAGTHSSPVPGSIGVAGRSQDDAMVDYFFQRQHGEQLGGGGSGGGGYNNSKHRWPTGDNIHAEHQVRSMDELNHDFQALALEGRAMGEGPRDADSDENDKGEKKNKGTFDGDKLGDLKEEGDVMDKTNGLPVQNGIDADVKDFSRTPGNCQNSANEVDLLGPNQNGSEGLAQLTSTNGAKPVEDFSNMESQSVPLDPMEHVGMEPLQFDYSGTQVPVDSAAATVGLFDYNSQQQLFQRPNALAVQQLTAAQQQQYALAAAHQPHIAGLAPAAFVPNPYIISAAPPGTDPYTAGLAAAATLGPAVVPHQYYGVTPWGVYPASLFQQQAAAAAAATNSANQQTTPQAQQGQQQVLRGGASQRPLTPNQNQQGQQTDPLVAAAAVNSALAFGQGLAAGMPGYPVLAPAAYYDQTGALVVNAGARNGLGAPVRLVAPAPVIISSSAAQAAVAAAAASANGAAGGLAGTTNGPFRPLGTQQPQPQPQQQPNNNLASSSFYGNNSLNSNSQSSSLFSQGSAQPANTSLGFGSSSSLGATLGSALGGFGTAVANSNTGSGSRRDSLTGSSDLYKRTSSSLTPIGHSFYNGLSFSSSPGPVGMPLPSQGPGHSQTPPPSLSSHGSSSSLNLGGLTNGSGRYISAAPGAEAKYRSASSASSLFSPSSTLFSSSRLRYGMSDVMPSGRSRLLEDFRNNRYPNLQLREIAGHIMEFSQDQHGSRFIQLKLERATPAERQLVFNEILQAAYQLMVDVFGNYVIQKFFEFGSLEQKLALAERIRGHVLSLALQMYGCRVIQKALEFIPSDQQNEMVRELDGHVLKCVKDQNGNHVVQKCIECVQPQSLQFIIDAFKGQVFALSTHPYGCRVIQRILEHCLPDQTLPILEELHQHTEQLVQDQYGNYVIQHVLEHGRPEDKSKIVAEIRGNVLVLSQHKFASNVVEKCVTHASRTERAVLIDEVCTMNDGPHSALYTMMKDQYANYVVQKMIDVAEPGQRKIVMHKIRPHIATLRKYTYGKHILAKLEKYYMKNGVDLGPICGPPNGII

SEQ ID NO: 9610 - protein, 1189 aa, Homo sapiens
MSVACVLKRKAVLWQDSFSPHLKHHPQEPANPNMPVVLTSGTGSQAQPQPAANQALAAGTHSSPVPGSIGVAGRSQDDAMVDYFFQRQHGEQLGGGGSGGGGYNNSKHRWPTGDNIHAEHQVRSMDELNHDFQALALEGRAMGEQLLPGKKFWETDESSKDGPKGIFLGDQWRDSAWGTSDHSVSQPIMVQRRPGQSFHVNSEVNSVLSPRSESGGLGVSMVEYVLSSSPGDSCLRKGGFGPRDADSDENDKGEKKNKGTFDGDKLGDLKEEGDVMDKTNGLPVQNGIDADVKDFSRTPGNCQNSANEVDLLGPNQNGSEGLAQLTSTNGAKPVEDFSNMESQSVPLDPMEHVGMEPLQFDYSGTQVPVDSAAATVGLFDYNSQQQLFQRPNALAVQQLTAAQQQQYALAAAHQPHIAGLAPAAFVPNPYIISAAPPGTDPYTAGLAAAATLGPAVVPHQYYGVTPWGVYPASLFQQQAAAAAAATNSANQQTTPQAQQGQQQVLRGGASQRPLTPNQNQQGQQTDPLVAAAAVNSALAFGQGLAAGMPGYPVLAPAAYYDQTGALVVNAGARNGLGAPVRLVAPAPVIISSSAAQAAVAAAAASANGAAGGLAGTTNGPFRPLGTQQPQPQPQQQPNNNLASSSFYGNNSLNSNSQSSSLFSQGSAQPANTSLGFGSSSSLGATLGSALGGFGTAVANSNTGSGSRRDSLTGSSDLYKRTSSSLTPIGHSFYNGLSFSSSPGPVGMPLPSQGPGHSQTPPPSLSSHGSSSSLNLGGLTNGSGRYISAAPGAEAKYRSASSASSLFSPSSTLFSSSRLRYGMSDVMPSGRSRLLEDFRNNRYPNLQLREIAGHIMEFSQDQHGSRFIQLKLERATPAERQLVFNEILQAAYQLMVDVFGNYVIQKFFEFGSLEQKLALAERIRGHVLSLALQMYGCRVIQKALEFIPSDQQVINEMVRELDGHVLKCVKDQNGNHVVQKCIECVQPQSLQFIIDAFKGQVFALSTHPYGCRVIQRILEHCLPDQTLPILEELHQHTEQLVQDQYGNYVIQHVLEHGRPEDKSKIVAEIRGNVLVLSQHKFASNVVEKCVTHASRTERAVLIDEVCTMNDGPHSALYTMMKDQYANYVVQKMIDVAEPGQRKIVMHKIRPHIATLRKYTYGKHILAKLEKYYMKNGVDLGPICGPPNGII

SEQ ID NO: 9611 - protein, 356 aa, Homo sapiens
MTSVTRSEIIDEKGPVMSKTHDHQLESSLSPVEVFAKTSASLEMNQGVSEERIHLGSSPKKGGNCDLSHQERLQSKSLHLSPQEQSASYQDRRQSWRRASMKETNRRKSLHPIHQGITELSRSISVDLAESKRLGCLLLSSFQFSIQKLEPFLRDTKGFSLESFRAKASSLSEELKHFADGLETDGTLQKCFEDSNGKASDFSLEASVAEMKEYITKFSLERQTWDQLLLHYQQEAKEILSRGSTEAKITEVKVEPMTYLGSSQNEVLNTKPDYQKILQNQSKVFDCMELVMDELQGSVKQLQAFMDESTQCFQKVSVQLGKRSMQQLDPSPARKLLKLQLQNPPAIHGSGSGSCQ

SEQ ID NO: 9612 - protein, 496 aa, Homo sapiens
MRVLSGTSLMLCSLLLLLQALCSPGLAPQSRGHLCRTRPTDLVFVVDSSRSVRPVEFEKVKVFLSQVIESLDVGPNATRVGMVNYASTVKQEFSLRAHVSKAALLQAVRRIQPLSTGTMTGLAIQFAITKAFGDAEGGRSRSPDISKVVIVVTDGRPQDSVQDVSARARASGVELFAIGVGSVDKATLRQIASEPQDEHVDYVESYSVIEKLSRKFQEAFCVVSDLCATGDHDCEQVCISSPGSYTCACHEGFTLNSDGKTCNVCSGGGGSSATDLVFLIDGSKSVRPENFELVKKFISQIVDTLDVSDKLAQVGLVQYSSSVRQEFPLGRFHTKKDIKAAVRNMSYMEKGTMTGAALKYLIDNSFTVSSGARPGAQKVGIVFTDGRSQDYINDAAKKAKDLGFKMFAVGVGNAVEDELREIASEPVAEHYFYTADFKTINQIGKKLQKKICVEEDPCACESLVKFQAKVEGLLQALTRKLEAVSKRLAILENTVV

SEQ ID NO: 9613 - protein, 1436 aa, Homo sapiens
MARAQALVLALTFQLCAPETETPAAGCTFEEASDPAVPCEYSQAQYDDFQWEQVRIHPGTRAPADLPHGSYLMVNTSQHAPGQRAHVIFQSLSENDTHCVQFSYFLYSRDGHSPGTLGVYVRVNGGPLGSAVWNMTGSHGRQWHQAELAVSTFWPNEYQVLFEALISPDRRGYMGLDDILLLSYPCAKAPHFSRLGDVEVNAGQNASFQCMAAGRAAEAERFLLQRQSGALVPAAGVRHISHRRFLATFPLAAVSRAEQDLYRCVSQAPRGAGVSNFAELIVKEPPTPIAPPQLLRAGPTYLIIQLNTNSIIGDGPIVRKEIEYRMARGPWAEVHAVSLQTYKLWHLDPDTEYEISVLLTRPGDGGTGRPGPPLISRTKCAEPMRAPKGLAFAEIQARQLTLQWEPLGYNVTRCHTYTVSLCYHYTLGSSHNQTIRECVKTEQGVSRYTIKNLLPYRNVHVRLVLTNPEGRKEGKEVTFQTDEDVPSGIAAESLTFTPLEDMIFLKWEEPQEPNGLITQYEISYQSIESSDPAVNVPGPRRTISKLRNETYHVFSNLHPGTTYLFSVRARTGKGFGQAALTEITTNISAPSFDYADMPSPLGESENTITVLLRPAQGRGAPISVYQVIVEEERARRLRREPGGQDCFPVPLTFEAALARGLVHYFGAELAASSLPEAMPFTVGDNQTYRGFWNPPLEPRKAYLIYFQAASHLKGETRLNCIRIARKAACKESKRPLEVSQRSEEMGLILGICAGGLAVLILLLGAIIVIIRKGKPVNMTKATVNYRQEKTHMMSAVDRSFTDQSTLQEDERLGLSFMDTHGYSTRGDQRSGGVTEASSLLGGSPRRPCGRKGSPYHTGQLHPAVRVADLLQHINQMKTAEGYGFKQEYESFFEGWDATKKKDKVKGSRQEPMPAYDRHRVKLHPMLGDPNADYINANYIDGYHRSNHFIATQGPKPEMVYDFWRMVWQEHCSSIVMITKLVEVGRVKCSRYWPEDSDTYGDIKIMLVKTETLAEYVVRTFALERRGYSARHEVRQFHFTAWPEHGVPYHATGLLAFIRRVKASTPPDAGPIVIHCSAGTGRTGCYIVLDVMLDMAECEGVVDIYNCVKTLCSRRVNMIQTEEQYIFIHDAILEACLCGETTIPVSEFKATYKEMIRIDPQSNSSQLREEFQTLNSVTPPLDVEECSIALLPRNRDKNRSMDVLPPDRCLPFLISTDGDSNNYINAALTDSYTRSAAFIVTLHPLQSTTPDFWRLVYDYGCTSIVMLNQLNQSNSAWPCLQYWPEPGRQQYGLMEVEFMSGTADEDLVARVFRVQNISRLQEGHLLVRHFQFLRWSAYRDTPDSKKAFLHLLAEVDKWQAESGDGRTIVHCLNGGGRSGTFCACATVLEMIRCHNLVDVFFAAKTLRNYKPNMVETMDQYHFCYDVALEYLEGLESR

SEQ ID NO: 9614 - protein, 1069 aa, Homo sapiens
SQPKLDRNHSFRHILPGFRSAAAAAADNERSHLMPRLKESRSHESLLSPSSAVEALDLSMEEEVVIKPVHSSILGQDYCFEVTTSSGSKCFSCRSAAERDKWMENLRRAVHPNKDNSRRVEHILKLWVIEAKDLPAKKKYLCELCLDDVLYARTTGKLKTDNVFWGEHFEFHNLPPLRTVTVHLYRETDKKKKKERNSYLGLVSLPAASVAGRQFVEKWYPVVTPNPKGGKGPGPMIRIKARYQTITILPMEMYKEFAEHITNHYLGLCAALEPILSAKTKEEMASALVHILQSTGKVKDFLTDLMMSEVDRCGDNEHLIFRENTLATKAIEEYLKLVGQKYLQDALGEFIKALYESDENCEVDPSKCSAADLPEHQGNLKMCCELAFCKIINSYCVFPRELKEVFASWRQECSSRGRPDISERLISASLFLRFLCPAIMSPSLFNLLQEYPDDRTARTLTLIAKVTQNLANFAKFGSKEEYMSFMNQFLEHEWTNMQRFLLEISNPETLSNTAGFEGYIDLGRELSSLHSLLWEAVSQLEQSIVSKLGPLPRILRDVHTALSTPGSGQLPGTNDLASTPGSGSSSISAGLQKMVIENDLSGLIDFTRLPSPTPENKDLFFVTRSSGVQPSPARSSSYSEANEPDLQMANGGKSLSMVDLQDARTLDGEAGSPAGPDVLPTDGQAAAAQLVAGWPARATPVNLAGLATVRRAGQTPTTPGTSEGAPGRPQLLAPLSFQNPVYQMAAGLPLSPRGLGDSGSEGHSSLSSHSNSEELAAAAKLGSFSTAAEELARRPGELARRQMSLTEKGGQPTVPRQNSAGPQRRIDQPPPPPPPPPPAPRGRTPPNLLSTLQYPRPSSGTLASASPDWVGPSTRLRQQSSSSKGDSPELKPRAVHKQGPSPVSPNALDRTAAWLLTMNAQLLEDEGLGPDPPHRDRLRSKDELSQAEKDLAVLQDKLRISTKKLEEYETLFKCQEETTQKLVLEYQARLEEGEERLRRQQEDKDIQMKGIISRLMSVEEELKKDHAEMQAAVDSKQKIIDAQEKRIASLDAANARLMSALTQLKESMH

SEQ ID NO: 9615 - protein, 270 aa, Homo sapiens
MPRDNMASLIQRIARQACLTFRGSGGGRGASDRDAASGPEAPMQPGFPENLSKLKSLLTQLRAEDLNIAPRKATLQPLPPNLPPVTYMHIYETDGFSLGVFLLKSGTSIPLHDHPGMHGMLKVLYGTVRISCMDKLDAGGGQRPRALPPEQQFEPPLQPREREAVRPGVLRSRAEYTEASGPCILTPHRDNLHQIDAVEGPAAFLDILAPPYDPDDGRDCHYYRVLEPVRPKEASSSACDLPREVWLLETPQADDFWCEGEPYPGPKVFP

SEQ ID NO: 9616 - protein, 609 aa, Homo sapiens
MEGPSLRGPALRLAGLPTQQDCNIQEKIDLEIRMREGIWKLLSLSTQKDQVLHAVKNLMVCNARLMAYTSELQKLEEQIANQTGRCDVKFESKERTACKGKIAISDIRIPLMWKDSDHFSNKERSRRYAIFCLFKMGANVFDTDVVNVDKTITDICFENVTIFNEAGPDFQIKVEVYSCCTEESSITNTPKKLAKKLKTSISKATGKKISSVLQEEDDEMCLLLSSAVFGVKYNLLAHTTLTLESAEDSFKTHNLSINGNEESSFWLPLYGNMCCRLVAQPACMAEDAFAGFLNQQQMVEGLISWRRLYCVLRGGKLYCFYSPEEIEAKVEPALVVPINKETRIRAMDKDAKKRIHNFSVINPVPGQAITQIFAVDNREDLQKWMEAFWQHFFDLSQWKHCCEELMKIEIMSPRKPPLFLTKEATSVYHDMSIDSPMKLESLTDIIQKKIEETNGQFLIGQHEESLPPPWATLFDGNHQMVIQKKVLYPASEPLHDEKGKKRQAPLPPSDKLPFSLKSQSNTDQLVKDNWGKTSVSQTSSLDTKLSTLMHHLQKPMAAPRKLLPARRNRLSDGEHTDTKTNFEAKPVPAPRQKSIKDILDPRSWLQAQV

SEQ ID NO: 9617 - protein, 1872 aa, Homo sapiens
MGPGCDLLLRTAATITAAAIMSDTDSDEDSAGGGPFSLAGFLFGNINGAGQLEGESVLDDECKKHLAGLGALGLGSLITELTANEELTGTDGALVNDEGWVRSTEDAVDYSDINEVAEDESRRYQQTMGSLQPLCHSDYDEDDYDADCEDIDCKLMPPPPPPPGPMKKDKDQDSITGEKVDFSSSSDSESEMGPQEATQAESEDGKLTLPLAGIMQHDATKLLPSVTELFPEFRPGKVLRFLRLFGPGKNVPSVWRSARRKRKKKHRELIQEEQIQEVECSVESEVSQKSLWNYDYAPPPPPEQCLSDDEITMMAPVESKFSQSTGDIDKVTDTKPRVAEWRYGPARLWYDMLGVPEDGSGFDYGFKLRKTEHEPVIKSRMIEEFRKLEENNGTDLLADENFLMVTQLHWEDDIIWDGEDVKHKGTKPQRASLAGWLPSSMTRNAMAYNVQQGFAATLDDDKPWYSIFPIDNEDLVYGRWEDNIIWDAQAMPRLLEPPVLTLDPNDENLILEIPDEKEEATSNSPSKESKKESSLKKSRILLGKTGVIKEEPQQNMSQPEVKDPWNLSNDEYYYPKQQGLRGTFGGNIIQHSIPAVELRQPFFPTHMGPIKLRQFHRPPLKKYSFGALSQPGPHSVQPLLKHIKKKAKMREQERQASGGGEMFFMRTPQDLTGKDGDLILAEYSEENGPLMMQVGMATKIKNYYKRKPGKDPGAPDCKYGETVYCHTSPFLGSLHPGQLLQAFENNLFRAPIYLHKMPETDFLIIRTRQGYYIRELVDIFVVGQQCPLFEVPGPNSKRANTHIRDFLQVFIYRLFWKSKDRPRRIRMEDIKKAFPSHSESSIRKRLKLCADFKRTGMDSNWWVLKSDFRLPTEEEIRAMVSPEQCCAYYSMIAAEQRLKDAGYGEKSFFAPEEENEEDFQMKIDDEVRTAPWNTTRAFIAAMKGKCLLEVTGVADPTGCGEGFSYVKIPNKPTQQKDDKEPQPVKKTVTGTDADLRRLSLKNAKQLLRKFGVPEEEIKKLSRWEVIDVVRTMSTEQARSGEGPMSKFARGSRFSVAEHQERYKEECQRIFDLQNKVLSSTEVLSTDTDSSSAEDSDFEEMGKNIENMLQNKKTSSQLSREREEQERKELQRMLLAAGSAASGNNHRDDDTASVTSLNSSATGRCLKIYRTFRDEEGKEYVRCETVRKPAVIDAYVRIRTTKDEEFIRKFALFDEQHREEMRKERRRIQEQLRRLKRNQEKEKLKGPPEKKPKKMKERPDLKLKCGACGAIGHMRTNKFCPLYYQTNAPPSNPVAMTEEQEEELEKTVIHNDNEELIKVEGTKIVLGKQLIESADEVRRKSLVLKFPKQQLPPKKKRRVGTTVHCDYLNRPHKSIHRRRTDPMVTLSSILESIINDMRDLPNTYPFHTPVNAKVVKDYYKIITRPMDLQTLRENVRKRLYPSREEFREHLELIVKNSATYNGPKHSLTQISQSMLDLCDEKLKEKEDKLARLEKAINPLLDDDDQVAFSFILDNIVTQKMMAVPDSWPFHHPVNKKFVPDYYKVIVNPMDLETIRKNISKHKYQSRESFLDDVNLILANSVKYNGPESQYTKTAQEIVNVCYQTLTEYDEHLTQLEKDICTAKEAALEEAELESLDPMTPGPYTPQPPDLYDTNTSLSMSRDASVFQDESNMSVLDIPSATPEKQVTQEGEDGDGDLADEEEGTVQQPQASVLYEDLLMSEGEDDEEDAGSDEEGDNPFSAIQLSESGSDSDVGSGGIRPKQPRMLQENTRMDMENEESMMSYEGDGGEASHGLEDSNISYGSYEEPDPKSNTQDTSFSSIGGYEVSEEEEDEEEEEQRSGPSVLSQVHLSEDEEDSEDFHSIAGDSDLDSDE

SEQ ID NO: 9618 - protein, 588 aa, Homo sapiens
MHCKVSLLDDTVYECVVEKHAKGQDLLKRVCEHLNLLEEDYFGLAIWDNATSKTWLDSAKEIKKQVRGVPWNFTFNVKFYPPDPAQLTEDITRYYLCLQLRQDIVAGRLPCSFATLALLGSYTIQSELGDYDPELHGVDYVSDFKLAPNQTKELEEKVMELHKSYRSMTPAQADLEFLENAKKLSMYGVDLHKAKDLEGVDIILGVCSSGLLVYKDKLRINRFPWPKVLKISYKRSSFFIKIRPGEQEQYESTIGFKLPSYRAAKKLWKVCVEHHTFFRLTSTDTIPKSKFLALGSKFRYSGRTQAQTRQASALIDRPAPHFERTASKRASRSLDGAAAVDSADRSPRPTSAPAITQGQVAEGGVLDASAKKTVVPKAQKETVKAEVKKEDEPPEQAEPEPTEAWKKKRERLDGENIYIRHSNLMLEDLDKSQEEIKKHHASISELKKNFMESVPEPRPSEWDKRLSTHSPFRTLNINGQIPTGEGPPLVKTQTVTISDNANAVKSEIPTKDVPIVHTETKTITYEAAQTVKGGISETRIEKRIVITGDADIDHDQVLVQAIKEAKEQHPDMSVTKVVVHQETEIADE

SEQ ID NO: 9619 - protein, 579 aa, Homo sapiens
MSASSLLEQRPKGQGNKVQNGSVHQKDGLNDDDFEPYLSPQARPNNAYTAMSDSYLPSYYSPSIGFSYSLGEAAWSTGGDTAMPYLTSYGQLSNGEPHFLPDAMFGQPGALGSTPFLGQHGFNFFPSGIDFSAWGNNSSQGQSTQSSGYSSNYAYAPSSLGGAMIDGQSAFANETLNKAPGMNTIDQGMAALKLGSTEVASNVPKVVGSAVGSGSITSNIVASNSLPPATIAPPKPASWADIASKPAKQQPKLKTKNGIAGSSLPPPPIKHNMDIGTWDNKGPVAKAPSQALVQNIGQPTQGSPQPVGQQANNSPPVAQASVGQQTQPLPPPPPQPAQLSVQQQAAQPTRWVAPRNRGSGFGHNGVDGNGVGQSQAGSGSTPSEPHPVLEKLRSINNYNPKDFDWNLKHGRVFIIKSYSEDDIHRSIKYNIWCSTEHGNKRLDAAYRSMNGKGPVYLLFSVNGSGHFCGVAEMKSAVDYNTCAGVWSQDKWKGRFDVRWIFVKDVPNSQLRHIRLENNENKPVTNSRDTQEVPLEKAKQVLKIIASYKHTTSIFDDFSHYEKRQEEEESVKKERQGRGK

SEQ ID NO: 9620 - protein, 459 aa, Homo sapiens
PKTTKGLPQTAVCNLNITLPAHKKETESDQDDEIEKTDRRQSFASLALRKRYSYLTEPGMSPQSPCERTDIRMAIVADHLGLSWTELARELNFSVDEINQIRVENPNSLISQSFMLLKKWVTRDGKNATTDALTSVLTKINRIDIVTLLEGPIFDYGNISGTRSFADENNVFHDPVDGYPSLQVELETPTGLHYTPPTPFQQDDYFSDISSIESPLRTPSRLSDGLVPSQGNIEHSADGPPVVTAEDASLEDSKLEDSVPLTEMPEAVDVDESQLENVCLSWQNETSSGNLESCAQARRVTGGLLDRLDDSPDQCRDSITSYLKGEAGKFEANGSHTEITPEAKTKSYFPESQNDVGKQSTKETLKPKIHGSGHVEEPASPLAAYQKSLEETSKLIIEETKPCVPVSMKKMSRTSPADGKPRLSLHEEEGSSGSEQKQGEGFKVKTKKEIRHVEKKSHS

SEQ ID NO: 9621 - protein, 655 aa, Homo sapiens
MERKVLALQARKKRTKAKKDKAQRKSETQHRGSAPHSESDLPEQEEEILGSDDDEQEDPNDYCKGGYHLVKIGDLFNGRYHVIRKLGWGHFSTVWLSWDIQGKKFVAMKVVKSAEHYTETALDEIRLLKSVRNSDPNDPNREMVVQLLDDFKISGVNGTHICMVFEVLGHHLLKWIIKSNYQGLPLPCVKKIIQQVLQGLDYLHTKCRIIHTDIKPENILLSVNEQYIRRLAAEATEWQRSGAPPPSGSAVSTAPQPKPADKMSKNKKKKLKKKQKRQAELLEKRMQEIEEMEKESGPGQKRPNKQEESESPVERPLKENPPNKMTQEKLEESSTIGQDQTLMERDTEGGAAEINCNGVIEVINYTQNSNNETLRHKEDLHNANDCDVQNLNQESSFLSSQNGDSSTSQETDSCTPITSEVSDTMVCQSSSTVGQSFSEQHISQLQESIRAEIPCEDEQEQEHNGPLDNKGKSTAGNFLVNPLEPKNAEKLKVKIADLGNACWVHKHFTEDIQTRQYRSLEVLIGSGYNTPADIWSTACMAFELATGDYLFEPHSGEEYTRDEDHIALIIELLGKVPRKLIVAGKYSKEFFTKKGDLKHITKLKPWGLFEVLVEKYEWSQEEAAGFTDFLLPMLELIPEKRATAAECLRHPWLNS

SEQ ID NO: 9622 - protein, 1861 aa, Homo sapiens
MASSASSSPAGTEDSAPAQGGFGSDYSRSSRKSDANASYLRAARAGHLEKALDYIKNGVDINICNQNGLNALHLASKEGHVEVVSELLQREANVDAATKKGNTALHIASLAGQAEVVKVLVTNGANVNAQSQNGFTPLYMAAQENHLEVVKFLLDNGASQSLATEDGFTPLAVALQQGHDQVVSLLLENDTKGKVRLPALHIAARKDDTKAAALLLQNDNNADVESKSGFTPLHIAAHYGNINVATLLLNRAAAVDFTARNDITPLHVASKRGNANMVKLLLDRGAKIDAKTRDGLTPLHCGARSGHEQVVEMLLDRAAPILSKTKNGLSPLHMATQGDHLNCVQLLLQHNVPVDDVTNDYLTALHVAAHCGHYKVAKVLLDKKANPNAKALNGFTPLHIACKKNRIKVMELLLKHGASIQAVTESGLTPIHVAAFMGHVNIVSQLMHHGASPNTTNVRGETALHMAARSGQAEVVRYLVQDGAQVEAKAKDDQTPLHISARLGKADIVQQLLQQGASPNAATTSGYTPLHLSAREGHEDVAAFLLDHGASLSITTKKGFTPLHVAAKYGKLEVANLLLQKSASPDAAGKSGLTPLHVAAHYDNQKVALLLLDQGASPHAAAKNGYTPLHIAAKKNQMDIATTLLEYGADANAVTRQGIASVHLAAQEGHVDMVSLLLGRNANVNLSNKSGLTPLHLAAQEDRVNVAEVLVNQGAHVDAQTKMGYTPLHVGCHYGNIKIVNFLLQHSAKVNAKTKNGYTPLHQAAQQGHTHIINVLLQNNASPNELTVNGNTALGIARRLGYISVVDTLKIVTEETMTTTTVTEKHKMNVPETMNEVLDMSDDEVRKANAPEMLSDGEYISDVEEGEDAMTGDTDKYLGPQDLKELGDDSLPAEGYMGFSLGARSASLRSFSSDRSYTLNRSSYARDSMMIEELLVPSKEQHLTFTREFDSDSLRHYSWAADTLDNVNLVSSPIHSGFLVSFMVDARGGSMRGSRHHGMRIIIPPRKCTAPTRITCRLVKRHKLANPPPMVEGEGLASRLVEMGPAGAQFLGPVIVEIPHFGSMRGKERELIVLRSENGETWKEHQFDSKNEDLTELLNGMDEELDSPEELGKKRICRIITKDFPQYFAVVSRIKQESNQIGPEGGILSSTTVPLVQASFPEGALTKRIRVGLQAQPVPDEIVKKILGNKATFSPIVTVEPRRRKFHKPITMTIPVPPPSGEGVSNGYKGDTTPNLRLLCSITGGTSPAQWEDITGTTPLTFIKDCVSFTTNVSARFWLADCHQVLETVGLATQLYRELICVPYMAKFVVFAKMNDPVESSLRCFCMTDDKVDKTLEQQENFEEVARSKDIEVLEGKPIYVDCYGNLAPLTKGGQQLVFNFYSFKENRLPFSIKIRDTSQEPCGRLSFLKEPKTTKGLPQTAVCNLNITLPAHKKIEKTDRRQSFASLALRKRYSYLTEPGMSPQSPCERTDIRMAIVADHLGLSWTELARELNFSVDEINQIRVENPNSLISQSFMLLKKWVTRDGKNATTDALTSVLTKINRIDIVTLLEGPIFDYGNISGTRSFADENNVFHDPVDGYPSLQVELETPTGLHYTPPTPFQQDDYFSDISSIESPLRTPSRLSDGLVPSQGNIEHSADGPPVVTAEDASLEDSKLEDSVPLTEMPEAVDVDESQLENVCLSWQNETSSGNLESCAQARRVTGGLLDRLDDSPDQCRDSITSYLKGEAGKFEANGSHTEITPEAKTKSYFPESQNDVGKQSTKETLKPKIHGSGHVEEPASPLAAYQKSLEETSKLIIEETKPCVPVSMKKMSRTSPADGKPRLSLHEEEGSSGSEQKQGEGFKVKTKKEIRHVEKKSHS

SEQ ID NO: 9623 - protein, 347 aa, Homo sapiens
MSLLCRNKGCGQHFDPNTNLPDSCCHHPGVPIFHDALKGWSCCRKRTVDFSEFLNIKGCTMGPHCAEKLPEAPQPEGPATSSSLQEQKPLNVIPKSAETLRRERPKSELPLKLLPLNISQALEMALEQKELDQEPGAGLDSLIRTGSSCQNPGCDAVYQGPESDATPCTYHPGAPRFHEGMKSWSCCGIQTLDFGAFLAQPGCRVGRHDWGKQLPASCRHDWHQTDSLVVVTVYGQIPLPAFNWVKASQTELHVHIVFDGNRVFQAQMKLWGVINVEQSSVFLMPSRVEISLVKADPGSWAQLEHPDALAKKARAGVVLEMDEEESDDSDDDLSWTEEEEEEEAMGE

SEQ ID NO: 9624 - protein, 452 aa, Homo sapiens
MSPKRIAKRRSPPADAIPKSKKVKDTRAAASRRVPGARSCQGACGPSPPDQKTRPVSHRSHSTEPGLVLTLGQGDVGQLGLGENVMERKKPALVSIPEDVVQAEAGGMHTVCLSKSGQVYSFGCNDEGALGRDTSVEGSEMVPGKVELQEKVVQVSAGDSHTAALTDDGRVFLWGSFRDNNGVIGLLEPMKKSMVPVQVQLDVPVVKVASGNDHLVMLTADGDLYTLGCGEQGQLGRVPELFANRGGRQGLERLLVPKCVMLKSRGSRGHVRFQDAFCGAYFTFAISHEGHVYGFGLSNYHQLGTPGTESCFIPQNLTSFKNSTKSWVGFSGGQHHTVCMDSEGKAYSLGRAEYGRLGLGEGAEEKSIPTLISRLPAVSSVACGASVGYAVTKDGRVFAWGMGTNYQLGTGQDEDAWSPVEMMGKQLENRVVLSVSSGGQHTVLLVKDKEQS

SEQ ID NO: 9625 - protein, 712 aa, Homo sapiens
MGQADVSRPVNPDAVEEADQPTTEPGMVLDSVEAGDTTPPTKRKSKFSGFGKIFKPWKWRKKKSSDKFKETSEVLERKISMRKPREELVKRGVLLEDPEQGGEDPGKPSDAMLKNGHTTPIGNARSSSPVQVEEEPVRLASLRKAIPEEDLKKRLGSTGSQPNSEAESVPENVPKPPLLPPKRPLSSSHEASEGQAKDATSSGGTARFIISTSITTAPAATTAATSLAKTVNLSVTPSPAPRTLPAAPASTNTTATPSLTHMVPAKQPPIPPPKPAHRNSNPVIAELSQAINSGTLLSKPSPPLPPKRGIPSTSVPTLESAAAITTKTPSDEREKSTCSMGSELLPMISPRSPSPPLPTHIPPEPPRTPPFPAKTFQVVPEIEFPPSLDLHQEIPQQEDQKKEVPKRILDQNFGEPHIPSRLPPLPLHIRIQQALTSPLPMTPILEGSHRAHSLLFENSDSFSEDSSTLGRTRSLPITIEMLKVPDDEEEEEQTCPSTFSEEMTPTSVIPKLPQCLREEEEKESDSDSEGPIQYRDEEDEDESYQSALANKVKRKDTLAMKLNHRPSEPELNLNSWPCKSKEEWNEIRHQIGNTLIRRLSQRPTPEELEQRNILQPKNEADRQAEKREIKRRLTRKLSQRPTVAELLARKILRFNEYVEVTDAQDYDRRADKPWTKLTPADKAAIRKELNEFKSSEMEVHEESKHFTRYHRP

SEQ ID NO: 9626 - protein, 702 aa, Homo sapiens
MEDPFEEADQPTTEPGMVLDSVEAGDTTPPTKRKSKFSGFGKIFKPWKWRKKKSSDKFKETSEVLERKISMRKPREELVKRGVLLEDPEQGGEDPGKPSDAMLKNGHTTPIGNARSSSPVQVEEEPVRLASLRKAIPEEDLKKRLGSTGSQPNSEAESVPENVPKPPLLPPKRPLSSSHEASEGQAKDATSSGGTARFIISTSITTAPAATTAATSLAKTVNLSVTPSPAPRTLPAAPASTNTTATPSLTHMVPAKQPPIPPPKPAHRNSNPVIAELSQAINSGTLLSKPSPPLPPKRGIPSTSVPTLESAAAITTKTPSDEREKSTCSMGSELLPMISPRSPSPPLPTHIPPEPPRTPPFPAKTFQVVPEIEFPPSLDLHQEIPQQEDQKKEVPKRILDQNFGEPHIPSRLPPLPLHIRIQQALTSPLPMTPILEGSHRAHSLLFENSDSFSEDSSTLGRTRSLPITIEMLKVPDDEEEEEQTCPSTFSEEMTPTSVIPKLPQCLREEEEKESDSDSEGPIQYRDEEDEDESYQSALANKVKRKDTLAMKLNHRPSEPELNLNSWPCKSKEEWNEIRHQIGNTLIRRLSQRPTPEELEQRNILQPKNEADRQAEKREIKRRLTRKLSQRPTVAELLARKILRFNEYVEVTDAQDYDRRADKPWTKLTPADKAAIRKELNEFKSSEMEVHEESKHFTRYHRP

SEQ ID NO: 9627 - protein, 994 aa, Homo sapiens
MKAQKSGKEQQLDIMNKQYQQLESRLDEILSRIAKETEEIKDLEEQLTEGQIAANEALKKDLEGVISGLQEYLGTIKGQATQAQNECRKLRDEKETLLQRLTEVEQERDQLEIVAMDAENMRKELAELESALQEQHEVNASLQQTQGDLSAYEAELEARLNLRDAEANQLKEELEKVTRLTQLEQSALQAELEKERQALKNALGKAQFSEEKEQENSELHAKLKHLQDDNNLLKQQLKDFQNHLNHVVDGLVRPEEVAARVDELRRKLKLGTGEMNIHSPSDVLGKSLADLQKQFSEILARSKWERDEAQVRERKLQEEMALQQEKLATGQEEFRQACERALEARMNFDKRQHEARIQQMENEIHYLQENLKSMEEIQGLTDLQLQEADEEKERILAQLRELEKKKKLEDAKSQEQVFGLDKELKKLKKAVATSDKLATAELTIAKDQLKSLHGTVMKINQERAEELQEAERFSRKAAQAARDLTRAEAEIELLQNLLRQKGEQFRLEMEKTGVGTGANSQVLEIEKLNETMERQRTEIARLQNVLDLTGSDNKGGFENVLEEIAELRREVSYQNDYISSMADPFKRRGYWYFMPPPPSSKVSSHSSQATKDSGVGLKYSASTPVRKPRPGQQDGKEGSQPPPASGYWVYSPIRSGLHKLFPSRDADSGGDSQEESELDDQEEPPFVPPPGYMMYTVLPDGSPVPQGMALYAPPPPLPNNSRPLTPGTVVYGPPPAGAPMVYGPPPPNFSIPFIPMGVLHCNVPEHHNLENEVSRLEDIMQHLKSKKREERWMRASKRQSEKEMEELHHNIDDLLQEKKSLECEVEELHRTVQKRQQQKDFIDGNVESLMTELEIEKSLKHHEDIVDEIECIEKTLLKRRSELREADRLLAEAESELSCTKEKTKNAVEKFTDAKRSLLQTESDAEELERRAQETAVNLVKADQQLRSLQADAKDLEQHKIKQEEILKEINKIVAAKDSDFQCLSKKKEKLTEE

SEQ ID NO: 9628 - protein, 1773 aa, Homo sapiens
MKAQKSGKEQQLDIMNKQYQQLESRLDEILSRIAKETEEIKDLEEQLTEGQIAANEALKKDLEGVISGLQEYLGTIKGQATQAQNECRKLRDEKETLLQRLTEVEQERDQLEIVAMDAENMRKELAELESALQEQHEVNASLQQTQGDLSAYEAELEARLNLRDAEANQLKEELEKVTRLTQLEQSALQAELEKERQALKNALGKAQFSEEKEQENSELHAKLKHLQDDNNLLKQQLKDFQNHLNHVVDGLVRPEEVAARVDELRRKLKLGTGEMNIHSPSDVLGKSLADLQKQFSEILARSKWERDEAQVRERKLQEEMALQQEKLATGQEEFRQACERALEARMNFDKRQHEARIQQMENEIHYLQENLKSMEEIQGLTDLQLQEADEEKERILAQLRELEKKKKLEDAKSQEQVFGLDKELKKLKKAVATSDKLATAELTIAKDQLKSLHGTVMKINQERAEELQEAERFSRKAAQAARDLTRAEAEIELLQNLLRQKGEQFRLEMEKTGVGTGANSQVLEIEKLNETMERQRTEIARLQNVLDLTGSDNKGGFENVLEEIAELRREVSYQNDYISSMADPFKRRGYWYFMPPPPSSKVSSHSSQATKDSGVGLKYSASTPVRKPRPGQQDGKEGSQPPPASGYWVYSPIRSGLHKLFPSRDADSGGDSQEESELDDQEEPPFVPPPGYMMYTVLPDGSPVPQGMALYAPPPPLPNNSRPLTPGTVVYGPPPAGAPMVYGPPPPNFSIPFIPMGVLHCNVPEHHNLENEVSRLEDIMQHLKSKKREERWMRASKRQSEKEMEELHHNIDDLLQEKKSLECEVEELHRTVQKRQQQKDFIDGNVESLMTELEIEKSLKHHEDIVDEIECIEKTLLKRRSELREADRLLAEAESELSCTKEKTKNAVEKFTDAKRSLLQTESDAEELERRAQETAVNLVKADQQLRSLQADAKDLEQHKIKQEEILKEINKIVAAKDSDFQCLSKKKEKLTEELQKLQKDIEMAERNEDHHLQVLKESEVLLQAKRAELEKLKSQVTSQQQEMAVLDRQLGHKKEELHLLQGSMVQAKADLQEALRLGETEVTEKCNHIREVKSLLEELSFQKGELNVQISERKTQLTLIKQEIEKEEENLQVVLRQMSKHKTELKNILDMLQLENHELQGLKLQHDQRVSELEKTQVAVLEEKLELENLQQISQQQKGEIEWQKQLLERDKREIERMTAESRALQSCVECLSKEKEDLQEKCDIWEKKLAQTKRVLAAAEENSKMEQSNLEKLELNVRKLQQELDQLNRDKLSLHNDISAMQQQLQEKREAVNSLQEELANVQDHLNLAKQDLLHTTKHQDVLLSEQTRLQKDISEWANRFEDCQKEEETKQQQLQVLQNEIEENKLKLVQQEMMFQRLQKERESEESKLETSKVTLKEQQHQLEKELTDQKSKLDQVLSKVLAAEERVRTLQEEERWCESLEKTLSQTKRQLSEREQQLVEKSGELLALQKEADSMRADFSLLRNQFLTERKKAEKQVASLKEALKIQRSQLEKNLLEQKQENSCIQKEMATIELVAQDNHERARRLMKELNQMQYEYTELKKQMANQKDLERRQMEISDAMRTLKSEVKDEIRTSLKNLNQFLPELPADLEAILERNENLEGELESLKENLPFTMNEGPFEEKLNFSQVHIMDEHWRGEALREKLRHREDRLKAQLRHCMSKQAEVLIKGKRQTEGTLHSLRRQVDALGELVTSTSADSASSPSLSQLESSLTEDSQLGQNQEKNASAR

SEQ ID NO: 9629 - protein, 340 aa, Homo sapiens
MGKSIPQYLGQLDIRKSVVSLATGAGAIYLLYKAIKAGIKCKPPLCSNSPICIARLAVERERHGRDSGELRRLLNSLECKQDEYAKSMILHSITRCVYLLEAEASACTTDDIVLLGYMLDDKDNSVKTQALNTLKAFSGIRKFRLKIQEHSIKVLELISTIWDTELHIAGLRLLNNLPLPDYVHPQLRRVMPALMEILQSDYILAQVQAVRLLSYLAQKNDLLYDILNCQVHSNFLNLFQPTQSGSLLYEVLVFAERLSEGRNAPHYHVVKWHYNEQSLHESLFGEESRLADRLLALVIHPEEDVQIQACKVIVSLQYPQDLRARPSSCQPSRSYFKNTE

SEQ ID NO: 9630 - protein, 330 aa, Homo sapiens
MGKSIPQYLGQLDIRKSVVSLATGAGAIYLLYKAIKAGIKCKPPLCSNSPICIARLAVERERHGRDSGELRRLLNSLECKQDEYAKSMILHSITRCVYLLEAEASACTTDDIVLLGYMLDDKDNSVKTQALNTLKAFSGIRKFRLKIQEHSIKVLELISTIWDTELHIAGLRLLNNLPLPDYVHPQLRRVMPALMEILQSDYILAQVQAVRLLSYLAQKNDLLYDILNCQPTQSGSLLYEVLVFAERLSEGRNAPHYHVVKWHYNEQSLHESLFGEESRLADRLLALVIHPEEDVQIQACKVIVSLQYPQDLRARPSSCQPSRSYFKNTE

SEQ ID NO: 9631 - protein, 1025 aa, Homo sapiens
MKASSGDQGSPPCFLRFPRPVRVVSGAEAELKCVVLGEPPPVVVWEKGGQQLAASERLSFPADGAEHGLLLTAALPTDAGVYVCRARNAAGEAYAAAAVTVLEPPASDPELQPAERPLPSPGSGEGAPVFLTGPRSQWVLRGAEVVLTCRAGGLPEPTLYWEKDGMALDEVWDSSHFALQPGRAEDGPGASLALRILAARLPDSGVYVCHARNAHGHAQAGALLQVHQPPESPPADPDEAPAPVVEPLKCAPKTFWVNEGKHAKFRCYVMGKPEPEIEWHWEGRPLLPDRRRLMYRDRDGGFVLKVLYCQAKDRGLYVCAARNSAGQTLSAVQLHVKEPRLRFTRPLQDVEGREHGIAVLECKVPNSRIPTAWFREDQRLLPCRKYEQIEEGTVRRLIIHRLKADDDGIYLCEMRGRVRTVANVTVKGPILKRLPRKLDVLEGENAVLLVETLEAGVEGRWSRDGEELPVICQSSSGHMHALVLPGVTREDAGEVTFSLGNSRTTTLLRVKCVKHSPPGPPILAEMFKGHKNTVLLTWKPPEPAPETPFIYRLERQEVGSEDWIQCFSIEKAGAVEVPGDCVPSEGDYRFRICTVSGHGRSPHVVFHGSAHLVPTARLVAGLEDVQVYDGEDAVFSLDLSTIIQGTWFLNGEELKSNEPEGQVEPGALRYRIEQKGLQHRLILHAVKHQDSGALVGFSCPGVQDSAALTIQESPVHILSPQDRVSLTFTTSERVVLTCELSRVDFPATWYKDGQKVEESELLVVKMDGRKHRLILPEAKVQDSGEFECRTEGVSAFFGVTVQDPPVHIVDPREHVFVHAITSECVMLACEVDREDAPVRWYKDGQEVEESDFVVLENEGPHRRLVLPATQPSDGGEFQCVAGDECAYFTVTITDVSSWIVYPSGKVYVAAVRLERVVLTCELCRPWAEVRWTKDGEEVVESPALLLQKEDTVRRLVLPAVQLEDSGEYLCEIDDESASFTVTVTESYQSQDSSNNNPELCVLLKKPKTRRLWSRFPPWRRTAGTE

SEQ ID NO: 9632 - protein, 1804 aa, Homo sapiens
MKASSGDQGSPPCFLRFPRPVRVVSGAEAELKCVVLGEPPPVVVWEKGGQQLAASERLSFPADGAEHGLLLTAALPTDAGVYVCRARNAAGEAYAAAAVTVLEPPASDPELQPAERPLPSPGSGEGAPVFLTGPRSQWVLRGAEVVLTCRAGGLPEPTLYWEKDGMALDEVWDSSHFALQPGRAEDGPGASLALRILAARLPDSGVYVCHARNAHGHAQAGALLQVHQPPESPPADPDEAPAPVVEPLKCAPKTFWVNEGKHAKFRCYVMGKPEPEIEWHWEGRPLLPDRRRLMYRDRDGGFVLKVLYCQAKDRGLYVCAARNSAGQTLSAVQLHVKEPRLRFTRPLQDVEGREHGIAVLECKVPNSRIPTAWFREDQRLLPCRKYEQIEEGTVRRLIIHRLKADDDGIYLCEMRGRVRTVANVTVKGPILKRLPRKLDVLEGENAVLLVETLEAGVEGRWSRDGEELPVICQSSSGHMHALVLPGVTREDAGEVTFSLGNSRTTTLLRVKCVKHSPPGPPILAEMFKGHKNTVLLTWKPPEPAPETPFIYRLERQEVGSEDWIQCFSIEKAGAVEVPGDCVPSEGDYRFRICTVSGHGRSPHVVFHGSAHLVPTARLVAGLEDVQVYDGEDAVFSLDLSTIIQGTWFLNGEELKSNEPEGQVEPGALRYRIEQKGLQHRLILHAVKHQDSGALVGFSCPGVQDSAALTIQESPVHILSPQDRVSLTFTTSERVVLTCELSRVDFPATWYKDGQKVEESELLVVKMDGRKHRLILPEAKVQDSGEFECRTEGVSAFFGVTVQDPPVHIVDPREHVFVHAITSECVMLACEVDREDAPVRWYKDGQEVEESDFVVLENEGPHRRLVLPATQPSDGGEFQCVAGDECAYFTVTITDVSSWIVYPSGKVYVAAVRLERVVLTCELCRPWAEVRWTKDGEEVVESPALLLQKEDTVRRLVLPAVQLEDSGEYLCEIDDESASFTVTVTEPPVRIIYPRDEVTLIAVTLECVVLMCELSREDAPVRWYKDGLEVEESEALVLERDGPRCRLVLPAAQPEDGGEFVCDAGDDSAFFTVTVTAPPERIVHPAARSLDLHFGAPGRVELRCEVAPAGSQVRWYKDGLEVEASDALQLGAEGPTRTLTLPHAQPEDAGEYVCETRHEAITFNVILAEPPVQFLALETTPSPLCVAPGEPVVLSCELSRAGAPVVWSHNGRPVQEGEGLELHAEGPRRVLCIQAAGPAHAGLYTCQSGAAPGAPSLSFTVQVAEPLLVKLVSELTPLTVHEGDDATFRCEVSPPDADVTWLRNGAVVTPGPQVEMAQNGSSRILTLRGCQLGDAGTVTLRAGSTATSARLHVRETELLFLRRLQDVRAEEGQDVCLEVETGRVGAAGAVRWVRGGQPLPHDSRLSMAQDGHIHRLFIHGVILADQGTYGCESHHDRTLARLSVRPRQLRVLRPLEDVTISEGGSATFQLELSQEGVTGEWARGGVQLYPGPKCHIHSDGHRHRLVLNGLGLADSGCVSFTADSLRCAARLIVREVPVTIVRGPHDLEVTEGDTATFECELSQALADVTWEKDGNALTPSPRLRLQALGTRRLLQLRRCGPSDAGTYSCAVGTARAGPVRLTVRERTVAVLSELRSVSAREGDGATFECTVSEVETTGRWELGGRPLRPGARVRIRQEGKKHILVLSELRAEDAGEVRFQAGPAQSLALLEVEALPLQMCRHPPREKTVLVGRRAVLEVTVSRSGGHVCWLREGAELCPGDKYEMRSHGPTHSLVIHDVRPEDQGTYCCQAGQDSTHTRLLVEGN

SEQ ID NO: 9633 - protein, 350 aa, Homo sapiens
MCCDSDFVARNKSQDSGIAEMEELPVPHNIKISNITCDSFKISWEMDSKSKDRITHYFIDLNKKENKNSNKFKHKDVPTKLVAKAVPLPMTVRGHWFLSPRTEYTVAVQTASKQVDGDYVVSEWSEIIEFCTADYSKVHLTQLLEKAEVIAGRMLKFSVFYRNQHKEYFDYVREHHGNAMQPSVKDNSGSHGSPISGKLEGIFFSCSTEFNTGKPPQDSPYGRYRFEIAAEKLFNPNTNLYFGDFYCMYTAYHYVILVIAPVGSPGDEFCKQRLPQLNSKDNKFLTCTEEDGVLVYHHAQDVILEVIYTDPVDLSVGTVAEITGHQLMSLSTANAKKDPSCKTCNISVGR

SEQ ID NO: 9634 - protein, 376 aa, Homo sapiens
MEVPRLDHALNSPTSPCEEVIKNLSLEAIQLCDRDGNKSQDSGIAEMEELPVPHNIKISNITCDSFKISWEMDSKSKDRITHYFIDLNKKENKNSNKFKHKDVPTKLVAKAVPLPMTVRGHWFLSPRTEYTVAVQTASKQVDGDYVVSEWSEIIEFCTADYSKVHLTQLLEKAEVIAGRMLKFSVFYRNQHKEYFDYVREHHGNAMQPSVKDNSGSHGSPISGKLEGIFFSCSTEFNTGKPPQDSPYGRYRFEIAAEKLFNPNTNLYFGDFYCMYTAYHYVILVIAPVGSPGDEFCKQRLPQLNSKDNKFLTCTEEDGVLVYHHAQDVILEVIYTDPVDLSVGTVAEITGHQLMSLSTANAKKDPSCKTCNISVGR

SEQ ID NO: 9635 - protein, 974 aa, Homo sapiens
MAAQGEPGYLAAQSDPGSNSERSTDSPVPGSEDDLVAGATLHSPEWSEERFRVDRKKLEAMLQAAAEGKGRSGEDFFQKIMEETNTQIAWPSKLKIGAKSKKDPHIKVSGKKEDVKEAKEMIMSVLDTKSNRVTLKMDVSHTEHSHVIGKGGNNIKKVMEETGCHIHFPDSNRNNQAEKSNQVSIAGQPAGVESARVRIRELLPLVLMFELPIAGILQPVPDPNSPSIQHISQTYNISVSFKQRSRMYGATVIVRGSQNNTSAVKEGTAMLLEHLAGSLASAIPVSTQLDIAAQHHLFMMGRNGSNIKHIMQRTGAQIHFPDPSNPQKKSTVYLQGTIESVCLARQYLMGCLPLVLMFDMKEEIEVDPQFIAQLMEQLDVFISIKPKPKQPSKSVIVKSVERNALNMYEARKCLLGLESSGVTIATSPSPASCPAGLACPSLDILASAGLGLTGLGLLGPTTLSLNTSTTPNSLLNALNSSVSPLQSPSSGTPSPTLWAPPLANTSSATGFSAIPHLMIPSTAQATLTNILLSGVPTYGHTAPSPPPGLTPVDVHINSMQTEGKKISAALNGHAQSPDIKYGAISTSSLGEKVLSANHGDPSIQTSGSEQTSPKSSPTEGCNDAFVEVGMPRSPSHSGNAGDLKQMMCPSKVSCAKRQTVELLQGTKNSHLHSTDRLLSDPELSATESPLADKKAPGSERAAERAAAAQQNSERAHLAPRSSYVNMQAFDYEQKKLLATKAMLKKPVVTEVRTPTNTWSGLGFSKSMPAETIKELRRANHVSYKPTMTTTYEGSSMSLSRSNSREHLGGGSESDNWRDRNGIGPGSHSEFAASIGSPKRKQNKSTEHYLSSSNYMDCISSLTGSNGCNLNSSFKGSDLPELFSKLGLGKYTDVFQQQEIDLQTFLTLTDQDLKELGITTFGARRKMLLAISELNKNRRKLFESPNARTSFLEGGASGRLPRQYHSDIASVSGRW

SEQ ID NO: 9636 - protein, 373 aa, Homo sapiens
MRLLAWLIFLANWGGARAEPGKFWHIADLHLDPDYKVSKDPFQVCPSAGSQPVPDAGPWGDYLCDSPWALINSSIYAMKEIEPEPDFILWTGDDTPHVPDEKLGEAAVLEIVERLTKLIREVFPDTKVYAALGNHDFHPKNQFPAGSNNIYNQIAELWKPWLSNESIALFKKGAFYCEKLPGPSGAGRIVVLNTNLYYTSNALTADMADPGQQFQWLEDVLTDASKAGDMVYIVGHVPPGFFEKTQNKAWFREGFNEKYLKVVRKHHRVIAGQFFGHHHTDSFRMLYDDAGVPISAMFITPGVTPWKTTLPGVVNGANNPAIRVFEYDRATLSLKVRSPAEARGGGWEGLKCITTFPHSQLIHLPLTTEPQEG

SEQ ID NO: 9637 - protein, 455 aa, Homo sapiens
MRLLAWLIFLANWGGARAEPGKFWHIADLHLDPDYKVSKDPFQVCPSAGSQPVPDAGPWGDYLCDSPWALINSSIYAMKEIEPEPDFILWTGDDTPHVPDEKLGEAAVLEIVERLTKLIREVFPDTKVYAALGNHDFHPKNQFPAGSNNIYNQIAELWKPWLSNESIALFKKGAFYCEKLPGPSGAGRIVVLNTNLYYTSNALTADMADPGQQFQWLEDVLTDASKAGDMVYIVGHVPPGFFEKTQNKAWFREGFNEKYLKVVRKHHRVIAGQFFGHHHTDSFRMLYDDAGVPISAMFITPGVTPWKTTLPGVVNGANNPAIRVFEYDRATLSLKDMVTYFMNLSQANAQGTPRWELEYQLTEAYGVPDASAHSMHTVLDRIAGDQSTLQRYYVYNSVSYSAGVCDEACSMQHVCAMRQVDIDAYTTCLYASGTTPVPQLPLLLMALLGLCTLVL

SEQ ID NO: 9638 - protein, 989 aa, Homo sapiens
MKGLGDSRPRHLSDSLDPPHEPLFAGTDRNPYLLSPTEAFAREARFPGQNTLPGDGLFPLNNQLPPPSSTFPRIHYNSHFEVPEESPFPSHAQATKINRLPANLLDQFEKQLPIHRDGFSTLQFPRGEAKARGESPGRIRHLVHSVQRLFFTKAPSLEGTAGKVGGNGSKKGGMEDGKGRRAKSKERAKAGEPKRRSRSNISGWWSSDDNLDGEAGAFRSSGPASGLMTLGRQAERSQPRYFMHAYNTISGHMLKTTKNNTTELTAPPPPPAPPATCPSLGVGTDTNYVKRGSWSTLTLSHAHEVCQKTSATLDKSLLKSKSCHQGLAYHYLQVPGGGGEWSTTLLSPRETDAAAEGPIPCRRMRSGSYIKAMGDEDSDESGGSPKPSPKTAARRQSYLRATQQSLGEQSNPRRSLDRLDSVDMLLPSKCPSWEEDYTPVSDSLNDSSCISQIFGQASLIPQLFGHEQQVREAELSDQYEAACESACSEAESTAAETLDLPLPSYFRSRSHSYLRAIQAGCSQEEDSVSLQSLSPPPSTGSLSNSRTLPSSSCLVAYKKTPPPVPPRTTSKPFISVTVQSSTESAQDTYLDSQDHKSEVTSQSGLSNSSDSLDSSTRPPSVTRGGVAPAPEAPEPPPKHAALKSEQGTLTSSESHPEAAPKRKLSSIGIQERTRRNGSHLSEDNGPKAIDVMAPSSESSVPSHSMSSRRDTDSDTQDANDSSCKSSERSLPDCTPHPNSISIDAGPRQAPKIAQIKRNLSYGDNSDPALEASSLPPPDPWLETSSSSPAEPAQPGACRRDGYWFLKLLQAETERLEGWCCQMDKETKENNLSEEVLGKVLSAVGSAQLLMSQKFQQFRGLCEQNLNPDANPRPTAQDLAGFWDLLQLSIEDISMKFDELYHLKANSWQLVETPEKRKEEKKPPPPVPKKPAKSKPAVSRDKASDASDKQRQEARKRLLAAKRAASVRQNSATESADSIEIYVPEAQTRL

SEQ ID NO: 9639 - protein, 473 aa, Homo sapiens
MLKAVILIGGPQKGTRFRPLSFEVPKPLFPVAGVPMIQHHIEACAQVPGMQEILLIGFYQPDEPLTQFLEAAQQEFNLPVRYLQEFAPLGTGGGLYHFRDQILAGSPEAFFVLNADVCSDFPLSAMLEAHRRQRHPFLLLGTTANRTQSLNYGCIVENPQTHEVLHYVEKPSTFISDIINCGIYLFSPEALKPLRDVFQRNQQDGQLEDSPGLWPGAGTIRLEQDVFSALAGQGQIYVHLTDGIWSQIKSAGSALYASRLYLSRYQDTHPERLAKHTPGGPWIRGTQPAPIPNLWLPPQPSEPGFLTSSPELKPQSLPLPDQIRFGIFAPRASLLLLGNVYIHPTAKVAPSAVLGPNVSIGKGVTVGEGVRLRESIVLHGATLQEHTCVLHSIVGWGSTVGRWARVEGTPSDPNPNDPRARMDSESLFKDGKLLPAITILGCRVRIPAEVLILNSIVLPHKELSRSFTNQIIL

SEQ ID NO: 9640 - protein, 408 aa, Homo sapiens
MELATRYQIPKEVADIFNAPSDDEEFVGFRDDVPMETLSSEESCDSFDSLESGKQVVESDLSDDGKASLVSEEEEDEEEDKATPRRSRSRRSSIGLRVAFQFPTKKLANKPDKNSSSEQLFSSARLQNEKKTILERKKDCRQVIQREDSTSESEDDSRDESQESSDALLKRTMNIKENKAMLAQLLAELNSMPDFFPVRTPTSASRKKTVRRAFSEGQITRRMNPTRSARPPEKFALENFTVSAAKFAEEFYSFRRRKTIGGKCREYRRRHRISSFRPVEDITEEDLENVAITVRDKIYDKVLGNTCHQCRQKTIDTKTVCRNQGCCGVRGQFCGPCLRNRYGEDVRSALLDPDWVCPPCRGICNCSYCRKRDGRCATGILIHLAKFYGYDNVKEYLESLQKELVEDN

SEQ ID NO: 9641 - protein, 880 aa, Homo sapiens
MTTETGPDSEVKKAQEEAPQQPEAAAAVTTPVTPAGHGHPEANSNEKHPSQQDTRPAEQSLDMEEKDYSEADGLSERTTPSKAQKSPQKIAKKYKSAICRVTLLDASEYECEVEKHGRGQVLFDLVCEHLNLLEKDYFGLTFCDADSQKNWLDPSKEIKKQIRSSPWNFAFTVKFYPPDPAQLTEDITRYYLCLQLRADIITGRLPCSFVTHALLGSYAVQAELGDYDAEEHVGNYVSELRFAPNQTRELEERIMELHKTYRGMTPGEAEIHFLENAKKLSMYGVDLHHAKDSEGIDIMLGVCANGLLIYRDRLRINRFAWPKILKISYKRSNFYIKIRPGEYEQFESTIGFKLPNHRSAKRLWKVCIEHHTFFRLVSPEPPPKGFLVMGSKFRYSGRTQAQTRQASALIDRPAPFFERSSSKRYTMSRSLDGAEFSRPASVSENHDAGPDGDKRDEDGESGGQRSEAEEGEVRTPTKIKELKPEQETTPRHKQEFLDKPEDVLLKHQASINELKRTLKEPNSKLIHRDRDWERERRLPSSPASPSPKGTPEKANERAGLREGSEEKVKPPRPRAPESDTGDEDQDQERDTVFLKDNHLAIERKCSSITVSSTSSLEAEVDFTVIGDYHGSAFEDFSRSLPELDRDKSDSDTEGLLFSRDLNKGAPSQDDESGGIEDSPDRGACSTPDMPQFEPVKTETMTVSSLAIRKKIEPEAVLQTRVSAMDNTQVDGSASVGREFIATTPSITTETISTTMENSLKSGKGAAAMIPGPQTVATEIRSLSPIIGKDVLTSTYGATAETLSTSTTTHVTKTVKGGFSETRIEKRIIITGDEDVDQDQALALAIKEAKLQHPDMLVTKAVVYRETDPSPEERDKKPQES

SEQ ID NO: 9642 - protein, 276 aa, Homo sapiens
MSYGPLDMYRNPGPSGPQLRDFSSIIQTCSGNIQRISQATAQIKNLMSQLGTKQDSSKLQENLQQLQHSTNQLAKETNELLKELGSLPLPLSTSEQRQQRLQKERLMNDFSAALNNFQAVQRRVSEKEKESIARARAGSRLSAEERQREEQLVSFDSHEEWNQMQSQEDEVAITEQDLELIKERETAIRQLEADILDVNQIFKDLAMMIHDQGDLIDSIEANVESSEVHVERATEQLQRAAYYQKKSRKKMCILVLVLSVIILILGLIIWLVYKTK

SEQ ID NO: 9643 - protein, 277 aa, Homo sapiens
MEAAETEAEAAALEVLAEVAGILEPVGLQEEAELPAKILVEFVVDSQKKDKLLCSQLQVADFLQNILAQEDTAKGLDPLASEDTSRQKAIAAKEQWKELKATYREHVEAIKIGLTKALTQMEEAQRKRTQLREAFEQLQAKKQMAMEKRRAVQNQWQLQQEKHLQHLAEVSAEVRERKTGTQQELDRVFQKLGNLKQQAEQERDKLQRYQTFLQLLYTLQGKLLFPEAEAEAENLPDDKPQQPTRPQEQSTGDTMGRDPGVSFKAVGLQPAGDVNLP

SEQ ID NO: 9644 - protein, 772 aa, Homo sapiens
MEEKDYSEADGLSERTTPSKAQKSPQKIAKKYKSAICRVTLLDASEYECEVENWLDPSKEIKKQIRSSPWNFAFTVKFYPPDPAQLTEDITRYYLCLQLRADIITGRLPCSFVTHALLGSYAVQAELGDYDAEEHVGNYVSELRFAPNQTRELEERIMELHKTYRGMTPGEAEIHFLENAKKLSMYGVDLHHAKDSEGIDIMLGVCANGLLIYRDRLRINRFAWPKILKISYKRSNFYIKIRPGEYEQFESTIGFKLPNHRSAKRLWKVCIEHHTFFRLVSPEPPPKGFLVMGSKFRYSGRTQAQTRQASALIDRPAPFFERSSSKRYTMSRSLDGAEFSRPASVSENHDAGPDGDKRDEDGESGGQRSEAEEGEVRTPTKIKELKFLDKPEDVLLKHQASINELKRTLKEPNSKLIHRDRDWERERRLPSSPASPSPKGTPEKANERAGLREGSEEKVKPPRPRAPESDTGDEDQDQERDTVFLKDNHLAIERKCSSITVSSTSSLEAEVDFTVIGDYHGSAFEDFSRSLPELDRDKSDSDTEGLLFSRDLNKGAPSQDDESGGIEDSPDRGACSTPDMPQFEPVKTETMTVSSLAIRKKIEPEAVLQTRVSAMDNTQQVDGSASVGREFIATTPSITTETISTTMENSLKSGKGAAAMIPGPQTVATEIRSLSPIIGKDVLTSTYGATAETLSTSTTTHVTKTVKGGFSETRIEKRIIITGDEDVDQDQALALAIKEAKLQHPDMLVTKAVVYRETDPSPEERDKKPQES

SEQ ID NO: 9645 - protein, 570 aa, Homo sapiens
MESLGLHTVTLSDGTTAYVQQAVKGEKLLEGQVIQLEDGTTAYIHQVTVQKEALSFEDGQPVQLEDGSMAYIHRTPREGYDPSTLEAVQLEDGSTAYIHHPVAVPSESTILAVQTEVGLEDLAAEDDEGFSADAVVALEQYASKVLHDSQIPRNGKGQQVGDRAFRCGYKGCGRLYTTAHHLKVHERAHTGDRPYRCDFPSCGKAFATGYGLKSHVRTHTGEKPYKCPEELCSKAFKTSGDLQKHVRTHTGERPFQCPFEGCGRSFTTSNIRKVHVRTHTGERPYTCPEPHCGRGFTSATNYKNHVRIHTGEKPYVCTVPGCGKRFTEYSSLYKHHVVHTHCKPYTCSTCGKTYRQTSTLAMHKRSAHGELEATEESEQALYEQQQLEAASAAEESPPPKRPRIAYLSEVKEERDDIPAQVAMVTEEDGAPQVALITQDGAQQVSLSPEDLQALGSAISMVTQHGSTTLTIPSPDADLATSGTHTVTMVSADGTQTQPVTIITSGAVVAEDSSVASLRHQQVALLATANGTHIAVQLEEQQTLEEAINVATAAMQQGAVTLETTVSESGC

SEQ ID NO: 9646 - protein, 961 aa, Homo sapiens
MFRQFYLWTCLASGIILGSLFEICLGQYDDDCKLARGGPPATIVAIDEESRNGTILVDNMLIKGTAGGPDPTIELSLKDNVDYWVLMDPVKQMLFLNSTGRVLDRDPPMNIHSIVVQVQCINKKVGTIIYHEVRIVVRDRNDNSPTFKHESYYATVNELTPVGTTIFTGFSGDNGATDIDDGPNGQIEYVIQYNPDDPTSNDTFEIPLMLTGNIVLRKRLNYEDKTRYFVIIQANDRAQNLNERRTTTTTLTVDVLDGDDLGPMFLPCVLVPNTRDCRPLTYQAAIPELRTPEELNPIIVTPPIQAIDQDRNIQPPSDRPGILYSILVGTPEDYPRFFHMHPRTAELSLLEPVNRDFHQKFDLVIKAEQDNGHPLPAFAGLHIEILDENNQSPYFTMPSYQGYILESAPVGATISDSLNLTSPLRIVALDKDIEDTKDPELHLFLNDYTSVFTVTQTGITRYLTLLQPVDREEQQTYTFSITAFDGVQESEPVIVNIQVMDANDNTPTFPEISYDVYVYTDMRPGDSVIQLTAVDADEGSNGEITYEILVGAQGDFIINKTTGLITIAPGVEMIVGRTYALTVQAADNAPPAERRNSICTVYIEVLPPNNQSPPRFPQLMYSLEISEAMRVGAVLLNLQATDREGDSITYAIENGDPQRVFNLSETTGILTLGKALDRESTDRYILIITASDGRPDGTSTATVNIVVTDVNDNAPVFDPYLPRNLSVVEEEANAFVGQVKATDPDAGINGQVHYSLGNFNNLFRITSNGSIYTAVKLNREVRDYYELVVVATDGAVHPRHSTLTLAIKVLDIDDNSPVFTNSTYTVLVEENLPAGTTILQIEAKDVDLGANVSYRIRSPEVKHFFALHPFTGELSLLRSLDYEAFPDQEASITFLVEAFDIYGTMPPGIATVTVIVKDMNDYPPVFSKRIYKGMVAPDAVKGTPITTVYAEDADPPVSRRH

SEQ ID NO: 9647 - protein, 654 aa, Homo sapiens
MFRQFYLWTCLASGIILGSLFEICLGQYDDDCKLARGGPPATIVAIDEESRNGTILVDNMLIKGTAGGPDPTIELSLKDNVDYWVLMDPVKQMLFLNSTGRVLDRDPPMNIHSIVVQVQCINKKVGTIIYHEVRIVVRDRNDNSPTFKHESYYATVNELTPVGTTIFTGFSGDNGATDIDDGPNGQIEYVIQYNPDDPTSNDTFEIPLMLTGNIVLRKRLNYEDKTRYFVIIQANDRAQNLNERRTTTTTLTVDVLDGDDLGPMFLPCVLVPNTRDCRPLTYQAAIPELRTPEELNPIIVTPPIQAIDQDRNIQPPSDRPGILYSILVGTPEDYPRFFHMHPRTAELSLLEPVNRDFHQKFDLVIKAEQDNGHPLPAFAGLHIEILDENNQSPYFTMPSYQGYILESAPVGATISDSLNLTSPLRIVALDKDIEDTKDPELHLFLNDYTSVFTVTQTGITRYLTLLQPVDREEQQTYTFSITAFDGVQESEPVIVNIQVMDANDNTPTFPEISYDVYVYTDMRPGDSVIQLTAVDADEGSNGEITYEILVGAQGDFIINKTTGLITIAPGVEMIVGRTYALTVQAADNAPPAERRNSICTVYIEVLPPNNQSPPRFPQLMYSLEISEAMRVGAVLLNLQHGDSNLRESTGQGKH

SEQ ID NO: 9648 - protein, 1962 aa, Homo sapiens
MFRQFYLWTCLASGIILGSLFEICLGQYDDDWQYEDCKLARGGPPATIVAIDEESRNGTILVDNMLIKGTAGGPDPTIELSLKDNVDYWVLMDPVKQMLFLNSTGRVLDRDPPMNIHSIVVQVQCINKKVGTIIYHEVRIVVRDRNDNSPTFKHESYYATVNELTPVGTTIFTGFSGDNGATDIDDGPNGQIEYVIQYNPDDPTSNDTFEIPLMLTGNIVLRKRLNYEDKTRYFVIIQANDRAQNLNERRTTTTTLTVDVLDGDDLGPMFLPCVLVPNTRDCRPLTYQAAIPELRTPEELNPIIVTPPIQAIDQDRNIQPPSDRPGILYSILVGTPEDYPRFFHMHPRTAELSLLEPVNRDFHQKFDLVIKAEQDNGHPLPAFAGLHIEILDENNQSPYFTMPSYQGYILESAPVGATISDSLNLTSPLRIVALDKDIEDTKDPELHLFLNDYTSVFTVTQTGITRYLTLLQPVDREEQQTYTFSITAFDGVQESEPVIVNIQVMDANDNTPTFPEISYDVYVYTDMRPGDSVIQLTAVDADEGSNGEITYEILVGAQGDFIINKTTGLITIAPGVEMIVGRTYALTVQAADNAPPAERRNSICTVYIEVLPPNNQSPPRFPQLMYSLEISEAMRVGAVLLNLQATDREGDSITYAIENGDPQRVFNLSETTGILTLGKALDRESTDRYILIITASDGRPDGTSTATVNIVVTDVNDNAPVFDPYLPRNLSVVEEEANAFVGQVKATDPDAGINGQVHYSLGNFNNLFRITSNGSIYTAVKLNREVRDYYELVVVATDGAVHPRHSTLTLAIKVLDIDDNSPVFTNSTYTVLVEENLPAGTTILQIEAKDVDLGANVSYRIRSPEVKHFFALHPFTGELSLLRSLDYEAFPDQEASITFLVEAFDIYGTMPPGIATVTVIVKDMNDYPPVFSKRIYKGMVAPDAVKGTPITTVYAEDADPPGLPASRVRYRVDDVQFPYPASIFEVEEDSGRVITRVNLNEEPTTIFKLVVVAFDDGEPVMSSSATVKILVLHPGEIPRFTQEEYRPPPVSELATKGTMVGVISAAAINQSIVYSIVSGNEEDTFGINNITGVIYVNGPLDYETRTSYVLRVQADSLEVVLANLRVPSKSNTAKVYIEIQDENNHPPVFQKKFYIGGVSEDARMFTSVLRVKATDKDTGNYSVMAYRLIIPPIKEGKEGFVVETYTGLIKTAMLFHNMRRSYFKFQVIATDDYGKGLSGKADVLVSVVNQLDMQVIVSNVPPTLVEKKIEDLTEILDRYVQEQIPGAKVVVESIGARRHGDAFSLEDYTKCDLTVYAIDPQTNRAIDRNELFKFLDGKLLDINKDFQPYYGEGGRILEIRTPEAVTSIKKRGESLGYTEGALLALAFIIILCCIPAILVVLVSYRQFKVRQAECTKTARIQAALPAAKPAVPAPAPVAAPPPPPPPPPGAHLYEELGDSSMHNLFLLYHFQQSRGNNSVSEDRKHQQVVMPFSSNTIEAHKSAHVDGSLKSNKLKSARKFTFLSDEDDLSAHNPLYKENISQVSTNSDISQRTDFVDPFSPKIQAKSKSLRGPREKIQRLWSQSVSLPRRLMRKVPNRPEIIDLQQWQGTRQKAENENTGICTNKRGSSNPLLTTEEANLTEKEEIRQGETLMIEGTEQLKSLSSDSSFCFPRPHFSFSTLPTVSRTVELKSEPNVISSPAECSLELSPSRPCVLHSSLSRRETPICMLPIETERNIFENFAHPPNISPSACPLPPPPPISPPSPPPAPAPLAPPPDISPFSLFCPPPSPPSIPLPLPPPTFFPLSVSTSGPPTPPLLPPFPTPLPPPPPSIPCPPPPSASFLSTECVCITGVKCTTNLMPAEKIKSSMTQLSTTTVCKTDPQREPKGILRHVKNLAELEKSVANMYSQIEKNYLRTNVSELQTMCPSEVTNMEITSEQNKGSLNNIVEGTEKQSHSQSTSL

SEQ ID NO: 9649 - protein, 1677 aa, Homo sapiens
MFRQFYLWTCLASGIILGSLFEICLGQYDDDCKLARGGPPATIVAIDEESRNGTILVDNMLIKGTAGGPDPTIELSLKDNVDYWVLMDPVKQMLFLNSTGRVLDRDPPMNIHSIVVQVQCINKKVGTIIYHEVRIVVRDRNDNSPTFKHESYYATVNELTPVGTTIFTGFSGDNGATDIDDGPNGQIEYVIQYNPDDPTSNDTFEIPLMLTGNIVLRKRLNYEDKTRYFVIIQANDRAQNLNERRTTTTTLTVDVLDGDDLGPMFLPCVLVPNTRDCRPLTYQAAIPELRTPEELNPIIVTPPIQAIDQDRNIQPPSDRPGILYSILVGTPEDYPRFFHMHPRTAELSLLEPVNRDFHQKFDLVIKAEQDNGHPLPAFAGLHIEILDENNQSPYFTMPSYQGYILESAPVGATISDSLNLTSPLRIVALDKDIEDTKDPELHLFLNDYTSVFTVTQTGITRYLTLLQPVDREEQQTYTFSITAFDGVQESEPVIVNIQVMDANDNTPTFPEISYDVYVYTDMRPGDSVIQLTAVDADEGSNGEITYEILVGAQGDFIINKTTGLITIAPGVEMIVGRTYALTVQAADNAPPAERRNSICTVYIEVLPPNNQSPPRFPQLMYSLEISEAMRVGAVLLNLQATDREGDSITYAIENGDPQRVFNLSETTGILTLGKALDRESTDRYILIITASDGRPDGTSTATVNIVVTDVNDNAPVFDPYLPRNLSVVEEEANAFVGQVKATDPDAGINGQVHYSLGNFNNLFRITSNGSIYTAVKLNREVRDYYELVVVATDGAVHPRHSTLTLAIKVLDIDDNSPVFTNSTYTVLVEENLPAGTTILQIEAKDVDLGANVSYRIRSPEVKHFFALHPFTGELSLLRSLDYEAFPDQEASITFLVEAFDIYGTMPPGIATVTVIVKDMNDYPPVFSKRIYKGMVAPDAVKGTPITTVYAEDADPPGLPASRVRYRVDDVQFPYPASIFEVEEDSGRVITRVNLNEEPTTIFKLVVVAFDDGEPVMSSSATVKILVLHPGEIPRFTQEEYRPPPVSELATKGTMVGVISAAAINQSIVYSIVSGNEEDTFGINNITGVIYVNGPLDYETRTSYVLRVQADSLEVVLANLRVPSKSNTAKVYIEIQDENNHPPVFQKKFYIGGVSEDARMFTSVLRVKATDKDTGNYSVMAYRLIIPPIKEGKEGFVVETYTGLIKTAMLFHNMRRSYFKFQVIATDDYGKGLSGKADVLVSVVNQLDMQVIVSNVPPTLVEKKIEDLTEILDRYVQEQIPGAKVVVESIGARRHGDAFSLEDYTKCDLTVYAIDPQTNRAIDRNELFKFLDGKLLDINKDFQPYYGEGGRILEIRTPEAVTSIKKRGESLGYTEGALLALAFIIILCCIPAILVVLVSYRQFKVRQAECTKTARIQAALPAAKPAVPAPAPVAAPPPPPPPPPGAHLYEELGDSSMHKYEMPQYGSRRRLLPPAGQEEYGEVVGEAEEEYEEEEWARKRMIKLVVDREYETSSTGEDSAPECQRNRLHHPSIHSNINGNIYIAQNGSVVRTRRACLTDNLKVASPVRLGGPFKKLDKLAVTHEENVPLNTLSKGPFSTEKMNARPTLVTFAPCPVGTDNTAVKPLRNRLKSTVEQESMIDSKNIKEALEFHSDHTQSDDEELWMGPWNNLHIPMTKL

SEQ ID NO: 9650 - protein, 576 aa, Homo sapiens
MRRHMVTYAWQLLKKELGLYQLAMDIIIMIRVCKMFRQGLRGFREYQIIETAHWKHPIFSFWDKKMQSRVTFDTMDFIAEEGHFPPKAIQIMQKKPSWRTEDEIQAVCNILQVLDSYRNYAEPLQLLLAKVMRFERFGRRRVIIKKGQKGNSFYFIYLGTVAITKDEDGSSAFLDPHPKLLHKGSCFGEMDVLHASVRRSTIVCMEETEFLVVDREDFFANKLDQEVQKDAQYRFEFFRKMELFASWSDEKLWQLVAMAKIERFSYGQLISKDFGESPFIMFISKGSCEVLRLLDLGASPSYRRWIWQHLELIDGRPLKTHLSEYSPMERFKEFQIKSYPLQDFSSLKLPHLKKAWGLQGTSFSRKIRTSGDTLPKMLGPKIQSRPAQSIKCAMINIKPGELPKEAAVGAYVKVHTVEQGEILGLHQAFLPEGECDTRPLILMSLGNELIRIRKEIFYELIDNDDEMIKKLLKLNIAFPSDEDMCQKFLQQNSWNIFRKDLLQLLVEPCQSQLFTPNRPKKREIYNPKSVVLDLCSINKTTKPRYPIFMAPQKYLPPLRIVQAIKAPRYKIRELLA

SEQ ID NO: 9651 - protein, 312 aa, Homo sapiens
MGTLRDLQYALQEKIEELRQRDALIDELELELDQKDELIQKLQNELDKYRSVIRPATQQAQKQSASTLQGEPRTKRQAISAEPTAFDIQDLSHVTLPFYPKSPQSKDLIKEAILDNDFMKNLELSQIQEIVDCMYPVEYGKDSCIIKEGDVGSLVYVMEDGKVEVTKEGVKLCTMGPGKVFGELAILYNCTRTATVKTLVNVKLWAIDRQCFQTIMMRTGLIKHTEYMEFLKSVPTFQSLPEEILSKLADVLEETHYENGEYIIRQGARGDTFFIISKGTVNVTREDSPSEDPVFLRTLGKGDWFGEKALQG

SEQ ID NO: 9652 - protein, 839 aa, Homo sapiens
MMSASRLAGTLIPAMAFLSCVRPESWEPCVEVVPNITYQCMELNFYKIPDNLPFSTKNLDLSFNPLRHLGSYSFFSFPELQVLDLSRCEIQTIEDGAYQSLSHLSTLILTGNPIQSLALGAFSGLSSLQKLVAVETNLASLENFPIGHLKTLKELNVAHNLIQSFKLPEYFSNLTNLEHLDLSSNKIQSIYCTDLRVLHQMPLLNLSLDLSLNPMNFIQPGAFKEIRLHKLTLRNNFDSLNVMKTCIQGLAGLEVHRLVLGEFRNEGNLEKFDKSALEGLCNLTIEEFRLAYLDYYLDDIIDLFNCLTNVSSFSLVSVTIERVKDFSYNFGWQHLELVNCKFGQFPTLKLKSLKRLTFTSNKGGNAFSEVDLPSLEFLDLSRNGLSFKGCCSQSDFGTTSLKYLDLSFNGVITMSSNFLGLEQLEHLDFQHSNLKQMSEFSVFLSLRNLIYLDISHTHTRVAFNGIFNGLSSLEVLKMAGNSFQENFLPDIFTELRNLTFLDLSQCQLEQLSPTAFNSLSSLQVLNMSHNNFFSLDTFPYKCLNSLQVLDYSLNHIMTSKKQELQHFPSSLAFLNLTQNDFACTCEHQSFLQWIKDQRQLLVEVERMECATPSDKQGMPVLSLNITCQMNKTIIGVSVLSVLVVSVVAVLVYKFYFHLMLLAGCIKYGRGENIYDAFVIYSSQDEDWVRNELVKNLEEGVPPFQLCLHYRDFIPGVAIAANIIHEGFHKSRKVIVVVSQHFIQSRWCIFEYEIAQTWQFLSSRAGIIFIVLQKVEKTLLRQQVELYRLLSRNTYLEWEDSVLGRHIFWRRLRKALLDGKSWNPEGTVGTGCNWQEATSI

SEQ ID NO: 9653 - protein, 349 aa, Homo sapiens
MDPSDFPSPFDPLTLPEKPLAGDLPVDMEFGEDLLESQTAPTRGWAPPGPSPSSGALDLLDTPAGLEKDPGVLDGATELLGLGGLLYKAPSPPEVDHGPEGTLAWDAGDQTLEPGPGGQTPEVVPPDPGAGANSCSPEGLLEPLAPDSPITLQSPHIEEEETTSIATARRGSPGQEEELPQGQPQSPNAPPSPSVGETLGDGINSSQTKPGGSSPPAHPSLPGDGLTAKASEKPPERVQKRSERVRRAEPPKPEVVDSTESRRSGTPRTRLWRRLVLEAPSMSSAHPSVSPCMRPSSSARSPSLGIPPTLLAAAYARRLERSCTRSAMAAWYTGSAAILASPNSGPTRD

SEQ ID NO: 9654 - protein, 686 aa, Homo sapiens
MGTLRDLQYALQEKIEELRQRDALIDELELELDQKDELIQKLQNELDKYRSVIRPATQQAQKQSASTLQGEPRTKRQAISAEPTAFDIQDLSHVTLPFYPKSPQSKDLIKEAILDNDFMKNLELSQIQEIVDCMYPVEYGKDSCIIKEGDVGSLVYVMEDGKVEVTKEGVKLCTMGPGKVFGELAILYNCTRTATVKTLVNVKLWAIDRQCFQTIMMRTGLIKHTEYMEFLKSVPTFQSLPEEILSKLADVLEETHYENGEYIIRQGARGDTFFIISKGTVNVTREDSPSEDPVFLRTLGKGDWFGEKALQGEDVRTANVIAAEAVTCLVIDRDSFKHLIGGLDDVSNKAYEDAEAKAKYEAEAAFFANLKLSDFNIIDTLGVGGFGRVELVQLKSEESKTFAMKILKKRHIVDTRQQEHIRSEKQIMQGAHSDFIVRLYRTFKDSKYLYMLMEACLGGELWTILRDRGSFEDSTTRFYTACVVEAFAYLHSKGIIYRDLKPENLILDHRGYAKLVDFGFAKKIGFGKKTWTFCGTPEYVAPEIILNKGHDISADYWSLGILMYELLTGSPPFSGPDPMKTYNIILRGIDMIEFPKKIAKNAANLIKKLCRDNPSERLGNLKNGVKDIQKHKWFEGFNWEGLRKGTLTPPIIPSVASPTDTSNFDSFPEDNDEPPPDDNSGWDIDF

SEQ ID NO: 9655 - protein, 495 aa, Homo sapiens
MDPSDFPSPFDPLTLPEKPLAGDLPVDMEFGEDLLESQTAPTRGWAPPGPSPSSGALDLLDTPAGLEKDPGVLDGATELLGLGGLLYKAPSPPEVDHGPEGTLAWDAGDQTLEPGPGGQTPEVVPPDPGAGANSCSPEGLLEPLAPDSPITLQSPHIEEEETTSIATARRGSPGQEEELPQGQPQSPNAPPSPSVGETLGDGINSSQTKPGGSSPPAHPSLPGDGLTAKASEKPPERKRSERVRRAEPPKPEVVDSTESIPVSDEDSDAMVDDPNDEDFVPFRPRRSPRMSLRSSVSQRAGRSAVGTKMTCAHCRTPLQKGQTAYQRKGLPQLFCSSSCLTTFSKKPSGKKTCTFCKKEIWNTKDSVVAQTGSGGSFHEFCTSVCLSLYEAQQQRPIPQSGDPADATRCSICQKTGEVLHEVSNGSVVHRLCSDSCFSKFRANKGLKTNCCDQCGAYIYTKTGSPGPELLFHEGQQKRFCNTTCLGAYKKVGPRE

SEQ ID NO: 9656 - protein, 497 aa, Homo sapiens
MDPSDFPSPFDPLTLPEKPLAGDLPVDMEFGEDLLESQTAPTRGWAPPGPSPSSGALDLLDTPAGLEKDPGVLDGATELLGLGGLLYKAPSPPEVDHGPEGTLAWDAGDQTLEPGPGGQTPEVVPPDPGAGANSCSPEGLLEPLAPDSPITLQSPHIEEEETTSIATARRGSPGQEEELPQGQPQSPNAPPSPSVGETLGDGINSSQTKPGGSSPPAHPSLPGDGLTAKASEKPPERVQKRSERVRRAEPPKPEVVDSTESIPVSDEDSDAMVDDPNDEDFVPFRPRRSPRMSLRSSVSQRAGRSAVGTKMTCAHCRTPLQKGQTAYQRKGLPQLFCSSSCLTTFSKKPSGKKTCTFCKKEIWNTKDSVVAQTGSGGSFHEFCTSVCLSLYEAQQQRPIPQSGDPADATRCSICQKTGEVLHEVSNGSVVHRLCSDSCFSKFRANKGLKTNCCDQCGAYIYTKTGSPGPELLFHEGQQKRFCNTTCLGAYKKVGPRE

SEQ ID NO: 9657 - protein, 653 aa, Homo sapiens
MAAAAASHLNLDALREVLECPICMESFTEEQLRPKLLHCGHTICRQCLEKLLASSINGVRCPFCSKITRITSLTQLTDNLTVLKIIDTAGLSEAVGLLMCRSCGRRLPRQFCRSCGLVLCEPCREADHQPPGHCTLPVKEAAEERRRDFGEKLTRLRELMGELQRRKAALEGVSKDLQARYKAVLQEYGHEERRVQDELARSRKFFTGSLAEVEKSNSQVVEEQSYLLNIAEVQAVSRCDYFLAKIKQADVALLEETADEEEPELTASLPRELTLQDVELLKVGHVGPLQIGQAVKKPRTVNVEDSWAMEATASAASTSVTFREMDMSPEEVVASPRASPAKQRGPEAASNIQQCLFLKKMGAKGSTPGMFNLPVSLYVTSQGEVLVADRGNYRIQVFTRKGFLKEIRRSPSGIDSFVLSFLGADLPNLTPLSVAMNCQGLIGVTDSYDNSLKVYTLDGHCVACHRSQLSKPWGITALPSGQFVVTDVEGGKLWCFTVDRGSGVVKYSCLCSAVRPKFVTCDAEGTVYFTQGLGLNLENRQNEHHLEGGFSIGSVGPDGQLGRQISHFFSENEDFRCIAGMCVDARGDLIVADSSRKEILHFPKGGGYSVLIREGLTCPVGIALTPKGQLLVLDCWDHCIKIYSYHLRRYSTP

SEQ ID NO: 9658 - protein, 1280 aa, Homo sapiens
MDPSDFPSPFDPLTLPEKPLAGDLPVDMEFGEDLLESQTAPTRGWAPPGPSPSSGALDLLDTPAGLEKDPGVLDGATELLGLGGLLYKAPSPPEVDHGPEGTLAWDAGDQTLEPGPGGQTPEVVPPDPGAGANSCSPEGLLEPLAPDSPITLQSPHIEEEETTSIATARRGSPGQEEELPQGQPQSPNAPPSPSVGETLGDGINSSQTKPGGSSPPAHPSLPGDGLTAKASEKPPERVQKRSERVRRAEPPKPEVVDSTESIPVSDEDSDAMVDDPNDEDFVPFRPRRSPRMSLRSSVSQRAGRSAVGTKMTCAHCRTPLQKGQTAYQRKGLPQLFCSSSCLTTFSKKPSGKKTCTFCKKEIWNTKDSVVAQTGSGGSFHEFCTSVCLSLYEAQQQRPIPQSGDPADATRCSICQKTGEVLHEVSNGSVVHRLCSDSCFSKFRANKGLKTNCCDQCGAYIYTKTGSPGPELLFHEGQQKRFCNTTCLGAYKKKNTRVYPCVWCKTLCKNFEMLSHVDRNGKTSLFCSLCCTTSYKVKQAGLTGPPRPCSFCRRSLSDPCYYNKVDRTVYQFCSPSCWTKFQRTSPEGGIHLSCHYCHSLFSGKPEVLDWQDQVFQFCCRDCCEDFKRLRGVVSQCEHCRQEKLLHEKLRFSGVEKSFCSEGCVLLYKQDFTKKLGLCCITCTYCSQTCQRGVTEQLDGSTWDFCSEDCKSKYLLWYCKAARCHACKRQGKLLETIHWRGQIRHFCNQQCLLRFYSQQNQPNLDTQSGPESLLNSQSPESKPQTPSQTKVENSNTVRTPEENGNLGKIPVKTRSAPTAPTPPPPPPPATPRKNKAAMCKPLMQNRGVSCKVEMKSKGSQTEEWKPQVIVLPIPVPIFVPVPMHLYCQKVPVPFSMPIPVPVPMFLPTTLESTDKIVETIEELKVKIPSNPLEADILAMAEMIAEAEELDKASSDLCDLVSNQSAEGLLEDCDLFGPARDDVLAMAVKMANVLDEPGQDLEADFPKNPLDINPSVDFLFDCGLVGPEDVSTEQDLPRTMRKGQKRLVLSESCSRDSMSSQPSCTGLNYSYGVNAWKCWVQSKYANGETSKAKPMRIKEDILACSAAELNYGLAQFVREITRPNGERYEPDSIYYLCLGIQQYLLENNRMVNIFTDLYYLTFVQELNKSLSTWQPTLLPNNTGPGKRKREDEAPILEQRENRMNPLRCPVKFYEFYLSKCPESLRTRNDVFYLQPERSCIAESPLWYSVIPMDRSMLESMLNRILAVREIYEELGRPGEEDLD

SEQ ID NO: 9659 - protein, 1062 aa, Homo sapiens
QTHNSVIGVPIRETPILDDYDCEEDEEPPRRANHVSREDEFGSQVTHTLDSLGHPGEEKVDFEKKAAAEATQETVESLMQKFKESFRANTPIEIGQLQPPLRSTSAGKRKRRSKSRGGISFGRAKGTSGSEADDETQLTFYTEQYRSRRRSKGLLKSPVNKTALTLIAVSSCILAMVCGSQMSCPLTVKVTLHVPEHFIADGSSFVVSEGSYLDISDWLNPAKLSLYYQINATSPWVRDLCGQRTTDACEQLCDPETGECSCHEGYAPDPVHRHLCVRSDWGQSEGPWPYTTLERGYDLVTGEQAPEKILSLGQGLWLPVSKSFVVPPVELSINPLASCKTDVLVTEDPADVREEAMLSTYFETINDLLSSFGPVRDCSRNNGGCTRNFKCVSDRQVDSSGCVCPEELKPMKDGSGCYDHSKGIDCSDGFNGGCEQLCLQQTLPLPYDATSSTIFMFCGCVEEYKLAPDGKSCLMLSDVCEGPKCLKPDSKFNDTLFGEMLHGYNNRTQHVNQGQVFQMTFRENNFIKDFPQLADGLLVIPLPVEEQCRGVLSEPLPDLQLLTGDIRYDEAMGYPMVQQWRVRSNLYRVKLSTITLAAGFTNVLKILTKESSREELLSFIQHYGSHYIAEALYGSELTCIIHFPSKKVQQQLWLQYQKETTELGSKKELKSMPFITYLSGLLTAQMLSDDQLISGVEIRCEEKGRCPSTCHLCRRPGKEQLSPTPVLLEINRVVPLYTLIQDNGTKEAFKSALMSSYWCSGKGDVIDDWCRCDLSAFDANGLPNCSPLLQPVLRLSPTVEPSSTVVSLEWVDVQPAIGTKVSDYILQHKKVDEYTDTDLYTGEFLSFADDLLSGLGTSCVAAGRSHGEVPEVSIYSVIFKCLEPDGLYKFTLYAVDTRGRHSELSTVTLRTACPLVDDNKAEEIADKIYNLYNGYTSGKEQQMAYNTLMEVSASMLFRVQHHYNSHYEKFGDFVWRSEDELGPRKAHLILRRLERVSSHCSSLLRSAYIQSRVETVPYLFCRSEEVRPAGMVWYSILKDTKITCEEKMVSMARNTYGESKGR

SEQ ID NO: 9660 - protein, 1372 aa, Homo sapiens
MDPSDFPSPFDPLTLPEKPLAGDLPVDMEFGEDLLESQTAPTRGWAPPGPSPSSGALDLLDTPAGLEKDPGVLDGATELLGLGGLLYKAPSPPEVDHGPEGTLAWDAGDQTLEPGPGGQTPEVVPPDPGAGANSCSPEGLLEPLAPDSPITLQSPHIEEEETTSIATARRGSPGQEEELPQGQPQSPNAPPSPSVGETLGDGINSSQTKPGGSSPPAHPSLPGDGLTAKASEKPPERVQKRSERVRRAEPPKPEVVDSTESIPVSDEDSDAMVDDPNDEDFVPFRPRRSPRMSLRSSVSQRAGRSAVGTKMTCAHCRTPLQKGQTAYQRKGLPQLFCSSSCLTTFSKKPSGKKTCTFCKKEIWNTKDSVVAQTGSGGSFHEFCTSVCLSLYEAQQQRPIPQSGDPADATRCSICQKTGEVLHEVSNGSVVHRLCSDSCFSKFRANKGLKTNCCDQCGAYIYTKTGSPGPELLFHEGQQKRFCNTTCLGAYKKKNTRVYPCVWCKTLCKNFEMLSHVDRNGKTSLFCSLCCTTSYKVKQAGLTGPPRPCSFCRRSLSDPCYYNKVDRTVYQFCSPSCWTKFQRTSPEGGIHLSCHYCHSLFSGKPEVLDWQDQVFQFCCRDCCEDFKRLRGVVSQCEHCRQEKLLHEKLRFSGVEKSFCSEGCVLLYKQDFTKKLGLCCITCTYCSQTCQRGVTEQLDGSTWDFCSEDCKSKYLLWYCKAARCHACKRQGKLLETIHWRGQIRHFCNQQCLLRFYSQQNQPNLDTQSGPESLLNSQSPESKPQTPSQTKVENSNTVRTPEENGNLGKIPVKTRSAPTAPTPPPPPPPATPRKNKAAMCKPLMQNRGVSCKVEMKSKGSQTEEWKPQVIVLPIPVPIFVPVPMHLYCQKVPVPFSMPIPVPVPMFLPTTLESTDKIVETIEELKVKIPSNPLEADILAMAEMIAEAEELDKASSDLCDLVSNQSAEGLLEDCDLFGPARDDVLAMAVKMANVLDEPGQDLEADFPKNPLDINPSVDFLFDCGLVGPEDVSTEQDLPRTMRKGQKRLVLSESCSRDSMSSQPSCTGLNYSYGVNAWKCWVQSKYANGETSKGDELRFGPKPMRIKEDILACSAAELNYGLAQFVREITRPNGERYEPDSIYYLCLGIQQYLLENNRMVNIFTDLYYLTFVQELNKSLSTWQPTLLPNNTVFSRVEEEHLWECKQLGVYSPFVLLNTLMFFNTKFFGLQTAEEHMQLSFTNVVRQSRKCTTPRGTTKVVSIRYYAPVRQRKGRDTGPGKRKREDEAPILEQRENRMNPLRCPVKFYEFYLSKCPESLRTRNDVFYLQPERSCIAESPLWYSVIPMDRSMLESMLNRILAVREIYEELGRPGEEDLD

SEQ ID NO: 9661 - protein, 594 aa, Homo sapiens
MESNHKSGDGLSGTQKEAALRALVQRTGYSLVQENGQRKYGGPPPGWDAAPPERGCEIFIGKLPRDLFEDELIPLCEKIGKIYEMRMMMDFNGNNRGYAFVTFSNKVEAKNAIKQLNNYEIRNGRLLGVCASVDNCRLFVGGIPKTKKREEILSEMKKVTEGVVDVIVYPSAADKTKNRGFAFVEYESHRAAAMARRKLLPGRIQLWGHGIAVDWAEPEVEVDEDTMSSVKILYVRNLMLSTSEEMIEKEFNNIKPGAVERVKKIRDYAFVHFSNREDAVEAMKALNGKVLDGSPIEVTLAKPVDKDSYVRYTRGTGGRGTMLQGEYTYSLGQVYDPTTTYLGAPVFYAPQTYAAIPSLHFPATKGHLSNRAIIRAPSVREIYMNVPVGAAGVRGLGGRGYLAYTGLGRGYQVKGDKREDKLYDILPGMELTPMNPVTLKPQGIKLAPQILEEICQKNNWGQPVYQLHSAIGQDQRQLFLYKITIPALASQNPAIHPFTPPKLSAFVDEAKTYAAEYTLQTLGIPTDGGDGTMATAAAAATAFPGYAVPNATAPVSAAQLKQAVTLGQDLAAYTTYEVYPTFAVTARGDGYGTF

SEQ ID NO: 9662 - protein, 594 aa, Homo sapiens
MEAVCLGTCPEPEASMSTAIPGLKKGNNALQSIILQTLLEKENGQRKYGGPPPGWDAAPPERGCEIFIGKLPRDLFEDELIPLCEKIGKIYEMRMMMDFNGNNRGYAFVTFSNKVEAKNAIKQLNNYEIRNGRLLGVCASVDNCRLFVGGIPKTKKREEILSEMKKVTEGVVDVIVYPSAADKTKNRGFAFVEYESHRAAAMARRKLLPGRIQLWGHGIAVDWAEPEVEVDEDTMSSVKILYVRNLMLSTSEEMIEKEFNNIKPGAVERVKKIRDYAFVHFSNREDAVEAMKALNGKVLDGSPIEVTLAKPVDKDSYVRYTRGTGGRGTMLQGEYTYSLGQVYDPTTTYLGAPVFYAPQTYAAIPSLHFPATKGHLSNRAIIRAPSVRGAAGVRGLGGRGYLAYTGLGRGYQVKGDKREDKLYDILPGMELTPMNPVTLKPQGIKLAPQILEEICQKNNWGQPVYQLHSAIGQDQRQLFLYKITIPALASQNPAIHPFTPPKLSAFVDEAKTYAAEYTLQTLGIPTDGGDGTMATAAAAATAFPGYAVPNATAPVSAAQLKQAVTLGQDLAAYTTYEVYPTFAVTARGDGYGTF

SEQ ID NO: 9663 - protein, 1358 aa, Homo sapiens
MDPSDFPSPFDPLTLPEKPLAGDLPVDMEFGEDLLESQTAPTRGWAPPGPSPSSGALDLLDTPAGLEKDPGVLDGATELLGLGGLLYKAPSPPEVDHGPEGTLAWDAGDQTLEPGPGGQTPEVVPPDPGAGANSCSPEGLLEPLAPDSPITLQSPHIEEEETTSIATARRGSPGQEEELPQGQPQSPNAPPSPSVGETLGDGINSSQTKPGGSSPPAHPSLPGDGLTAKASEKPPERKRSERVRRAEPPKPEVVDSTESIPVSDEDSDAMVDDPNDEDFVPFRPRRSPRMSLRSSVSQRAGRSAVGTKMTCAHCRTPLQKGQTAYQRKGLPQLFCSSSCLTTFSKKPSGKKTCTFCKKEIWNTKDSVVAQTGSGGSFHEFCTSVCLSLYEAQQQRPIPQSGDPADATRCSICQKTGEVLHEVSNGSVVHRLCSDSCFSKFRANKGLKTNCCDQCGAYIYTKTGSPGPELLFHEGQQKRFCNTTCLGAYKKKNTRVYPCVWCKTLCKNFEMLSHVDRNGKTSLFCSLCCTTSYKVKQAGLTGPPRPCSFCRRSLSDPCYYNKVDRTVYQFCSPSCWTKFQRTSPEGGIHLSCHYCHSLFSGKPEVLDWQDQVFQFCCRDCCEDFKRLRGVVSQCEHCRQEKLLHEKLRFSGVEKSFCSEGCVLLYKQDFTKKLGLCCITCTYCSQTCQRGVTEQLDGSTWDFCSEDCKSKYLLWYCKAARCHACKRQGKLLETIHWRGQIRHFCNQQCLLRFYSQQNQPNLDTQSGPESLLNSQSPESKPQTPSQTKVENSNTIPVKTRSAPTAPTPPPPPPPATPRKNKAAMCKPLMQNRGVSCKVEMKSKGSQTEEWKPQVIVLPIPVPIFVPVPMHLYCQKVPVPFSMPIPVPVPMFLPTTLESTDKIVETIEELKVKIPSNPLEADILAMAEMIAEAEELDKASSDLCDLVSNQSAEGLLEDCDLFGPARDDVLAMAVKMANVLDEPGQDLEADFPKNPLDINPSVDFLFDCGLVGPEDVSTEQDLPRTMRKGQKRLVLSESCSRDSMSSQPSCTGLNYSYGVNAWKCWVQSKYANGETSKGDELRFGPKPMRIKEDILACSAAELNYGLAQFVREITRPNGERYEPDSIYYLCLGIQQYLLENNRMVNIFTDLYYLTFVQELNKSLSTWQPTLLPNNTVFSRVEEEHLWECKQLGVYSPFVLLNTLMFFNTKFFGLQTAEEHMQLSFTNVVRQSRKCTTPRGTTKVVSIRYYAPVRQRKGRDTGPGKRKREDEAPILEQRENRMNPLRCPVKFYEFYLSKCPESLRTRNDVFYLQPERSCIAESPLWYSVIPMDRSMLESMLNRILAVREIYEELGRPGEEDLD

SEQ ID NO: 9664 - protein, 549 aa, Homo sapiens
MTKHPPNRRGISFEVGAQLEARDRLKNWYPAHIEDIDYEEGKVLIHFKRWNHRYDEWFCWDSPYLRPLEKIQLRKEGLHEEDGSSEFQINEQVLACWSDCRFYPAKVTAVNKDGTYTVKFYDGVVQTVKHIHVKAFSKDQNIVGNARPKETDHKSLSSSPDKREKFKEQRKATVNVKKDKEDKPLKTEKRPKQPDKEGKLICSEKGKVSEKSLPKNEKEDKENISENDREYSGDAQVDKKPENDIVKSPQENLREPKRKRGRPPSIAPTAVDSNSQTLQPITLELRRRKISKGCEVPLKRPRLDKNSSQEKSKNYSENTDKDLSRRRSSRLSTNGTHEILDPDLVVSDLVDTDPLQDTLSSTKESEEGQLKSALEAGQVSSALTCHSFGDGSGAAGLELNCPSMGENTMKTEPTSPLVELQEISTVEVTNTFKKTDDFGSSNAPAVDLDHKFRCKVVDCLKFFRKAKLLHYHMKYFHGMEKSLEPEESPGKRHVQTRGPSASDKPSQETLTRKRVSASSPTTKDKEKNKEKKFKEFVRVKPKKKKKKKK

SEQ ID NO: 9665 - protein, 1012 aa, Homo sapiens
MTKHPPNRRGISFEVGAQLEARDRLKNWYPAHIEDIDYEEGKVLIHFKRWNHRYDEWFCWDSPYLRPLEKIQLRKEGLHEEDGSSEFQINEQVLACWSDCRFYPAKVTAVNKDGTYTVKFYDGVVQTVKHIHVKAFSKDQNIVGNARPKETDHKSLSSSPDKREKFKEQRKATVNVKKDKEDKPLKTEKRPKQPDKEGKLICSEKGKVSEKSLPKNEKEDKENISENDREYSGDAQVDKKPENDIVKSPQENLREPKRKRGRPPSIAPTAVDSNSQTLQPITLELRRRKISKGCEVPLKRPRLDKNSSQEKSKNYSENTDKDLSRRRSSRLSTNGTHEILDPDLVVSDLVDTDPLQDTLSSTKESEEGQLKSALEAGQVSSALTCHSFGDGSGAAGLELNCPSMGENTMKTEPTSPLVELQEISTVEVTNTFKKTDDFGSSNAPAVDLDHKFRCKVVDCLKFFRKAKLLHYHMKYFHGMEKSLEPEESPGKRHVQTRGPSASDKPSQETLTRKRVSASSPTTKDKEKNKEKKFKEFVRVKPKKKKKKKKKTKPECPCSEEISDTSQEPSPPKAFAVTRCGSSHKPGVHMSPQLHGPESGHHKGKVKALEEDNLSESSSESFLWSDDEYGQDVDVTTNPDEELDGDDRYDFEVVRCICEVQEENDFMIQCEECQCWQHGVCMGLLEENVPEKYTCYVCQDPPGQRPGFKYWYDKEWLSRGHMHGLAFLEENYSHQNAKKIVATHQLLGDVQRVIEVLHGLQLKMSILQSREHPDLPLWCQPWKQHSGEGRSHFRNIPVTDTRSKEEAPSYRTLNGAVEKPRPLALPLPRSVEESYITSEHCYQKPRAYYPAVEQKLVVETRGSALDDAVNPLHENGDDSLSPRLGWPLDQDRSKGDSDPKPGSPKVKEYVSKKALPEEAPARKLLDRGGEGLLSSQHQWQFNLLTHVESLQDEVTHRMDSIEKELDVLESWLDYTGELEPPEPLARLPQLKHCIKQLLMDLGKVQQIALCCST

SEQ ID NO: 9666 - protein, 173 aa, Homo sapiens
MEAPGPRALRTALCGGCCCLLLCAQLAVAGKGARGFGRGALIRLNIWPAVQGACKQLEVCEHCVEGDGARNLSSCVWEQCRPEEPGHCVAQSEVVKEGCSIYNRSEACPAAHHHPTYEPKTVTTGSPPVPEAHSPGFDGASFIGGVVLVLSLQAVAFFVLHFLKAKDSTYQTL

SEQ ID NO: 9667 - protein, 174 aa, Homo sapiens
MEAPGPRALRTALCGGCCCLLLCAQLAVAGKGARGFGRGALIRLNIWPAVQGACKQLEVCEHCVEGDGARNLSSCVWEQCRPEEPGHCVAQSEVVKEGCSIYNRSEACPAAHHHPTYEPKTVTTGSPPVPEAHSPGFDGASFIGGVVLVLSLQAVAFFVLHFLKAKDSTYQTLI

SEQ ID NO: 9668 - protein, 174 aa, Homo sapiens
MRHFLSKVYSFPMRKLILFLVFPVVRQTPTQHFKNQFPALHWEHELGLAFTKNRMNYTNKFLLIPESGDYFIYSQVTFRGMTSECSEIRQAGRPNKPDSITVVITKVTDSYPEPTQLLMGTKSVCEVGSNWFQPIYLGAMFSLQEGDKLMVNVSDISLVDYTKEDKTFFGAFLL

SEQ ID NO: 9669 - protein, 828 aa, Homo sapiens
MWLRLGPPSLSLSPKPTVGRSLCLTLWFLSLALRASTQAPAPTVNTHFGKLRGARVPLPSEILGPVDQYLGVPYAAPPIGEKRFLPPEPPPSWSGIRNATHFPPVCPQNIHTAVPEVMLPVWFTANLDIVATYIQEPNEDCLYLNVYVPTEDGSGAKKQGEDLADNDGDEDEDIRDSGAKPVMVYIHGGSYMEGTGNMIDGSILASYGNVIVITLNYRVGVLGFLSTGDQAAKGNYGLLDQIQALRWVSENIAFFGGDPRRITVFGSGIGASCVSLLTLSHHSEGLFQRAIIQSGSALSSWAVNYQPVKYTSLLADKVGCNVLDTVDMVDCLRQKSAKELVEQDIQPARYHVAFGPVIDGDVIPDDPEILMEQGEFLNYDIMLGVNQGEGLKFVEGVVDPEDGVSGTDFDYSVSNFVDNLYGYPEGKDTLRETIKFMYTDWADRDNPETRRKTLVALFTDHQWVEPSVVTADLHARYGSPTYFYAFYHHCQSLMKPAWSDAAHGDEVPYVFGVPMVGPTDLFPCNFSKNDVMLSAVVMTYWTNFAKTGDPNKPVPQDTKFIHTKANRFEEVAWSKYNPRDQLYLHIGLKPRVRDHYRATKVAFWKHLVPHLYNLHDMFHYTSTTTKVPPPDTTHSSHITRRPNGKTWSTKRPAISPAYSNENAQGSWNGDQDAGPLLVENPRDYSTELSVTIAVGASLLFLNVLAFAALYYRKDKRRQEPLRQPSPQRGAGAPELGAAPEEELAALQLGPTHHECEAGPPHDTLRLTALPDYTLTLRRSPDDIPLMTPNTITMIPNSLVGLQTLHPYNTFAAGFNSTGLPHSHSTTRV

SEQ ID NO: 9670 - protein, 1358 aa, Homo sapiens
MLRSEWPVFPEAEAEDVDSPASSHEPLAWLPQQGRQLDMTEEEPDGTLGSLEVEEAGESSSRLGYEAGLSLEGHGNTSPMALGHGQARGWVASGEQASGDKLSEHSEVNPSVELSPARSWSSGTVSLDHPSDSLDSTWEGETDGPQPTALAETLPEGPSHHLLSPDGRTGGSVARATPMEFQDSSAPPAQSPQHATDRWRRETTRFFCPQPKEHIWKQTKTSPKPLPSRFIGSISPLNPQPRPTRQGRPLPRQGATLAGRSSSNAPKYGRGQLNYPLPDFSKVGPRVRFPKDESYRPPKSRSHNRKPQAPARPLIFKSPAEIVQEVLLSSGEAALAKDTPPAHPITRVPQEFQTPEQATELVHQLQEDYHRLLTKYAEAENTIDQLRLGAKVNLFSDPPQPNHSIHTGMVPQGTKVLSFTIPQPRSAEWWPGPAEDPQASAASGWPSARGDLSPSSLTSMPTLGWLPENRDISEDQSSAEQTQALASQASQFLAKVESFERLIQAGRLMPQDQVKGFQRLKAAHAALEEEYLKACREQHPAQPLAGSKGTPGRFDPRRELEAEIYRLGSCLEELKEHIDQTQQEPEPPGSDSALDSTPALPCLHQPTHLPAPSGQAPMPAIKTSCPEPATTTAAASTGPCPLHVNVEVSSGNSEVEDRPQDPLARLRHKELQMEQVYHGLMERYLSVKSLPEAMRMEEEEEGEEEEEEEGGGDSLEVDGVAATPGKAEATRVLPRQCPVQAEKSHGAPLEEATEKMVSMKPPGFQASLARDGHMSGLGKAEAAPPGPGVPPHPPGTKSAASHQSSMTSLEGSGISERLPQKPLHRGGGPHLEETWMASPETDSGFVGSETSRVSPLTQTPEHRLSHISTAGTLAQPFAASVPRDGASYPKARGSLIPRRATEPSTPRSQAQRYLSSPSGPLRQRAPNFSLERTLAAEMAVPGSEFEGHKRISEQPLPNKTISPPPAPAPAAAPLPCGPTETIPSFLLTRAGRDQAICELQEEVSRLRLRLEDSLHQPLQGSPTRPASAFDRPARTRGRPADSPATWGSHYGSKSTERLPGEPRGEEQIVPPGRQRARSSSVPREVLRLSLSSESELPSLPLFSEKSKTTKDSPQAARDGKRGVGSAGWPDRVTFRGQYTGHEYHVLSPKAVPKGNGTVSCPHCRPIRTQDAGGAVTGDPLGPPPADTLQCPLCGQVGSPPEADGPGSATSGAEKATTRRKASSTPSPKQRSKQAGSSPRPPPGLWYLATAPPAPAPPAFAYISSVPIMPYPPAAVYYAPAGPTSAQPAAKWPPTASPPPARRHRHSIQLDLGDLEELNKALSRAVQAAESVRSTTRQMRSSLSADLRQAHSLRGSCLF

SEQ ID NO: 9671 - protein, 384 aa, Homo sapiens
MSAGGGTRGYSPRSPGATSQAICELQEEVSRLRLRLEDSLHQPLQGSPTRPASAFDRPARTRGRPADSPATWGSHYGSKSTERLPGEPRGEEQIVPPGRQRARSSSVPREVLRLSLSSESELPSLPLFSEKSKTTKDSPQAARDGKRGVGSAGWPDRVTFRGQYTGHEYHVLSPKAVPKGNGTVSCPHCRPIRTQDAGGAVTGDPLGPPPADTLQCPLCGQVGSPPEADGPGSATSGAEKATTRRKASSTPSPKQRSKQAGSSPRPPPGLWYLATAPPAPAPPAFAYISSVPIMPYPPAAVYYAPAGPTSAQPAAKWPPTASPPPARRHRHSIQLDLGDLEELNKALSRAVQAAESVRSTTRQMRSSLSADLRQAHSLRGSCLF

SEQ ID NO: 9672 - protein, 2177 aa, Homo sapiens
MAAFGILSYEHRPLKRPRLGPPDVYPQDPKQKEDELTALNVKQGFNNQPAVSGDEHGSAKNVSFNPAKISSNFSSIIAEKLRCNTLPDTGRRKPQVNQKDNFWLVTARSQSAINTWFTDLAGTKPLTQLAKKVPIFSKKEEVFGYLAKYTVPVMRAAWLIKMTCAYYAAISETKVKKRHVDPFMEWTQIITKYLWEQLQKMAEYYRPGPAGSGGCGSTIGPLPHDVEVAIRQWDYTEKLAMFMFQDGMLDRHEFLTWVLECFEKIRPGEDELLKLLLPLLLRYSGEFVQSAYLSRRLAYFCTRRLALQLDGVSSHSSHVISAQSTSTLPTTPAPQPPTSSTPSTPFSDLLMCPQHRPLVFGLSCILQTILLCCPSALVWHYSLTDSRIKTGSPLDHLPIAPSNLPMPEGNSAFTQQVRAKLREIEQQIKERGQAVEVRWSFDKCQEATAGFTIGRVLHTLEVLDSHSFERSDFSNSLDSLCNRIFGLGPSKDGHEISSDDDAVVSLLCEWAVSCKRSGRHRAMVVAKLLEKRQAEIEAERCGESEAADEKGSIASGSLSAPSAPIFQDVLLQFLDTQAPMLTDPRSESERVEFFNLVLLFCELIRHDVFSHNMYTCTLISRGDLAFGAPGPRPPSPFDDPADDPEHKEAEGSSSSKLEDPGLSESMDIDPSSSVLFEDMEKPDFSLFSPTMPCEGKGSPSPEKPDVEKEVKPPPKEKIEGTLGVLYDQPRHVQYATHFPIPQEESCSHECNQRLVVLFGVGKQRDDARHAIKKITKDILKVLNRKGTAETDQLAPIVPLNPGDLTFLGGEDGQKRRRNRPEAFPTAEDIFAKFQHLSHYDQHQVTAQVSRNVLEQITSFALGMSYHLPLVQHVQFIFDLMEYSLSISGLIDFAIQLLNELSVVEAELLLKSSDLVGSYTTSLCLCIVAVLRHYHACLILNQDQMAQVFEGLCGVVKHGMNRSDGSSAERCILAYLYDLYTSCSHLKNKFGELFSDFCSKVKNTIYCNVEPSESNMRWAPEFMIDTLENPAAHTFTYTGLGKSLSENPANRYSFVCNALMHVCVGHHDPDRVNDIAILCAELTGYCKSLSAEWLGVLKALCCSSNNGTCGFNDLLCNVDVSDLSFHDSLATFVAILIARQCLLLEDLIRCAAIPSLLNAACSEQDSEPGARLTCRILLHLFKTPQLNPCQSDGNKPTVGIRSSCDRHLLAASQNRIVDGAVFAVLKAVFVLGDAELKGSGFTVTGGTEELPEEEGGGGSGGRRQGGRNISVETASLDVYAKYVLRSICQQEWVGERCLKSLCEDSNDLQDPVLSSAQAQRLMQLICYPHRLLDNEDGENPQRQRIKRILQNLDQWTMRQSSLELQLMIKQTPNNEMNSLLENIAKATIEVFQQSAETGSSSGSTASNMPSSSKTKPVLSSLERSGVWLVAPLIAKLPTSVQGHVLKAAGEELEKGQHLGSSSRKERDRQKQKSMSLLSQQPFLSLVLTCLKGQDEQREGLLTSLYSQVHQIVNNWRDDQYLDDCKPKQLMHEALKLRLNLVGGMFDTVQRSTQQTTEWAMLLLEIIISGTVDMQSNNELFTTVLDMLSVLINGTLAADMSSISQGSMEENKRAYMNLAKKLQKELGERQSDSLEKVRQLLPLPKQTRDVITCEPQGSLIDTKGNKIAGFDSIFKKEGLQVSTKQKISPWDLFEGLKPSAPLSWGWFGTVRVDRRVARGEEQQRLLLYHTHLRPRPRAYYLEPLPLPPEDEEPPAPTLLEPEKKAPEPPKTDKPGAAPPSTEERKKKSTKGKKRSQPATKTEDYGMGPGRSGPYGVTVPPDLLHHPNPGSITHLNYRQGSIGLYTQNQPLPAGGPRVDPYRPVRLPMQKLPTRPTYPGVLPTTMTGVMGLEPSSYKTSVYRQQQPAVPQGQRLRQQLQQSQGMLGQSSVHQMTPSSSYGLQTSQGYTPYVSHVGLQQHTGPAGTMVPPSYSSQPYQSTHPSTNPTLVDPTRHLQQRPSGYVHQQAPTYGHGLTSTQRFSHQTLQQTPMISTMTPMSAQGVQAGVRSTAILPEQQQQQQQQQQQQQQQQQQQQQQQQQQYHIRQQQQQQILRQQQQQQQQQQQQQQQQQQQQQQQQQQHQQQQQQQAAPPQPQPQSQPQFQRQGLQQTQQQQQTAALVRQLQQQLSNTQPQPSTNIFGRY

SEQ ID NO: 9673 - protein, 2176 aa, Homo sapiens
MAAFGILSYEHRPLKRPRLGPPDVYPQDPKQKEDELTALNVKQGFNNQPAVSGDEHGSAKNVSFNPAKISSNFSSIIAEKLRCNTLPDTGRRKPQVNQKDNFWLVTARSQSAINTWFTDLAGTKPLTQLAKKVPIFSKKEEVFGYLAKYTVPVMRAAWLIKMTCAYYAAISETKVKKRHVDPFMEWTQIITKYLWEQLQKMAEYYRPGPAGSGGCGSTIGPLPHDVEVAIRQWDYTEKLAMFMFQDGMLDRHEFLTWVLECFEKIRPGEDELLKLLLPLLLRYSGEFVQSAYLSRRLAYFCTRRLALQLDGVSSHSSHVISAQSTSTLPTTPAPQPPTSSTPSTPFSDLLMCPQHRPLVFGLSCILQTILLCCPSALVWHYSLTDSRIKTGSPLDHLPIAPSNLPMPEGNSAFTQQVRAKLREIEQQIKERGQAVEVRWSFDKCQEATAGFTIGRVLHTLEVLDSHSFERSDFSNSLDSLCNRIFGLGPSKDGHEISSDDDAVVSLLCEWAVSCKRSGRHRAMVVAKLLEKRQAEIEAERCGESEAADEKGSIASGSLSAPSAPIFQDVLLQFLDTQAPMLTDPRSESERVEFFNLVLLFCELIRHDVFSHNMYTCTLISRGDLAFGAPGPRPPSPFDDPADDPEHKEAEGSSSSKLEDPGLSESMDIDPSSSVLFEDMEKPDFSLFSPTMPCEGKGSPSPEKPDVEKEVKPPPKEKIEGTLGVLYDQPRHVQYATHFPIPQEESCSHECNQRLVVLFGVGKQRDDARHAIKKITKDILKVLNRKGTAETDQLAPIVPLNPGDLTFLGGEDGQKRRRNRPEAFPTAEDIFAKFQHLSHYDQHQVTAQVSRNVLEQITSFALGMSYHLPLVQHVQFIFDLMEYSLSISGLIDFAIQLLNELSVVEAELLLKSSDLVGSYTTSLCLCIVAVLRHYHACLILNQDQMAQVFEGLCGVVKHGMNRSDGSSAERCILAYLYDLYTSCSHLKNKFGELFSDFCSKVKNTIYCNVEPSESNMRWAPEFMIDTLENPAAHTFTYTGLGKSLSENPANRYSFVCNALMHVCVGHHDPDRVNDIAILCAELTGYCKSLSAEWLGVLKALCCSSNNGTCGFNDLLCNVDVSDLSFHDSLATFVAILIARQCLLLEDLIRCAAIPSLLNAACSEQDSEPGARLTCRILLHLFKTPQLNPCQSDGNKPTVGIRSSCDRHLLAASQNRIVDGAVFAVLKAVFVLGDAELKGSGFTVTGGTEELPEEEGGGGSGGRRQGGRNISVETASLDVYAKYVLRSICQQEWVGERCLKSLCEDSNDLQDPVLSSAQAQRLMQLICYPHRLLDNEDGENPQRQRIKRILQNLDQWTMRQSSLELQLMIKQTPNNEMNSLLENIAKATIEVFQQSAETGSSSGSTASNMPSSSKTKPVLSSLERSGVWLVAPLIAKLPTSVQGHVLKAAGEELEKGQHLGSSSRKERDRQKQKSMSLLSQQPFLSLVLTCLKGQDEQREGLLTSLYSQVHQIVNNWRDDQYLDDCKPKQLMHEALKLRLNLVGGMFDTVQRSTQQTTEWAMLLLEIIISGTVDMQSNNELFTTVLDMLSVLINGTLAADMSSISQGSMEENKRAYMNLAKKLQKELGERQSDSLEKVRQLLPLPKQTRDVITCEPQGSLIDTKGNKIAGFDSIFKKEGLQVSTKQKISPWDLFEGLKPSAPLSWGWFGTVRVDRRVARGEEQQRLLLYHTHLRPRPRAYYLEPLPLPPEDEEPPAPTLLEPEKKAPEPPKTDKPGAAPPSTEERKKKSTKGKKRSQPATKTEDYGMGPGRSGPYGVTVPPDLLHHPNPGSITHLNYRQGSIGLYTQNQPLPAGGPRVDPYRPVRLPMQKLPTRPTYPGVLPTTMTGVMGLEPSSYKTSVYRQQQPAVPQGQRLRQQLQSQGMLGQSSVHQMTPSSSYGLQTSQGYTPYVSHVGLQQHTGPAGTMVPPSYSSQPYQSTHPSTNPTLVDPTRHLQQRPSGYVHQQAPTYGHGLTSTQRFSHQTLQQTPMISTMTPMSAQGVQAGVRSTAILPEQQQQQQQQQQQQQQQQQQQQQQQQQQYHIRQQQQQQILRQQQQQQQQQQQQQQQQQQQQQQQQQQHQQQQQQQAAPPQPQPQSQPQFQRQGLQQTQQQQQTAALVRQLQQQLSNTQPQPSTNIFGRY

SEQ ID NO: 9674 - protein, 1010 aa, Homo sapiens
MSQLRLLPSRLGVQAARLLAAHDVPVFGWRSRSSGPPATFPSSKGGGGSSYMEEMYFAWLENPQSVHKSWDSFFREASEEAFSGSAQPRPPSVVHESRSAVSSRTKTSKLVEDHLAVQSLIRAYQIRGHHVAQLDPLGILDADLDSFVPSDLITTIDKLAFYDLQEADLDKEFQLPTTTFIGGSENTLSLREIIRRLENTYCQHIGLEFMFINDVEQCQWIRQKFETPGVMQFSSEEKRTLLARLVRSMRFEDFLARKWSSEKRFGLEGCEVMIPALKTIIDKSSEMGIENVILGMPHRGRLNVLANVIRKDLEQIFCQFDPKLEAADEGSGDVKYHLGMYHERINRVTNRNITLSLVANPSHLEAVDPVVQGKTKAEQFYRGDAQGKKVMSILVHGDAAFAGQGVVYETFHLSDLPSYTTNGTVHVVVNNQIGFTTDPRMARSSPYPTDVARVVNAPIFHVNADDPEAVIYVCSVAAEWRNTFNKDVVVDLVCYRRRGHNEMDEPMFTQPLMYKQIHRQVPVLKKYADKLIAEGTVTLQEFEEEIAKYDRICEEAYGRSKDKKILHIKHWLDSPWPGFFNVDGEPKSMTCPATGIPEDMLTHIGSVASSVPLEDFKIHTGLSRILRGRADMTKNRTVDWALAEYMAFGSLLKEGIHVRLSGQDVERGTFSHRHHVLHDQEVDRRTCVPMNHLWPDQAPYTVCNSSLSEYGVLGFELGYAMASPNALVLWEAQFGDFHNTAQCIIDQFISTGQAKWVRHNGIVLLLPHGMEGMGPEHSSARPERFLQMSNDDSDAYPAFTKDFEVSQLYDCNWIVVNCSTPANYFHVLRRQILLPFRKPLIIFTPKSLLRHPEAKSSFDQMVSGTSFQRVIPEDGAAARAPEQVQRLIFCTGKVYYDLVKERSSQDLEEKVAITRLEQISPFPFDLIKQEAEKYPGAELAWCQEEHKNMGYYDYISPRFMTILRRARPIWYVGRDPAAAPATGNRNTHLVSLKKFLDTAFNLQAFEGKTF

SEQ ID NO: 9675 - protein, 532 aa, Homo sapiens
MESAEPAGQARAAATKLSEAVGAALQEPRRQRRLVLVIVCVALLLDNMLYMVIVPIVPDYIAHMRGGGEGPTRTPEVWEPTLPLPTPANASAYTANTSASPTAAWPAGSALRPRYPTESEDVKIGVLFASKAILQLLVNPLSGPFIDRMSYDVPLLIGLGVMFASTVLFAFAEDYATLFAARSLQGLGSAFADTSGIAMIADKYPEEPERSRALGVALAFISFGSLVAPPFGGILYEFAGKRVPFLVLAAVSLFDALLLLAVAKPFSAAARARANLPVGTPIHRLMLDPYIAVVAGALTTCNIPLAFLEPTIATWMKHTMAASEWEMGMAWLPAFVPHVLGVYLTVRLAARYPHLQWLYGALGLAVIGASSCIVPACRSFAPLVVSLCGLCFGIALVDTALLPTLAFLVDVRHVSVYGSVYAIADISYSVAYALGPIVAGHIVHSLGFEQLSLGMGLANLLYAPVLLLLRNVGLLTRSRSERDVLLDEPPQGLYDAVRLRERPVSGQDGEPRSPPGPFDACEDDYNYYYTRS

SEQ ID NO: 9676 - protein, 519 aa, Homo sapiens
MFETEADEKREMALEEGKGPGAEDSPPSKEPSPGQELPPGQDLPPNKDSPSGQEPAPSQEPLSSKDSATSEGSPPGPDAPPSKDVPPCQEPPPAQDLSPCQDLPAGQEPLPHQDPLLTKDLPAIQESPTRDLPPCQDLPPSQVSLPAKALTEDTMSSGDLLAATGDPPAAPRPAFVIPEVRLDSTYSQKAGAEQGCSGDEEDAEEAEEVEEGEEGEEDEDEDTSDDNYGERSEAKRSSMIETGQGAEGGLSLRVQNSLRRRTHSEGSLLQEPRGPCFASDTTLHCSDGEGAASTWGMPSPSTLKKELGRNGGSMHHLSLFFTGHRKMSGADTVGDDDEASRKRKSKNLAKDMKNKLGIFRRRNESPGAPPAGKADKMMKSFKPTSEEALKWGESLEKLLVHKYGLAVFQAFLRTEFSEENLEFWLACEDFKKVKSQSKMASKAKKIFAEYIAIQACKEVNLDSYTREHTKDNLQSVTRGCFDLAQKRIFGLMEKDSYPRFLRSDLYLDLINQKKMSPPL

SEQ ID NO: 9677 - protein, 1435 aa, Homo sapiens
MMQGNKKCTDAFSDSSSIGSVLDDADREVSSLTDRAFRSLCISEDTSFHDSYLAVSPDITRQVFGTFHQRTVGHTQRKSGIWSQLPSQGTEHSGWAATFQQLPKYVQGEEKYPKTSPPPTPVQRRLEVPVSGLRSSNKPVSKVSTLIKSFDRTESQRCESRPTASKPPALKNPPKFAPLPENSVNFCFDSAFLTVRRVPAEVSNTHQNSYQPGRKHGEQESSKNPEMACHGSSSFLPAANDTATLCESKFPSPHHKPVTGEPGRGKGTFLHSENSAFESWNAHQPKLLERKDTAGTVPESKAPKHYGDTTLLREPCPPERTVSPCQVQASCSQEENRLAAGALSTSIPWGCRDPGAQVFAVEGKAPSSQPDSQEKPAQPPWRKPKTGKKGKESLQDTLEEKTQTNQRGPPLYTKHNPQEQFSENNALDLPVEPNEHYDPPFNISKLLTPIIPSKHALDSADSQPAERTPSPPGQLNGYQEKEPSECQSRDSYKSKAPSLLFNLKDVRKRVKSTYSSSPLLKVLDEKTRGKVDGKQEPVSNGVILPNGLEESPPNELSKERPADDPTASHINPQKDPTADPSEPSADSYLTLSTAPTIAKAPFYVNGEAAERSSYENKEVEGELEMGPAGSSWCPDSREHRPRKHLSLRLCNRDPEPGGATEKMKTHQLENGLSRSVSQETEPEREAGLQNTHLNQKFFPGPLSPEEEDVFYSDSQSDFMPSLKGKAKFSTSSSDQSFASFDDQQKMWFTENQREDRRKDVSAGDSQKDEKENVMRKDELQYCALSNGHACLENRSQGEALQRERESVSGGRTRKASAEEANFRGSWIGENKGTTFSQAKDLTPSPSSASNRHMLFTIKDNTLRATPVIKPIMLPLLRTMSLEDSLSSGHKEEELPRPEWGEDPGFCAPENQDILGTSTPTNTRGTRVKCMANEVMEDPGQGSSMARMEASQPAPKGNFPSMPLVGEGDRVKAPPDAAPGLVASNCKSGSADSGKLAAPWHIPTIALPEGDIEDQPPPWQPENCWEEQTPGFKSHFLSTPRAGPPGRRLVPSERANSPNPGSPGESSACSPAASNIWEESSQAPGGPELLPEEPNQASPWASSSPARVTRREDLTHALVWEGGSDPLLELSAEDLRTLSPRGSLLDVATSPAGTSGRLELPAQLERTASKPPAVPPKTEKALRRAKKLASKRRKTDQAQEKHGESQEGKPCPEDLEQTQQRPLCPRERPRHNFPVVRSLPPPVHRHSVSGFSEPVGRRPGGPQSLTPLPAYPATQKVLQDPQSGEYFVFDLPLQVKIKTFYDPETGKYVKVSIPSSEGASPEPPPPDALAAPYVLYPGFQPVPVTALMPLRCSSQLSAPTFLRQGPRASAARARTQSVHESGLQLDPGPHGDCTPHSAGQRPHGPPQSPGEEGVEAPGLGIISTDDLEDFATEGIS

SEQ ID NO: 9678 - protein, 1902 aa, Homo sapiens
MDQMGKMRPQPYGGTNPYSQQQGPPSGPQQGHGYPGQPYGSQTPQRYPMTMQGRAQSAMGGLSYTQQIPPYGQQGPSGYGQQGQTPYYNQQSPHPQQQQPPYSQQPPSQTPHAQPSYQQQPQSQPPQLQSSQPPYSQQPSQPPHQQSPAPYPSQQSTTQQHPQSQPPYSQPQAQSPYQQQQPQQPAPSTLSQQAAYPQPQSQQSQQTAYSQQRFPPPQELSQDSFGSQASSAPSMTSSKGGQEDMNLSLQSRPSSLPDLSGSIDDLPMGTEGALSPGVSTSGISSSQGEQSNPAQSPFSPHTSPHLPGIRGPSPSPVGSPASVAQSRSGPLSPAAVPGNQMPPRPPSGQSDSIMHPSMNQSSIAQDRGYMQRNPQMPQYSSPQPGSALSPRQPSGGQIHTGMGSYQQNSMGSYGPQGGQYGPQGGYPRQPNYNALPNANYPSAGMAGGINPMGAGGQMHGQPGIPPYGTLPPGRMSHASMGNRPYGPNMANMPPQVGSGMCPPPGGMNRKTQETAVAMHVAANSIQNRPPGYPNMNQGGMMGTGPPYGQGINSMAGMINPQGPPYSMGGTMANNSAGMAASPEMMGLGDVKLTPATKMNNKADGTPKTESKSKKSSSSTTTNEKITKLYELGGEPERKMWVDRYLAFTEEKAMGMTNLPAVGRKPLDLYRLYVSVKEIGGLTQVNKNKKWRELATNLNVGTSSSAASSLKKQYIQCLYAFECKIERGEDPPPDIFAAADSKKSQPKIQPPSPAGSGSMQGPQTPQSTSSSMAEGGDLKPPTPASTPHSQIPPLPGMSRSNSVGIQDAFNDGSDSTFQKRNSMTPNPGYQPSMNTSDMMGRMSYEPNKDPYGSMRKAPGSDPFMSSGQGPNGGMGDPYSRAAGPGLGNVAMGPRQHYPYGGPYDRVRTEPGIGPEGNMSTGAPQPNLMPSNPDSGMYSPSRYPPQQQQQQQQRHDSYGNQFSTQGTPSGSPFPSQQTTMYQQQQQNYKRPMDGTYGPPAKRHEGEMYSVPYSTGQGQPQQQQLPPAQPQPASQQQAAQPSPQQDVYNQYGNAYPATATAATERRPAGGPQNQFPFQFGRDRVSAPPGTNAQQNMPPQMMGGPIQASAEVAQQGTMWQGRNDMTYNYANRQSTGSAPQGPAYHGVNRTDEMLHTDQRANHEGSWPSHGTRQPPYGPSAPVPPMTRPPPSNYQPPPSMQNHIPQVSSPAPLPRPMENRTSPSKSPFLHSGMKMQKAGPPVPASHIAPAPVQPPMIRRDITFPPGSVEATQPVLKQRRRLTMKDIGTPEAWRVMMSLKSGLLAESTWALDTINILLYDDNSIMTFNLSQLPGLLELLVEYFRRCLIEIFGILKEYEVGDPGQRTLLDPGRFSKVSSPAPMEGGEEEEELLGPKLEEEEEEEVVENDEEIAFSGKDKPASENSEEKLISKFDKLPVKIVQKNDPFVVDCSDKLGRVQEFDSGLLHWRIGGGDTTEHIQTHFESKTELLPSRPHAPCPPAPRKHVTTAEGTPGTTDQEGPPPDGPPEKRITATMDDMLSTRSSTLTEDGAKSSEAIKESSKFPFGISPAQSHRNIKILEDEPHSKDETPLCTLLDWQDSLAKRCVCVSNTIRSLSFVPGNDFEMSKHPGLLLILGKLILLHHKHPERKQAPLTYEKEEEQDQGVSCNKVEWWWDCLEMLRENTLVTLANISGQLDLSPYPESICLPVLDGLLHWAVCPSAEAQDPFSTLGPNAVLSPQRLVLETLSKLSIQDNNVDLILATPPFSRLEKLYSTMVRFLSDRKNPVCREMAVVLLANLAQGDSLAARAIAVQKGSIGNLLGFLEDSLAATQFQQSQASLLHMQNPPFEPTSVDMMRRAARALLALAKVDENHSEFTLYESRLLDISVSPLMNSLVSQVICDVLFLIGQS

SEQ ID NO: 9679 - protein, 607 aa, Homo sapiens
MAEEGAILKVTKDLRAAVSAILQGYGDGQGPVTDTSAELHRLCGCLELLLQFDQKEQKSFLGPRKDYWDFLCTALRRQRGNMEPIHFVRSQDKLKTPLGKGRAFIRFCLARGQLAEALQLCLLNSELTREWYGPRSPLLCPERQEDILDSLYALNGVAFELDLQQPDLDGAWPMFSESRCSSSTQTQGRRPRKNKDAPKKVPLPCLHSELPLPHLLGILKIPAAYGGPENVQIEDSHTSQAICLQDAPSGQQLAGLPRSQQQRHLPFFLEKKGESSRKHRYPQSMWEPEGKELQLDQEERAPWIEIFLGNSTPSTQGQGKGAMGTQKEVIGMEAEVTGVLLVAEGQRTTEGTHKKEAEWSHVQRLLMPSPRGAVEGAVSGSRQGSGGSSILGEPWVLQGHATKEDSTVENPQVQTEVTLVARREEQAEVSLQDEIKSLRLGLRKAEEQAQRQEQLLREQEGELQALREQLSRCQEERAELQAQLEQKQQEAERRDAMYQEELGGQRDLVQAMKRRVLELIQEKDRLWQRLQHLSSMAPECCVACSKIFGRFSRRYPCSARTSLGREESEPPGEAAMWRWRLWRGRASGHPSGEGRPPETNQGHSTGR

SEQ ID NO: 9680 - protein, 261 aa, Homo sapiens
MVKGEKGPKGKKITLKVARNCIKITFDGKKRLDLSKMGITTFPKCILRLSDMDELDLSRNLIRKIPDSISKFQNLRWLDLHSNYIDKLPESIGQMTSLLYLNVSNNRLTSNGLPVELKQLKNIRAVNLGLNHLDSVPTTLGALKELHEVGLHDNLLNNIPVSISKLPKLKKLNIKRNPFPKPGESEIFIDSIRRLENLYVVEEKDLCAACLRKCQNARDNLNRIKNMATTTPRKTIFPNLISPNSMAKDSWEDWRIRLTSS

SEQ ID NO: 9681 - protein, 147 aa, Homo sapiens
MAERPEDLNLPNAVITRIIKEALPDGVNISKEARSAISRAASVFVLYATSCANNFAMKGKRKTLNASDVLSAMEEMEFQRFVTPLKEALEAYRREQKGKKEASEQKKKDKDKKTDSEEQDKSRDEDNDEDEERLEEEEQNEEEEVDN

SEQ ID NO: 9682 - protein, 539 aa, Homo sapiens
MGLCCCKDWRGHLRAPKGGAGEREKVPANPEALLLMASSQRDMEDWVQAIRRVIWAPLGGGIFGQRLEETVHHERKYGPRLAPLLVEQCVDFIRERGLTEEGLFRMPGQANLVRDLQDSFDCGEKPLFDRFLDEVQAYSNVNKMSVQNLATVFGPNILRPQVEDPVTIMEGTSLVQHLMTVLIRKHSQLFTAPVPEGPTSPRGGLQCAVGWGSEEVTRDSQGEPGGPGLPAHRTSSLDGAAVAVLSRTAPTGPGSRCSPGKKVQTLPSWKSSFRQPRSLSGSPKGGGSSLEVPIISSGGNWLMNGLSSLRGHRRASSGDRLKDSGSVQRLSTYDNVPAPGLVPGIPSVASMAWSGASSSESSVGGSLSSCTACRASDSSARSSLHTDWALEPSPLPSSSEDPKSLDLDHSMDEAGAGASNSEPSEPDSPTREHARRSEALQGLVTELRAELCRQRTEYERSVKRIEEGSADLRKRMSRLEEELDQEKKKYIMLEIKLRNSERAREDAERRNQLLQREMEEFFSTLGSLTVGAKGARAPK

SEQ ID NO: 9683 - protein, 589 aa, Homo sapiens
MASSQRDMEDWVQAIRRVIWAPLGGGTARRSHAHPLEPLPPGIFGQRLEETVHHERKYGPRLAPLLVEQCVDFIRERGLTEEGLFRMPGQANLVRDLQDSFDCGEKPLFDSTTDVHTVASLLKLYLRELPEPVVPFARYEDFLSCAQLLTKDEGEGTLELAKQVSNLPQANYNLLRYICKFLDEVQAYSNVNKMSVQNLATVFGPNILRPQVEDPVTIMEGTSLVQHLMTVLIRKHSQLFTAPVPEGPTSPRGGLQCAVGWGSEEVTRDSQGEPGGPGLPAHRTSSLDGAAVAVLSRTAPTGPGSRCSPGKKVQTLPSWKSSFRQPRSLSGSPKGGGSSLEVPIISSGGNWLMNGLSSLRGHRRASSGDRLKDSGSVQRLSTYDNVPAPGLVPGIPSVASMAWSGASSSESSVGGSLSSCTACRASDSSARSSLHTDWALEPSPLPSSSEDPKSLDLDHSMDEAGAGASNSEPSEPDSPTREHARRSEALQGLVTELRAELCRQRTEYERSVKRIEEGSADLRKRMSRLEEELDQEKKKYIMLEIKLRNSERAREDAERRNQLLQREMEEFFSTLGSLTVGAKGARAPK

SEQ ID NO: 9684 - protein, 796 aa, Homo sapiens
MPAWEPGVAASCGWRAPPCSPLRLCIAPHPCTPPSSHQGNLTCRLPPRSFGFCRCVWVRTRGPSLPGEQVSLAAHESEGAAAQLGSSPEIDPRRPRCLLPESAQIPQISYASTAPDLSDNSRYDFFSRVVPSDTYQAQAMVDIVRALKWNYVSTVASEGSYGESGVEAFIQKSREDGGVCIAQSVKIPREPKAGEFDKIIRRLLETSNARAVIIFANEDDIRRVLEAARRANQTGHFFWMGSDSWGSKIAPVLHLEEVAEGAVTILPKRMSVRDRERIGQDSAYEQEGKVQFVIDAVYAMGHALHAMHRDLCPGRVGLCPRMDPVDGTQLLKYIRNVNFSGIAGNPVTFNENGDAPGRYDIYQYQLRNDSAEYKVIGSWTDHLHLRIERMHWPGSGQQLPRSICSLPCQPGERKKTVKGMPCCWHCEPCTGYQYQVDRYTCKTCPYDMRPTENRTGCRPIPIIKLEWGSPWAVLPLFLAVVGIAATLFVVITFVRYNDTPIVKASGRELSYVLLAGIFLCYATTFLMIAEPDLGTCSLRRIFLGLGMSISYAALLTKTNRIYRIFEQGKRSVSAPRFISPASQLAITFSLISLQLLGICVWFVVDPSHSVVDFQDQRTLDPRFARGVLKCDISDLSLICLLGYSMLLMVTCTVYAIKTRGVPETFNEAKPIGFTMYTTCIVWLAFIPIFFGTSQSADKLYIQTTTLTVSVSLSASVSLGMLYMPKVYIILFHPEQNVPKRKRSLKAVVTAATMSNKFTQKGNFRPNGEAKSELCENLEAPALATKQTYVTYTNHAI

SEQ ID NO: 9685 - protein, 865 aa, Homo sapiens
MPGKRGLGWWWARLPLCLLLSLYGPWMPSSLGKPKGHPHMNSIRIDGDITLGGLFPVHGRGSEGKPCGELKKEKGIHRLEAMLFALDRINNDPDLLPNITLGARILDTCSRDTHALEQSLTFVQALIEKDGTEVRCGSGGPPIITKPERVVGVIGASGSSVSIMVANILRLFKIPQISYASTAPDLSDNSRYDFFSRVVPSDTYQAQAMVDIVRALKWNYVSTVASEGSYGESGVEAFIQKSREDGGVCIAQSVKIPREPKAGEFDKIIRRLLETSNARAVIIFANEDDIRRVLEAARRANQTGHFFWMGSDSWGSKIAPVLHLEEVAEGAVTILPKRMSVRDRERIGQDSAYEQEGKVQFVIDAVYAMGHALHAMHRDLCPGRVGLCPRMDPVDGTQLLKYIRNVNFSGIAGNPVTFNENGDAPGRYDIYQYQLRNDSAEYKVIGSWTDHLHLRIERMHWPGSGQQLPRSICSLPCQPGERKKTVKGMPCCWHCEPCTGYQYQVDRYTCKTCPYDMRPTENRTGCRPIPIIKLEWGSPWAVLPLFLAVVGIAATLFVVITFVRYNDTPIVKASGRELSYVLLAGIFLCYATTFLMIAEPDLGTCSLRRIFLGLGMSISYAALLTKTNRIYRIFEQGKRSVSAPRFISPASQLAITFSLISLQLLGICVWFVVDPSHSVVDFQDQRTLDPRFARGVLKCDISDLSLICLLGYSMLLMVTCTVYAIKTRGVPETFNEAKPIGFTMYTTCIVWLAFIPIFFGTSQSADKLYIQTTTLTVSVSLSASVSLGMLYMPKVYIILFHPEQNVPKRKRSLKAVVTAATMSNKFTQKGNFRPNGEAKSELCENLEAPALATKQTYVTYTNHAI

SEQ ID NO: 9686 - protein, 209 aa, Homo sapiens
MSWIKEGELSLWERFCANIIKAGPMPKHIAFIMDGNRRYAKKCQVERQEGHSQGFNKLAETLRWCLNLGILEVTVYAFSIENFKRSKSEVDGLMDLARQKFSRLMEEKEKLQKHGVCIRVLGDLHLLPLDLQELIAQAVQATKNYNKCFLNVCFAYTSRHEISNAVREMAWGVEQGLLDPRYPELFCMVIVKENRPGPAWQLTPVILAH

SEQ ID NO: 9687 - protein, 367 aa, Homo sapiens
MLLLRCQLKQAPPQKVSFRFCVVMGKQQSKLKHSTYKYGRPDEIIEERIQTKAFQEYSPAHMDTVSVVAALNSDLCVSGGKDKTVVAYNWKTGNVVKRFKGHEHEITKVACIPKSSQFFSASRDRMVMMWDLHGSSQPRQQLCGHAMVVTGLAVSPDSSQLCTGSRDNTLLLWDVVTGQSVERASVSRNVVTHLCWVPREPYILQTSEDKTLRLWDSRGLQVAHMFPAKQHIQTYCEVSVDGHKCISCSNGFGGEGCEATLWDLRQTRNRICEYKGHFQTVASCVFLPRALALMPLIATSSHDCKVKIWNQDTGACLFTLSLDGSGPLTSLAVGDAISLLCASFNRGIHLLRMDHSQGLELQEVAAF

SEQ ID NO: 9688 - protein, 1309 aa, Homo sapiens
MQPLTKDAGMSLSSVTLASALQVRGEALSEEEIWSLLFLAAEQLLEDLRNDSSDYVVCPWSALLSAAGSLSFQGRVSHIEAAPFKAPELLQGQSEDEQPDASQMHVYSLGMTLYWSAGFHVPPHQPLQLCEPLHSILLTMCEDQPHRRCTLQSVLEACRVHEKEVSVYPAPAGLHIRRLVGLVLGTISEVEKRVVEESSSVQQNRSYLLRKRLRGTSSESPAAQAPECLHPCRVSERSTETQSSPEPHWSTLTHSHCSLLVNRALPGADPQDQQAGRRLSSGSVHSAADSSWPTTPSQRGFLQRRSKFSRPEFILLAGEAPMTLHLPGSVVTKKGKSYLALRDLCVVLLNGQHLEVKCDVESTVGAVFNAVTSFANLEELTYFGLAYMKSKEFFFLDSETRLCKIAPEGWREQPQKTSMNTFTLFLRIKFFVSHYGLLQHSLTRHQFYLQLRKDILEERLYCNEEILLQLGVLALQAEFGNYPKEQVESKPYFHVEDYIPASLIERMTALRVQVEVSEMHRLSSALWGEDAELKFLRVTQQLPEYGVLVHQVFSEKRRPEEEMALGICAKGVIVYEVKNNSRIAMLRFQWRETGKISTYQKKFTITSSVTGKKHTFVTDSAKTSKYLLDLCSAQHGFNAQMGSGQPSHVLFDHDKFVQMANLSPAHQARSKPLIWIQRLSCSENELFVSRLQGAAGGLLSTSMDNFNVDGSKEAGAEGIGRSPCTGREQLKSACVIQKPMTWDSLSGPPVQSMHAGSKNNRRKSFIAEPGREIVRVTLKRDPHRGFGFVINEGEYSGQADPGIFISSIIPGGPAEKAKTIKPGGQILALNHISLEGFTFNMAVRMIQNSPDNIELIISQSKGVGGNNPDEEKNSTANSGVSSTDILSFGYQGSLLSHTQDQDRNTEELDMAGVQSLVPRLRHQLSFLPLKGAGSSCPPSPPEISAGEIYFVELVKEDGTLGFSVTGGINTSVPYGGIYVKSIVPGGPAAKEGQILQGDRLLQVDGVILCGLTHKQAVQCLTGPGQVARLVLERRVPRSTQQCPSANDSMGDERTAVSLVTALPGRPSSCVSVTDGPKFEVKLKKNANGLGFSFVQMEKESCSHLKSDLVRIKRLFPGQPAEENGAIAAGDIILAVNGRSTEGLIFQEVLHLLRGAPQEVTLLLCRPPPGALPELEQEWQTPELSADKEFTRATCTDSCTSPILDQEDSWRDSASPDAGEGLGLRPESSQKAIREAQWGQNRERPWASSLTHSPESHPHLCKLHQERDESTLATSLEKDVRQNCYSVCDIMRLGRYSFSSPLTRLSTDIF

SEQ ID NO: 9689 - protein, 369 aa, Homo sapiens
MLKPSLPFTSLLFLQLPLLGVGLNTTILTPNGNEDTTADFFLTTMPTDSLSVSTLPLPEVQCFVFNVEYMNCTWNSSSEPQPTNLTLHYWYKNSDNDKVQKCSHYLFSEEITSGCQLQKKEIHLYQTFVVQLQDPREPRRQATQMLKLQNLVIPWAPENLTLHKLSESQLELNWNNRFLNHCLEHLVQYRTDWDHSWTEQSVDYRHKFSLPSVDGQKRYTFRVRSRFNPLCGSAQHWSEWSHPIHWGSNTSKENPFLFALEAVVISVGSMGLIISLLCVYFWLERTMPRIPTLKNLEDLVTEYHGNFSAWSGVSKGLAESLQPDYSERLCLVSEIPPKGGALGEGPGASPCNQHSPYWAPPCYTLKPET

SEQ ID NO: 9690 - protein, 247 aa, Homo sapiens
MLSDGCGSEEKISVPSCYGGIGAPVSRQVPASHDSELMAFMTRKLWDLEQQVKAQTDEILSKDQKIAALEDLVQTLRPHPAEATLQRQEELETMCVQLQRQVREMERFLSDYGLQWVGEPMDQEDSESKTVSEHGERDWMTAKKFWKPGDSLAPPEVDFDRLLASLQDLSELVVEGDTQVTPVPGGARLRTLEPIPLKLYRNGIMMFDGPFQPFYDPSTQRCLRDILDGFFPSELQRLYPNGVPFKV

SEQ ID NO: 9691 - protein, 520 aa, Homo sapiens
MSSPLASLSKTRKVPLPSEPMNPGRRGIRIYGDEDEVDMLSDGCGSEEKISVPSCYGGIGAPVSRQVPASHDSELMAFMTRKLWDLEQQVKAQTDEILSKDQKIAALEDLVQTLRPHPAEATLQRQEELETMCVQLQRQVREMERFLSDYGLQWVGEPMDQEDSESKTVSEHGERDWMTAKKFWKPGDSLAPPEVDFDRLLASLQDLSELVVEGDTQVTPVPGGARLRTLEPIPLKLYRNGIMMFDGPFQPFYDPSTQRCLRDILDGFFPSELQRLYPNGVPFKVSDLRNQVYLEDGLDPFPGEGRVVGRQLMHKALDRVEEHPGSRMTAEKFLNRLPKFVIRQGEVIDIRGPIRDTLQNCCPLPARIQEIVVETPTLAAERERSQESPNTPAPPLSMLRIKSENGEQAFLLMMQPDNTIGDVRALLAQARVMDASAFEIFSTFPPTLYQDDTLTLQAAGLVPKAALLLRARRAPKSSLKFSPGPCPGPGPGPSPGPGPGPSPGPGPGPSPCPGPSPSPQ

SEQ ID NO: 9692 - protein, 630 aa, Homo sapiens
MSVSSGVQILTKPETVDRRRSAETTKEAGRPLEMAVSEPEASAAEWKQLDPAQSNLYNDVMLENYCNQASMGCQAPKPDMISKLEKGEAPWLGKGKRPSQGCPSKIARPKQKETDGKVQKDDDQLENIQKSQNKLLREVAVKKKTQAKKNGSDCGSLGKKNNLHKKHVPSKKRLLKFESCGKILKQNLDLPDHSRNCVKRKSDAAKEHKKSFNHSLSDTRKGKKQTGKKHEKLSSHSSSDKCNKTGKKHDKLCCHSSSHIKQDKIQTGEKHEKSPSLSSSTKHEKPQACVKPYECNQCGKVLSHKQGLIDHQRVHTGEKPYECNECGIAFSQKSHLVVHQRTHTGEKPYECIQCGKAHGHKHALTDHLRIHTGEKPYECAECGKTFRHSSNLIQHVRSHTGEKPYECKECGKSFRYNSSLTEHVRTHTGEIPYECNECGKAFKYSSSLTKHMRIHTGEKPFECNECGKAFSKKSHLIIHQRTHTKEKPYKCNECGKAFGHSSSLTYHMRTHTGESPFECNQCGKGFKQIEGLTQHQRVHTGEKPYECNECGKAFSQKSHLIVHQRTHTGEKPYECNECEKAFNAKSQLVIHQRSHTGEKPYECNECGKTFKQNASLTKHVKTHSEDKSHE

SEQ ID NO: 9693 - protein, 437 aa, Homo sapiens
MAGGPPKALPSTGPHSLRDMPHPLAGSSSEEAVGGDSTPSPDLLMARSFGDKDLILPNGGTPAGTSSPASSSSLLNRLQLDDDIDGETRDLFVIVDDPKKHVCTMETYITYRITTKSTRVEFDLPEYSVRRRYQDFDWLRSKLEESQPTHLIPPLPEKFVVKGVVDRFSEEFVETRRKALDKFLKRITDHPVLSFNEHFNIFLTAKDLNAYKKQGIALLTRMGESVKHVTGGYKLRTRPLEFAAIGDYLDTFALKLGTIDRIAQRIIKEEIEYLVELREYGPVYSTWSALEGELAEPLEGVSACIGNCSTALEELTDDMTEDFLPVLREYILYSDSMKSVLKKRDQVQAEYEAKLEAVALRKEDRPKVPADVEKCQDRMECFNADLKADMERWQNNKRQDFRQLLMGMADKNIQYYEKCLMAWESIIPLLQEKQEAK

SEQ ID NO: 9694 - protein, 738 aa, Homo sapiens
MEDCLHTSSENLSKLVSWAHSHGTICSLIPNLKHLLSEGSHGNLTAMWGCSAGHAYHWPLTATCRAGSQERVCFQDNRSFNSDSPSIIGVPSETQTSPVERYPGRPVKAKLDCNRTRDSCDFSYCSEPSELDETVEEYEDENTLFDMVCESSVTDEDSDFEPQTQRPQSIARKRPGVVPSSLHSSSQTQMVDECSNDVIIKKIKQEIPEDYYIVANAELTGGVDGPALSLTQMAKPKPQTHAGPSCVGSAKLIPHVTSAISTELDPHGMSASPSVISRPIVQKTARVSLASPNRGPPGTHGTNQQVAMQMPVSTSHPNKQISIPLSALQLPGQDEQVASEEFLSHLPSQVSSCEVALSPSVNTEPEVSSSQQQPPVAPAITTEATAQCIPDQDERAAELSREQNEKTIRSTQTALRNFREFLISKYPSETREIYVIPCKELDAYLASFFVDARQKDGSEYEPNSLANYQCGLERYLKEHRYGYSITRDKEFKRSQEALKQKQIELRCKGKGNKPHKSMKLTFADELILRKRGLLSRYNPEGLLNLVWLNNTKAFGHCTGFHGSTLKWGDIRLRVTETGLEYLEWMGQDTGDLNAKTKRGGTDSRVYATQHAPQTCPVQDYKEYAQRRPPAMRYEDAPFYLSIKPVVNLAALHWYNCQALGKNKLAKMVKTMCEKGNIPGRKTNFSVYQSCSTLSEAQSNQLVLICNNLSQQAAQSVAGHSNNGNFIVSASYDSSSDTA

SEQ ID NO: 9695 - protein, 720 aa, Homo sapiens
MEPVETWTPGKVATWLRGLDDSLQDYPFEDWQLPGKNLLQLCPQSLEALAVRSLGHQELILGGVEQLQALSSRLQTENLQSLTEGLLGATHDFQSIVQGCLGDCAKTPIDVLCAAVELLHEADALLFWLSRYLFSHLNDFSACQEIRDLLEELSQVLHEDGPAAEKEGTVLRICSHVAGICHNILVCCPKELLEQKAVLEQVQLDSPLGLEIHTTSNCQHFVSQVDTQVPTDSRLQIQPGDEVVQINEQVVVREERDMVGWPRKNMVRELLREPAGLSLVLKKIPIPETPPQTPPQVLDSPHQRSPSLSLAPLSPRAPSEDVFAFDLSSNPSPGPSPAWTDSASLGPEPLPIPPEPPAILPAGVAGTPGLPESPDKSPVGRKKSKGLATRLSRRRVSCRELGRPDCDGWLLLRKAPGGFMGPRWRRRWFVLKGHTLYWYRQPQDEKAEGLINVSNYSLESGHDQKKKYVFQLTHDVYKPFIFAADTLTDLSMWVRHLITCISKYQSPGRAPPPREEDCYSETEAEDPDDEAGSHSASPSPAQAGSPLHGDTSPAATPTQRSPRTSFGSLTDSSEEALEGMVRGLRQGGVSLLGQPQPLTQEQWRSSFMRRNRDPQLNERVHRVRALQSTLKAKLQELQVLEEVLGDPELTGEKFRQWKEQNRELYSEGLGAWGVAQAEGSSHILTSDSTEQSPHSLPSDPEEHSHLCPLTSESSLRPPDL

SEQ ID NO: 9696 - protein, 505 aa, Homo sapiens
MDPGNENSATEAAAIIDLDPDFEPQSRPRSCTWPLPRPEIANQPSEPPEVEPDLGEKVHTEGRSEPILLPSRLPEPAGGPQPGILGAVTGPRKGGSRRNAWGNQSYAELISQAIESAPEKRLTLAQIYEWMVRTVPYFKDKGDSNSSAGWKNSIRHNLSLHSKFIKVHNEATGKSSWWMLNPEGGKSGKAPRRRAASMDSSSKLLRGRSKAPKKKPSVLPAPPEGATPTSPVGHFAKWSGSPCSRNREEADMWTTFRPRSSSNASSVSTRLSPLRPESEVLAEEIPASVSSYAGGVPPTLNEGLELLDGLNLTSSHSLLSRSGLSGFSLQHPGVTGPLHTYSSSLFSPAEGPLSAGEGCFSSSQALEALLTSDTPPPPADVLMTQVDPILSQAPTLLLLGGLPSSSKLATGVGLCPKPLEAPGPSSLVPTLSMIAPPPVMASAPIPKALGTPVLTPPTEAASQDRMPQDLDLDMYMENLECDMDNIISDLMDEGEGLDFNFEPDP

SEQ ID NO: 9697 - protein, 722 aa, Homo sapiens
MGRGPWDAGPSRRLLPLLLLLGLARGAAGAPGPDGLDVCATCHEHATCQQREGKKICICNYGFVGNGRTQCVDKNECQFGATLVCGNHTSCHNTPGGFYCICLEGYRATNNNKTFIPNDGTFCTDIDECEVSGLCRHGGRCVNTHGSFECYCMDGYLPRNGPEPFHPTTDATSCTEIDCGTPPEVPDGYIIGNYTSSLGSQVRYACREGFFSVPEDTVSSCTGLGTWESPKLHCQEINCGNPPEMRHAILVGNHSSRLGGVARYVCQEGFESPGGKITSVCTEKGTWRESTLTCTEILTKINDVSLFNDTCVRWQINSRRINPKISYVISIKGQRLDPMESVREETVNLTTDSRTPEVCLALYPGTNYTVNISTAPPRRSMPAVIGFQTAEVDLLEDDGSFNISIFNETCLKLNRRSRKVGSEHMYQFTVLGQRWYLANFSHATSFNFTTREQVPVVCLDLYPTTDYTVNVTLLRSPKRHSVQITIATPPAVKQTISNISGFNETCLRWRSIKTADMEEMYLFHIWGQRWYQKEFAQEMTFNISSSSRDPEVCLDLRPGTNYNVSLRALSSELPVVISLTTQITEPPLPEVEFFTVHRGPLPRLRLRKAKEKNGPISSYQVLVLPLALQSTFSCDSEGASSFFSNASDADGYVAAELLAKDVPDDAMEIPIGDRLYYGEYYNAPLKRGSDYCIILRITSEWNKIRHSCCCRWRVLDWVPWLL

SEQ ID NO: 9698 - protein, 757 aa, Homo sapiens
MGRGPWDAGPSRRLLPLLLLLGLARGAAGAPGPDGLDVCATCHEHATCQQREGKKICICNYGFVGNGRTQCVDKNECQFGATLVCGNHTSCHNTPGGFYCICLEGYRATNNNKTFIPNDGTFCTDIDECEVSGLCRHGGRCVNTHGSFECYCMDGYLPRNGPEPFHPTTDATSCTEIDCGTPPEVPDGYIIGNYTSSLGSQVRYACREGFFSVPEDTVSSCTGLGTWESPKLHCQEINCGNPPEMRHAILVGNHSSRLGGVARYVCQEGFESPGGKITSVCTEKGTWRESTLTCTEILTKINDVSLFNDTCVRWQINSRRINPKISYVISIKGQRLDPMESVREETVNLTTDSRTPEVCLALYPGTNYTVNISTAPPRRSMPAVIGFQTAEVDLLEDDGSFNISIFNETCLKLNRRSRKVGSEHMYQFTVLGQRWYLANFSHATSFNFTTREQVPVVCLDLYPTTDYTVNVTLLRSPKRHSVQITIATPPAVKQTISNISGFNETCLRWRSIKTADMEEMYLFHIWGQRWYQKEFAQEMTFNISSSSRDPEVCLDLRPGTNYNVSLRALSSELPVVISLTTQITEPPLPEVEFFTVHRGPLPRLRLRKAKEKNGPISSYQVLVLPLALQSTFSCDSEGASSFFSNASDADGYVAAELLAKDVPDDAMEIPIGDRLYYGEYYNAPLKRGSDYCIILRITSEWNKVRRHSCAVWAQVKEIPCNCNFLRLHIHRANSGDTQIRHSCCCRWRVLDWVPWLL

SEQ ID NO: 9699 - protein, 747 aa, Homo sapiens
MGRGPWDAGPSRRLLPLLLLLGLARGAAGAPGPDGLDVCATCHEHATCQQREGKKICICNYGFVGNGRTQCVDKNECQFGATLVCGNHTSCHNTPGGFYCICLEGYRATNNNKTFIPNDGTFCTDIDECEVSGLCRHGGRCVNTHGSFECYCMDGYLPRNGPEPFHPTTDATSCTEIDCGTPPEVPDGYIIGNYTSSLGSQVRYACREGFFSVPEDTVSSCTGLGTWESPKLHCQEINCGNPPEMRHAILVGNHSSRLGGVARYVCQEGFESPGGKITSVCTEKGTWRESTLTCTEILTKINDVSLFNDTCVRWQINSRRINPKISYVISIKGQRLDPMESVREETVNLTTDSRTPEVCLALYPGTNYTVNISTAPPRRSMPAVIGFQTAEVDLLEDDGSFNISIFNETCLKLNRRSRKVGSEHMYQFTVLGQRWYLANFSHATSFNFTTREQVPVVCLDLYPTTDYTVNVTLLRSPKRHSVQITIATPPAVKQTISNISGFNETCLRWRSIKTADMEEMYLFHIWGQRWYQKEFAQEMTFNISSSSRDPEVCLDLRPGTNYNVSLRALSSELPVVISLTTQITEPPLPEVEFFTVHRGPLPRLRLRKAKEKNGPISSYQVLVLPLALQSTFSCDSEGASSFFSNASDADGYVAAELLAKDVPDDAMEIPIGDRLYYGEYYNAPLKRGSDYCIILRITSEWNKVRRHSCAVWAQVKDSSLMLLQMAGVGLGSLAVVIILTFLSFSAV

SEQ ID NO: 9700 - protein, 676 aa, Homo sapiens
MQSWRRRKSLWLALSASWLLLVLLGGFSLLRLALPPRPRPGASQGWPRWLDAELLQSFSQPGELPEDAVSPPQAPHGGSCNWESCFDTSKCRGDGLKVFVYPAVGTISETHRRILASIEGSRFYTFSPAGACLLLLLSLDAQTGECSSMPLQWNRGRNHLVLRLHPAPCPRTFQLGQAMVAEASPTVDSFRPGFDVALPFLPEAHPLRGGAPGQLRQHSPQPGVALLALEEERGGWRTADTGSSACPWDGRCEQDPGPGQTQRQETLPNATFCLISGHRPEAASRFLQALQAGCIPVLLSPRWELPFSEVIDWTKAAIVADERLPLQVLAALQEMSPARVLALRQQTQFLWDAYFSSVEKVIHTTLEVIQDRIFGTSAHPSLLWNSPPGALLALSTFSTSPQDFPFYYLQQGSRPEGRFSALIWVGPPGQPPLKLIQAVAGSQHCAQILVLWSNERPLPSRWPETAVPLTVIDGHRKVSDRFYPYSTIRTDAILSLDARSSLSTSEVDFAFLVWQSFPERMVGFLTSSHFWDEAHGGWGYTAERTNEFSMVLTTAAFYHRYYHTLFTHSLPKALRTLADEAPTCVDVLMNFIVAAVTKLPPIKVPYGKQRQEAAPLAPGGPGPRPKPPAPAPDCINQIAAAFGHMPLLSSRLRLDPVLFKDPVSVQRKKYRSLEKP

SEQ ID NO: 9701 - protein, 375 aa, Homo sapiens
MNTSHLLALLLPKSPQGENRSKPLGTPYNFSEHCQDSVDVMVFIVTSYSIETVVGVLGNLCLMCVTVRQKEKANVTNLLIANLAFSDFLMCLLCQPLTAVYTIMDYWIFGETLCKMSAFIQCMSVTVSILSLVLVALERHQLIINPTGWKPSISQAYLGIVLIWVIACVLSLPFLANSILENVFHKNHSKALEFLADKVVCTESWPLAHHRTIYTTFLLLFQYCLPLGFILVCYARIYRCLQRQGRVFHKGTYSLRAGHMKQVNVVLVVMVVAFAVLWLPLHVFNSLEDWHHEAIPICHGNLIFLVCHLLAMASTCVNPFIYGFLNTNFKKEIKALVLTCQQSAPLEESEHLPLSTVHTEVSKGSLRLSGRSNPI

SEQ ID NO: 9702 - protein, 458 aa, Homo sapiens
MSSSRPEPGPWAPLSPRLQPLSQSSSSLLGEGREQRPELRKTASSTVWQAQLGEASTRPQAPEEEGNPPESMKPARASGPKARPSAGGHWWSSTVGNVSTMGGSDLCRLRAPSAAAMQRSHSDLVRSTQMRGHSGARKASLSCSALGSSPVHRAQLQPGGTSGQGGQAPAGLERDLAPEDETSNSAWMLGASQLSVPPLDLGDTTAHSSSAQAEPKAAEQLATTTCHALPPAALLCGMREVRAGGCCHALPATGILAFPKLVASVSESGLQAQHGVKIHCRLSGGLPGHSHCCAHLWGPAGLVPEPGSRTKDVWTMTSANDLAPAEASPLSAQDAGVQAAPVAACKAVATSPSLEAPAALHVFPEVTLGSSLEEVPSPVRDVRWDAEGMTWEVYGAAVDLEVLGVAIQKHLEMQFEQLQRAPASEDSLSVEGRRGPLRAVMQSLRRPSCCGCSGAAPE

SEQ ID NO: 9703 - protein, 2671 aa, Homo sapiens
MSEMSSFLHIGDIVSLYAEGSVNGFISTLGLVDDRCVVEPAAGDLDNPPKKFRDCLFKVCPMNRYSAQKQYWKAKQTKQDKEKIADVVLLQKLQHAAQMEQKQNDTENKKVHGDVVKYGSVIQLLHMKSNKYLTVNKRLPALLEKNAMRVTLDATGNEGSWLFIQPFWKLRSNGDNVVVGDKVILNPVNAGQPLHASNYELSDNAGCKEVNSVNCNTSWKINLFMQFRDHLEEVLKGGDVVRLFHAEQEKFLTCDEYKGKLQVFLRTTLRQSATSATSSNALWEVEVVHHDPCRGGAGHWNGLYRFKHLATGNYLAAEENPSYKGDASDPKAAGMGAQGRTGRRNAGEKIKYCLVAVPHGNDIASLFELDPTTLQKTDSFVPRNSYVRLRHLCTNTWIQSTNVPIDIEEERPIRLMLGTCPTKEDKEAFAIVSVPVSEIRDLDFANDASSMLASAVEKLNEGFISQNDRRFVIQLLEDLVFFVSDVPNNGQNVLDIMVTKPNRERQKLMREQNILKQVFGILKAPFREKGGEGPLVRLEELSDQKNAPYQHMFRLCYRVLRHSQEDYRKNQEHIAKQFGMMQSQIGYDILAEDTITALLHNNRKLLEKHITKTEVETFVSLVRKNREPRFLDYLSDLCVSNHIAIPVTQELICKCVLDPKNSDILIRTELRPVKEMAQSHEYLSIEYSEEEVWLTWTDKNNEHHEKSVRQLAQEARAGNAHDENVLSYYRYQLKLFARMCLDRQYLAIDEISQQLGVDLIFLCMADEMLPFDLRASFCHLMLHVHVDRDPQELVTPVKFARLWTEIPTAITIKDYDSNLNASRDDKKNKFANTMEFVEDYLNNVVSEAVPFANEEKNKLTFEVVSLAHNLIYFGFYSFSELLRLTRTLLGIIDCVQGPPAMLQAYEDPGGKNVRRSIQGVGHMMSTMVLSRKQSVFSAPSLSAGASAAEPLDRSKFEENEDIVVMETKLKILEILQFILNVRLDYRISYLLSVFKKEFVEVFPMQDSGADGTAPAFDSTTANMNLDRIGEQAEAMFGVGKTSSMLEVDDEGGRMFLRVLIHLTMHDYAPLVSGALQLLFKHFSQRQEAMHTFKQVQLLISAQDVENYKVIKSELDRLRTMVEKSELWVDKKGSGKGEEVEAGAAKDKKERPTDEEGFLHPPGEKSSENYQIVKGILERLNKMCGVGEQMRKKQQRLLKNMDAHKVMLDLLQIPYDKGDAKMMEILRYTHQFLQKFCAGNPGNQALLHKHLHLFLTPGLLEAETMQHIFLNNYQLCSEISEPVLQHFVHLLATHGRHVQYLDFLHTVIKAEGKYVKKCQDMIMTELTNAGDDVVVFYNDKASLAHLLDMMKAARDGVEDHSPLMYHISLVDLLAACAEGKNVYTEIKCTSLLPLEDVVSVVTHEDCITEVKMAYVNFVNHCYVDTEVEMKEIYTSNHIWTLFENFTLDMARVCSKREKRVADPTLEKYVLSVVLDTINAFFSSPFSENSTSLQTHQTIVVQLLQSTTRLLECPWLQQQHKGSVEACIRTLAMVAKGRAILLPMDLDAHISSMLSSGASCAAAAQRNASSYKATTRAFPRVTPTANQWDYKNIIEKLQDIITALEERLKPLVQAELSVLVDVLHWPELLFLEGSEAYQRCESGGFLSKLIQHTKDLMESEEKLCIKVLRTLQQMLLKKTKYGDRGNQLRKMLLQNYLQNRKSTSRGDLPDPIGTGLDPDWSAIAATQCRLDKEGATKLVCDLITSTKNEKIFQESIGLAIHLLDGGNTEIQKSFHNLMMSDKKSERFFKVLHDRMKRAQQETKSTVAVNMNDLGSQPHEDREPVDPTTKGRVASFSIPGSSSRYSLGPSLRRGHEVSERVQSSEMGTSVLIMQPILRFLQLLCENHNRDLQNFLRCQNNKTNYNLVCETLQFLDIMCGSTTGGLGLLGLYINEDNVGLVIQTLETLTEYCQGPCHENQTCIVTHESNGIDIITALILNDISPLCKYRMDLVLQLKDNASKLLLALMESRHDSENAERILISLRPQELVDVIKKAYLQEEERENSEVSPREVGHNIYILALQLSRHNKQLQHLLKPVKRIQEEEAEGISSMLSLNNKQLSQMLKSSAPAQEEEEDPLAYYENHTSQIEIVRQDRSMEQIVFPVPGICQFLTEETKHRLFTTTEQDEQGSKVSDFFDQSSFLHNEMEWQRKLRSMPLIYWFSRRMTLWGSISFNLAVFINIIIAFFYPYMEGASTGVLDSPLISLLFWILICFSIAALFTKRYSIRPLIVALILRSIYYLGIGPTLNILGALNLTNKIVFVVSFVGNRGTFIRGYKAMVMDMEFLYHVGYILTSVLGLFAHELFYSILLFDLIYREETLFNVIKSVTRNGRSILLTALLALILVYLFSIVGFLFLKDDFILEVDRLPNNHSTASPLGMPHGAAAFVDTCSGDKMDCVSGLSVPEVLEEDRELDSTERACDTLLMCIVTVMNHGLRNGGGVGDILRKPSKDESLFPARVVYDLLFFFIVIIIVLNLIFGVIIDTFADLRSEKQKKEEILKTTCFICGLERDKFDNKTVSFEEHIKLEHNMWNYLYFIVLVRVKNKTDYTGPESYVAQMIKNKNLDWFPRMRAMSLVSNEGEGEQNEIRILQDKLNSTMKLVSHLTAQLNELKEQMTEQRKRRQRLGFVDVQNCISR

SEQ ID NO: 9704 - protein, 500 aa, Homo sapiens
METEAIDGYITCDNELSPEREHSNMAIDLTSSTPNGQHASPSHMTSTNSVKLEMQSDEECDRKPLSREDEIRGHDEGSSLEEPLIESSEVADNRKVQELQGEGGIRLPNGERPFHCNQCGASFTQKGNLLRHIKLHSGEKPFKCPFCSYACRRRDALTGHLRTHSVGKPHKCNYCGRSYKQRSSLEEHKERCHNYLQNVSMEAAGQVMSHHVPPMEDCKEQEPIMDNNISLVPFERPAVIEKLTGNMGKRKSSTPQKFVGEKLMRFSYPDIHFDMNLTYEKEAELMQSHMMDQAINNAITYLGAEALHPLMQHPPSTIAEVAPVISSAYSQVYHPNRIERPISRETADSHENNMDGPISLIRPKSRPQEREASPSNSCLDSTDSESSHDDHQSYQGHPALNPKRKQSPAYMKEDVKALDTTKAPKGSLKDIYKVFNGEGEQIRAFKCEHCRVLFLDHVMYTIHMGCHGYRDPLECNICGYRSQDRYEFSSHIVRGEHTFH

SEQ ID NO: 9705 - protein, 615 aa, Homo sapiens
MEILHLDMPLDFCLNIAKLLMDHERESVGFHFLTIIHERFKSSENIGKVLILHTDMLLQRKEELLAKEKIEEIFLAHQTGRQLTAESMNWLHNILWRQAASSFEVQNYTDALQWYYYSLRFYSTDEMDLDFTKLQRNMACCYLNLQQLDKAKEAVAEAERHDPRNVFTQFYIFKIAVIEGNSERALQAIITLENILTDEESEDNDLVAERGSPTMLLSLAAQFALENGQQIVAEKALEYLAQHSEDQEQVLTAVKCLLRFLLPKIAEMPESEDKKKEMDRLLTCLNRAFVKLSQPFGEEALSLESRANEAQWFRKTAWNLAVQCDKDPVMMREFFILSYKMSQFCPSDQVILIARKTCLLMAVAVDLEQGRKASTAFEQTMFLSRALEEIQTCNDIHNFLKQTGTFSNDSCEKLLLLYEFEVRAKLNDPLLESFLESVWELPHLETKTFETIAIIAMEKPAHYPLIALKALKKALLLYKKEEPIDISQYSKCMHNLVNLSVPDGASNVELCPLEEVWGYFEDALSHISRTKDYPEMEILWLMVKSWNTGVLMFSRSKYASAEKWCGLALRFLNHLTSFKESYETQMNMLYSQLVEALSNNKGPVFHEHGYWSKSD

SEQ ID NO: 9706 - protein, 421 aa, Homo sapiens
MAEQLALVIGGTIGGLLLLLLIGASCCLWRRFCATLTYEELPGTPAMATTAASSGQRDRPCQPHARTQLSRPPAVPFVVPPTLQGRDWVPLHSGEWADAPWDPCPASELLPHTSSGGLGDACMVGAINPELYKFPEDKSETDFPDGCLGRLWFSVEYEQEAERLLVGLIKAQHLQAPSETCSPLVKLYLLPDERRFLQSKTKRKTSNPQFDEHFIFQVSSKTITQRVLKFSVYHVDRQRKHQLLGQVLFPLKNETLVGDCRRVIWRDLEAESLEPPSEFGDLQFCLSYNDYLSRLTVVVLRAKGLRLQEDRGIVSVFVKVSLMNHNKFVKCKKTSAVLGSINPVYNETFSFKADATELDTASLSLTVVQNMEGDKSQQLGRVVVGPYMYTRGRELEHWDEMLSKPKELVKRWHALCRTTEP

SEQ ID NO: 9707 - protein, 474 aa, Homo sapiens
MGVVLSPHPAPSRREPLAPLAPGTRPGWSPAVSGSSRSALRPSTAGPGPGPGTGWGGTAASGRWVPAPAVHCAAPRAAAGHQQHHGPPLCSPDGAPRRFKRRPGSPAPAAQTGETSLREQPHGGPPAVPFVVPPTLQGRDWVPLHSGEWADAPWDPCPASELLPHTSSGGLGDACMVGAINPELYKFPEDKSETDFPDGCLGRLWFSVEYEQEAERLLVGLIKAQHLQAPSETCSPLVKLYLLPDERRFLQSKTKRKTSNPQFDEHFIFQVSSKTITQRVLKFSVYHVDRQRKHQLLGQVLFPLKNETLVGDCRRVIWRDLEAESLEPPSEFGDLQFCLSYNDYLSRLTVVVLRAKGLRLQEDRGIVSVFVKVSLMNHNKFVKCKKTSAVLGSINPVYNETFSFKADATELDTASLSLTVVQNMEGDKSQQLGRVVVGPYMYTRGRELEHWDEMLSKPKELVKRWHALCRTTEP

SEQ ID NO: 9708 - protein, 925 aa, Homo sapiens
MDNDDFFSMDFKEVVENLVTNDNSPNIPEAIDRLFSDIANINRESMAEITDIQIEEMAVNLWNWALTIGGGWLVNEEQKIRLHYVACKLLSMCEASFASEQSIQRLIMMNMRIGKEWLDAGNFLIADECFQAAVASLEQLYVKLIQRSSPEADLTMEKITVESDHFRVLSYQAESAVAQGDFQRASMCVLQCKDMLMRLPQMTSSLHHLCYNFGVETQKNNKYEESSFWLSQSYDIGKMDKKSTGPEMLAKVLRLLATNYLDWDDTKYYDKALNAVNLANKEHLSSPGLFLKMKILLKGETSNEELLEAVMEILHLDMPLDFCLNIAKLLMDHERESVGFHFLTIIHERFKSSENIGKVLILHTDMLLQRKEELLAKEKIEEIFLAHQTGRQLTAESMNWLHNILWRQAASSFEVQNYTDALQWYYYSLRFYSTDEMDLDFTKLQRNMACCYLNLQQLDKAKEAVAEAERHDPRNVFTQFYIFKIAVIEGNSERALQAIITLENILTDEESEDNDLVAERGSPTMLLSLAAQFALENGQQIVAEKALEYLAQHSEDQEQVLTAVKCLLRFLLPKIAEMPESEDKKKEMDRLLTCLNRAFVKLSQPFGEEALSLESRANEAQWFRKTAWNLAVQCDKDPVMMREFFILSYKMSQFCPSDQVILIARKTCLLMAVAVDLEQGRKASTAFEQTMFLSRALEEIQTCNDIHNFLKQTGTFSNDSCEKLLLLYEFEVRAKLNDPLLESFLESVWELPHLETKTFETIAIIAMEKPAHYPLIALKALKKALLLYKKEEPIDISQYSKCMHNLVNLSVPDGASNVELCPLEEVWGYFEDALSHISRTKDYPEMEILWLMVKSWNTGVLMFSRSKYASAEKWCGLALRFLNHLTSFKESYETQMNMLYSQLVEALSNNKGPVFHEHGYWSKSD

SEQ ID NO: 9709 - protein, 664 aa, Homo sapiens
MKRRNADCSKLRRPLKRNRITEGIYGSTFLYLKFLVVWALVLLADFVLEFRFEYLWPFWLFIRSVYDSFRYQGLAFSVFFVCVAFTSNIICLLFIPIQWLFFAASTYVWVQYVWHTERGVCLPTVSLWILFVYIEAAIRFKDLKNFHVDLCRPFAAHCIGYPVVTLGFGFKSYVSYKMRLRKQKEVQKENEFYMQLLQQALPPEQQMLQKQEKEAEEAAKGLPDMDSSILIHHNGGIPANKKLSTTLPEIEYREKGKEKDKDAKKHNLGINNNNILQPVDSKIQEIEYMENHINSKRLNNDLVGSTENLLKEDSCTASSKNYKNASGVVNSSPRSHSATNGSIPSSSSKNEKKQKCTSKSPSTHKDLMENCIPNNQLSKPDALVRLEQDIKKLKADLQASRQVEQELRSQISSLSSTERGIRSEMGQLRQENELLQNKLHNAVQMKQKDKQNISQLEKKLKAEQEARSFVEKQLMEEKKRKKLEEATAARAVAFAAASRGECTETLRNRIRELEAEGKKLTMDMKVKEDQIRELELKVQELRKYKENEKDTEVLMSALSAMQDKTQHLENSLSAETRIKLDLFSALGDAKRQLEIAQGQILQKDQEIKDLKQKIAEVMAVMPSITYSAATSPLSPVSPHYSSKFVETSPSGLDPNASVYQPLKK

SEQ ID NO: 9710 - protein, 501 aa, Homo sapiens
MRLPKLLTFLLWYLAWLDLEFICTVLGAPDLGQRPQGTRPGLAKAEAKERPPLARNVFRPGGHSYGGGATNANARAKGGTGQTGGLTQPKKDEPKKLPPRPGGPEPKPGHPPQTRQATARTVTPKGQLPGGKAPPKAGSVPSSFLLKKAREPGPPREPKEPFRPPPITPHEYMLSLYRTLSDADRKGGNSSVKLEAGLANTITSFIDKGQDDRGPVVRKQRYVFDISALEKDGLLGAELRILRKKPSDTAKPAAPGGGRAAQLKLSSCPSGRQPAALLDVRSVPGLDGSGWEVFDIWKLFRNFKNSAQLCLELEAWERGRAVDLRGLGFDRAARQVHEKALFLVFGRTKKRDLFFNEIKARSGQDDKTVYEYLFSQRRKRRAPLATRQGKRPSKNLKARCSRKALHVNFKDMGWDDWIIAPLEYEAFHCEGLCEFPLRSHLEPTNHAVIQTLMNSMDPESTPPTCCVPTRLSPISILFIDSANNVVYKQYEDMVVESCGCR

SEQ ID NO: 9711 - protein, 539 aa, Homo sapiens
MAESPGCCSVWARCLHCLYSCHWRKCPRERMQTSKCDCIWFGLLFLTFLLSLSWLYIGLVLLNDLHNFNEFLFRRWGHWMDWSLAFLLVISLLVTYASLLLVLALLLRLCRQPLHLHSLHKVLLLLIMLLVAAGLVGLDIQWQQEWHSLRVSLQATAPFLHIGAAAGIALLAWPVADTFYRIHRRGPKILLLLLFFGVVLVIYLAPLCISSPCIMEPRDLPPKPGLVGHRGAPMLAPENTLMSLRKTAECGATVFETDVMVSSDGVPFLMHDEHLSRTTNVASVFPTRITAHSSDFSWTELKRLNAGSWFLERRPFWGAKPLAGPDQKEAESQTVPALEELLEEAAALNLSIMFDLRRPPQNHTYYDTFVIQTLETVLNARVPQAMVFWLPDEDRANVQRRAPGMRQIYGRQGGNRTERPQFLNLPYQDLPLLDIKALHKDNVSVNLFVVNKPWLFSLLWCAGVDSVTTNDCQLLQQMRYPIWLITPQTYLIIWVITNCVSTMLLLWTFLLQRRFVKKRGKTGLETAVLLTRINNFMME

SEQ ID NO: 9712 - protein, 674 aa, Homo sapiens
MPSYTVTVATGSQWFAGTDDYIYLSLVGSAGCSEKHLLDKPFYNDFERGAVDSYDVTVDEELGEIQLVRIEKRKYWLNDDWYLKYITLKTPHGDYIEFPCYRWITGDVEVVLRDGRAKLARDDQIHILKQHRRKELETRQKQYRWMEWNPGFPLSIDAKCHKDLPRDIQFDSEKGVDFVLNYSKAMENLFINRFMHMFQSSWNDFADFEKIFVKISNTISERVMNHWQEDLMFGYQFLNGCNPVLIRRCTELPEKLPVTTEMVECSLERQLSLEQEVQQGNIFIVDFELLDGIDANKTDPCTLQFLAAPICLLYKNLANKIVPIAIQLNQIPGDENPIFLPSDAKYDWLLAKIWVRSSDFHVHQTITHLLRTHLVSEVFGIAMYRQLPAVHPIFKLLVAHVRFTIAINTKAREQLICECGLFDKANATGGGGHVQMVQRAMKDLTYASLCFPEAIKARGMESKEDIPYYFYRDDGLLVWEAIRTFTAEVVDIYYEGDQVVEEDPELQDFVNDVYVYGMRGRKSSGFPKSVKSREQLSEYLTVVIFTASAQHAAVNFGQYDWCSWIPNAPPTMRAPPPTAKGVVTIEQIVDTLPDRGRSCWHLGAVWALSQFQENELFLGMYPEEHFIEKPVKEAMARFRKNLEAIVSVIAERNKKKQLPYYYLSPDRIPNSVAI

SEQ ID NO: 9713 - protein, 1232 aa, Homo sapiens
MKEEVKGIPVRVALRCRPLVPKEISEGCQMCLSFVPGEPQVVVGTDKSFTYDFVFDPSTEQEEVFNTAVAPLIKGVFKGYNATVLAYGQTGSGKTYSMGGAYTAEQENEPTVGVIPRVIQLLFKEIDKKSDFEFTLKVSYLEIYNEEILDLLCPSREKAQINIREDPKEGIKIVGLTEKTVLVALDTVSCLEQGNNSRTVASTAMNSQSSRSHAIFTISLEQRKKSDKNSSFRSKLHLVDLAGSERQKKTKAEGDRLKEGININRGLLCLGNVISALGDDKKGGFVPYRDSKLTRLLQDSLGGNSHTLMIACVSPADSNLEETLNTLRYADRARKIKNKPIVNIDPQTAELNHLKQQVQQLQVLLLQAHGGTLPGSITVEPSENLQSLMEKNQSLVEENEKLSRGLSEAAGQTAQMLERIILTEQANEKMNAKLEELRQHAACKLDLQKLVETLEDQELKENVEIICNLQQLITQLSDETVACMAAAIDTAVEQEAQVETSPETSRSSDAFTTQHALRQAQMSKELVELNKALALKEALARKMTQNDSQLQPIQYQYQDNIKELELEVINLQKEKEELVLELQTAKKDANQAKLSERRRKRLQELEGQIADLKKKLNEQSKLLKLKESTERTVSKLNQEIRMMKNQRVQLMRQMKEDAEKFRQWKQKKDKEVIQLKERDRKRQYELLKLERNFQKQSNVLRRKTEEAAAANKRLKDALQKQREVADKRKETQSRGMEGTAARVKNWLGNEIEVMVSTEEAKRHLNDLLEDRKILAQDVAQLKEKKESGENPPPKLRRRTFSLTEVRGQVSESEDSITKQIESLETEMEFRSAQIADLQQKLLDAESEDRPKQRWENIATILEAKCALKYLIGELVSSKIQVSKLESSLKQSKTSCADMQKMLFEERNHFAEIETELQAELVRMEQQHQEKVLYLLSQLQQSQMAEKQLEESVSEKEQQLLSTLKCQDEELEKMREVCEQNQQLLRENEIIKQKLTLLQVASRQKHLPKDTLLSPDSSFEYVPPKPKPSRVKEKFLEQSMDIEDLKYCSEHSVNEHEDGDGDDDEGDDEEWKPTKLVKVSRKNIQGCSCKGWCGNKQCGCRKQKSDCGVDCCCDPTKCRNRQQGKDSLGTVERTQDSEGSFKLEDPTEVTPGLSFFNPVCATPNSKILKEMCDVEQVLSKKTPPAPSPFDLPELKHVATEYQENKAPGKKKKRALASNTSFFSGCSPIEEEAH

SEQ ID NO: 9714 - protein, 747 aa, Homo sapiens
MFGGPGPGVLGAQGMAGPLRGRVEELKLPWWRESSPLVLRHSEAARLAADALLERGEAAYLRVISEERELPFLSALDVDYMTSHVRGGPELSEAQGQEASGPDRLSLLSEVTSGTYFPMASDIDPPDLDLGWPEVPQATGFSPTQAVVHFQRDKAKNIKDLLRFLFSQAHTVVAVVMDIFTDMELLCDLMEASSRRGVPVYLLLAQEHLRHFLEMCYKMDLNGEHLPNMRVRSTCGDTYCSKAGRRFTGQALEKFVLIDCEQVVAGSYSFTWLCSQAHTSMVLQLRGRIVEDFDREFRCLYAESQPVEGFCGGEDPLSPRALRPPPVALAFRPDVPSPTSSLPSSTSLSSIKQSPLMGRSSYLALPGGGDCSDTGVVSSSLGPARREASGQPSLHRQLSDPNHGSPPGLYRANLGKLGAYPWSQSSPALNHNSTSPLTLAVGSPLLPRSRPLLQFHRGAPALSRFPENGLPGSQEPSPLRGRWVPGTTLETVEEKEKKASPSQSRGQLDLLVPFPRAREVGDPDSGVTPNSGPLRPGEQAPEDRRLSPSQADSQLDLLSRALGTGGAPELGSLRPGDRALEDRRLSLNQSRGQSDLLMQYPKAQGSRVPLETNSSARPARRAPDERRQTLGHSQLDLITKFGPFRGEGPGPNGLPISSPARTAGAGSGDEKRLTLGHSKLDLITKYHQLHGARQGTEPGGPKGGHLNGGNSDLVRDEKRLTLGHSKLDLITKYNKSKFKQLRSRFES

SEQ ID NO: 9715 - protein, 832 aa, Homo sapiens
MKPPGSSSRQPPLAGCSLAGASCGPQRGPAGSVPASAPARTPPCRLLLVLLLLPPLAASSRPRAWGAAAPSAPHWNETAEKNLGVLADEDNTLQQNSSSNISYSNAMQKEITLPSRLIYYINQDSESPYHVLDTKARHQQKHNKAVHLAQASFQIEAFGSKFILDLILNNGLLSSDYVEIHYENGKPQYSKGGEHCYYHGSIRGVKDSKVALSTCNGLHGMFEDDTFVYMIEPLELVHDEKSTGRPHIIQKTLAGQYSKQMKNLTMERGDQWPFLSELQWLKRRKRAVNPSRGIFEEMKYLELMIVNDHKTYKKHRSSHAHTNNFAKSVVNLVDSIYKEQLNTRVVLVAVETWTEKDQIDITTNPVQMLHEFSKYRQRIKQHADAVHLISRVTFHYKRSSLSYFGGVCSRTRGVGVNEYGLPMAVAQVLSQSLAQNLGIQWEPSSRKPKCDCTESWGGCIMEETGVSHSRKFSKCSILEYRDFLQRGGGACLFNRPTKLFEPTECGNGYVEAGEECDCGFHVECYGLCCKKCSLSNGAHCSDGPCCNNTSCLFQPRGYECRDAVNECDITEYCTGDSGQCPPNLHKQDGYACNQNQGRCYNGECKTRDNQCQYIWGTKAAGSDKFCYEKLNTEGTEKGNCGKDGDRWIQCSKHDVFCGFLLCTNLTRAPRIGQLQGEIIPTSFYHQGRVIDCSGAHVVLDDDTDVGYVEDGTPCGPSMMCLDRKCLQIQALNMSSCPLDSKGKVCSGHGVCSNEATCICDFTWAGTDCSIRDPVRNLHPPKDEGPKVNMATSRLIGAVAGTILALGVIFGGTGWGIENVKKRRFDPTQQGPI

SEQ ID NO: 9716 - protein, 2354 aa, Homo sapiens
MQKRQGYCSYCRVQYNNLEQHLFSAQHRSLTRQSRRQICTSSLMERFLQDVLQHHPYHCQESSSTQDETHVNTGSSSEVVHLDDAFSEEEEEDEDKVEDEDATEERPSEVSEPIEELHSRPHKSQEGTQEVSVRPSVIQKLEKGQQQPLEFVHKIGASVRKCNLVDIGQATNNRSNLVRPPVICNAPASCLPESSNDRPVTANTTSLPPAAHLDSVSKCDPNKVEKYLEQPDGASRNPVPSSHVETTSFSYQKHKESNRKSLRMNSDKLVLWKDVKSQGKTLSAGLKFHERMGTKGSLRVKSPSKLAVNPNKTDMPSNKGIFEDTIAKNHEEFFSNMDCTQEEKHLVFNKTAFWEQKCSVSSEMKFDCISLQSASDQPQETAQDLSLWKEEQIDQEDNYESRGSEMSFDCSSSFHSLTDQSKVSAKEVNLSKEVRTDVQYKNNKSYVSKISSDCDDILHLVTNQSQMIVKEISLQNARHISLVDQSYESSSSETNFDCDASPQSTSDYPQQSVTEVNLPKEVHIGLVDKNYGSSSSEVSADSVFPLQSVVDRPPVAVTETKLRKKAHTSLVDNYGSSCSETSFDCDVSLESVVDHPQLTVKGRNLKGRQVHLKHKKRKPSSAKAHLDCDVSLGTVADESQRAVEKINLLKEKNADLMDMNCESHGPEMGFQADAQLADQSQVAEIERQKVDVDLENKSVQSSRSSLSSDSPASLYHSAHDEPQEALDEVNLKELNIDMEVRSYDCSSSELTFDSDPPLLSVTEQSHLDAEGKERHIDLEDESCESDSSEITFDSDIPLYSVIDQPEVAVYEEETVDLESKSNESCVSEITFDSDIPLHSGNDHPEVAVKEVIQKEEYIHLERKNDEPSGSEISSDSHAPLHSVTNSPEVAVKKLNPQKEEQVHLENKENEPIDSEVSLDYNIIFHSVTGRSEDPIKEISLHTKEHMYLENKSVFETSLDSDVPLQAATHKPEVIVKETWLQREKHAEFQGRSTEFSGSKTSLDSGVPHYSVTEPQVAVNKINRKKQYVLENKNDKCSGSEIILDSNVPPQSMTDQPQLAFLKEKHVNLKDKNSKSGDSKITFDSEQLQEAVKKIDQWKEEVIGLKNKINEPSTYKLIHHPDVSVQSVADQPKVAIKHVNLGNENHMYLEVKNSQYSCSEMNLDSGFLGQSIVNRPQITILEQEHIELEGKHNQCCGSEVSFDSDDPLQSVADRLRETVKEISLWKDEEVDTEDRRNEAKGFEIMYDSDVLQPVAGQPEEVVKEVSLWKEHVDLENKIVKPTDSRINFDSHEPLQSVTNKIPGANKEINLLREEHVCLDDKGYVPSDSEIIYVSNIPLQSVIKQPHILEEEHASLEDKSSNSYSPEESSDSNDSFQAAADELQKPVKEINLWKEDHIYLEDKSYKLGDFDVSYASHIPVQFVTDQSSVPVKEINLQKKDHNDLENKNCEVCGSEIKCHSCVHLQSEVDQPQVSYKEADLQKEEHVVMEEKTDQPSDSEMMYDSDVPFQIVVNQFPGSVKETHLPKVVLVDLVPGDSDYEVISDDIPLQLVTDPPQLTVKDISCINTECIDIEDKSCDFFGSEVRCNCKASTPSMTNQCKETFKIINRKKDYIILGEPSCQSCGSEMNFNVDASDQSMTYESQGPDEKMVKYIDSEDKSCGYNGSKGKFNLEDTSHRTTHRLQKAHKEASLRKDPRNAGLKGKSCQSSASAVDFGASSKSALHRRADKKKRSKLKHRDLEVSCEPDGFEMNFQCAPPLPSDTDQPQETVKKRHPCKKVSSDLKEKNHDSQSSSVLKVDSVRNLKKAKDVIEDNPDEPVLEALPHVPPSFVGKTWSQIMREDDIKINALVKEFREGRFHCYFDDDCETKKVSSKGKKKVTWADLQGKEDTAPTQAVSESDDIVCGISDIDDLSVALDKPCHRHPPAERPPKQKGRVASQCQTAKISHSTQTSCKNYPVMKRKIIRQEEDPPKSKCSRLQDDRKTKKKVKIGTVEFPASCTKVLKPMQPKALVCVLSSLNIKLKEGEGLPFPKMRHHSWDNDIRFICKYKRNIFDYYEPLIKQIVISPPLSVIVPEFERRNWVKIHFNRSNQNSSAGDNDADGQGSASAPLMAVPARYGFNSHQGTSDSSLFLEESKVLHARELPKKRNFQLTFLNHDVVKISPKSVRNKLLESQSKKKIHGKRVTTSSNKLGFPKKVYKPIILQQKPRKASEKQSIWIRTKPSDIIRKYISKYSVFLRHRYQSRSAFLGRYLKKKKSVVSRLKKAKRTAKVLLNSSVPPAGAEELSSAMANPPPKRPVRASCRVARRRKKTDESYHGRQKGPSTPVRAYDLRSSSCLQQRERMMTRLANKLRGNEVK

SEQ ID NO: 9717 - protein, 1437 aa, Homo sapiens
MTLPHSLGGAGDPRPPQAMEVHRLEHRQEEEQKEERQHSLRMGSSVRRRTFRSSEEEHEFSAADYALAAALALTASSELSWEAQLRRQTSAVELEERGQKRVGFGNDWERTEIAFLQTHRLLRQRRDWKTLRRRTEEKVQEAKELRELCYGRGPWFWIPLRSHAVWEHTTVLLTCTVQASPPPQVTWYKNDTRIDPRLFRAGKYRITNNYGLLSLEIRRCAIEDSATYTVRVKNAHGQASSFAKVLVRTYLGKDAGFDSEIFKRSTFGPSVEFTSVLKPVFAREKEPFSLSCLFSEDVLDAESIQWFRDGSLLRSSRRRKILYTDRQASLKVSCTYKEDEGLYMVRVPSPFGPREQSTYVLVRDAEAENPGAPGSPLNVRCLDVNRDCLILTWAPPSDTRGNPITAYTIERCQGESGEWIACHEAPGGTCRCPIQGLVEGQSYRFRVRAISRVGSSVPSKASELVVMGDHDAARRKTEIPFDLGNKITISTDAFEDTVTIPSPPTNVHASEIREAYVVLAWEEPSPRDRAPLTYSLEKSVIGSGTWEAISSESPVRSPRFAVLDLEKKKSYVFRVRAMNQYGLSDPSEPSEPIALRGPPATLPPPAQVQAFRDTQTSVSLTWDPVKDPELLGYYIYSRKVGTSEWQTVNNKPIQGTRFTVPGLRTGKEYEFCVRSVSEAGVGESSAATEPIRVKQALATPSAPYGFALLNCGKNEMVIGWKPPKRRGGGKILGYFLDQHDSEELDWHAVNQQPIPTRVCKVSDLHEGHFYEFRARAANWAGVGELSAPSSLFECKEWTMPQPGPPYDVRASEVRATSLVLQWEPPLYMGAGPVTGYHVSFQEEGSEQWKPVTPGPISGTHLRVSDLQPGKSYVFQVQAMNSAGLGQPSMPTDPVLLEDKPGAHEIEVGVDEEGFIYLAFEAPEAPDSSEFQWSKDYKGPLDPQRVKIEDKVNKSKVILKEPGLEDLGTYSVIVTDADEDISASHTLTEEELEKLKKLSHEIRNPVIKLISGWNIDILERGEVRLWLEVEKLSPAAELHLIFNNKEIFSSPNRKINFDREKGLVEVIIQNLSEEDKGSYTAQLQDGKAKNQITLTLVDDDFDKLLRKADAKRRDWKRKQGPYFERPLQWKVTEDCQVQLTCKVTNTKKETRFQWFFQRAEMPDGQYDPETGTGLLCIEELSKKDKGIYRAMVSDDRGEDDTILDLTGDALDAIFTELGRIGALSATPLKIQGTEEGIRIFSKVKYYNVEYMKTTWFHKDKRLESGDRIRTGTTLDEIWLHILDPKDSDKGKYTLEIAAGKEVRQLSTDLSGQAFEDAMAEHQRLKTLAIIEKNRAKVVRGLPDVATIMEDKTLCLTCIVSGDPTPEISWLKNDQPVTFLDRYRMEVRGTEVTITIEKVNSEDSGRYGVFVKNKYGSETGQVTISVFKHGDEPKELKSM

SEQ ID NO: 9718 - protein, 783 aa, Homo sapiens [sequence omitted]

SEQ ID NO: 9719 - protein, 869 aa, Homo sapiens
MRELVNIPLVHILTLVAFSGTEKLPKAPVITTPLETVDALVEEVATFMCAVESYPQPEISWTRNKILIKLFDTRYSIRENGQLLTILSVEDSDDGIYCCTANNGVGGAVESCGALQVKMKPKITRPPINVKIIEGLKAVLPCTTMGNPKPSVSWIKGDSPLRENSRIAVLESGSLRIHNVQKEDAGQYRCVAKNSLGTAYSKVVKLEVEVFARILRAPESHNVTFGSFVTLHCTATGIPVPTITWIENGNAVSSGSIQESVKDRVIDSRLQLFITKPGLYTCIATNKHGEKFSTAKAAATISIAEWSKPQKDNKGYCAQYRGEVCNAVLAKDALVFLNTSYADPEEAQELLVHTAWNELKVVSPVCRPAAEALLCNHIFQECSPGVVPTPIPICREYCLAVKELFCAKEWLVMEEKTHRGLYRSEMHLLSVPECSKLPSMHWDPTACARLPHLDYNKENLKTFPPMTSSKPSVDIPNLPSSSSSSFSVSPTYSMTVIISIMSSFAIFVLLTITTLYCCRRRKQWKNKKRESAAVTLTTLPSELLLDRLHPNPMYQRMPLLLNPKLLSLEYPRNNIEYVRDIGEGAFGRVFQARAPGLLPYEPFTMVAVKMLKEEASADMQADFQREAALMAEFDNPNIVKLLGVCAVGKPMCLLFEYMAYGDLNEFLRSMSPHTVCSLSHSDLSMRAQVSSPGPPPLSCAEQLCIARQVAAGMAYLSERKFVHRDLATRNCLVGENMVVKIADFGLSRNIYSADYYKANENDAIPIRWMPPESIFYNRYTTESDVWAYGVVLWEIFSYGLQPYYGMAHEEVIYYVRDGNILSCPENCPVELYNLMRLCWSKLPADRPSFTSIHRILERMCERAEGTVSV

SEQ ID NO: 9720 - protein, 868 aa, Homo sapiens
MWPRLAFCCWGLALVSGWATFQQMSPSRNFSFRLFPETAPGAPGSIPAPPAPGDEAAGSRVERLGQAFRRRVRLLRELSERLELVFLVDDSSSVGEVNFRSELMFVRKLLSDFPVVPTATRVAIVTFSSKNYVVPRVDYISTRRARQHKCALLLQEIPAISYRGGGTYTKGAFQQAAQILLHARENSTKVVFLITDGYSNGGDPRPIAASLRDSGVEIFTFGIWQGNIRELNDMASTPKEEHCYLLHSFEEFEALARRALHEDLPSGSFIQDDMVHCSYLCDEGKDCCDRMGSCKCGTHTGHFECICEKGYYGKGLQYECTACPSGTYKPEGSPGGISSCIPCPDENHTSPPGSTSPEDCVCREGYRASGQTCELVHCPALKPPENGYFIQNTCNNHFNAACGVRCHPGFDLVGSSIILCLPNGLWSGSESYCRVRTCPHLRQPKHGHISCSTREMLYKTTCLVACDEGYRLEGSDKLTCQGNSQWDGPEPRCVERHCSTFQMPKDVIISPHNCGKQPAKFGTICYVSCRQGFILSGVKEMLRCTTSGKWNVGVQAAVCKDVEAPQINCPKDIEAKTLEQQDSANVTWQIPTAKDNSGEKVSVHVHPAFTPPYLFPIGDVAIVYTATDLSGNQASCIFHIKVIDAEPPVIDWCRSPPPVQVSEKVHAASWDEPQFSDNSGAELVITRSHTQGDLFPQGETIVQYTATDPSGNNRTCDIHIVIKGSPCEIPFTPVNGDFICTPDNTGVNCTLTCLEGYDFTEGSTDKYYCAYEDGVWKPTYTTEWPDCAKKRFANHGFKSFEMFYKAARCDDTDLMKKFSEAFETTLGKMVPSFCSDAEDIDCRLEENLTKKYCLEYNYDYENGFAIGN

SEQ ID NO: 9721 - protein, 3571 aa, Homo sapiens
MWPRLAFCCWGLALVSGWATFQQMSPSRNFSFRLFPETAPGAPGSIPAPPAPGDEAAGSRVERLGQAFRRRVRLLRELSERLELVFLVDDSSSVGEVNFRSELMFVRKLLSDFPVVPTATRVAIVTFSSKNYVVPRVDYISTRRARQHKCALLLQEIPAISYRGGGTYTKGAFQQAAQILLHARENSTKVVFLITDGYSNGGDPRPIAASLRDSGVEIFTFGIWQGNIRELNDMASTPKEEHCYLLHSFEEFEALARRALHEDLPSGSFIQDDMVHCSYLCDEGKDCCDRMGSCKCGTHTGHFECICEKGYYGKGLQYECTACPSGTYKPEGSPGGISSCIPCPDENHTSPPGSTSPEDCVCREGYRASGQTCELVHCPALKPPENGYFIQNTCNNHFNAACGVRCHPGFDLVGSSIILCLPNGLWSGSESYCRVRTCPHLRQPKHGHISCSTREMLYKTTCLVACDEGYRLEGSDKLTCQGNSQWDGPEPRCVERHCSTFQMPKDVIISPHNCGKQPAKFGTICYVSCRQGFILSGVKEMLRCTTSGKWNVGVQAAVCKDVEAPQINCPKDIEAKTLEQQDSANVTWQIPTAKDNSGEKVSVHVHPAFTPPYLFPIGDVAIVYTATDLSGNQASCIFHIKVIDAEPPVIDWCRSPPPVQVSEKVHAASWDEPQFSDNSGAELVITRSHTQGDLFPQGETIVQYTATDPSGNNRTCDIHIVIKGSPCEIPFTPVNGDFICTPDNTGVNCTLTCLEGYDFTEGSTDKYYCAYEDGVWKPTYTTEWPDCAKKRFANHGFKSFEMFYKAARCDDTDLMKKFSEAFETTLGKMVPSFCSDAEDIDCRLEENLTKKYCLEYNYDYENGFAIGPGGWGAANRLDYSYDDFLDTVQETATSIGNAKSSRIKRSAPLSDYKIKLIFNITASVPLPDERNDTLEWENQQRLLQTLETITNKLKRTLNKDPMYSFQLASEILIADSNSLETKKASPFCRPGSVLRGRMCVNCPLGTYYNLEHFTCESCRIGSYQDEEGQLECKLCPSGMYTEYIHSRNISDCKAQCKQGTYSYSGLETCESCPLGTYQPKFGSRSCLSCPENTSTVKRGAVNISACGVPCPEGKFSRSGLMPCHPCPRDYYQPNAGKAFCLACPFYGTTPFAGSRSITECSSFSSTFSAAEESVVPPASLGHIKKRHEISSQVFHECFFNPCHNSGTCQQLGRGYVCLCPLGYTGLKCETDIDECSPLPCLNNGVCKDLVGEFICECPSGYTGQRCEENINECSSSPCLNKGICVDGVAGYRCTCVKGFVGLHCETEVNECQSNPCLNNAVCEDQVGGFLCKCPPGFLGTRCGKNVDECLSQPCKNGATCKDGANSFRCLCAAGFTGSHCELNINECQSNPCRNQATCVDELNSYSCKCQPGFSGKRCETEQSTGFNLDFEVSGIYGYVMLDGMLPSLHALTCTFWMKSSDDMNYGTPISYAVDNGSDNTLLLTDYNGWVLYVNGREKITNCPSVNDGRWHHIAITWTSANGIWKVYIDGKLSDGGAGLSVGLPIPGGGALVLGQEQDKKGEGFSPAESFVGSISQLNLWDYVLSPQQVKSLATSCPEELSKGNVLAWPDFLSGIVGKVKIDSKSIFCSDCPRLGGSVPHLRTASEDLKPGSKVNLFCDPGFQLVGNPVQYCLNQGQWTQPLPHCERISCGVPPPLENGFHSADDFYAGSTVTYQCNNGYYLLGDSRMFCTDNGSWNGVSPSCLDVDECAVGSDCSEHASCLNVDGSYICSCVPPYTGDGKNCAEPIKCKAPGNPENGHSSGEIYTVGAEVTFSCQEGYQLMGVTKITCLESGEWNHLIPYCKAVSCGKPAIPENGCIEELAFTFGSKVTYRCNKGYTLAGDKESSCLANSSWSHSPPVCEPVKCSSPENINNGKYILSGLTYLSTASYSCDTGYSLQGPSIIECTASGIWDRAPPACHLVFCGEPPAIKDAVITGNNFTFRNTVTYTCKEGYTLAGLDTIECLADGKWSRSDQQCLAVSCDEPPIVDHASPETAHRLFGDIAFYYCSDGYSLADNSQLLCNAQGKWVPPEGQDMPRCIAHFCEKPPSVSYSILESVSKAKFAAGSVVSFKCMEGFVLNTSAKIECMRGGQWNPSPMSIQCIPVRCGEPPSIMNGYASGSNYSFGAMVAYSCNKGFYIKGEKKSTCEATGQWSSPIPTCHPVSCGEPPKVENGFLEHTTGRIFESEVRYQCNPGYKSVGSPVFVCQANRHWHSESPLMCVPLDCGKPPPIQNGFMKGENFEVGSKVQFFCNEGYELVGDSSWTCQKSGKWNKKSNPKCMPAKCPEPPLLENQLVLKELTTEVGVVTFSCKEGHVLQGPSVLKCLPSQQWNDSFPVCKIVLCTPPPLISFGVPIPSSALHFGSTVKYSCVGGFFLRGNSTTLCQPDGTWSSPLPECVPVECPQPEEIPNGIIDVQGLAYLSTALYTCKPGFELVGNTTTLCGENGHWLGGKPTCKAIECLKPKEILNGKFSYTDLHYGQTVTYSCNRGFRLEGPSALTCLETGDWDVDAPSCNAIHCDSPQPIENGFVEGADYSYGAIIIYSCFPGFQVAGHAMQTCEESGWSSSIPTCMPIDCGLPPHIDFGDCTKLKDDQGYFEQEDDMMEVPYVTPHPPYHLGAVAKTWENTKESPATHSSNFLYGTMVSYTCNPGYELLGNPVLICQEDGTWNGSAPSCISIECDLPTAPENGFLRFTETSMGSAVQYSCKPGHILAGSDLRLCLENRKWSGASPRCEAISCKKPNPVMNGSIKGSNYTYLSTLYYECDPGYVLNGTERRTCQDDKNWDEDEPICIPVDCSSPPVSANGQVRGDEYTFQKEIEYTCNEGFLLEGARSRVCLANGSWSGATPDCVPVRCATPPQLANGVTEGLDYGFMKEVTFHCHEGYILHGAPKLTCQSDGNWDAEIPLCKPVNCGPPEDLAHGFPNGFSFIHGGHIQYQCFPGYKLHGNSSRRCLSNGSWSGSSPSCLPCRCSTPVIEYGTVNGTDFDCGKAARIQCFKGFKLLGLSEITCEADGQWSSGFPHCEHTSCGSLPMIPNAFISETSSWKENVITYSCRSGYVIQGSSDLICTEKGVWSQPYPVCEPLSCGSPPSVANAVATGEAHTYESEVKLRCLEGYTMDTDTDTFTCQKDGRWFPERISCSPKKCPLPENITHILVHGDDFSVNRQVSVSCAEGYTFEGVNISVCQLDGTWEPPFSDESCSPVSCGKPESPEHGFVVGSKYTFESTIIYQCEPGYELEGNRERVCQENRQWSGGVAICKETRCETPLEFLNGKADIENRTTGPNVVYSCNRGYSLEGPSEAHCTENGTWSHPVPLCKPNPCPVPFVIPENALLSEKEFYVDQNVSIKCREGFLLQGHGIITCNPDETWTQTSAKCEKISCGPPAHVENAIARGVHYQYGDMITYSCYSGYMLEGFLRSVCLENGTWTSPPICRAVCRFPCQNGGICQRPNACSCPEGWMGRLCEEPICILPCLNGGRCVAPYQCDCPPGWTGSRCHTAVCQSPCLNGGKCVRPNRCHCLSSWTGHNCSRKRRTGF

SEQ ID NO: 9722 - protein, 325 aa, Homo sapiens
MAAMRKALPRRLVGLASLRAVSTSSMGTLPKRVKIVEVGPRDGLQNEKNIVSTPVKIKLIDMLSEAGLSVIETTSFVSPKWVPQMGDHTEVLKGIQKFPGINYPVLTPNLKGFEAAVAAGAKEVVIFGAASELFTKKNINCSIEESFQRFDAILKAAQSANISVRGYVSCALGCPYEGKISPAKVAEVTKKFYSMGCYEISLGDTIGVGTPGIMKDMLSAVMQEVPLAALAVHCHDTYGQALANTLMALQMGVSVVDSSVAGLGGCPYAQGASGNLATEDLVYMLEGLGIHTGVNLQKLLEAGNFICQALNRKTSSKVAQATCKL

SEQ ID NO: 9723 - protein, 1302 aa, Homo sapiens
MEQLSDEEIDHGAEEDSDKEDQDLDKMFGAWLGELDKLTQSLDSDKPMEPVKRSPLRQETNMANFSYRFSIYNLNEALNQGETVDLDALMADLCSIEQELSSIGSGNSKRQITETKATQKLPVSRHTLKHGTLKGLSSSSNRIAKPSHASYSLDDVTAQLEQASLSMDEAAQQSVLEDTKPLVTNQHRRTASAGTVSDAEVHSISNSSHSSITSAASSMDSLDIDKVTRPQELDLTHQGQPITEHAISLRCSSKQAKRHIDFTEEQAELTPHSYLDRETSLLLRNIAGKPSHLLTKEEQAAKLKAEKIRVALEKIKEAQVKKLVIRVHMSDDSSKTMMVDERQTVRQVLDNLMDKSHCGYSLDWSLVETVSELQMERIFEDHENLVENLLNWTRDSQNKLIFMERIEKYALFKNPQNYLLGKKETAEMADRNKEVLLEECFCGSSVTVPEIEGVLWLKDDGKKSWKKRYFLLRASGIYYVPKGKAKVSRDLVCFLQLDHVNVYYGQDYRNKYKAPTDYCLVLKHPQIQKKSQYIKYLCCDDVRTLHQWVNGIRIAKYGKQLYMNYQEALKRTESAYDWTSLSSSSIKSGSSSSSIPESQSNHSNQSDSGVSDTQPAGHVRSQSIVSSVFSEAWKRGTQLEESSKARMESMNRPYTSLVPPLSPQPKIVTPYTASQPSPPLPPPPPPPPPPPPPPPPPPPPLPSQSAPSAGSAAPMFVKYSTITRLQNASQHSGALFKPPTPPVMQSQSVKPQILVPPNGVVPPPPPPPPPPTPGSAMAQLKPAPCAPSLPQFSAPPPPLKIHQVQHITQVAPPTPPPPPPIPAPLPPQAPPKPLVTIPAPTSTKTVAPVVTQAAPPTPTPPVPPAKKQPAFPASYIPPSPPTPPVPVPPPTLPKQQSFCAKPPPSPLSPVPSVVKQIASQFPPPPTPPAMESQPLKPVPANVAPQSPPAVKAKPKWQPSSIPVPSPDFPPPPPESSLVFPPPPPSPVPAPPPPPPPTASPTPDKSGSPGKKTSKTSSPGGKKPPPTPQRNSSIKSSSGAEHPEPKRPSVDSLVSKFTPPAESGSPSKETLPPPAAPPKPGKLNLSGVNLPGVLQQGCVSAKAPVLSGRGKDSVVEFPSPPSDSDFPPPPPETELPLPPIEIPAVFSGNTSPKVAVVNPQPQQWSKMSVKKAPPPTRPKRNDSTRLTQAEISEQPTMATVVPQVPTSPKSSLSVQPGFLADLNRTLQRKSITRHGSLSSRMSRAEPTATMDDMALPPPPPELLSDQQKAGYGGSHISGYATLRRGPPPAPPKRDQNTKLSRDW

SEQ ID NO: 9724 - protein, 115 aa, Homo sapiens
MVQIIKDTNEFKTFLTAAGHKLAVVQFSSKRCGPCKRMFPVFHAMSVKYQNVFFANVDVNNSPELAETCHIKTIPTFQMFKKSQKVTLFSRIKRIICCYRSGFMSNLCLADDGNE

SEQ ID NO: 9725 - protein, 127 aa, Homo sapiens
MVQIIKDTNEFKTFLTAAGHKLAVVQFSSKRCGPCKRMFPVFHAMSVKYQNVFFANVDVNNSPELAETCHIKTIPTFQMFKKSQKVTLFSRIKRIICCYRSGFMSNLIFEFCGADAKKLEAKTQELM

SEQ ID NO: 9726 - protein, 1282 aa, Homo sapiens
MEAKDQKKHRKKNSGPKAAKKKKRLLQDLQLGDEEDARKRNPKAFAVQSAVRMARSFHRTQDLKTKKHHIPVVDRTPLEPPPIVVVVMGPPKVGKSTLIQCLIRNFTRQKLTEIRGPVTIVSGKKRRLTIIECGCDINMMIDLAKVADLVLMLIDASFGFEMETFEFLNICQVHGFPKIMGVLTHLDSFKHNKQLKKTKKRLKHRFWTEVYPGAKLFYLSGMVHGEYQNQEIHNLGRFITVMKFRPLTWQTSHPYILADRMEDLTNPEDIRTNIKCDRKVSLYGYLRGAHLKNKSQIHMPGVGDFAVSDISFLPDPCALPEQQKKRCLNEKEKLVYAPLSGVGGVLYDKDAVYVDLGGSHVFQDEVGPTHELVQSLISTHSTIDAKMASSRVTLFSDSKPLGSEDIDNQGLMMPKEEKQMDLNTGRMRRKAIFGDEDESGDSDDEEDDEMSEDDGLENGSSDEEAEEEENAEMTDQYMAVKGIKRRKLELEEDSEMDLPAFADSDDDLERSSAEEGEAEEADESSEEEDCTAGEKGISGSKAAGEGSKAGLSPANCQSDRVNLEKSLLMKKAALPTFDSGHCTAEEVFASEDESEESSSLSAEEEDSENEEAIRKKLSKPSQVSSGQKLGPQNFIDETSDIENLLKEEEDYKEENNDSKETSGALKWKEDLSRKAAEAFLRQQQAAPNLRKLIYGTVTEDNEEEDDDTLEELGGLFRVNQPDRECKHKADSLDCSRFLVEAPHDWDLEEVMNSIRDCFVTGKWEDDKDAAKVLAEDEELYGDFEDLETGDVHKGKSGPNTQNEDIEKEVKEEIDPDEEESAKKKHLDKKRKLKEMFDAEYDEGESTYFDDLKGEMQKQAQLNRAEFEDQDDEARVQYEGFRPGMYVRIEIENVPCEFVQNFDPHYPIILGGLGNSEGNVGYVQMRLKKHRWYKKILKSRDPIIFSVGWRRFQTIPLYYIEDHNGRQRLLKYTPQHMHCGAAFWGPITPQGTGFLAIQSVSGIMPDFRIAATGVVLDLDKSIKIVKKLKLTGFPYKIFKNTSFIKGMFNSALEVAKFEGAVIRTVSGIRGQIKKALRAPEGAFRASFEDKLLMSDIVFMRTWYPVSIPAFYNPVTSLLKPVGEKDTWSGMRTTGQLRLAHGVRLKANKDSLYKPILRQKKHFNSLHIPKALQKALPFKNKPKTQAKAGKVPKDRRRPAVIREPHERKILALLDALSTVHSQKMKKAKEQRHLHNKEHFRAKQKEEEEKLKRQKDLRKKLFRIQGQKERRNQKSSLKGAEGQLQ

SEQ ID NO: 9727 - protein, 365 aa, Homo sapiens
MASTESSLLRSLGLSPGPGSSEVELDCWFDEDFKFILLPVSYAVVFVLGLGLNAPTLWLFIFRLRPWDATATYMFHLALSDTLYVLSLPTLIYYYAAHNHWPFGTEICKFVRFLFYWNLYCSVLFLTCISVHRYLGICHPLRALRWGRPRLAGLLCLAVWLVVAGCLVPNLFFVTTSNKGTTVLCHDTTRPEEFDHYVHFSSAVMGLLFGVPCLVTLVCYGLMARRLYQPLPGSAQSSSRLRSLRTIAVVLTVFAVCFVPFHITRTIYYLARLLEADCRVLNIVNVVYKVTRPLASANSCLDPVLYLLTGDKYRRQLRQLCGGGKPQPRTAASSLALVSLPEDSSCRWAATPQDSSCSTPRADRL

SEQ ID NO: 9728 - protein, 948 aa, Homo sapiens
MRWPQPGAAARLPPESPGPPESPGPPEREAAAARRWTGAEPQDCAPGSGRPEKPPQLSEDDIWLKSEGDNYSATLLEPAASSLSPDHKNMEIEVSVAECKSVPGITSTPHPMDHPSAFYSPPHNGLLTDHHESLDNDVAREIRYLDEVLEANCCDSAVDGTYNGTSSPEPGAVVLVGGLSPPVHEATQPEPTERTASRQAPPHIELSNSSPDPMAEAERTNGHSPSQPRDALGDSLQVPVSPSSTTSSRCSSRDGEFTLTTLKKEAKFELRAFHEDKKPSKLFEDDEHEKEQYCIRKVRPSEEMLELEKERRELIRSQAVKKNPGIAAKWWNPPQEKTIEEQLDEEHLESHKKYKERKERRAQQEQLLLQKQLQQQQQQPPSQLCTAPASSHERASMIDKAKEDIVTEQIDFSAARKQFQLMENSRQAVAKGQSTPRLFSIKPFYRPLGSVNSDKPLTNPRPPSVGGPPEDSGASAAKGQKSPGALETPSAAGSQGNTASQGKEGPYSEPSKRGPLSKLWAEDGEFTSARAVLTVVKDDDHGILDQFSRSVNVSLTQEELDSGLDELSVRSQDTTVLETLSNDFSMDNISDSGASNETTNALQENSLADFSLPQTPQTDNPSEGRGEGVSKSFSDHGFYSPSSTLGDSPLVDDPLEYQAGLLVQNAIQQAIAEQVDKAVSKTSRDGAEQQGPEATVEEAEAAAFGSEKPQSMFEPPQVSSPVQEKRDVLPKILPAEDRALRERGPPQPLPAVQPSGPINMEETRPEGSYFSKYSEAAELRSTASLLATQESDVMVGPFKLRSRKQRTLSMIEEEIRAAQEREEELKRQRQVLQSTQSPRTKNAPSLPSRTCYKTAPGKIEKVKPPPSPTTEGPSLQPDLAPEEAAGTQRPKNLMQTLMEDYETHKSKRRERMDDSSVLEATRVNRRKSALALRWEAGIYANQEEEDNE

SEQ ID NO: 9729 - protein, 1103 aa, Homo sapiens
MAEAELHKERLQAIAEKRKRQTEIEGKRQQLDEQILLLQHSKSKVLREKWLLQGIPAGTAEEEEARRRQSEEDEFRVKQLEDNIQRLEQEIQTLESEESQISAKEQIILEKLKETEKSFKDFQKGFSSTDGDAVNYISSQLPDLPILCSRTAEPSPGQDGTSRAAGVGWENVLLKEGESASNATETSGPDMTIKKPPQLSEDDIWLKSEGDNYSATLLEPAASSLSPDHKNMEIEVSVAECKSVPGITSTPHPMDHPSAFYSPPHNGLLTDHHESLDNDVAREIRYLDEVLEANCCDSAVDGTYNGTSSPEPGAVVLVGGLSPPVHEATQPEPTERTASRQAPPHIELSNSSPDPMAEAERTNGHSPSQPRDALGDSLQVPVSPSSTTSSRCSSRDGEFTLTTLKKEAKFELRAFHEDKKPSKLFEDDEHEKEQYCIRKVRPSEEMLELEKERRELIRSQAVKKNPGIAAKWWNPPQEKTIEEQLDEEHLESHKKYKERKERRAQQEQLLLQKQLQQQQQQPPSQLCTAPASSHERASMIDKAKEDIVTEQIDFSAARKQFQLMENSRQAVAKGQSTPRLFSIKPFYRPLGSVNSDKPLTNPRPPSVGGPPEDSGASAAKGQKSPGALETPSAAGSQGNTASQGKEGPYSEPSKRGPLSKLWAEDGEFTSARAVLTVVKDDDHGILDQFSRSVNVSLTQEELDSGLDELSVRSQDTTVLETLSNDFSMDNISDSGASNETTNALQENSLADFSLPQTPQTDNPSEGRGEGVSKSFSDHGFYSPSSTLGDSPLVDDPLEYQAGLLVQNAIQQAIAEQVDKAVSKTSRDGAEQQGPEATVEEAEAAAFGSEKPQSMFEPPQVSSPVQEKRDVLPKILPAEDRALRERGPPQPLPAVQPSGPINMEETRPEGSYFSKYSEAAELRSTASLLATQESDVMVGPFKLRSRKQRTLSMIEEEIRAAQEREEELKRQRQVLQSTQSPRTKNAPSLPSRTCYKTAPGKIEKVKPPPSPTTEGPSLQPDLAPEEAAGTQRPKNLMQTLMEDYETHKSKRRERMDDSSYTSKLLSCKVTSEVLEATRVNRRKSALALRWEAGIYANQEEEDNE

SEQ ID NO: 9730 - protein, 379 aa, Homo sapiens
MEMAEAELHKERLQAIAEKRKRQTEIEGKRQQLDEQILLLQHSKSKVLREKWLLQGIPAGTAEEEEARRRQSEEDEFRVKQLEDNIQRLEQEIQTLESEESQISAKEQIILEKLKETEKSFKDFQKGFSSTDGAVYAMEINVEKDKQTGETKILSTSTIGPEGVHQKGVKVYDDGTKVVYEVRSGGTVVENGVHKLSTKDVEELIQKAGQSSLGGGHVSERTVIADGSLSHPKEHMLCKEAKLEMVHKSRKDHSSGNPGQQAQAPSAAGPEANLDQPVTMIFMGYQNIEDEEETKKVLGYDETIKAELVLIDEDDEKSLREKTVTDVSTIDGNAAELVSGRPVSDTTEPSSPEGKEESLATEPAPGTQKKKRCQCCVVM

SEQ ID NO: 9731 - protein, 913 aa, Homo sapiens
MTSRLRALGGRINNIRTSELPKEKTRSEVICSIHFLDGVVQTFKVTKQDTGQVLLDMVHNHLGVTEKEYFGLQHDDDSVDSPRWLEASKAIRKQLKGGFPCTLHFRVRFFIPDPNTLQQEQTRHLYFLQLKMDICEGRLTCPLNSAVVLASYAVQSHFGDYNSSIHHPGYLSDSHFIPDQNEDFLTKVESLHEQHSGLKQSEAESCYINIARTLDFYGVELHSGRDLHNLDLMIGIASAGVAVYRKYICTSFYPWVNILKISFKRKKFFIHQRQKQAESREHIVAFNMLNYRSCKNLWKSCVEHHTFFQAKKLLPQEKNVLSQYWTMGSRNTKKSVNNQYCKKVIGGMVWNPAMRRSLSVEHLETKSLPSRSPPITPNWRSPRLRHEIRKPRHSSADNLANEMTYITETEDVFYTYKGSLAPQDSDSEVSQNRSPHQESLSENNPAQSYLTQKSSSSVSPSSNAPGSCSPDGVDQQLLDDFHRVTKGGSTEDASQYYCDKNDNGDSYLVLIRITPDEDGKFGFNLKGGVDQKMPLVVSRINPESPADTCIPKLNEGDQIVLINGRDISEHTHDQVVMFIKASRESHSRELALVIRRRAVRSFADFKSEDELNQLFPEAIFPMCPEGGDTLEGSMAQLKKGLESGTVLIQFEQLYRKKPGLAITFAKLPQNLDKNRYKDVLPYDTTRVLLQGNEDYINASYVNMEIPAANLVNKYIATQGPLPHTCAQFWQVVWDQKLSLIVMLTTLTERGRTKCHQYWPDPPDVMNHGGFHIQCQSEDCTIAYVSREMLVTNTQTGEEHTVTHLQYVAWPDHGVPDDSSDFLEFVNYVRSLRVDSEPVLVHCSAGIGRTGVLVTMETAMCLTERNLPIYPLDIVRKMRDQRAMMVQTSSQYKFVCEAILRVYEEGLVQMLDPS

SEQ ID NO: 9732 - protein, 119 aa, Homo sapiens
MKALSPVRGCYEAVCCLSERSLAIARGRGKGPAAEEPLSLLDDMNHCYSRLRELVPGVPRGTQLSQVEILQRVIDYILDLQVVLAEPAPGPPDGPHLPIQTAELTPELVISNDKRSFCH

SEQ ID NO: 9733 - protein, 900 aa, Homo sapiens
MLRFLRRTFGRRSMQRYARGAAGRGAAGLGDERDGGPRGGPAAAASSSALPAAPGGSVFPAGGGPLLTGGAAVHISAAGAAKATLYCRVFLLDGTEVSVDLPKHAKGQDLFDQIVYHLDLVETDYFGLQFLDSAQVAHWLDHAKPIKKQMKIGPAYALHFRVKYYSSEPNNLREEFTRYLFVLQLRHDILSGKLKCPYETAVELAALCLQAELGECELPEHTPELVSEFRFIPNQTEAMEFDIFQRWKECRGKSPAQAELSYLNKAKWLEMYGVDMHVVRGRDGCEYSLGLTPTGILIFEGANKIGLFFWPKITKMDFKKSKLTLVVVEDDDQGREQEHTFVFRLDSARTCKHLWKCAVEHHAFFRLRTPGNSKSNRSDFIRLGSRFRFSGRTEYQATHGSRLRRTSTFERKPSKRYPSRRHSTFKASNPVIAAQLCSKTNPEVHNYQPQYHPNIHPSQPRWHPHSPNVSYPLPSPVLSSSDRLPFGIEENGGTPFLTAASGRHHHQHQHQHQHQHHSNYSLSLTLENKEGPLRSPNSSSKSLTKLSPGTPALFSEAAAHLKKLELETVKAAGPWPPLHININKAEEKKVSEKTLQTPLLPSPVADHVKCNILKAQLENASRVNIQGGKEESPFVNINKKSSLQDASVRSPIPIRVETAQPAVEKPEIKPPRVRKLTRQYSFDEDDLPPDLAEAVGVTTSTTTNTTTAATQVSVPLPSPKVQNVSSPHKSEGKGLLSPGAKSPSDRGGAFTLEPGDLLMDFTEATPLAEPASNPHCAHSRCSPPLSLPMKEETTGVCMYPPIKTRLIKTFPVDTMNPFPDTFTTGPQFTADFRDSKLQCCPGPTSPLIPAATLRPLTETVSTVQTIYTTRKPVSLAASAETLRQELEREKMMKRLLMTEL

SEQ ID NO: 9734 - protein, 588 aa, Homo sapiens
MHRSAPSQTTKRSRSPFSTTRRSWDDSESSGTNLNIDNEDYSRYPPREYRASGSRRGMAYGHIDSYGADDSEEEGAGPVERPPVRGKTGKFKDDKLYDPEKGARSLAGPPPHFSSFSRDVREERDKLDPVPAARCSASRADFLPQSSVASQSSSEGKLATKGDSSERERREQNLPARPSRAPVSICGGGENTSKSAEEPVVRPKIRNLASPNCVKPKIFFDTDDDDDMPHSTSRWRDTANDNEGHSDGLARRGRGESSSGYPEPKYPEDKREARSDQVKPEKVPRRRRTMADPDFWTHSDDYYKYCDEDSDSDKEWIAALRRKYRSREQTLSSSGESWETLPGKEEREPPQAKVSASTGTSPGPGASASAGAGAGASAGSNGSNYLEEVREPSLQEEQASLEEGEIPWLQYHENDSSSEGDNDSGHELMQPGVFMLDGNNNLEDDSSVSEDLEVDWSLFDGFADGLGVAEAISYVDPQFLTYMALEERLAQAMETALAHLESLAVDVEVANPPASKESIDALPEILVTEDHGAVGQEMCCPICCSEYVKGEVATELPCHHYFHKPCVSIWLQKSGTCPVCRCMFPPPL

SEQ ID NO: 9735 - protein, 530 aa, Homo sapiens
MTSSLQRPWRVPWLPWTILLVSTAAASQNQERLCAFKDPYQQDLGIGESRISHENGTILCSKGSTCYGLWEKSKGDINLVKQGCWSHIGDPQECHYEECVVTTTPPSIQNGTYRFCCCSTDLCNVNFTENFPPPDTTPLSPPHSFNRDETIIIALASVSVLAVLIVALCFGYRMLTGDRKQGLHSMNMMEAAASEPSLDLDNLKLLELIGRGRYGAVYKGSLDERPVAVKVFSFANRQNFINEKNIYRVPLMEHDNIARFIVGDERVTADGRMEYLLVMEYYPNGSLCKYLSLHTSDWVSSCRLAHSVTRGLAYLHTELPRGDHYKPAISHRDLNSRNVLVKNDGTCVISDFGLSMRLTGNRLVRPGEEDNAAISEVGTIRYMAPEVLEGAVNLRDCESALKQVDMYALGLIYWEIFMRCTDLFPGESVPEYQMAFQTEVGNHPTFEDMQVLVSREKQRPKFPEAWKENSLAVRSLKETIEDCWDQDAEARLTAQCAEERMAELMMIWERNKSVSPTVNPMSTAMQNERR

SEQ ID NO: 9736 - protein, 1038 aa, Homo sapiens
MTSSLQRPWRVPWLPWTILLVSTAAASQNQERLCAFKDPYQQDLGIGESRISHENGTILCSKGSTCYGLWEKSKGDINLVKQGCWSHIGDPQECHYEECVVTTTPPSIQNGTYRFCCCSTDLCNVNFTENFPPPDTTPLSPPHSFNRDETIIIALASVSVLAVLIVALCFGYRMLTGDRKQGLHSMNMMEAAASEPSLDLDNLKLLELIGRGRYGAVYKGSLDERPVAVKVFSFANRQNFINEKNIYRVPLMEHDNIARFIVGDERVTADGRMEYLLVMEYYPNGSLCKYLSLHTSDWVSSCRLAHSVTRGLAYLHTELPRGDHYKPAISHRDLNSRNVLVKNDGTCVISDFGLSMRLTGNRLVRPGEEDNAAISEVGTIRYMAPEVLEGAVNLRDCESALKQVDMYALGLIYWEIFMRCTDLFPGESVPEYQMAFQTEVGNHPTFEDMQVLVSREKQRPKFPEAWKENSLAVRSLKETIEDCWDQDAEARLTAQCAEERMAELMMIWERNKSVSPTVNPMSTAMQNERNLSHNRRVPKIGPYPDYSSSSYIEDSIHHTDSIVKNISSEHSMSSTPLTIGEKNRNSINYERQQAQARIPSPETSVTSLSTNTTTTNTTGLTPSTGMTTISEMPYPDETNLHTTNVAQSIGPTPVCLQLTEEDLETNKLDPKEVDKNLKESSDENLMEHSLKQFSGPDPLSSTSSSLLYPLIKLAVEATGQQDFTQTANGQACLIPDVLPTQIYPLPKQQNLPKRPTSLPLNTKNSTKEPRLKFGSKHKSNLKQVETGVAKMNTINAAEPHVVTVTMNGVAGRNHSVNSHAATTQYANGTVLSGQTTNIVTHRAQEMLQNQFIGEDTRLNINSSPDEHEPLLRREQQAGHDEGVLDRLVDRRERPLEGGRTNSNNNNSNPCSEQDVLAQGVPSTAADPGPSKPRRAQRPNSLDLSATNVLDGSSIQIGESTQDGKSGSGEKIKKRVKTPYSLKRWRPSTWVISTESLDCEVNNNGSNRAVHSKSSTAVYLAEGGTATTMVSKDIGMNCL

SEQ ID NO: 9737 - protein, 455 aa, Homo sapiens
MGQESSKPVWPNPTGGYQSNTGRRYGRRHAYVSFRPPTSQRERIASQRKTNSEVPMHRSAPSQTTKRSRSPFSTTRRSWDDSESSGTNLNIDNEDYSSTSRWRDTANDNEGHSDGLARRGRGESSSGYPEPKYPEDKREARSDQVKPEKVPRRRRTMADPDFWTHSDDYYKYCDEDSDSDKEWIAALRRKYRSREQTLSSSGESWETLPGKEEREPPQAKVSASTGTSPGPGASASAGAGAGASAGSNGSNYLEEVREPSLQEEQASLEEGEIPWLQYHENDSSSEGDNDSGHELMQPGVFMLDGNNNLEDDSSVSEDLEVDWSLFDGFADGLGVAEAISYVDPQFLTYMALEERLAQAMETALAHLESLAVDVEVANPPASKESIDALPEILVTEDHGAVGQEMCCPICCSEYVKGEVATELPCHHYFHKPCVSIWLQKSGTCPVCRCMFPPPL

SEQ ID NO: 9738 - protein, 718 aa, Homo sapiens
MAASPGPAGVGGAGAVYGSGSSGFALDSGLEIKTRSVEQTLLPLVSQITTLINHKDNTKKSDKTLQAIQRVGQAVNLAVGRFVKVGEAIANENWDLKEEINIACIEAKQAGETIAALTDITNLNHLESDGQITIFTDKTGVIKAARLLLSSVTKVLLLADRVVIKQIITSRNKVLATMERLEKVNSFQEFVQIFSQFGNEMVEFAHLSGDRQNDLKDEKKKAKMAAARAVLEKCTMMLLTASKTCLRHPNCESAHKNKEGVFDRMKVALDKVIEIVTDCKPNGETDISSISIFTGIKEFKMNIEALRENLYFQSKENLSVTLEVILERMEDFTDSAYTSHEHRERILELSTQARMELQQLISVWIQAQSKKTKSIAEELELSILKISHSLNELKKELHSTATQLAADLLKYHADHVVLKALKLTGVEGNLEALAEYACKLSEQKEQLVETCRLLRHISGTEPLEITCIHAEETFQVTGQQIISAAETLTLHPSSKIAKENLDVFCEAWESQISDMSTLLREINDVFEGRRGEKYGYLSLPKPMKNNANLKSLKPDKPDSEEQAKIAKLGLKLGLLTSDADCEIEKWEDQENEIVQYGRNMSSMAYSLYLFTRGEGPLKTSQDLIHQLEVFAAEGLKLTSSVQAFSKQLKDDDKLMLLLEINKLIPLCHQLQTVTKTSLQNKVFLKVDKCITKTRSMMALLVQLLSLCYKLLKKSETRY

SEQ ID NO: 9739 - protein, 1103 aa, Homo sapiens
MPLLDVFWSCFRKVKCFPLLQVKKNAEAEAKRACEWLQATGFPQYVQLFEEGSFPLDIGSVKKNHGFLDEDSLGALCRRLMTLNNCASMKLEVHFQSKQNEDSEEEEQCTISSHWAFQQESKCWSPMGSSDLLAPPSPGLPATSSCESVLTELSATSLPVITVSLPPEPADLPLPGRAPSSSDRPLLSPTQGQEGPQDKAKKRHRNRSFLKHLESLRRKEKSGSQQAEPKHSPATSEKVSKASSFRSCRGFLSAGFYRAKNWAATSAGGSGANTRKAWEAWPVASFRHPQWTHRGDCLVHVPGDHKPGTFPRSLSIESLCPEDGHRLADWQPGRRWGCEGRRGSCGSTGSHASTYDNLPELYPAEPVMVGAEAEDEDDEESGGSYAHLDDILQHVWGLQQRVELWSRAMYPDLGPGDEEEEEATSSVEIATVEVKCQAEALSQMEVPAHGESPAWAQAEVQPAVLAPAQAPAEAEPVAQEEAEAPAPAPAPAPAQDSEQEAHSGGEPTFASSLSVEEGHSISDTVASSSELDSSGNSMNEAEAAGPLAGLQASMPRERRDSGVGASLTRPCRKLRWHSFQNSHRPSLNSESLEINRQFAGQINLLHKGSLLRLTAFMEKYTVPHKQGWVWSMPKFMRRNKTPDYRGQHVFGVPPLIHVQRTGQPLPQSIQQAMRYLRSQCLDQVGIFRKSGVKSRIQNLRQMNETSPDNVCYEGQSAYDVADLLKQYFRDLPEPIFTSKLTTTFLQIYQLLPKDQWLAAAQAATLLLPDENREVLQTLLYFLSDIASAEENQMTAGNLAVCLAPSIFHLNVSKKDSPSPRIKSKRSLIGRPGPRDLSDNMAATQGLSHMISDCKKLFQVPQDMVLQLCSSYSAAELSPPGPALAELRQAQAAGVSLSLYMEENIQDLLRDAAERFKGWMSVPGPQHTELACRKAPDGHPLRLWKASTEVAAPPAVVLHRVLRERALWDEDLLRAQVLEALMPGVELYHYVTDSMAPHPCRDFVVLRMWRSDLPRGGCLLVSQSLDPEQPVPESGVRALMLTSQYLMEPCGLGRSRLTHICRADLRGRSPDWYNKVFGHLCAMEVAKIRDSFPTLQAAGPETKL

SEQ ID NO: 9740 - protein, 636 aa, Homo sapiens
MANQVNGNAVQLKEEEEPMDTSSVTHTEHYKTLIEAGLPQKVAERLDEIFQTGLVAYVDLDERAIDALREFNEEGALSVLQQFKESDLSHVQNKSAFLCGVMKTYRQREKQGSKVQESTKGPDEAKIKALLERTGYTLDVTTGQRKYGGPPPDSVYSGVQPGIGTEVFVGKIPRDLYEDELVPLFEKAGPIWDLRLMMDPLSGQNRGYAFITFCGKEAAQEAVKLCDSYEIRPGKHLGVCISVANNRLFVGSIPKNKTKENILEEFSKVTGLTEGLVDVILYHQPDDKKKNRGFCFLEYEDHKSAAQARRRLMSGKVKVWGNVVTVEWADPVEEPDPEVMAKVKVLFVRNLATTVTEEILEKSFSEFGKLERVKKLKDYAFVHFEDRGAAVKAMDEMNGKEIEGEEIEIVLAKPPDKKRKERQAARQASRSTAYEDYYYHPPPRMPPPIRGRGRGGGRGGYGYPPDYYGYEDYYDDYYGYDYHDYRGGYEDPYYGYDDGYAVRGRGGGRGGRGAPPPPRGRGAPPPRGRAGYSQRGAPLGPPRGSRGGRGGPAQQQRGRGSRGSRGNRGGNVGGKRKADGYNQPDSKRRQTNNQQNWGSQPIAQQPLQQGGDYSGNYGYNNDNQEFYQDTYGQQWK

SEQ ID NO: 9741 - protein, 699 aa, Homo sapiens
MLTKEQGDVIGIPFNVDVSSFPSRKMFCQCDSCGMSFNTVSELVISKINYLGKKSDEFNACGKLLLNIKHDETHTQEKNEVLKNRNTLSHHEETLQHEKIQTLEHNFEYSICQETLLEKAVFNTQKRENAEENNCDYNEFGRTLCDSSSLLFHQISPSRDNHYEFSDCEKFLCVKSTLSKPHGVSMKHYDCGESGNNFRRKLCLSHLQKGDKGEKHFECNECGKAFWEKSHLTRHQRVHTGQKPFQCNECEKAFWDKSNLTKHQRSHTGEKPFECNECGKAFSHKSALTLHQRTHTGEKPYQCNACGKTFCQKSDLTKHQRTHTGLKPYECYECGKSFRVTSHLKVHQRTHTGEKPFECLECGKSFSEKSNLTQHQRIHIGDKSYECNACGKTFYHKSLLTRHQIIHTGWKPYECYECGKTFCLKSDLTVHQRTHTGQKPFACPECGKFFSHKSTLSQHYRTHTGEKPYECHECGKIFYNKSYLTKHNRTHTGEKPYECNECGKAFYQKSQLTQHQRIHIGEKPYKCNECGKAFCHKSALIVHQRTHTQEKPYKCNECGKSFCVKSGLIFHERKHTGEKPYECNECGKFFRHKSSLTVHHRAHTGEKSCQCNECGKIFYRKSELAQHQRSHTGEKPYECNTCRKTFSQKSNLIVHQRRHIGENLMNEMDIRNFQPQVSLHNASEYSHCGESPDDILNVQ

SEQ ID NO: 9742 - protein, 946 aa, Homo sapiens
MWVPVLALPVCTYAETLMDSTTATAELGWMVHPPSGWEEVSGYDENMNTIRTYQVCNVFESSQNNWLRTKFIRRRGAHRIHVEMKFSVRDCSSIPSVPGSCKETFNLYYYEADFDSATKTFPNWMENPWVKVDTIAADESFSQVDLGGRVMKINTEVRSFGPVSRSGFYLAFQDYGGCMSLIAVRVFYRKCPRIIQNGAIFQETLSGAESTSLVAARGSCIANAEEVDVPIKLYCNGDGEWLVPIGRCMCKAGFEAVENGTVCRGCPSGTFKANQGDEACTHCPINSRTTSEGATNCVCRNGYYRADLDPLDMPCTTIPSAPQAVISSVNETSLMLEWTPPRDSGGREDLVYNIICKSCGSGRGACTRCGDNVQYAPRQLGLTEPRIYISDLLAHTQYTFEIQAVNGVTDQSPFSPQFASVNITTNQAAPSAVSIMHQVSRTVDSITLSWSQPDQPNGVILDYELQYYEKQELSEYNATAIKSPTNTVTVQGLKAGAIYVFQVRARTVAGYGRYSGKMYFQTMTEAEYQTSIQEKLPLIIGSSAAGLVFLIAVVVIAIVCNRRGFERADSEYTDKLQHYTSGHMTPGMKIYIDPFTYEDPNEAVREFAKEIDISCVKIEQVIGAGEFGEVCSGHLKLPGKREIFVAIKTLKSGYTEKQRRDFLSEASIMGQFDHPNVIHLEGVVTKSTPVMIITEFMENGSLDSFLRQNDGQFTVIQLVGMLRGIAAGMKYLADMNYVHRDLAARNILVNSNLVCKVSDFGLSRFLEDDTSDPTYTSALGGKIPIRWTAPEAIQYRKFTSASDVWSYGIVMWEVMSYGERPYWDMTNQDVINAIEQDYRLPPPMDCPSALHQLMLDCWQKDRNHRPKFGQIVNTLDKMIRNPNSLKAMAPLSSGINLPLLDRTIPDYTSFNTVDEWLEAIKMGQYKESFANAGFTSFDVVSQMMME

SEQ ID NO: 9743 - protein, 986 aa, Homo sapiens
MALRRLGAALLLLPLLAAVEETLMDSTTATAELGWMVHPPSGWEEVSGYDENMNTIRTYQVCNVFESSQNNWLRTKFIRRRGAHRIHVEMKFSVRDCSSIPSVPGSCKETFNLYYYEADFDSATKTFPNWMENPWVKVDTIAADESFSQVDLGGRVMKINTEVRSFGPVSRSGFYLAFQDYGGCMSLIAVRVFYRKCPRIIQNGAIFQETLSGAESTSLVAARGSCIANAEEVDVPIKLYCNGDGEWLVPIGRCMCKAGFEAVENGTVCRGCPSGTFKANQGDEACTHCPINSRTTSEGATNCVCRNGYYRADLDPLDMPCTTIPSAPQAVISSVNETSLMLEWTPPRDSGGREDLVYNIICKSCGSGRGACTRCGDNVQYAPRQLGLTEPRIYISDLLAHTQYTFEIQAVNGVTDQSPFSPQFASVNITTNQAAPSAVSIMHQVSRTVDSITLSWSQPDQPNGVILDYELQYYEKELSEYNATAIKSPTNTVTVQGLKAGAIYVFQVRARTVAGYGRYSGKMYFQTMTEAEYQTSIQEKLPLIIGSSAAGLVFLIAVVVIAIVCNRRGFERADSEYTDKLQHYTSGHMTPGMKIYIDPFTYEDPNEAVREFAKEIDISCVKIEQVIGAGEFGEVCSGHLKLPGKREIFVAIKTLKSGYTEKQRRDFLSEASIMGQFDHPNVIHLEGVVTKSTPVMIITEFMENGSLDSFLRQNDGQFTVIQLVGMLRGIAAGMKYLADMNYVHRDLAARNILVNSNLVCKVSDFGLSRFLEDDTSDPTYTSALGGKIPIRWTAPEAIQYRKFTSASDVWSYGIVMWEVMSYGERPYWDMTNQDVINAIEQDYRLPPPMDCPSALHQLMLDCWQKDRNHRPKFGQIVNTLDKMIRNPNSLKAMAPLSSGINLPLLDRTIPDYTSFNTVDEWLEAIKMGQYKESFANAGFTSFDVVSQMMMEDILRVGVTLAGHQKKILNSIQVMRAQMNQIQSVEV

SEQ ID NO: 9744 - protein, 987 aa, Homo sapiens
MALRRLGAALLLLPLLAAVEETLMDSTTATAELGWMVHPPSGWEEVSGYDENMNTIRTYQVCNVFESSQNNWLRTKFIRRRGAHRIHVEMKFSVRDCSSIPSVPGSCKETFNLYYYEADFDSATKTFPNWMENPWVKVDTIAADESFSQVDLGGRVMKINTEVRSFGPVSRSGFYLAFQDYGGCMSLIAVRVFYRKCPRIIQNGAIFQETLSGAESTSLVAARGSCIANAEEVDVPIKLYCNGDGEWLVPIGRCMCKAGFEAVENGTVCRGCPSGTFKANQGDEACTHCPINSRTTSEGATNCVCRNGYYRADLDPLDMPCTTIPSAPQAVISSVNETSLMLEWTPPRDSGGREDLVYNIICKSCGSGRGACTRCGDNVQYAPRQLGLTEPRIYISDLLAHTQYTFEIQAVNGVTDQSPFSPQFASVNITTNQAAPSAVSIMHQVSRTVDSITLSWSQPDQPNGVILDYELQYYEKELSEYNATAIKSPTNTVTVQGLKAGAIYVFQVRARTVAGYGRYSGKMYFQTMTEAEYQTSIQEKLPLIIGSSAAGLVFLIAVVVIAIVCNRRRGFERADSEYTDKLQHYTSGHMTPGMKIYIDPFTYEDPNEAVREFAKEIDISCVKIEQVIGAGEFGEVCSGHLKLPGKREIFVAIKTLKSGYTEKQRRDFLSEASIMGQFDHPNVIHLEGVVTKSTPVMIITEFMENGSLDSFLRQNDGQFTVIQLVGMLRGIAAGMKYLADMNYVHRDLAARNILVNSNLVCKVSDFGLSRFLEDDTSDPTYTSALGGKIPIRWTAPEAIQYRKFTSASDVWSYGIVMWEVMSYGERPYWDMTNQDVINAIEQDYRLPPPMDCPSALHQLMLDCWQKDRNHRPKFGQIVNTLDKMIRNPNSLKAMAPLSSGINLPLLDRTIPDYTSFNTVDEWLEAIKMGQYKESFANAGFTSFDVVSQMMMEDILRVGVTLAGHQKKILNSIQVMRAQMNQIQSVEV

SEQ ID NO: 9745 - protein, 495 aa, Homo sapiens
MAPARGRLPPALWVVTAAAAAATCVSAARGEVNLLDTSTIHGDWGWLTYPAHGWDSINEVDESFQPIHTYQVCNVMSPNQNNWLRTSWVPRDGARRVYAEIKFTLRDCNSMPGVLGTCKETFNLYYLESDRDLGASTQESQFLKIDTIAADESFTGADLGVRRLKLNTEVRSVGPLSKRGFYLAFQDIGACLAILSLRIYYKKCPAMVRNLAAFSEAVTGADSSSLVEVRGQCVRHSEERDTPKMYCSAEGEWLVPIGKCVCSAGYEERRDACVACELGFYKSAPGDQLCARCPPHSHSAAPAAQACHCDLSYYRAALDPPSSACTRPPSAPVNLISSVNGTSVTLEWAPPLDPGGRSDITYNAVCRRCPWALSRCEACGSGTRFVPQQTSLVQASLLVANLLAHMNYSFWIEAVNGVSDLSPEPRRAAVVNITTNQAGRRRNSVPQRPGPPASPASDPSRDQSSAGDVLWAFRQVPLWPCAPHQDPELEALHCL

SEQ ID NO: 9746 - protein, 1332 aa, Homo sapiens
MRNLKLFRTLEFRDIQGPGNPQCFSLRTEQGTVLIGSEHGLIEVDPVSREVKNEVSLVAEGFLPEDGSGRIVGVQDLLDQESVCVATASGDVILCSLSTQQLECVGSVASGISVMSWSPDQELVLLATGQQTLIMMTKDFEPILEQQIHQDDFGESKFITVGWGRKETQFHGSEGRQAAFQMQMHESALPWDDHRPQVTWRGDGQFFAVSVVCPETGARKVRVWNREFALQSTSEPVAGLGPALAWKPSGSLIASTQDKPNQQDIVFFEKNGLLHGHFTLPFLKDEVKVNDLLWNADSSVLAVWLEDLQREESSIPKTCVQLWTVGNYHWYLKQSLSFSTCGKSKIVSLMWDPVTPYRLHVLCQGWHYLAYDWHWTTDRSVGDNSSDLSNVAVIDGNRVLVTVFRQTVVPPPMCTYQLLFPHPVNQVTFLAHPQKSNDLAVLDASNQISVYKCGDCPSADPTVKLGAVGGSGFKVCLRTPHLEKRYKIQFENNEDQDVNPLKLGLLTWIEEDVFLAVSHSEFSPRSVIHHLTAASSEMDEEHGQLNVSSSAAVDGVIISLCCNSKTKSVVLQLADGQIFKYLWESPSLAIKPWKNSGGFPVRFPYPCTQTELAMIGEEECVLGLTDRCRFFINDIEVASNITSFAVYDEFLLLTTHSHTCQCFCLRDASFKTLQAGLSSNHVSHGEVLRKVERGSRIVTVVPQDTKLVLQMPRGNLEVVHHRALVLAQIRKWLDKLMFKEAFECMRKLRINLNLIYDHNPKVFLGNVETFIKQIDSVNHINLFFTELKEEDVTKTMYPAPVTSSVYLSRDPDGNKIDLVCDAMRAVMESINPHKYCLSILTSHVKKTTPELEIVLQKVHELQGNAPSDPDAVSAEEALKYLLHLVDVNELYDHSLGTYDFDLVLMVAEKSQKDPKEYLPFLNTLKKMETNYQRFTIDKYLKRYEKAIGHLSKCGPEYFPECLNLIKDKNLYNEALKLYSPSSQQYQDISIAYGEHLMQEHMYEPAGLMFARCGAHEKALSAFLTCGNWKQALCVAAQLNFTKDQLVGLGRTLAGKLVEQRKHIDAAMVLEECAQDYEEAVLLLLEGAAWEEALRLVYKYNRLDIIETNVKPSILEAQKNYMAFLDSQTATFSRHKKRLLVVRELKEQAQQAGLDDEVPHGQESDLFSETSSVVSGSEMSGKYSHSNSRISARSSKNRRKAERKKHSLKEGSPLEDLALLEALSEVVQNTENLKDEVYHILKVLFLFEFDEQGRELQKAFEDTLQLMERSLPEIWTLTYQQNSATPVLGPNSTANSIMASYQQQKTSVPVLDAELFIPPKINRRTQWKLSLLD

SEQ ID NO: 9747 - protein, 247 aa, Homo sapiens
MKSQGQHWYSSSDKNCKVSFREKLLIIDSNLGVQDVENLKFLCIGLVPNKKLEKSSSASDVFEHLLAEDLLSEEDPFFLAELLYIIRQKKLLQHLNCTKEEVERLLPTRQRVSLFRNLLYELSEGIDSENLKDMIFLLKDSLPKTEMTSLSFLAFLEKQGKIDEDNLTCLEDLCKTVVPKLLRNIEKYKREKAIQIVTPPVDKEAESYQGEEELVSQTDVKTFLEALPEGVFVFLNEGDRGNSPDDL

SEQ ID NO: 9748 - protein, 406 aa, Homo sapiens
MTTPANAQNASKTWELSLYELHRTPQEAIMDGTEIAVSPRSLHSELMCPICLDMLKNTMTTKECLHRFCSDCIVTALRSGNKECPTCRKKLVSKRSLRPDPNFDALISKIYPSREEYEAHQDRVLIRLSRLHNQQALSSSIEEGLRMQAMHRAQRVRRPIPGSDQTTTMSGGEGEPGEGEGDGEDVSSDSAPDSAPGPAPKRPRGGGAGGSSVGTGGGGTGGVGGGAGSEDSGDRGGTLGGGTLGPPSPPGAPSPPEPGGEIELVFRPHPLLVEKGEYCQTRYVKTTGNATVDHLSKYLALRIALERRQQQEAGEPGGPGGGASDTGGPDGCGGEGGGAGGGDGPEEPALPSLEGVSEKQYTIYIAPGGGAFTTLNGSLTLELVNEKFWKVSRPLELCYAPTKDPK

SEQ ID NO: 9749 - protein, 1516 aa, Homo sapiens
MEEISAAAVKVVPGPERPSPFSQLVYTSNDSYIVHSGDLRKIHKAASRGQVRKLEKMTKRKKTINLNIQDAQKRTALHWACVNGHEEVVTFLVDRKCQLDVLDGEHRTPLMKALQCHQEACANILIDSGADINLVDVYGNTALHYAVYSEILSVVAKLLSHGAVIEVHNKASLTPLLLSITKRSEQIVEFLLIKNANANAVNKYKCTALMLAVCHGSSEIVGMLLQQNVDVFAADICGVTAEHYAVTCGFHHIHEQIMEYIRKLSKNHQNTNPEGTSAGTPDEAAPLAERTPDTAESLVEKTPDEAAPLVERTPDTAESLVEKTPDEAASLVEGTSDKIQCLEKATSGKFEQSAEETPREITSPAKETSEKFTWPAKGRPRKIAWEKKEDTPREIMSPAKETSEKFTWAAKGRPRKIAWEKKETPVKTGCVARVTSNKTKVLEKGRSKMIACPTKESSTKASANDQRFPSESKQEEDEEYSCDSRSLFESSAKIQVCIPESIYQKVMEINREVEEPPKKPSAFKPAIEMQNSVPNKAFELKNEQTLRADPMFPPESKQKDYEENSWDSESLCETVSQKDVCLPKATHQKEIDKINGKLEESPNKDGLLKATCGMKVSIPTKALELKDMQTFKAEPPGKPSAFEPATEMQKSVPNKALELKNEQTLRADEILPSESKQKDYEENSWDTESLCETVSQKDVCLPKAAHQKEIDKINGKLEGSPVKDGLLKANCGMKVSIPTKALELMDMQTFKAEPPEKPSAFEPAIEMQKSVPNKALELKNEQTLRADEILPSESKQKDYEESSWDSESLCETVSQKDVCLPKAAHQKEIDKINGKLEGSPVKDGLLKANCGMKVSIPTKALELMDMQTFKAEPPEKPSAFEPAIEMQKSVPNKALELKNEQTLRADEILPSESKQKDYEESSWDSESLCETVSQKDVCLPKATHQKEIDKINGKLEESPDNDGFLKAPCRMKVSIPTKALELMDMQTFKAEPPEKPSAFEPAIEMQKSVPNKALELKNEQTLRADQMFPSESKQKKVEENSWDSESLRETVSQKDVCVPKATHQKEMDKISGKLEDSTSLSKILDTVHSCERARELQKDHCEQRTGKMEQMKKKFCVLKKKLSEAKEIKSQLENQKVKWEQELCSVRLTLNQEEEKRRNADILNEKIREELGRIEEQHRKELEVKQQLEQALRIQDIELKSVESNLNQVSHTHENENYLLHENCMLKKEIAMLKLEIATLKHQYQEKENKYFEDIKILKEKNAELQMTLKLKEESLTKRASQYSGQLKVLIAENTMLTSKLKEKQDKEILEAEIESHHPRLASAVQDHDQIVTSRKSQEPAFHIAGDACLQRKMNVDVSSTIYNNEVLHQPLSEAQRKSKSLKINLNYAGDALRENTLVSEHAQRDQRETQCQMKEAEHMYQNEQDNVNKHTEQQESLDQKLFQLQSKNMWLQQQLVHAHKKADNKSKITIDIHFLERKMQHHLLKEKNEEIFNYNNHLKNRIYQYEKEKAETENS

SEQ ID NO: 9750 - protein, 415 aa, Homo sapiens
MATRNSPMPLGTAQGDPGEAGTRPGPDASLRDTGAATQLKMKPRKVHKIKAVIIDLGSQYCKCGYAGEPRPTYFISSTVGKRCPEAADAGDTRKWTLVGHELLNTEAPLKLVNPLKHGIVVDWDCVQDIWEYIFRTAMKILPEEHAVLVSDPPLSPSSNREKYAELMFETFGIPAMHVTSQSLLSIYSYGKTSGLVVESGHGVSHVVPISEGDVLPGLTSRADYAGGDLTNYLMQLLNEAGHAFTDDHLHIIEHIKKKCCYAAFLPEEELGLVPEELRVDYELPDGKLITIGQERFRCSEMLFQPSLAGSTQPGLPELTAACLGRCQDTGFKEEMAANVLLCGGCTMLDGFPERFQRELSLLCPGDSPAVAAAPERKTSVWTGGSILASLQAFQQLWVSKEEFEERGSVAIYSKC

SEQ ID NO: 9751 - protein, 1449 aa, Homo sapiens
HCSYSNRSVVGVLVHYQKRHPEIKVTAKYIRQAPPTAAMMRGVEGPQGSPRPPAPIQQLNRSSSERDGPPVENEMFFCQHCDYGNRTVKGVLIHYQKKHRDFKANADVIRQHTATIRSLCDRNQKKPASCVLVSPSNLERDKTKLRALKCRQCSYTSPYFYALRKHIKKDHPALKATVTSIMRWAFLDGLIEAGYHCEWCIYSHTEPNGLLLHYQRRHPEHYVDYTYMATKLWAGPDPSPPSLTMPAEAKTYRCRDCVFEAVSIWDITNHYQAFHPWAMNGDESVLLDIIKEKDAVEKPILSSEELAGPVNCENSIPTPFPEQEAECPEDARLSPEKSLQLASANPAISSTPYQCTVCQSEYNNLHGLLTHYGKKHPGMKVKAADFAQDIDINPGAVYKCRHCPYINTRIHGVLTHYQKRHPSIKVTAEDFVHDVEQSADISQNDVEETSRIFKQGYGAYRCKLCPYTHGTLEKLKIHYEKYHNQPEFDVFSQSPPKLPVPLEPEMTTEVSPSQVSITEEEVGEEPVSTSHFSTSHLVSHTVFRCQLCKYFCSTRKGIARHYRIKHNNVRAQPEGKNNLFKCALCAYTNPIRKGLAAHYQKRHDIDAYYTHCLAASRTISDKPNKVIIPSPPKDDSPQLSEELRRAVEKKKCSLCSFQSFSKKGIVSHYMKRHPGVFPKKQHASKLGGYFTAVYADEHEKPTLMEEEERGNFEKAEVEGEAQEIEWLPFRCIKCFKLSFSTAELLCMHYTDHHSRDLKRDFIILGNGPRLQNSTYQCKHCDSKLQSTAELTSHLNIHNEEFQKRAKRQERRKQLLSKQKYADGAFADFKQERPFGHLEEVPKIKERKVVGYKCKFCVEVHPTLRAICNHLRKHVQYGNVPAVSAAVKEADDPAHLFLDGLEAAKDASGALVGRVDGEHCLLDGMLEDETRPGGYHCSQCDRVLMSMQGLRSHERSHLALAMFTREDKYSCQYCSFVSAFRHNLDRHMQTHHGHHKPFRCKLCSFKSSYNSRLKTHILKAHAGEHAYKCSWCSFSTMTISQLKEHSLKVHGKALTLPRPRIVSLLSSHSHHSSQKATPAEEVEDSNDSSYSEPPDVQQQLNHYQSAALARNNSRVSPVPLSGAAAGTEQKTEAVLHCEFCEFSSGYIQSIRRHYRDKHGGKKLFKCKDCSFYTGFKSAFTMHVEAGHSAVPEEGPKDLRCPLCLYHTKYKRNMIDHIVLHREERVVPIEVCRSKLSKYLQGVVFRCDKCTFTCSSDESLQQHIEKHNELKPYKCQLCYYETKHTEELDSHLRDEHKVSRNFELVGRVNLDQLEQMKEKMESSSSDDEDKEEEMNSKAEDRELMRFSDHGAALNTEKRFPCEFCGRAFSQGSEWERHVLRHGMALNDTKQVSREEIHPKEIMENSVKMPSIEEKEDDEAIGIDFSLKNETVAICVVTADKSLLENAEAKKE

SEQ ID NO: 9752 - protein, 920 aa, Homo sapiens
MEVQLGLGRVYPRPPSKTYRGAFQNLFQSVREVIQNPGPRHPEAASAAPPGASLLLLQQQQQQQQQQQQQQQQQQQQQQQETSPRQQQQQQGEDGSPQAHRRGPTGYLVLDEEQQPSQPQSALECHPERGCVPEPGAAVAASKGLPQQLPAPPDEDDSAAPSTLSLLGPTFPGLSSCSADLKDILSEASTMQLLQQQQQEAVSEGSSSGRAREASGAPTSSKDNYLGGTSTISDNAKELCKAVSVSMGLGVEALEHLSPGEQLRGDCMYAPLLGVPPAVRPTPCAPLAECKGSLLDDSAGKSTEDTAEYSPFKGGYTKGLEGESLGCSGSAAAGSSGTLELPSTLSLYKSGALDEAAAYQSRDYYNFPLALAGPPPPPPPPHPHARIKLENPLDYGSAWAAAAAQCRYGDLASLHGAGAAGPGSGSPSAAASSSWHTLFTAEEGQLYGPCGGGGGGGGGGGGGGGGGGGGGGGEAGAVAPYGYTRPPQGLAGQESDFTAPDVWYPGGMVSRVPYPSPTCVKSEMGPWMDSYSGPYGDMRLETARDHVLPIDYYFPPQKTCLICGDEASGCHYGALTCGSCKVFFKRAAEGKQKYLCASRNDCTIDKFRRKNCPSCRLRKCYEAGMTLGARKLKKLGNLKLQEEGEASSTTSPTEETTQKLTVSHIEGYECQPIFLNVLEAIEPGVVCAGHDNNQPDSFAALLSSLNELGERQLVHVVKWAKALPGFRNLHVDDQMAVIQYSWMGLMVFAMGWRSFTNVNSRMLYFAPDLVFNEYRMHKSRMYSQCVRMRHLSQEFGWLQITPQEFLCMKALLLFSIIPVDGLKNQKFFDELRMNYIKELDRIIACKRKNPTSCSRRFYQLTKLLDSVQPIARELHQFTFDLLIKSHMVSVDFPEMMAEIISVQVPKILSGKVKPIYFHTQ

SEQ ID NO: 9753 - protein, 694 aa, Homo sapiens
MEWGYLLEVTSLLAALALLQRSSGAAAASAKELACQEITVPLCKGIGYNYTYMPNQFNHDTQDEAGLEVHQFWPLVEIQCSPDLKFFLCSMYTPICLEDYKKPLPPCRSVCERAKAGCAPLMRQYGFAWPDRMRCDRLPEQGNPDTLCMDYNRTDLTTAAPSPPRRLPPPPPGEQPPSGSGHGRPPGARPPHRGGGRGGGGGDAAAPPARGGGGGGKARPPGGGAAPCEPGCQCRAPMVSVSSERHPLYNRVKTGQIANCALPCHNPFFSQDERAFTVFWIGLWSVLCFVSTFATVSTFLIDMERFKYPERPIIFLSACYLFVSVGYLVRLVAGHEKVACSGGAPGAGGAGGAGGAAAGAGAAGAGAGGPGGRGEYEELGAVEQHVRYETTGPALCTVVFLLVYFFGMASSIWWVILSLTWFLAAGMKWGNEAIAGYSQYFHLAAWLVPSVKSIAVLALSSVDGDPVAGICYVGNQSLDNLRGFVLAPLVIYLFIGTMFLLAGFVSLFRIRSVIKQQDGPTKTHKLEKLMIRLGLFTVLYTVPAAVVVACLFYEQHNRPRWEATHNCPCLRDLQPDQARRPDYAVFMLKYFMCLVVGITSGVWVWSGKTLESWRSLCTRCCWASKGAAVGGGAGATAAGGGGGPGGGGGGGPGGGGGPGGGGGSLYSDVSTGLTWRSGTASSVSYPKQMPLSQV

SEQ ID NO: 9754 - protein, 4391 aa, Homo sapiens
MGWRAAGALLLALLLHGRLLAVTHGLRAYDGLSLPEDIETVTASQMRWTHSYLSDDEDMLADSISGDDLGSGDLGSGDFQMVYFRALVNFTRSIEYSPQLEDAGSREFREVSEAVVDTLESEYLKIPGDQVVSVVFIKELDGWVFVELDVGSEGNADGAQIQEMLLRVISSGSVASYVTSPQGFQFRRLGTVPQFPRACTEAEFACHSYNECVALEYRCDRRPDCRDMSDELNCEEPVLGISPTFSLLVETTSLPPRPETTIMRQPPVTHAPQPLLPGSVRPLPCGPQEAACRNGHCIPRDYLCDGQEDCEDGSDELDCGPPPPCEPNEFPCGNGHCALKLWRCDGDFDCEDRTDEANCPTKRPEEVCGPTQFRCVSTNMCIPASFHCDEESDCPDRSDEFGCMPPQVVTPPRESIQASRGQTVTFTCVAIGVPTPIINWRLNWGHIPSHPRVTVTSEGGRGTLIIRDVKESDQGAYTCEAMNARGMVFGIPDGVLELVPQRGPCPDGHFYLEHSAACLPCFCFGITSVCQSTRRFRDQIRLRFDQPDDFKGVNVTMPAQPGTPPLSSTQLQIDPSLHEFQLVDLSRRFLVHDSFWALPEQFLGNKVDSYGGSLRYNVRYELARGMLEPVQRPDVVLMGAGYRLLSRGHTPTQPGALNQRQVQFSEEHWVHESGRPVQRAELLQVLQSLEAVLIQTVYNTKMASVGLSDIAMDTTVTHATSHGRAHSVEECRCPIGYSGLSCESCDAHFTRVPGGPYLGTCSGCNCNGHASSCDPVYGHCLNCQHNTEGPQCNKCKAGFFGDAMKATATSCRPCPCPYIDASRRFSDTCFLDTDGQATCDACAPGYTGRRCESCAPGYEGNPIQPGGKCRPVNQEIVRCDERGSMGTSGEACRCKNNVVGRLCNECADGSFHLSTRNPDGCLKCFCMGVSRHCTSSSWSRAQLHGASEEPGHFSLTNAASTHTTNEGIFSPTPGELGFSSFHRLLSGPYFWSLPSRFLGDKVTSYGGELRFTVTQRSQPGSTPLHGQPLVVLQGNNIILEHHVAQEPSPGQPSTFIVPFREQAWQRPDGQPATREHLLMALAGIDTLLIRASYAQQPAESRVSGISMDVAVPEETGQDPALEVEQCSCPPGYRGPSCQDCDTGYTRTPSGLYLGTCERCSCHGHSEACEPETGACQGCQHHTEGPRCEQCQPGYYGDAQRGTPQDCQLCPCYGDPAAGQAAHTCFLDTDGHPTCDACSPGHSGRHCERCAPGYYGNPSQGQPCQRDSQVPGPIGCNCDPQGSVSSQCDAAGQCQCKAQVEGLTCSHCRPHHFHLSASNPDGCLPCFCMGITQQCASSAYTRHLISTHFAPGDFQGFALVNPQRNSRLTGEFTVEPVPEGAQLSFGNFAQLGHESFYWQLPETYQGDKVAAYGGKLRYTLSYTAGPQGSPLSDPDVQITGNNIMLVASQPALQGPERRSYEIMFREEFWRRPDGQPATREHLLMALADLDELLIRATFSSVPLAASISAVSLEVAQPGPSNRPRALEVEECRCPPGYIGLSCQDCAPGYTRTGSGLYLGHCELCECNGHSDLCHPETGACSQCQHNAAGEFCELCAPGYYGDATAGTPEDCQPCACPLTNPENMFSRTCESLGAGGYRCTACEPGYTGQYCEQCGPGYVGNPSVQGGQCLPETNQAPLVVEVHPARSIVPQGGSHSLRCQVSGSPPHYFYWSREDGRPVPSGTQQRHQGSELHFPSVQPSDAGVYICTCRNLHQSNTSRAELLVTEAPSKPITVTVEEQRSQSVRPGADVTFICTAKSKSPAYTLVWTRLHNGKLPTRAMDFNGILTIRNVQLSDAGTYVCTGSNMFAMDQGTATLHVQASGTLSAPVVSIHPPQLTVQPGQLAEFRCSATGSPTPTLEWTGGPGGQLPAKAQIHGGILRLPAVEPTDQAQYLCRAHSSAGQQVARAVLHVHGGGGPRVQVSPERTQVHAGRTVRLYCRAAGVPSATITWRKEGGSLPPQARSERTDIATLLIPAITTADAGFYLCVATSPAGTAQARIQVVVLSASDASPPPVKIESSSPSVTEGQTLDLNCVVAGSAHAQVTWYRRGGSLPPHTQVHGSRLRLPQVSPADSGEYVCRVENGSGPKEASITVSVLHGTHSGPSYTPVPGSTRPIRIEPSSSHVAEGQTLDLNCVVPGQAHAQVTWHKRGGSLPARHQTHGSLLRLHQVTPADSGEYVCHVVGTSGPLEASVLVTIEASVIPGPIPPVRIESSSSTVAEGQTLDLSCVVAGQAHAQVTWYKRGGSLPARHQVRGSRLYIFQASPADAGQYVCRASNGMEASITVTVTGTQGANLAYPAGSTQPIRIEPSSSQVAEGQTLDLNCVVPGQSHAQVTWHKRGGSLPVRHQTHGSLLRLYQASPADSGEYVCRVLGSSVPLEASVLVTIEPAGSVPALGVTPTVRIESSSSQVAEGQTLDLNCLVAGQAHAQVTWHKRGGSLPARHQVHGSRLRLLQVTPADSGEYVCRVVGSSGTQEASVLVTIQQRLSGSHSQGVAYPVRIESSSASLANGHTLDLNCLVASQAPHTITWYKRGGSLPSRHQIVGSRLRIPQVTPADSGEYVCHVSNGAGSRETSLIVTIQGSGSSHVPSVSPPIRIESSSPTVVEGQTLDLNCVVARQPQAIITWYKRGGSLPSRHQTHGSHLRLHQMSVADSGEYVCRANNNIDALEASIVISVSPSAGSPSAPGSSMPIRIESSSSHVAEGETLDLNCVVPGQAHAQVTWHKRGGSLPSHHQTRGSRLRLHHVSPADSGEYVCRVMGSSGPLEASVLVTIEASGSSAVHVPAPGGAPPIRIEPSSSRVAEGQTLDLKCVVPGQAHAQVTWHKRGGNLPARHQVHGPLLRLNQVSPADSGEYSCQVTGSSGTLEASVLVTIEPSSPGPIPAPGLAQPIYIEASSSHVTEGQTLDLNCVVPGQAHAQVTWYKRGGSLPARHQTHGSQLRLHLVSPADSGEYVCRAASGPGPEQEASFTVTVPPSEGSSYRLRSPVISIDPPSSTVQQGQDASFKCLIHDGAAPISLEWKTRNQELEDNVHISPNGSIITIVGTRPSNHGTYRCVASNAYGVAQSVVNLSVHGPPTVSVLPEGPVWVKVGKAVTLECVSAGEPRSSARWTRISSTPAKLEQRTYGLMDSHAVLQISSAKPSDAGTYVCLAQNALGTAQKQVEVIVDTGAMAPGAPQVQAEEAELTVEAGHTATLRCSATGSPAPTIHWSKLRSPLPWQHRLEGDTLIIPRVAQQDSGQYICNATSPAGHAEATIILHVESPPYATTVPEHASVQAGETVQLQCLAHGTPPLTFQWSRVGSSLPGRATARNELLHFERAAPEDSGRYRCRVTNKVGSAEAFAQLLVQGPPGSLPATSIPAGSTPTVQVTPQLETKSIGASVEFHCAVPSDRGTQLRWFKEGGQLPPGHSVQDGVLRIQNLDQSCQGTYICQAHGPWGKAQASAQLVIQALPSVLINIRTSVQTVVVGHAVEFECLALGDPKPQVTWSKVGGHLRPGIVQSGGVVRIAHVELADAGQYRCTATNAAGTTQSHVLLLVQALPQISMPQEVRVPAGSAAVFPCIASGYPTPDISWSKLDGSLPPDSRLENNMLMLPSVRPQDAGTYVCTATNRQGKVKAFAHLQVPERVVPYFTQTPYSFLPLPTIKDAYRKFEIKITFRPDSADGMLLYNGQKRVPGSPTNLANRQPDFISFGLVGGRPEFRFDAGSGMATIRHPTPLALGHFHTVTLLRSLTQGSLIVGDLAPVNGTSQGKFQGLDLNEELYLGGYPDYGAIPKAGLSSGFIGCVRELRIQGEEIVFHDLNLTAHGISHCPTCRDRPCQNGGQCHDSESSSYVCVCPAGFTGSRCEHSQALHCHPEACGPDATCVNRPDGRGYTCRCHLGRSGLRCEEGVTVTTPSLSGAGSYLALPALTNTHHELRLDVEFKPLAPDGVLLFSGGKSGPVEDFVSLAMVGGHLEFRYELGSGLAVLRSAEPLALGRWHRVSAERLNKDGSLRVNGGRPVLRSSPGKSQGLNLHTLLYLGGVEPSVPLSPATNMSAHFRGCVGEVSVNGKRLDLTYSFLGSQGIGQCYDSSPCERQPCQHGATCMPAGEYEFQCLCRDGFKGDLCEHEENPCQLREPCLHGGTCQGTRCLCLPGFSGPRCQQGSGHGIAESDWHLEGSGGNDAPGQYGAYFHDDGFLAFPGHVFSRSLPEVPETIELEVRTSTASGLLLWQGVEVGEAGQGKDFISLGLQDGHLVFRYQLGSGEARLVSEDPINDGEWHRVTALREGRRGSIQVDGEELVSGRSPGPNVAVNAKGSVYIGGAPDVATLTGGRFSSGITGCVKNLVLHSARPGAPPPQPLDLQHRAQAGANTRPCPS

SEQ ID NO: 9755 - protein, 1338 aa, Homo sapiens
MDRASELLFYVNGRKVIEKNVDPETMLLPYLRKKLRLTGTKYGCGGGGCGACTVMISRYNPITKRIRHHPANACLIPICSLYGAAVTTVEGIGSTHTRIHPVQERIAKCHGTQCGFCTPGMVMSIYTLLRNHPEPTLDQLTDALGGNLCRCTGYRPIIDACKTFCKTSGCCQSKENGVCCLDQGINGLPEFEEGSKTSPKLFAEEEFLPLDPTQELIFPPELMIMAEKQSQRTRVFGSERMMWFSPVTLKELLEFKFKYPQAPVIMGNTSVGPEVKFKGVFHPVIISPDRIEELSVVNHAYNGLTLGAGLSLAQVKDILADVVQKLPEEKTQMYHALLKHLGTLAGSQIRNMASLGGHIISRHPDSDLNPILAVGNCTLNLLSKEGKRQIPLNEQFLSKCPNADLKPQEILVSVNIPYSRKWEFVSAFRQAQRQENALAIVNSGMRVFFGEGDGIIRELCISYGGVGPATICAKNSCQKLIGRHWNEQMLDIACRLILNEVSLLGSAPGGKVEFKRTLIISFLFKFYLEVSQILKKMDPVHYPSLADKYESALEDLHSKHHCSTLKYQNIGPKQHPEDPIGHPIMHLSGVKHATGEAIYCDDMPLVDQELFLTFVTSSRAHAKIVSIDLSEALSMPGVVDIMTAEHLSDVNSFCFFTEAEKFLATDKVFCVGQLVCAVLADSEVQAKRAAKRVKIVYQDLEPLILTIEESIQHNSSFKPERKLEYGNVDEAFKVVDQILEGEIHMGGQEHFYMETQSMLVVPKGEDQEMDVYVSTQFPKYIQDIVASTLKLPANKVMCHVRRVGGAFGGKVLKTGIIAAVTAFAANKHGRAVRCVLERGEDMLITGGRHPYLGKYKAGFMNDGRILALDMEHYSNAGASLDESLFVIEMGLLKMDNAYKFPNLRCRGWACRTNLPSNTAFRGFGFPQAALITESCITEVAAKCGLSPEKVRIINMYKEIDQTPYKQEINAKNLIQCWRECMAMSSYSLRKVAVEKFNAENYWKKKGLAMVPLKFPVGLGSRAAGQAAALVHIYLDGSVLVTHGGIEMGQGVHTKMIQVVSRELRMPMSNVHLRGTSTETVPNANISGGSVVADLNGLAVKDACQTLLKRLEPIISKNPKGTWKDWAQTAFDESINLSAVGYFRGYESDMNWEKGEGQPFEYFVYGAACSEVEIDCLTGDHKNIRTDIVMDVGCSINPAIDIGQIEGAFIQGMGLYTIEELNYSPQGILHTRGPDQYKIPAICDMPTELHIALLPPSQNSNTLYSSKGLGESGVFLGCSVFFAIHDAVSAARQERGLHGPLTLNSPLTPEKIRMACEDKFTKMIPRDEPGSYVPWNVPI

SEQ ID NO: 9756 - protein, 1650 aa, Homo sapiens
MERCSRCHRLLLLLPLVLGLSAAPGWAGAPPVDVLRALRFPSLPDGVRRAKGICPADVAYRVARPAQLSAPTRQLFPGGFPKDFSLLTVVRTRPGLQAPLLTLYSAQGVRQLGLELGRPVRFLYEDQTGRPQPPSQPVFRGLSLADGKWHRVAVAVKGQSVTLIVDCKKRVTRPLPRSARPVLDTHGVIIFGARILDEEVFEGDVQELAIVPGVQAAYESCEQKELECEGGQRERPQNQQPHRAQRSPQQQPSRLHRPQNQEPQSQDPTPGEEEEILESSLLPPLEEAAHGPRGLKGEKGEPAVLEPGMLVEGPPGPEGPAGLIGPPGIQGNPGPVGDPGERGPPGRAGLPGSDGAPGPPGTSLMLPFRFGSGGGDKGPVVAAQEAQAQAILQQARLALRGPPGPMGYTGRPGPLGQPGSPGLKGESGDLGPQGPRGPQGLTGPPGKAGRRGRAGADGARGMPGDPGVKGDRGFDGLPGLPGEKGHRGDTGAQGLPGPPGEDGERGDDGEIGPRGLPGESGPRGLLGPKGPPGIPGPPGVRGMDGPQGPKGSLGPQGEPGPPGQQGTPGTQGLPGPQGAIGPHGEKGPQGKPGLPGMPGSDGPPGHPGKEGPPGTKGNQGPSGPQGPLGYPGPRGVKGVDGIRGLKGHKGEKGEDGFPGFKGDIGVKGDRGEVGVPGSRGEDGPEGPKGRTGPTGDPGPPGLMGEKGKLGVPGLPGYPGRQGPKGSLGFPGFPGASGEKGARGLSGKSGPRGERGPTGPRGQRGPRGATGKSGAKGTSGGDGPHGPPGERGLPGPQGPNGFPGPKGPPGPPGKDGLPGHPGQRGEVGFQGKTGPPGPPGVVGPQGAAGETGPMGERGHPGPPGPPGEQGLPGTAGKEGTKGDPGPPGAPGKDGPAGLRGFPGERGLPGTAGGPGLKGNEGPSGPPGPAGSPGERGAAGSGGPIGPPGRPGPQGPPGAAGEKGVPGEKGPIGPTGRDGVQGPVGLPGPAGPPGVAGEDGDKGEVGDPGQKGTKGNKGEHGPPGPPGPIGPVGQPGAAGADGEPGARGPQGHFGAKGDEGTRGFNGPPGPIGLQGLPGPSGEKGETGDVGPMGPPGPPGPRGPAGPNGADGPQGPPGGVGNLGPPGEKGEPGESGSPGIQGEPGVKGPRGERGEKGESGQPGEPGPPGPKGPTGDDGPKGNPGPVGFPGDPGPPGEGGPRGQDGAKGDRGEDGEPGQPGSPGPTGENGPPGPLGKRGPAGSPGSEGRQGGKGAKGDPGAIGAPGKTGPVGPAGPAGKPGPDGLRGLPGSVGQQGRPGATGQAGPPGPVGPPGLPGLRGDAGAKGEKGHPGLIGLIGPPGEQGEKGDRGLPGPQGSPGQKGEMGIPGASGPIGPGGPPGLPGPAGPKGAKGATGPGGPKGEKGVQGPPGHPGPPGEVIQPLPIQMPKKTRRSVDGSRLMQEDEAIPTGGAPGSPGGLEEIFGSLDSLREEIEQMRRPTGTQDSPARTCQDLKLCHPELPDGEYWVDPNQGCARDAFRVFCNFTAGGETCVTPRDDVTQFSYVDSEGSPVGVVQLTFLRLLSVSAHQDVSYPCSGAARDGPLRLRGANEDELSPETSPYVKEFRDGCQTQQGRTVLEVRTPVLEQLPVLDASFSDLGAPPRRGGVLLGPVCFMG

SEQ ID NO: 9757 - protein, 508 aa, Homo sapiens
MDSQKEALQRIISTLANKNDEIQNFIDTLHHTLKGVQENSSNILSELDEEFDSLYSILDEVKESMINCIKQEQARKSQELQSQISQCNNALENSEELLEFATRSLDIKEPEEFSKAARQIKDRVTMASAFRLSLKPKVSDNMTHLMVDFSQERQMLQTLKFLPVPKAPEIDPVECLVADNSVTVAWRMPEEDNKIDHFILEHRKTNFDGLPRVKDERCWEIIDNIKGTEYTLSGLKFDSKYMNFRVRACNKAVAGEYSDPVTLETKALNFNLDNSSSHLNLKVEDTCVEWDPTGGKGQESKIKGKENKGSVHVTSLKKHTSGTPSPKRTSVGSRPPAVRGSRDRFTGESYTVLGDTAIESGQHYWEVKAQKDCKSYSVGVAYKTLGKFDQLGKTNTSWCIHVNNWLQNTFAAKHNNKVKALDVTVPEKIGVFCDFDGGQLSFYDANSKQLLYSFKTKFTQPVLPGFMVWCGGLSLSTGMQVPSAVRTLQKSENGMTGSASSLNNVVTQ

SEQ ID NO: 9758 - protein, 521 aa, Homo sapiens
MNVSLSQKTVKIHRLFPMLAFSEPYEFVSLEWLQKWLDESTPTKPIDNHACLCSHDKLHPDKISIMKRISEYAADIFYSRYGGGPRLTVKALCKECVVERCRILRLKNQLNEDYKTVNNLLKAAVKGDGFWVGKSSLRSWRQLALEQLDEQDGDAEQSNGKMNGSTLNKDESKEERKEEEELNFNEDILCPHGELCISENERRLVSKEAWSKLQQYFPKAPEFPSYKECCSQCKILEREGEENEALHKMIANEQKTSLPNLFQDKNRPCLSNWPEDTDVLYIVSQFFVEEWRKFVRKPTRCSPVSSVGNSALLCPHGGLMFTFASMTKEDSKLIALIWPSEWQMIQKLFVVDHVIKITRIEVGDVNPSETQYISEPKLCPECREGLLCQQQRDLREYTQATIYVHKVVDNKKVMKDSAPELNVSSSETEEDKEEAKPDGEKDPDFNQIMHAFSVAPFDQNLSIDGKILSDDCATLGTLGVIPESVILLKADEPIADYAAMDDVMQVCMPEEGFKGTGLLGH

SEQ ID NO: 9759 - protein, 123 aa, Homo sapiens
MPSAGTLPWVQGIICNANNPCFRYPTPGEAPGVVGNFNKSIVARLFSDARRLLLYSQKDTSMKDMRKVLRTLQQIKKSSSNLKLQDFLVDNETFSGFLYHNLSLPKSTVDKMLRADVILHKVS

SEQ ID NO: 9760 - protein, 2261 aa, Homo sapiens
MACWPQLRLLLWKNLTFRRRQTCQLLLEVAWPLFIFLILISVRLSYPPYEQHECHFPNKAMPSAGTLPWVQGIICNANNPCFRYPTPGEAPGVVGNFNKSIVARLFSDARRLLLYSQKDTSMKDMRKVLRTLQQIKKSSSNLKLQDFLVDNETFSGFLYHNLSLPKSTVDKMLRADVILHKVFLQGYQLHLTSLCNGSKSEEMIQLGDQEVSELCGLPREKLAAAERVLRSNMDILKPILRTLNSTSPFPSKELAEATKTLLHSLGTLAQELFSMRSWSDMRQEVMFLTNVNSSSSSTQIYQAVSRIVCGHPEGGGLKIKSLNWYEDNNYKALFGGNGTEEDAETFYDNSTTPYCNDLMKNLESSPLSRIIWKALKPLLVGKILYTPDTPATRQVMAEVNKTFQELAVFHDLEGMWEELSPKIWTFMENSQEMDLVRMLLDSRDNDHFWEQQLDGLDWTAQDIVAFLAKHPEDVQSSNGSVYTWREAFNETNQAIRTISRFMECVNLNKLEPIATEVWLINKSMELLDERKFWAGIVFTGITPGSIELPHHVKYKIRMDIDNVERTNKIKDGYWDPGPRADPFEDMRYVWGGFAYLQDVVEQAIIRVLTGTEKKTGVYMQQMPYPCYVDDIFLRVMSRSMPLFMTLAWIYSVAVIIKGIVYEKEARLKETMRIMGLDNSILWFSWFISSLIPLLVSAGLLVVILKLGNLLPYSDPSVVFVFLSVFAVVTILQCFLISTLFSRANLAAACGGIIYFTLYLPYVLCVAWQDYVGFTLKIFASLLSPVAFGFGCEYFALFEEQGIGVQWDNLFESPVEEDGFNLTTSVSMMLFDTFLYGVMTWYIEAVFPGQYGIPRPWYFPCTKSYWFGEESDEKSHPGSNQKRISEICMEEEPTHLKLGVSIQNLVKVYRDGMKVAVDGLALNFYEGQITSFLGHNGAGKTTTMSILTGLFPPTSGTAYILGKDIRSEMSTIRQNLGVCPQHNVLFDMLTVEEHIWFYARLKGLSEKHVKAEMEQMALDVGLPSSKLKSKTSQLSGGMQRKLSVALAFVGGSKVVILDEPTAGVDPYSRRGIWELLLKYRQGRTIILSTHHMDEADVLGDRIAIISHGKLCCVGSSLFLKNQLGTGYYLTLVKKDVESSLSSCRNSSSTVSYLKKEDSVSQSSSDAGLGSDHESDTLTIDVSAISNLIRKHVSEARLVEDIGHELTYVLPYEAAKEGAFVELFHEIDDRLSDLGISSYGISETTLEEIFLKVAEESGVDAETSDGTLPARRNRRAFGDKQSCLRPFTEDDAADPNDSDIDPESRETDLLSGMDGKGSYQVKGWKLTQQQFVALLWKRLLIARRSRKGFFAQIVLPAVFVCIALVFSLIVPPFGKYPSLELQPWMYNEQYTFVSNDAPEDTGTLELLNALTKDPGFGTRCMEGNPIPDTPCQAGEEEWTTAPVPQTIMDLFQNGNWTMQNPSPACQCSSDKIKKMLPVCPPGAGGLPPPQRKQNTADILQDLTGRNISDYLVKTYVQIIAKSLKNKIWVNEFRYGGFSLGVSNTQALPPSQEVNDAIKQMKKHLKLAKDSSADRFLNSLGRFMTGLDTKNNVKVWFNNKGWHAISSFLNVINNAILRANLQKGENPSHYGITAFNHPLNLTKQQLSEVALMTTSVDVLVSICVIFAMSFVPASFVVFLIQERVSKAKHLQFISGVKPVIYWLSNFVWDMCNYVVPATLVIIIFICFQQKSYVSSTNLPVLALLLLLYGWSITPLMYPASFVFKIPSTAYVVLTSVNLFIGINGSVATFVLELFTDNKLNNINDILKSVFLIFPHFCLGRGLIDMVKNQAMADALERFGENRFVSPLSWDLVGRNLFAMAVEGVVFFLITVLIQYRFFIRPRPVNAKLSPLNDEDEDVRRERQRILDGGGQNDILEIKELTKIYRRKRKPAVDRICVGIPPGECFGLLGVNGAGKSSTFKMLTGDTTVTRGDAFLNKNSILSNIHEVHQNMGYCPQFDAITELLTGREHVEFFALLRGVPEKEVGKVGEWAIRKLGLVKYGEKYAGNYSGGNKRKLSTAMALIGGPPVVFLDEPTTGMDPKARRFLWNCALSVVKEGRSVVLTSHSMEECEALCTRMAIMVNGRFRCLGSVQHLKNRFGDGYTIVVRIAGSNPDLKPVQDFFGLAFPGSVLKEKHRNMLQYQLPSSLSSLARIFSILSQSKKRLHIEDYSVSQTTLDQVFVNFAKDQSDDDHLKDLSLHKNQTVVDVAVLTSFLQDEKVKESYV

SEQ ID NO: 9761 - protein, 399 aa, Homo sapiens
MGILLGLLLLGHLTVDTYGRPILEVPESVTGPWKGDVNLPCTYDPLQGYTQVLVKWLVQRGSDPVTIFLRDSSGDHIQQAKYQGRLHVSHKVPGDVSLQLSTLEMDDRSHYTCEVTWQTPDGNQVVRDKITELRVQKLSVSKPTVTTGSGYGFTVPQGMRISLQCQARGSPPISYIWYKQQTNNQEPIKVATLSTLLFKPAVIADSGSYFCTAKGQVGSEQHSDIVKFVVKDSSKLLKTKTEAPTTMTYPLKATSTVKQSWDWTTDMDGYLGETSAGPGKSLPVFAIILIISLCCMVVFTMAYIMLCRKTSQQEHVYEAARAHAREANDSGETMRVAIFASGCSSDEPTSQNLGNNYSDEPCIGQEYQIIAQINGNYARLLDTVPLDYEFLATEGKSVC

SEQ ID NO: 9762 - protein, 706 aa, Homo sapiens
MSLKPRVVDFDETWNKLLTTIKAVVMLEYVERATWNDRFSDIYALCVAYPEPLGERLYTETKIFLENHVRHLHKRVLESEEQVLVMYHRYWEEYSKGADYMDCLYRYLNTQFIKKNKLTEADLQYGYGGVDMNEPLMEIGELALDMWRKLMVEPLQAILIRMLLREIKNDRGGEDPNQKVIHGVINSFVHVEQYKKKFPLKFYQEIFESPFLTETGEYYKQEASNLLQESNCSQYMEKVLGRLKDEEIRCRKYLHPSSYTKVIHECQQRMVADHLQFLHAECHNIIRQEKKNDMANMYVLLRAVSTGLPHMIQELQNHIHDEGLRATSNLTQENMPTLFVESVLEVHGKFVQLINTVLNGDQHFMSALDKALTSVVNYREPKSVCKAPELLAKYCDNLLKKSAKGMTENEVEDRLTSFITVFKYIDDKDVFQKFYARMLAKRLIHGLSMSMDSEEAMINKLKQACGYEFTSKLHRMYTDMSVSADLNNKFNNFIKNQDTVIDLGISFQIYVLQAGAWPLTQAPSSTFAIPQELEKSVQMFELFYSQHFSGRKLTWLHYLCTGEVKMNYLGKPYVAMVTTYQMAVLLAFNNSETVSYKELQDSTQMNEKELTKTIKSLLDVKMINHDSEKEDIDAESSFSLNMNFSSKRTKFKITTSMQKDTPQVISQSRARFNPSISMIKKCIEVLIDKQYIERSQASADEYSYVA

SEQ ID NO: 9763 - protein, 745 aa, Homo sapiens
MSLKPRVVDFDETWNKLLTTIKAVVMLEYVERATWNDRFSDIYALCVAYPEPLGERLYTETKIFLENHVRHLHKRVLESEEQVLVMYHRYWEEYSKGADYMDCLYRYLNTQFIKKNKLTEADLQYGYGGVDMNEPLMEIGELALDMWRKLMVEPLQAILIRMLLREIKNDRGGEDPNQKVIHGVINSFVHVEQYKKKFPLKFYQEIFESPFLTETGEYYKQEASNLLQESNCSQYMEKVLGRLKDEEIRCRKYLHPSSYTKVIHECQQRMVADHLQFLHAECHNIIRQEKKNDMANMYVLLRAVSTGLPHMIQELQNHIHDEGLRATSNLTQENMPTLFVESVLEVHGKFVQLINTVLNGDQHFMSALDKALTSVVNYREPKSVCKAPELLAKYCDNLLKKSAKGMTENEVEDRLTSFITVFKYIDDKDVFQKFYARMLAKRLIHGLSMSMDSEEAMINKLKQACGYEFTSKLHRMYTDMSVSADLNNKFNNFIKNQDTVIDLGISFQIYVLQAGAWPLTQAPSSTFAIPQELEKSVQMFELFYSQHFSGRKLTWLHYLCTGEVKMNYLGKPYVAMVTTYQMAVLLAFNNSETVSYKELQDSTQMNEKELTKTIKSLLDVKMINHDSEKEDIDAESSFSLNMNFSSKRTKFKITTSMQKDTPQEMEQTRSAVDEDRKMYLQAAIVRIMKARKVLRHNALIQEVISQSRARFNPSISMIKKCIEVLIDKQYIERSQASADEYSYVA

SEQ ID NO: 9764 - protein, 1119 aa, Homo sapiens
MTAAAASNWGLITNIVNSIVGVSVLTMPFCFKQCGIVLGALLLVFCSWMTHQSCMFLVKSASLSKRRTYAGLAFHAYGKAGKMLVETSMIGLMLGTCIAFYVVIGDLGSNFFARLFGFQVGGTFRMFLLFAVSLCIVLPLSLQRNMMASIQSFSAMALLFYTVFMFVIVLSSLKHGLFSGQWLRRVSYVRWEGVFRCIPIFGMSFACQSQVLPTYDSLDEPSVKTMSSIFASSLNVVTTFYVMVGFFGYVSFTEATAGNVLMHFPSNLVTEMLRVGFMMSVAVGFPMMILPCRQALSTLLCEQQQKDGTFAAGGYMPPLRFKALTLSVVFGTMVGGILIPNVETILGLTGATMGSLICFICPALIYKKIHKNALSSQVVLWVGLGVLVVSTVTTLSVSEEVPEDLAEEAPGGRLGEAEGLMKVEAARLSAQDPVVAVAEDGREKPKLPKEREELEQAQIKGPVDVPGREDGKEAPEEAQLDRPGQGIAVPVGEAHRHEPPVPHDKVVVDEGQDREVPEENKPPSRHAGGKAPGVQGQMAPPLPDSEREKQEPEQGEVGKRPGQAQALEEAGDLPEDPQKVPEADGQPAVQPAKEDLGPGDRGLHPRPQAVLSEQQNGLAVGGGEKAKGGPPPGNAAGDTGQPAEDSDHGGKPPLPAEKPAPGPGLPPEPREQRDVERAGGNQAASQLEEAGRAEMLDHAVLLQVIKEQQVQQKRLLDQQEKLLAVIEEQHKEIHQQRQEDEEDKPRQVEVHQEPGAAVPRGQEAPEGKARETVENLPPLPLDPVLRAPGGRPAPSQDLNQRSLEHSEGPVGRDPAGPPDGGPDTEPRAAQAKLRDGQKDAAPRAAGTVKELPKGPEQVPVPDPAREAGGPEERLAEEFPGQSQDVTGGSQDRKKPGKEVAATGTSILKEANWLVAGPGAETGDPRMKPKQVSRDLGLAADLPGGAEGAAAQPQAVLRQPELRVISDGEQGGQQGHRLDHGGHLEMRKARGGDHVPVSHEQPRGGEDAAVQEPRQRPEPELGLKRAVPGGQRPDNAKPNRDLKLQAGSDLRRRRRDLGPHAEGQLAPRDGVIIGLNPLPDVQVNDLRGALDAQLRQAAGGALQVVHSRQLRQAPGPPEES

SEQ ID NO: 9765 - protein, 694 aa, Homo sapiens
MAQLRPAVPPGRPRRGSLPAGASWQNTDLFEMIEKMQGSRMDEQRCSFPPPLKTEEDYIPYPSVHEVLGREGPFPLILLPQFGGYWIEGTNHEITSIPETEPLQSPTTKVKLECNPTARIYRKHFLGKEHFNYYSLDAALGHLVFSLKYDVIGDQEHLRLLLRTKCRTYHDVIPISCLTEFPNVVQMAKLVCEDVNVDRFYPVLYPKASRLIVTFDEHVISNNFKFGVIYQKLGQTSEEELFSTNEESPAFVEFLEFLGQKVKLQDFKGFRGGLDVTHGQTGTESVYCNFRNKEIMFHVSTKLPYTEGDAQQLQRKRHIGNDIVAVVFQDENTPFVPDMIASNFLHAYVVVQAEGGGPDGPLYKVSVTARDDVPFFGPPLPDPAVFRKGPEFQEFLLTKLINAEYACYKAEKFAKLEERTRAALLETLYEELHIHSQSMMGLGGDEDKMENGSGGGGFFESFKRVIRSRSQSMDAMGLSNKKPNTVSTSHSGSFAPNNPDLAKAAGISLIVPGKSPTRKKSGPFGSRRSSAIGIENIQEVQEKRESPPAGQKTPDSGHVSQEPKSENSSTQSSPEMPTTKNRAETAAQRAEALKDFSRSSSSASSFASVVEETEGVDGEDTGLESVSSSGTPHKRDSFIYSTWLEDSVSTTSGGSSPGPSRSPHPDAGKLGDPACPEIKIQLEASEQHMPQLGC

SEQ ID NO: 9766 - protein, 748 aa, Homo sapiens
MIEKMQGSRMDEQRCSFPPPLKTEEDYIPYPSVHEVLGREGPFPLILLPQFGGYWIEGTNHEITSIPETEPLQSPTTKVKLECNPTARIYRKHFLGKEHFNYYSLDAALGHLVFSLKYDVIGDQEHLRLLLRTKCRTYHDVIPISCLTEFPNVVQMAKLVCEDVNVDRFYPVLYPKASRLIVTFDEHVISNNFKFGVIYQKLGQTSEEELFSTNEESPAFVEFLEFLGQKVKLQDFKGFRGGLDVTHGQTGTESVYCNFRNKEIMFHVSTKLPYTEGDAQQLQRKRHIGNDIVAVVFQDENTPFVPDMIASNFLHAYVVVQAEGGGPDGPLYKVSVTARDDVPFFGPPLPDPAVFRKGPEFQEFLLTKLINAEYACYKAEKFAKLEERTRAALLETLYEELHIHSQSMMGLGGDEDKMENGSGGGGFFESFKRVIRSRSQSMDAMGLSNKKPNTVSTSHSGSFAPNNPDLAKAAGISLLIPGKSASRFGRRGSAIGIGTVEEVVVRGAAGSGGCLHALFSARSQDGGHIGDVAPLPPGQAPGRAGWSGGSSDGTQHLLWGLSLIVPGKSPTRKKSGPFGSRRSSAIGIENIQEVQEKRESPPAGQKTPDSGHVSQEPKSENSSTQSSPEMPTTKNRAETAAQRAEALKDFSRSSSSASSFASVVEETEGVDGEDTGLESVSSSGTPHKRDSFIYSTWLEDSVSTTSGGSSPGPSRSPHPDAGKLGDPACPEIKIQLEASEQHMPQLGC

SEQ ID NO: 9767 - protein, 663 aa, Homo sapiens
MIEKMQGSRMDEQRCSFPPPLKTEEDYIPYPSVHEVLGREGPFPLILLPQFGGYWIEGTNHEITSIPETEPLQSPTTKVKLECNPTARIYRKHFLGKEHFNYYSLDAALGHLVFSLKYDVIGDQEHLRLLLRTKCRTYHDVIPISCLTEFPNVVQMAKLVCEDVNVDRFYPVLYPKASRLIVTFDEHVISNNFKFGVIYQKLGQTSEEELFSTNEESPAFVEFLEFLGQKVKLQDFKGFRGGLDVTHGQTGTESVYCNFRNKEIMFHVSTKLPYTEGDAQQLQRKRHIGNDIVAVVFQDENTPFVPDMIASNFLHAYVVVQAEGGGPDGPLYKVSVTARDDVPFFGPPLPDPAVFRKGPEFQEFLLTKLINAEYACYKAEKFAKLEERTRAALLETLYEELHIHSQSMMGLGGDEDKMENGSGGGGFFESFKRVIRSRSQSMDAMGLSNKKPNTVSTSHSGSFAPNNPDLAKAAGISLIVPGKSPTRKKSGPFGSRRSSAIGIENIQEVQEKRESPPAGQKTPDSGHVSQEPKSENSSTQSSPEMPTTKNRAETAAQRAEALKDFSRSSSSASSFASVVEETEGVDGEDTGLESVSSSGTPHKRDSFIYSTWLEDSVSTTSGGSSPGPSRSPHPDAGKLGDPACPEIKIQLEASEQHMPQLGC

SEQ ID NO: 9768 - protein, 1001 aa, Homo sapiens
MKVTVCFGRTRVVVPCGDGHMKVFSLIQQAVTRYRKAIAKDPNYWIQVHRLEHGDGGILDLDDILCDVADDKDRLVAVFDEQDPHHGGDGTSASSTGTQSPEIFGSELGTNNVSAFQPYQATSEIEVTPSVLRANMPLHVRRSSDPALIGLSTSVSDSNFSSEEPSRKNPTRWSTTAGFLKQNTAGSPKTCDRKKDENYRSLPRDTSNWSNQFQRDNARSSLSASHPMVGKWLEKQEQDEDGTEEDNSRVEPVGHADTGLEHIPNFSLDDMVKLVEVPNDGGPLGIHVVPFSARGGRTLGLLVKRLEKGGKAEHENLFRENDCIVRINDGDLRNRRFEQAQHMFRQAMRTPIIWFHVVPAANKEQYEQLSQSEKNNYYSSRFSPDSQYIDNRSVNSAGLHTVQRAPRLNHPPEQIDSHSRLPHSAHPSGKPPSAPASAPQNVFSTTVSSGYNTKKIGKRLNIQLKKGTEGLGFSITSRDVTIGGSAPIYVKNILPRGAAIQDGRLKAGDRLIEVNGVDLVGKSQEEVVSLLRSTKMEGTVSLLVFRQEDAFHPRELNAEPSQMQIPKETKAEDEDIVLTPDGTREFLTFEVPLNDSGSAGLGVSVKGNRSKENHADLGIFVKSIINGGAASKDGRLRVNDQLIAVNGESLLGKTNQDAMETLRRSMSTEGNKRGMIQLIVARRISKCNELKSPGSPPGPELPIETALDDRERRISHSLYSGIEGLDESPSRNAALSRIMGKYQLSPTVNMPQDDTVIIEDDRLPVLPPHLSDQSSSSSHDDVGFVTADAGTWAKAAISDSADCSLSPDVDPVLAFQREGFGRQIADETKLNTVDDQKAGSPSRDVGPSLGLKKSSSLESLQTAVAEVTLNGDIPFHRPRPRIIRGRGCNESFRAAIDKSYDKPAVDDDDEGMETLEEDTEESSRSGRESVSTASDQPSHSLERQMNGNQEKGDKTDRKKDKTGKEKKKDRDKEKDKMKAKKGMLKGLGDMFSLAKLKPEKR

SEQ ID NO: 9769 - protein, 988 aa, Homo sapiens
MKVTVCFGRTRVVVPCGDGHMKVFSLIQQAVTRYRKAIAKDPNYWIQVHRLEHGDGGILDLDDILCDVADDKDRLVAVFDEQDPHHGGDGTSASSTGTQSPEIFGSELGTNNVSAFQPYQATSEIEVTPSVLRANMPLHVRRSSDPALIGLSTSVSDSNFSSEEPSRKNPTRWSTTAGFLKQNTAGSPKTCDRKKDENYRSLPRDTSNWSNQFQRDNARSSLSASHPMVGKWLEKQEQDEDGTEEDNSRVEPVGHADTGLEHIPNFSLDDMVKLVEVPNDGGPLGIHVVPFSARGGRTLGLLVKRLEKGGKAEHENLFRENDCIVRINDGDLRNRRFEQAQHMFRQAMRTPIIWFHVVPAANKEQYEQLSQSEKNNYYSSRFSPDSQYIDNRSVNSAGLHTVQRAPRLNHPPEQIDSHSRLPHSAHPSGKPPSAPASAPQNVFSTTVSSGYNTKKIGKRLNIQLKKGTEGLGFSITSRDVTIGGSAPIYVKNILPRGAAIQDGRLKAGDRLIEVNGVDLVGKSQEEVVSLLRSTKMEGTVSLLVFRQEDAFHPRELKAEDEDIVLTPDGTREFLTFEVPLNDSGSAGLGVSVKGNRSKENHADLGIFVKSIINGGAASKDGRLRVNDQLIAVNGESLLGKTNQDAMETLRRSMSTEGNKRGMIQLIVARRISKCNELKSPGSPPGPELPIETALDDRERRISHSLYSGIEGLDESPSRNAALSRIMGKYQLSPTVNMPQDDTVIIEDDRLPVLPPHLSDQSSSSSHDDVGFVTADAGTWAKAAISDSADCSLSPDVDPVLAFQREGFGRQIADETKLNTVDDQKAGSPSRDVGPSLGLKKSSSLESLQTAVAEVTLNGDIPFHRPRPRIIRGRGCNESFRAAIDKSYDKPAVDDDDEGMETLEEDTEESSRSGRESVSTASDQPSHSLERQMNGNQEKGDKTDRKKDKTGKEKKKDRDKEKDKMKAKKGMLKGLGDMFSLAKLKPEKR

SEQ ID NO: 9770 - protein, 304 aa, Homo sapiens
MDNVTVRQGESATLRCTIDDRVTRVAWLNRSTILYAGNDKWSIDPRVIILVNTPTQYSIMIQNVDVYDEGPYTCSVQTDNHPKTSRVHLIVQVPPQIMNISSDITVNEGSSVTLLCLAIGRPEPTVTWRHLSVKEGQGFVSEDEYLEISDIKRDQSGEYECSALNDVAAPDVRKVKITVNYPPYISKAKNTGVSVGQKGILSCEASAVPMAEFQWFKEETRLATGLDGMRIENKGRMSTLTFFNVSEKDYGNYTCVATNKLGNTNASITLYGPGAVIDGVNSASRALACLWLSGTLLAHFFIKF

SEQ ID NO: 9771 - protein, 1044 aa, Homo sapiens
MKGTRAIGSVPERSPAGVDLSLTGLPPPVSRRPGSAATTKPIVRSVSVVTGSEQKRKVLEATGPGGSQAINNLRRSNSTTQVSQPRSGSPRPTEPTDFLMLFEGSPSGKKRPASLSTAPSEKGATWNVLDDQPRGFTLPSNARSSSALDSPAGPRRKECTVALAPNFTANNRSNKGAVGNCVTTMVHNRYTPSERAPPLKSSNQTAPSLNNIIKAATCEGSESSGFGKLPKNVSSATHSARNNTGGSTGLPRRKEVTEEEAERFIHQVNQATVTIQRWYRHQVQRRGAGAARLEHLLQAKREEQRQRSGEGTLLDLHQQKEAARRKAREEKARQARRAAIQELQQKRALRAQKASTAERGPPENPRETRVPGMRQPAQELSPTPGGTAHQALKANNTGGGLPAAGPGDRCLPTSDSSPEPQQPPEDRTQDVLAQDAAGDNLEMMAPSRGSAKSRGPLEELLHTLQLLEKEPDVLPRPRTHHRGRYAWASEEDDASSLTADNLEKFGKLSAFPEPPEDGTLLSEAKLQSIMSFLDEMEKSGQDQLDSQQEGWVPEAGPGPLELGSEVSTSVMRLKLEVEEKKQAMLLLQRALAQQRDLTARRVKETEKALSRQLQRQREHYEATIQRHLAFIDQLIEDKKVLSEKCEAVVAELKQEDQRCTERVAQAQAQHELEIKKLKELMSATEKARREKWISEKTKKIKEVTVRGLEPEIQKLIARHKQEVRRLKSLHEAELLQSDERASQRCLRQAEELREQLEREKEALGQQERERARQRQRAELEELRQQLEESSSALTRALRAEFEKGREEQERRHQMELNTLKQQLELERQAWEAGRTRKEEAWLLNREQELREEIRKGRDKEIELVIHRLEADMALAKEESEKAAESRIKRLRDKYEAELSELEQSERKLQERCSELKGQLGEAEGENLRLQGLVRQKERALEDAQAVNEQLSSERSNLAQVIRQEFEDRLAASEEETRQAKAELATLQARQQLELEEVHRRVKTALARKEEAVSSLRTQHEAAVKRADHLEELLEQHRRPTPSTK

SEQ ID NO: 9772 - protein, 316 aa, Homo sapiens
MGVCGYLFLPWKCLVVVSLRLLFLVPTGVPVRSGDATFPKAMDNVTVRQGESATLRCTIDNRVTRVAWLNRSTILYAGNDKWCLDPRVVLLSNTQTQYSIEIQNVDVYDEGPYTCSVQTDNHPKTSRVHLIVQVSPKIVEISSDISINEGNNISLTCIATGRPEPTVTWRHISPKAVGFVSEDEYLEIQGITREQSGDYECSASNDVAAPVVRRVKVTVNYPPYISEAKGTGVPVGQKGTLQCEASAVPSAEFQWYKDDKRLIEGKKGVKVENRPFLSKLIFFNVSEHDYGNYTCVASNKLGHTNASIMLFGETVL

SEQ ID NO: 9773 - protein, 344 aa, Homo sapiens
MGVCGYLFLPWKCLVVVSLRLLFLVPTGVPVRSGDATFPKAMDNVTVRQGESATLRCTIDNRVTRVAWLNRSTILYAGNDKWCLDPRVVLLSNTQTQYSIEIQNVDVYDEGPYTCSVQTDNHPKTSRVHLIVQVSPKIVEISSDISINEGNNISLTCIATGRPEPTVTWRHISPKAVGFVSEDEYLEIQGITREQSGDYECSASNDVAAPVVRRVKVTVNYPPYISEAKGTGVPVGQKGTLQCEASAVPSAEFQWYKDDKRLIEGKKGVKVENRPFLSKLIFFNVSEHDYGNYTCVASNKLGHTNASIMLFGPGAVSEVSNGTSRRAGCVWLLPLLVLHLLLKF

SEQ ID NO: 9774 - protein, 1353 aa, Homo sapiens
MKVTVCFGRTRVVVPCGDGHMKVFSLIQQAVTRYRKAIAKDPNYWIQVHRLEHGDGGILDLDDILCDVADDKDRLVAVFDEQDPHHGGDGTSASSTGTQSPEIFGSELGTNNVSAFQPYQATSEIEVTPSVLRANMPLHVRRSSDPALIGLSTSVSDSNFSSEEPSRKNPTRWSTTAGFLKQNTAGSPKTCDRKKDENYRSLPRDTSNWSNQFQRDNARSSLSASHPMVGKWLEKQEQDEDGTEEDNSRVEPVGHADTGLEHIPNFSLDDMVKLVEVPNDGGPLGIHVVPFSARGGRTLGLLVKRLEKGGKAEHENLFRENDCIVRINDGDLRNRRFEQAQHMFRQAMRTPIIWFHVVPAANKEQYEQLSQSEKNNYYSSRFSPDSQYIDNRSVNSAGLHTVQRAPRLNHPPEQIDSHSRLPHSAHPSGKPPSAPASAPQNVFSTTVSSGYNTKKIGKRLNIQLKKGTEGLGFSITSRDVTIGGSAPIYVKNILPRGAAIQDGRLKAGDRLIEVNGVDLVGKSQEEVVSLLRSTKMEGTVSLLVFRQEDAFHPRELNAEPSQMQIPKETKAEDEDIVLTPDGTREFLTFEVPLNDSGSAGLGVSVKGNRSKENHADLGIFVKSIINGGAASKDGRLRVNDQLIAVNGESLLGKTNQDAMETLRRSMSTEGNKRGMIQLIVARRISKCNELKSPGSPPGPELPIETALDDRERRISHSLYSGIEGLDESPSRNAALSRIMGKYQLSPTVNMPQDDTVIIEDDRLPVLPPHLSDQSSSSSHDDVGFVTADAGTWAKAAISDSADCSLSPDVDPVLAFQREGFGRQSMSEKRTKQFSDASQLDFVKTRKSKSMDLGIADETKLNTVDDQKAGSPSRDVGPSLGLKKSSSLESLQTAVAEVTLNGDIPFHRPRPRIIRGRGCNESFRAAIDKSYDKPAVDDDDEGMETLEEDTEESSRSGRESVSTASDQPSHSLERQMNGNQEKGDKTDRKKDKTGKEKKKDRDKEKDKMKAKKGMLKGLGDMFRFGKHRKDDKIEKTGKIKIQESFTSEEERIRMKQEQERIQAKTREFRERQARERDYAEIQDFHRTFGCDDELMYGGVSSYEGSMALNARPQSPREGHMMDALYAQVKKPRNSKPSPVDSNRSTPSNHDRIQRLRQEFQQAKQDEDVEDRRRTYSFEQPWPNARPATQSGRHSVSVEVQMQRQRQEERESSQQAQRQYSSLPRQSRKNASSVSQDSWEQNYSPGEGFQSAKENPRYSSYQGSRNGYLGGHGFNARVMLETQELLRQEQRRKEQQMKKQPPSEGPSNYDSYKKVQDPSYAPPKGPFRQDVPPSPSQVARLNRLQTPEKGRPFYS

SEQ ID NO: 9775 - protein, 1356 aa, Homo sapiens
MKVTVCFGRTRVVVPCGDGHMKVFSLIQQAVTRYRKAIAKDPNYWIQVHRLEHGDGGILDLDDILCDVADDKDRLVAVFDEQDPHHGGDGTSASSTGTQSPEIFGSELGTNNVSAFQPYQATSEIEVTPSVLRANMPLHVRRSSDPALIGLSTSVSDSNFSSEEPSRKNPTRWSTTAGFLKQNTAGSPKTCDRKKDENYRSLPRDTSNWSNQFQRDNARSSLSASHPMVGKWLEKQEQDEDGTEEDNSRVEPVGHADTGLEHIPNFSLDDMVKLVEVPNDGGPLGIHVVPFSARGGRTLGLLVKRLEKGGKAEHENLFRENDCIVRINDGDLRNRRFEQAQHMFRQAMRTPIIWFHVVPAANKEQYEQLSQSEKNNYYSSRFSPDSQYIDNRSVNSAGLHTVQRAPRLNHPPEQIDSHSRLPHSAHPSGKPPSAPASAPQNVFSTTVSSGYNTKKIGKRLNIQLKKGTEGLGFSITSRDVTIGGSAPIYVKNILPRGAAIQDGRLKAGDRLIEVNGVDLVGKSQEEVVSLLRSTKMEGTVSLLVFRQEDAFHPRELNAEPSQMQIPKETKAEDEDIVLTPDGTREFLTFEVPLNDSGSAGLGVSVKGNRSKENHADLGIFVKSIINGGAASKDGRLRVNDQLIAVNGESLLGKTNQDAMETLRRSMSTEGNKRGMIQLIVARRISKCNELKSPGSPPGPELPIETALDDRERRISHSLYSGIEGLDESPSRNAALSRIMGESGKYQLSPTVNMPQDDTVIIEDDRLPVLPPHLSDQSSSSSHDDVGFVTADAGTWAKAAISDSADCSLSPDVDPVLAFQREGFGRQSMSEKRTKQFSDASQLDFVKTRKSKSMDLGIADETKLNTVDDQKAGSPSRDVGPSLGLKKSSSLESLQTAVAEVTLNGDIPFHRPRPRIIRGRGCNESFRAAIDKSYDKPAVDDDDEGMETLEEDTEESSRSGRESVSTASDQPSHSLERQMNGNQEKGDKTDRKKDKTGKEKKKDRDKEKDKMKAKKGMLKGLGDMFRFGKHRKDDKIEKTGKIKIQESFTSEEERIRMKQEQERIQAKTREFRERQARERDYAEIQDFHRTFGCDDELMYGGVSSYEGSMALNARPQSPREGHMMDALYAQVKKPRNSKPSPVDSNRSTPSNHDRIQRLRQEFQQAKQDEDVEDRRRTYSFEQPWPNARPATQSGRHSVSVEVQMQRQRQEERESSQQAQRQYSSLPRQSRKNASSVSQDSWEQNYSPGEGFQSAKENPRYSSYQGSRNGYLGGHGFNARVMLETQELLRQEQRRKEQQMKKQPPSEGPSNYDSYKKVQDPSYAPPKGPFRQDVPPSPSQVARLNRLQTPEKGRPFYS

SEQ ID NO: 9776 - protein, 1296 aa, Homo sapiens
MKVTVCFGRTRVVVPCGDGHMKVFSLIQQAVTRYRKAIAKDPNYWIQVHRLEHGDGGILDLDDILCDVADDKDRLVAVFDEQDPHHGGDGTSASSTGTQSPEIFGSELGTNNVSAFQPYQATSEIEVTPSVLRANMPLHVRRSSDPALIGLSTSVSDSNFSSEEPSRKNPTRWSTTAGFLKQNTAGSPKTCDRKDEDGTEEDNSRVEPVGHADTGLEHIPNFSLDDMVKLVEVPNDGGPLGIHVVPFSARGGRTLGLLVKRLEKGGKAEHENLFRENDCIVRINDGDLRNRRFEQAQHMFRQAMRTPIIWFHVVPAANKEQYEQLSQSEKNNYYSSRFSPDSQYIDNRSVNSAGLHTVQRAPRLNHPPEQIDSHSRLPHSAHPSGKPPSAPASAPQNVFSTTVSSGYNTKKIGKRLNIQLKKGTEGLGFSITSRDVTIGGSAPIYVKNILPRGAAIQDGRLKAGDRLIEVNGVDLVGKSQEEVVSLLRSTKMEGTVSLLVFRQEDAFHPRELKAEDEDIVLTPDGTREFLTFEVPLNDSGSAGLGVSVKGNRSKENHADLGIFVKSIINGGAASKDGRLRVNDQLIAVNGESLLGKTNQDAMETLRRSMSTEGNKRGMIQLIVARRISKCNELKSPGSPPGPELPIETALDDRERRISHSLYSGIEGLDESPSRNAALSRIMGKYQLSPTVNMPQDDTVIIEDDRLPVLPPHLSDQSSSSSHDDVGFVTADAGTWAKAAISDSADCSLSPDVDPVLAFQREGFGRQSMSEKRTKQFSDASQLDFVKTRKSKSMDLGIADETKLNTVDDQKAGSPSRDVGPSLGLKKSSSLESLQTAVAEVTLNGDIPFHRPRPRIIRGRGCNESFRAAIDKSYDKPAVDDDDEGMETLEEDTEESSRSGRESVSTASDQPSHSLERQMNGNQEKGDKTDRKKDKTGKEKKKDRDKEKDKMKAKKGMLKGLGDMFRFGKHRKDDKIEKTGKIKIQESFTSEEERIRMKQEQERIQAKTREFRERQARERDYAEIQDFHRTFGCDDELMYGGVSSYEGSMALNARPQSPREGHMMDALYAQVKKPRNSKPSPVDSNRSTPSNHDRIQRLRQEFQQAKQDEDVEDRRRTYSFEQPWPNARPATQSGRHSVSVEVQMQRQRQEERESSQQAQRQYSSLPRQSRKNASSVSQDSWEQNYSPGEGFQSAKENPRYSSYQGSRNGYLGGHGFNARVMLETQELLRQEQRRKEQQMKKQPPSEGPSNYDSYKKVQDPSYAPPKGPFRQDVPPSPSQVARLNRLQTPEKGRPFYS

SEQ ID NO: 9777 - protein, 344 aa, Homo sapiens
MKTIQPKMHNSISWAIFTGLAALCLFQGVPVRSGDATFPKAMDNVTVRQGESATLRCTIDNRVTRVAWLNRSTILYAGNDKWCLDPRVVLLSNTQTQYSIEIQNVDVYDEGPYTCSVQTDNHPKTSRVHLIVQVSPKIVEISSDISINEGNNISLTCIATGRPEPTVTWRHISPKAVGFVSEDEYLEIQGITREQSGDYECSASNDVAAPVVRRVKVTVNYPPYISEAKGTGVPVGQKGTLQCEASAVPSAEFQWYKDDKRLIEGKKGVKVENRPFLSKLIFFNVSEHDYGNYTCVASNKLGHTNASIMLFGPGAVSEVSNGTSRRAGCVWLLPLLVLHLLLKF

SEQ ID NO: 9778 - protein, 879 aa, Homo sapiens
MSSSFFNPSFAFSSHFDPDGAPLSELSWPSSLAVVAVSFSGLFAVIVLMLACLCCKKGGIGFKEFENAEGDEYAADLAQGSPATAAQNGPDVYVLPLTEVSLPMAKQPGRSVQLLKSTDVGRHSLLYLKEIGRGWFGKVFLGEVNSGISSAQVVVKELQASASVQEQMQFLEEVQPYRALKHSNLLQCLAQCAEVTPYLLVMEFCPLGDLKGYLRSCRVAESMAPDPRTLQRMACEVACGVLHLHRNNFVHSDLALRNCLLTADLTVKIGDYGLAHCKYREDYFVTADQLWVPLRWIAPELVDEVHSNLLVVDQTKSGNVWSLGVTIWELFELGTQPYPQHSDQQVLAYTVREQQLKLPKPQLQLTLSDRWYEVMQFCWLQPEQRPTAEEVHLLLSYLCAKGATEAEEEFERRWRSLRPGGGGVGPGPGAAGPMLGGVVELAAASSFPLLEQFAGDGFHADGDDVLTELCAPDGAPPGVVPVLSAHSPSLGSEYFIRLEEAAPAAGHDPDCAGCAPSPPATADQDDDSDGSTAASLAMEPLLGHGPPVDVPWGRGDHYPRRSLARDPLCPSRSPSPSAGPLSLAEGGAEDADWGVAAFCPAFFEDPLGTSPLGSSGAPPLPLTGEDELEEVGARRAAQRGHWRSNVSANNNSGSRCPESWDPVSAGGHAEGCPSPKQTPRASPEPGYPGEPLLGLQAASAQEPGCCPGLPHLCSAQGLAPAPCLVTPSWTETASSGGDHPQAEPKLATEAEGTTGPRLPLPSVPSPSQEGAPLPSEEASAPDAPDALPDSPTPATGGEVSAIKLASALNGSSSSPEVEAPSSEDEDTAEATSGIFTDTSSDGLQARRPDVVPAFRSLQKQWPQREESLPRLCLLLRPRG

SEQ ID NO: 9779 - protein, 1244 aa, Homo sapiens
MKVTVCFGRTRVVVPCGDGHMKVFSLIQQAVTRYRKAIAKDPNYWIQVHRLEHGDGGILDLDDILCDVADDKDRLVAVFDEQDPHHGGDGTSASSTGTQSPEIFGSELGTNNVSAFQPYQATSEIEVTPSVLRANMPLHVRRSSDPALIGLSTSVSDSNFSSEEPSRKNPTRWSTTAGFLKQNTAGSPKTCDRKDEDGTEEDNSRVEPVGHADTGLEHIPNFSLDDMVKLVEVPNDGGPLGIHVVPFSARGGRTLGLLVKRLEKGGKAEHENLFRENDCIVRINDGDLRNRRFEQAQHMFRQAMRTPIIWFHVVPAANKEQYEQLSQSEKNNYYSSRFSPDSQYIDNRSVNSAGLHTVQRAPRLNHPPEQIDSHSRLPHSAHPSGKPPSAPASAPQNVFSTTVSSGYNTKKIGKRLNIQLKKGTEGLGFSITSRDVTIGGSAPIYVKNILPRGAAIQDGRLKAGDRLIEVNGVDLVGKSQEEVVSLLRSTKMEGTVSLLVFRQEDAFHPRELKAEDEDIVLTPDGTREFLTFEVPLNDSGSAGLGVSVKGNRSKENHADLGIFVKSIINGGAASKDGRLRVNDQLIAVNGESLLGKTNQDAMETLRRSMSTEGNKRGMIQLIVARRISKCNELKSPGSPPGPELPIETALDDRERRISHSLYSGIEGLDESPSRNAALSRIMGKYQLSPTVNMPQDDTVIIEDDRLPVLPPHLSDQSSSSSHDDVGFVTADAGTWAKAAISDSADCSLSPDVDPVLAFQREGFGRQSMSEKRTKQFSDASQLDFVKTRKSKSMDLGSSPSRDVGPSLGLKKSSSLESLQTAVAEVTLNGDIPFHRPRPRIIRGRGCNESFRAAIDKSYDKPAVDDDDEGMETLEEDTEESSRSGRESVSTASDQPSHSLERQMNGNQEKGDKTDRKKDKTGKEKKKDRDKEKDKMKAKKGMLKGLGDMFRIQAKTREFRERQARERDYAEIQDFHRTFGCDDELMYGGVSSYEGSMALNARPQSPREGHMMDALYAQVKKPRNSKPSPVDSNRSTPSNHDRIQRLRQEFQQAKQDEDVEDRRRTYSFEQPWPNARPATQSGRHSVSVEVQMQRQRQEERESSQQAQRQYSSLPRQSRKNASSVSQDSWEQNYSPGEGFQSAKENPRYSSYQGSRNGYLGGHGFNARVMLETQELLRQEQRRKEQQMKKQPPSEGPSNYDSYKKVQDPSYAPPKGPFRQDVPPSPSQVARLNRLQTPEKGRPFYS

SEQ ID NO: 9780 - protein, 675 aa, Homo sapiens
MSWESGAGPGLGSQGMDLVWSAWYGKCVKGKGSLPLSAHGIVVAWLSRAEWDQVTVYLFCDDHKLQRYALNRITVWRSRFVNLISERKTKFAKVPLKCLAQEVNIPDWIVDLRHELTHKKMPHINDCRRGCYFVLDWLQKTYWCRQLENSLRETWELEEFREGIEEEDQEEDKNIVVDDITEQKPEPQDDGKSTESDVKADGDSKGSEEVDSHCKKALSHKELYERARELLVSYEEEQFTVLEKFRYLPKAIKAWNNPSPRVECVLAELKGVTCENREAVLDAFLDDGFLVPTFEQLAALQIEYEENVDLNDVLVPKPFSQFWQPLLRGLHSQNFTQALLERMLSELPALGISGIRPTYILRWTVELIVANTKTGRNARRFSAGQWEARRGWRLFNCSASLDWPRMVESCLGSPCWASPQLLRIIFKAMGQGLPDEEQEKLLRICSIYTQSGENSLVQEGSEASPIGKSPYTLDSLYWSVKPASSSFGSEAKAQQQEEQGSVNDVKEEEKEEKEVLPDQVEEEEENDDQEEEEEDEDDEDDEEEDRMEVGPFSTGQESPTAENARLLAQKRGALQGSAWQVSSEDVRWDTFPLGRMPGQTEDPAELMLENYDTMYLLDQPVLEQRLEPSTCKTDTLGLSCGVGSGNCSNSSSSNFEGLLWSQGQLHGLKTGLQLF

SEQ ID NO: 9781 - protein, 717 aa, Homo sapiens
MSWESGAGPGLGSQGMDLVWSAWYGKCVKGKGSLPLSAHGIVVAWLSRAEWDQVTVYLFCDDHKLQRYALNRITVWRSRSGNELPLAVASTADLIRCKLLDVTGGLGTDELRLLYGMALVRFVNLISERKTKFAKVPLKCLAQEVNIPDWIVDLRHELTHKKMPHINDCRRGCYFVLDWLQKTYWCRQLENSLRETWELEEFREGIEEEDQEEDKNIVVDDITEQKPEPQDDGKSTESDVKADGDSKGSEEVDSHCKKALSHKELYERARELLVSYEEEQFTVLEKFRYLPKAIKAWNNPSPRVECVLAELKGVTCENREAVLDAFLDDGFLVPTFEQLAALQIEYEENVDLNDVLVPKPFSQFWQPLLRGLHSQNFTQALLERMLSELPALGISGIRPTYILRWTVELIVANTKTGRNARRFSAGQWEARRGWRLFNCSASLDWPRMVESCLGSPCWASPQLLRIIFKAMGQGLPDEEQEKLLRICSIYTQSGENSLVQEGSEASPIGKSPYTLDSLYWSVKPASSSFGSEAKAQQQEEQGSVNDVKEEEKEEKEVLPDQVEEEEENDDQEEEEEDEDDEDDEEEDRMEVGPFSTGQESPTAENARLLAQKRGALQGSAWQVSSEDVRWDTFPLGRMPGQTEDPAELMLENYDTMYLLDQPVLEQRLEPSTCKTDTLGLSCGVGSGNCSNSSSSNFEGLLWSQGQLHGLKTGLQLF

SEQ ID NO: 9782 - protein, 734 aa, Homo sapiens
MSWESGAGPGLGSQGMDLVWSAWYGKCVKGKGSLPLSAHGIVVAWLSRAEWDQVTVYLFCDDHKLQRYALNRITVWRSRSGNELPLAVASTADLIRCKLLDVTGGLGTDELRLLYGMALVRFVNLISERKTKFAKVPLKCLAQEVNIPDWIVDLRHELTHKKMPHINDCRRGCYFVLDWLQKTYWCRQLENSLRETWELEEFREGIEEEDQEEDKNIVVDDITEQKPEPQDDGKSTESDVKADGDSKGSEEVDSHCKKALSHKELYERARELLVSYEEEQFTVLEKFRYLPKAIKAWNNPSPRVECVLAELKGVTCENREAVLDAFLDDGFLVPTFEQLAALQIEYEDGQTEVQRGEGTDPKSHKNVDLNDVLVPKPFSQFWQPLLRGLHSQNFTQALLERMLSELPALGISGIRPTYILRWTVELIVANTKTGRNARRFSAGQWEARRGWRLFNCSASLDWPRMVESCLGSPCWASPQLLRIIFKAMGQGLPDEEQEKLLRICSIYTQSGENSLVQEGSEASPIGKSPYTLDSLYWSVKPASSSFGSEAKAQQQEEQGSVNDVKEEEKEEKEVLPDQVEEEEENDDQEEEEEDEDDEDDEEEDRMEVGPFSTGQESPTAENARLLAQKRGALQGSAWQVSSEDVRWDTFPLGRMPGQTEDPAELMLENYDTMYLLDQPVLEQRLEPSTCKTDTLGLSCGVGSGNCSNSSSSNFEGLLWSQGQLHGLKTGLQLF

SEQ ID NO: 9783 - protein, 641 aa, Homo sapiens
MERGLPLLCAVLALVLAPAGAFRNDKCGDTIKIESPGYLTSPGYPHSYHPSEKCEWLIQAPDPYQRIMINFNPHFDLEDRDCKYDYVEVFDGENENGHFRGKFCGKIAPPPVVSSGPFLFIKFVSDYETHGAGFSIRYEIFKRGPECSQNYTTPSGVIKSPGFPEKYPNSLECTYIVFVPKMSEIILEFESFDLEPDSNPPGGMFCRYDRLEIWDGFPDVGPHIGRYCGQKTPGRIRSSSGILSMVFYTDSAIAKEGFSANYSVLQSSVSEDFKCMEALGMESGEIHSDQITASSQYSTNWSAERSRLNYPENGWTPGEDSYREWIQVDLGLLRFVTAVGTQGAISKETKKKYYVKTYKIDVSSNGEDWITIKEGNKPVLFQGNTNPTDVVVAVFPKPLITRFVRIKPATWETGISMRFEVYGCKITDYPCSGMLGMVSGLISDSQITSSNQGDRNWMPENIRLVTSRSGWALPPAPHSYINEWLQIDLGEEKIVRGIIIQGGKHRENKVFMRKFKIGYSNNGSDWKMIMDDSKRKAKSFEGNNNYDTPELRTFPALSTRFIRIYPERATHGGLGLRMELLGCEVEGTINTDQECPCARALAKDAKKKKRWADSTHCRCVRSIHGEMWSSGKGVCSLDANL

SEQ ID NO: 9784 - protein, 609 aa, Homo sapiens
MERGLPLLCAVLALVLAPAGAFRNDKCGDTIKIESPGYLTSPGYPHSYHPSEKCEWLIQAPDPYQRIMINFNPHFDLEDRDCKYDYVEVFDGENENGHFRGKFCGKIAPPPVVSSGPFLFIKFVSDYETHGAGFSIRYEIFKRGPECSQNYTTPSGVIKSPGFPEKYPNSLECTYIVFVPKMSEIILEFESFDLEPDSNPPGGMFCRYDRLEIWDGFPDVGPHIGRYCGQKTPGRIRSSSGILSMVFYTDSAIAKEGFSANYSVLQSSVSEDFKCMEALGMESGEIHSDQITASSQYSTNWSAERSRLNYPENGWTPGEDSYREWIQVDLGLLRFVTAVGTQGAISKETKKKYYVKTYKIDVSSNGEDWITIKEGNKPVLFQGNTNPTDVVVAVFPKPLITRFVRIKPATWETGISMRFEVYGCKITDYPCSGMLGMVSGLISDSQITSSNQGDRNWMPENIRLVTSRSGWALPPAPHSYINEWLQIDLGEEKIVRGIIIQGGKHRENKVFMRKFKIGYSNNGSDWKMIMDDSKRKAKSFEGNNNYDTPELRTFPALSTRFIRIYPERATHGGLGLRMELLGCEVEGGTTVLATEKPTVIDSTIQSGIK

SEQ ID NO: 9785 - protein, 644 aa, Homo sapiens
MERGLPLLCAVLALVLAPAGAFRNDKCGDTIKIESPGYLTSPGYPHSYHPSEKCEWLIQAPDPYQRIMINFNPHFDLEDRDCKYDYVEVFDGENENGHFRGKFCGKIAPPPVVSSGPFLFIKFVSDYETHGAGFSIRYEIFKRGPECSQNYTTPSGVIKSPGFPEKYPNSLECTYIVFVPKMSEIILEFESFDLEPDSNPPGGMFCRYDRLEIWDGFPDVGPHIGRYCGQKTPGRIRSSSGILSMVFYTDSAIAKEGFSANYSVLQSSVSEDFKCMEALGMESGEIHSDQITASSQYSTNWSAERSRLNYPENGWTPGEDSYREWIQVDLGLLRFVTAVGTQGAISKETKKKYYVKTYKIDVSSNGEDWITIKEGNKPVLFQGNTNPTDVVVAVFPKPLITRFVRIKPATWETGISMRFEVYGCKITDYPCSGMLGMVSGLISDSQITSSNQGDRNWMPENIRLVTSRSGWALPPAPHSYINEWLQIDLGEEKIVRGIIIQGGKHRENKVFMRKFKIGYSNNGSDWKMIMDDSKRKAKSFEGNNNYDTPELRTFPALSTRFIRIYPERATHGGLGLRMELLGCEVEAPTAGPTTPNGNLVDECDDDQANCHSGTGDDFQLTGGTTVLATEKPTVIDSTIQSGIK

SEQ ID NO: 9786 - protein, 704 aa, Homo sapiens
MERGLPLLCAVLALVLAPAGAFRNDKCGDTIKIESPGYLTSPGYPHSYHPSEKCEWLIQAPDPYQRIMINFNPHFDLEDRDCKYDYVEVFDGENENGHFRGKFCGKIAPPPVVSSGPFLFIKFVSDYETHGAGFSIRYEIFKRGPECSQNYTTPSGVIKSPGFPEKYPNSLECTYIVFVPKMSEIILEFESFDLEPDSNPPGGMFCRYDRLEIWDGFPDVGPHIGRYCGQKTPGRIRSSSGILSMVFYTDSAIAKEGFSANYSVLQSSVSEDFKCMEALGMESGEIHSDQITASSQYSTNWSAERSRLNYPENGWTPGEDSYREWIQVDLGLLRFVTAVGTQGAISKETKKKYYVKTYKIDVSSNGEDWITIKEGNKPVLFQGNTNPTDVVVAVFPKPLITRFVRIKPATWETGISMRFEVYGCKITDYPCSGMLGMVSGLISDSQITSSNQGDRNWMPENIRLVTSRSGWALPPAPHSYINEWLQIDLGEEKIVRGIIIQGGKHRENKVFMRKFKIGYSNNGSDWKMIMDDSKRKAKSFEGNNNYDTPELRTFPALSTRFIRIYPERATHGGLGLRMELLGCEVEAPTAGPTTPNGNLVDECDDDQANCHSGTGDDFQLTGAETIFIPLLYHFSSCLSWDQLTPVCVLVTPHGRELPRNRSCLARTRASSFPHVIWIDELFLIATTICNNNLSHFESQRLGLS

SEQ ID NO: 9787 - protein, 801 aa, Homo sapiens
MLQNVTPHNKLPGEGNAGLLGLGPEAAAPGKRIRKPSLLYEGFESPTMASVPALQLTPANPPPPEVSNPKKPGRVTNQLQYLHKVVMKALWKHQFAWPFRQPVDAVKLGLPDYHKIIKQPMDMGTIKRRLENNYYWAASECMQDFNTMFTNCYIYNKPTDDIVLMAQTLEKIFLQKVASMPQEEQELVVTIPKNSHKKGAKLAALQGSVTSAHQVPAVSSVSHTALYTPPPEIPTTVLNIPHPSVISSPLLKSLHSAGPPLLAVTAAPPAQPLAKKKGVKRKADTTTPTPTAILAPGSPASPPGSLEPKAARLPPMRRESGRPIKPPRKDLPDSQQQHQSSKKGKLSEQLKHCNGILKELLSKKHAAYAWPFYKPVDASALGLHDYHDIIKHPMDLSTVKRKMENRDYRDAQEFAADVRLMFSNCYKYNPPDHDVVAMARKLQDVFEFRYAKMPDEPLEPGPLPVSTAMPPGLAKSSSESSSEESSSESSSEEEEEEDEEDEEEEESESSDSEEERAHRLAELQEQLRAVHEQLAALSQGPISKPKRKREKKEKKKKRKAEKHRGRAGADEDDKGPRAPRPPQPKKSKKASGSGGGSAALGPSGFGPSGGSGTKLPKKATKTAPPALPTGYDSEEEEESRPMSYDEKRQLSLDINKLPGEKLGRVVHIIQAREPSLRDSNPEEIEIDFETLKPSTLRELERYVLSCLRKKPRKPYTIKKPVGKTKEELALEKKRELEKRLQDVSGQLNSTKKPPKKANEKTESSSAQQVAVSRLSASSSSSDSSSSSSSSSSSDTSDSDSG

SEQ ID NO: 9788 - protein, 704 aa, Homo sapiens
MDHITVPKVENVKLVDRYVSKKPANGILYLTATHLIYVEASGAARKETWIALHHIATVEKLPITSLGCPLTLRCKNFRVAHFVLDSDLVCHEVYISLLKLSQPALPEDLYAFSYNPKSSKEMRESGWKLIDPISDFGRMGIPNRNWTITDANRNYEICSTYPPEIVVPKSVTLGTVVGSSKFRSKERVPVLSYLYKENNAAICRCSQPLSGFYTRCVDDELLLEAISQTNPGSQFMYVVDTRPKLNAMANRAAGKGYENEDNYANIRFRFMGIENIHVMRSSLQKLLEVCELKTPTMSEFLSGLESSGWLRHIKAIMDAGIFITKAVKVEKASVLVHCSDGWDRTAQVCSVASILLDPFYRTFKGLMILIEKEWISMGHKFSQRCGHLDGDSKEVSPIFTQFLDCIWQLMEQFPCAFEFNENFLLEIHDHVFSCQFGNFLGNCQKDREDLRVYEKTHSVWPFLVQRKPDFRNPLYKGFTMYGVLNPSTVPYNIQFWCGMYNRFDKGLQPKQSMLESLLEIKKQRAMLETDVHELEKKLKVRDEPPEEICTCSQLGNILSQHLGSPLTNPLGFMGINGDLNTLMENGTLSREGGLRAQMDQVKSQGADLHHNCCEIVGSLRAINISGDVGISEAMGISGDMCTFEATGFSKDLGICGAMDISEATGISGNLGISEARGFSGDMGILGDTGISKASTKEADYSKHQ

SEQ ID NO: 9789 - protein, 612 aa, Homo sapiens
MASPSPPPESKEEWDYLDPAQRSLYKDVMMENYGNLVSLDVLNRDKDEEPTVKQEIEEIEEEVEPQGVIVTRIKSEIDQDPMGRETFELVGRLDKQRGIFLWEIPRESLTQEQRMFRENTNIIRKRPNSEEKCHKCEECGKGFVRKAHFIQHQRVHTGEKPFQCNECGKSFSRSSFVIEHQRIHTGERPYECNYCGKTFSVSSTLIRHQRIHTGERPYQCNQCKQSFSQRRSLVKHQRIHTGEKPHKCSDCGKAFSWKSHLIEHQRTHTGEKPYHCTKCKKSFSRNSLLVEHQRIHTGERPHKCGECGKAFRLSTYLIQHQKIHTGEKPFLCIECGKSFSRSSFLIEHQRIHTGERPYQCKECGKSFSQLCNLTRHQRIHTGDKPHKCEECGKAFSRSSGLIQHQRIHTREKTYPYNETKESFDPNCSLVIQQEVYPKEKSYKCDECGKTFSVSAHLVQHQRIHTGEKPYLCTVCGKSFSRSSFLIEHQRIHTGERPYLCRQCGKSFSQLCNLIRHQGVHTGNKPHKCDECGKAFSRNSGLIQHQRIHTGEKPYKCEKCDKSFSQQRSLVNHQKIHAEVKTQETHECDACGEAFNCRISLIQHQKLHTAWMQ

SEQ ID NO: 9790 - protein, 862 aa, Homo sapiens
MSDSGSQLGSMGSLTMKSQLQITVISAKLKENKKNWFGPSPYVEVTVDGQSKKTEKCNNTNSPKWKQPLTVIVTPVSKLHFRVWSHQTLKSDVLLGTAALDIYETLKSNNMKLEEVVVTLQLGGDKEPTETIGDLSICLDGLQLESEVVTNGETTCSESASQNDDGSRSKDETRVSTNGSDDPEDAGAGENRRVSGNNSPSLSNGGFKPSRPPRPSRPPPPTPRRPASVNGSPSATSESDGSSTGSLPPTNTNTNTSEGATSGLIIPLTISGGSGPRPLNPVTQAPLPPGWEQRVDQHGRVYYVDHVEKRTTWDRPEPLPPGWERRVDNMGRIYYVDHFTRTTTWQRPTLESVRNYEQWQLQRSQLQGAMQQFNQRFIYGNQDLFATSQSKEFDPLGPLPPGWEKRTDSNGRVYFVNHNTRITQWEDPRSQGQLNEKPLPEGWEMRFTVDGIPYFVDHNRRTTTYIDPRTGKSALDNGPQIAYVRDFKAKVQYFRFWCQQLAMPQHIKITVTRKTLFEDSFQQIMSFSPQDLRRRLWVIFPGEEGLDYGGVAREWFFLLSHEVLNPMYCLFEYAGKDNYCLQINPASYINPDHLKYFRFIGRFIAMALFHGKFIDTGFSLPFYKRILNKPVGLKDLESIDPEFYNSLIWVKENNIEECDLEMYFSVDKEILGEIKSHDLKPNGGNILVTEENKEEYIRMVAEWRLSRGVEEQTQAFFEGFNEILPQQYLQYFDAKELEVLLCGMQEIDLNDWQRHAIYRHYARTSKQIMWFWQFVKEIDNEKRMRLLQFVTGTCRLPVGGFADLMGSNGPQKFCIEKVGKENWLPRSHTCFNRLDLPPYKSYEQLKEKLLFAIEETEGFGQE

SEQ ID NO: 9791 - protein, 1499 aa, Homo sapiens
MMANWAEARPLLILIVLLGQFVSIKAQEEDEDEGYGEEIACTQNGQMYLNRDIWKPAPCQICVCDNGAILCDKIECQDVLDCADPVTPPGECCPVCSQTPGGGNTNFGRGRKGQKGEPGLVPVVTGIRGRPGPAGPPGSQGPRGERGPKGRPGPRGPQGIDGEPGVPGQPGAPGPPGHPSHPGPDGLSRPFSAQMAGLDEKSGLGSQVGLMPGSVGPVGPRGPQGLQGQQGGAGPTGPPGEPGDPGPMGPIGSRGPEGPPGKPGEDGEPGRNGNPGEVGFAGSPGARGFPGAPGLPGLKGHRGHKGLEGPKGEVGAPGSKGEAGPTGPMGAMGPLGPRGMPGERGRLGPQGAPGQRGAHGMPGKPGPMGPLGIPGSSGFPGNPGMKGEAGPTGARGPEGPQGQRGETGPPGPVGSPGLPGAIGTDGTPGAKGPTGSPGTSGPPGSAGPPGSPGPQGSTGPQGIRGQPGDPGVPGFKGEAGPKGEPGPHGIQGPIGPPGEEGKRGPRGDPGTVGPPGPVGERGAPGNRGFPGSDGLPGPKGAQGERGPVGSSGPKGSQGDPGRPGEPGLPGARGLTGNPGVQGPEGKLGPLGAPGEDGRPGPPGSIGIRGQPGSMGLPGPKGSSGDPGKPGEAGNAGVPGQRGAPGKDGEVGPSGPVGPPGLAGERGEQGPPGPTGFQGLPGPPGPPGEGGKPGDQGVPGDPGAVGPLGPRGERGNPGERGEPGITGLPGEKGMAGGHGPDGPKGSPGPSGTPGDTGPPGLQGMPGERGIAGTPGPKGDRGGIGEKGAEGTAGNDGARGLPGPLGPPGPAGPTGEKGEPGPRGLVGPPGSRGNPGSRGENGPTGAVGFAGPQGPDGQPGVKGEPGEPGQKGDAGSPGPQGLAGSPGPHGPNGVPGLKGGRGTQGPPGATGFPGSAGRVGPPGPAGAPGPAGPLGEPGKEGPPGLRGDPGSHGRVGDRGPAGPPGGPGDKGDPGEDGQPGPDGPPGPAGTTGQRGIVGMPGQRGERGMPGLPGPAGTPGKVGPTGATGDKGPPGPVGPPGSNGPVGEPGPEGPAGNDGTPGRDGAVGERGDRGDPGPAGLPGSQGAPGTPGPVGAPGDAGQRGDPGSRGPIGPPGRAGKRGLPGPQGPRGDKGDHGDRGDRGQKGHRGFTGLQGLPGPPGPNGEQGSAGIPGPFGPRGPPGPVGPSGKEGNPGPLGPIGPPGVRGSVGEAGPEGPPGEPGPPGPPGPPGHLTAALGDIMGHYDESMPDPLPEFTEDQAAPDDKNKTDPGVHATLKSLSSQIETMRSPDGSKKHPARTCDDLKLCHSAKQSGEYWIDPNQGSVEDAIKVYCNMETGETCISANPSSVPRKTWWASKSPDNKPVWYGLDMNRGSQFAYGDHQSPNTAITQMTFLRLLSKEASQNITYICKNSVGYMDDQAKNLKKAVVLKGANDLDIKAEGNIRFRYIVLQDTCSKRNGNVGKTVFEYRTQNVARLPIIDLAPVDVGGTDQEFGVEIGPVCFV

SEQ ID NO: 9792 - protein, 1135 aa, Homo sapiens
METQKDEAAQAKGAAASGSTREQTAEKGAKNKAAEATEGPTSEPSSSGPGRLKKTAMKLFGGKKGICTLPSFFGGGRSKGSGKGSSKKGLSKSKTHDGLSEAAHGPEDVVSEGTGFSLPLPELPCQFPSSQSAHGALETGSRCKTSVAGATEKAVAEKFPSMPKPKKGLKGFFSSIRRHRKSKVTGAEQSEPGAKGPERVRARPHEHVSSAPQVPCFEETFQAPRKENANPQDAPGPKVSPTPEPSPPATEKMACKDPEKPMEACASAHVQPKPAPEASSLEEPHSPETGEKVVAGEVNPPNGPVGDPLSLLFGDVTSLKSFDSLTGCGDIIAEQDMDSMTDSMASGGQRANRDGTKRSSCLVTYQGGGEEMALPDDDDEEEEEEEEVELEEEEEEVKEEEEDDDLEYLWETAQMYPRPNMNLGYHPTTSPGHHGYMLLDPVRSYPGLAPGELLTPQSDQQESAPNSDEGYYDSTTPGFEDDSGEALGLVRRDCLPRDSYSGDALYEFYEPDDSLENSPPGDDCLYDLHGRSSEMFDPFLNFEPFLSSRPPGAMETEEERLVTIQKQLLYWELRREQLEAQEARAREAHAREAHAREAYTREAYGREAYAREAHTWEAHGREARTREAQAREVRCRETQVRETQARQEKPVLEYQMRPLGPSVMGLAAGVSGTSQISHRGITSAFPTTASSEPDWRDFRPLEKRYEGTCSKKDQSTCLMQLFQSDAMFEPDMQEANFGGSPRRAYPTYSPPEDPEEEEVEKEGNATVSFSQALVEFTSNGNLFSSMSCSSDSDSSFTQNLPELPPMVTFDIADVERDGEGKCEENPEFHNDEDLAASLEAFELGYYHKHAFNNYHSRFYQGLPWGVSSLPRYLGLPGLHPRPPPAAMALNRRSRSLDTAETLEMELSNSHLVQGYLESDELQAQQEDSDEEDEEEEEGEWSRDSPLSLYTEPPGAYDWPAWAPCPLPVGPGPAWISPNQLDRPSSQSPYRQATCCIPPMTMSISLSVPESRAPGESGPQLARPSHLHLPMGPCYNLQPQASQSMRARPRDVLLPVDEPSCSSSSGGFSPSPLPQAKPVGITHGIPQLPRVRPEHPQPQPTHYGPSSLDLSKERAEQGASLATSYSSTAMNGNLAK

SEQ ID NO: 9793 - protein, 564 aa, Homo sapiens
MTLLITGDSIVSAEAVWDHVTMANRELAFKAGDVIKVLDASNKDWWWGQIDDEEGWFPASFVRLWVNQEDEVEEGPSDVQNGHLDPNSDCLCLGRPLQNRDQMRANVINEIMSTERHYIKHLKDICEGYLKQCRKRRDMFSDEQLKVIFGNIEDIYRFQMGFVRDLEKQYNNDDPHLSEIGPCFLEHQDGFWIYSEYCNNHLDACMELSKLMKDSRYQHFFEACRLLQQMIDIAIDGFLLTPVQKICKYPLQLAELLKYTAQDHSDYRYVAAALAVMRNVTQQINERKRRLENIDKIAQWQASVLDWEGEDILDRSSELIYTGEMAWIYQPYGRNQQRVFFLFDHQMVLCKKDLIRRDILYYKGRIDMDKYEVVDIEDGRDDDFNVSMKNAFKLHNKETEEIHLFFAKKLEEKIRWLRAFREERKMVQEDEKIGFEISENQKRQAAMTVRKVPKQKGVNSARSVPPSYPPPQDPLNHGQYLVPDGIAQSQVFEFTEPKRSQSPFWQNFSRYCEGIKKPNRSKGVSDYDDAGVDFCSGNILHSGCFFYHWGFPCCSTSGSLQFCI

SEQ ID NO: 9794 - protein, 495 aa, Homo sapiens
MANRELAFKAGDVIKVLDASNKDWWWGQIDDEEGWFPASFVRLWVNQEDEVEEGPSDVQNGHLDPNSDCLCLGRPLQNRDQMRANVINEIMSTERHYIKHLKDICEGYLKQCRKRRDMFSDEQLKVIFGNIEDIYRFQMGFVRDLEKQYNNDDPHLSEIGPCFLEHQDGFWIYSEYCNNHLDACMELSKLMKDSRYQHFFEACRLLQQMIDIAIDGFLLTPVQKICKYPLQLAELLKYTAQDHSDYRYVAAALAVMRNVTQQINERKRRLENIDKIAQWQASVLDWEGEDILDRSSELIYTGEMAWIYQPYGRNQQRVFFLFDHQMVLCKKDLIRRDILYYKGRIDMDKYEVVDIEDGRDDDFNVSMKNAFKLHNKETEEIHLFFAKKLEEKIRWLRAFREERKMVQEDEKIGFEISENQKRQAAMTVRKVPKQKGVNSARSVPPSYPPPQDPLNHGQYLVPDGIAQSQVFEFTEPKRSQSPFWQNFSRLTPFKK

SEQ ID NO: 9795 - protein, 735 aa, Homo sapiens
MSEIILEFESFDLEPDSNPPGGMFCRYDRLEIWDGFPDVGPHIGRYCGQKTPGRIRSSSGILSMVFYTDSAIAKEGFSANYSVLQSSVSEDFKCMEALGMESGEIHSDQITASSQYSTNWSAERSRLNYPENGWTPGEDSYREWIQVDLGLLRFVTAVGTQGAISKETKKKYYVKTYKIDVSSNGEDWITIKEGNKPVLFQGNTNPTDVVVAVFPKPLITRFVRIKPATWETGISMRFEVYGCKITDYPCSGMLGMVSGLISDSQITSSNQGDRNWMPENIRLVTSRSGWALPPAPHSYINEWLQIDLGEEKIVRGIIIQGGKHRENKVFMRKFKIGYSNNGSDWKMIMDDSKRKAKSFEGNNNYDTPELRTFPALSTRFIRIYPERATHGGLGLRMELLGCEVEAPTAGPTTPNGNLVDECDDDQANCHSGTGGTTVLATEKPTVIDSTIQSEFPTYGFNCEFGWGSHKTFCHWEHDNHVQLKWSVLTSKTGPIQDHTGDGNFIYSQADENQKGKVARLVSPVVYSQNSAHCMTFWYHMSGSHVGTLRVKLRYQKPEEYDQLVWMAIGHQGDHWKEGRVLLHKSLKLYQVIFEGEIGKGNLGGIAVDDISINNHISQEDCAKPADLDKKNPEIKIDETGSTPGYEGEGEGDKNISRKPGNVLKTLDPILITIIAMSALGVLLGAVCGVVLYCACWHNGMSERNLSALENYNFELVDGVKLKKDKLNTQSTYSEA

SEQ ID NO: 9796 - protein, 1030 aa, Homo sapiens
MAEPGGAAGRSHPEDGSASEGEKEGNNESHMVSPPEKDDGQKGEEAVGSTEHPEEVTTQAEAAIEEGEVETEGEAAVEGEEEAVSYGDAESEEEYYYTETSSPEGQISAADTTYPYFSPPQELPGEEAYDSVSGEAGLQGFQQEATGPPESRERRVTSPEPSHGVLGPSEQMGQVTSGPAVGRLTGSTEEPQGQVLPMGVQHRFRLSHGSDIESSDLEEFVSQEPVIPPGVPDAHPREGDLPVFQDQIQQPSTEEGAMAERVESEGSDEEAEDEGSQLVVLDPDHPLMVRFQAALKNYLNRQIEKLKLDLQELVVATKQSRAQRQELGVNLYEVQQHLVHLQKLLEKSHDRHAMASSERRQKEEELQAARALYTKTCAAANEERKKLAALQTEMENLALHLFYMQNIDQDMRDDIRVMTQVVKKAETERIRAEIEKKKQDLYVDQLTTRAQQLEEDIALFEAQYLAQAEDTRILRKAVSEACTEIDAISVEKRRIMQQWASSLVGMKHRDEAHRAVLEALRGCQHQAKSTDGEIEAYKKSIMKEEEKNEKLASILNRTETEATLLQKLTTQCLTKQVALQSQFNTYRLTLQDTEDALSQDQLEQMILTEELQAIRQAIQGELELRRKTDAAIREKLQEHMTSNKTTKYFNQLILRLQKEKTNMMTHLSKINGDIAQTTLDITHTSSRLDAHQKTLVELDQDVKKVNELITNSQSEISRRTILIERKQGLINFLNKQLERMVSELGGEEVGPLELEIKRLSKLIDEHDGKAVQAQVTWLRLQQEMVKVTQEQEEQLASLDASKKELHIMEQKKLRVESKIEQEKKEQKEIEHHMKDLDNDLKKLNMLMNKNRCSSEELEQNNRVTENEFVRSLKASERETIKMQDKLNQLSEEKATLLNQLVEAEHQIMLWEKKIQLAKEMRSSVDSEIGQTEIRAMKGEIHRMKKYCRTTQDAHRHVHEQHGTHAGTCTKNTGRAQARARTTRDARGHVHEQHGTRAGTCTNNTGRAQARARTRDARRHVHEHRTHTARA

SEQ ID NO: 9797 - protein, 487 aa, Homo sapiens
MQWIRGGSGMLITGDSIVSAEAVWDHVTMANRELAFKAGDVIKVLDASNKDWWWGQIDDEEGWFPASFVRLWVNQEDEVEEGPSDVQNGHLDPNSDCLCLGRPLQNRDQMRANVINEIMSTERHYIKHLKDICEGYLKQCRKRRDMFSDEQLKVIFGNIEDIYRFQMGFVRDLEKQYNNDDPHLSEIGPCFLEHQDGFWIYSEYCNNHLDACMELSKLMKDSRYQHFFEACRLLQQMIDIAIDGFLLTPVQKICKYPLQLAELLKYTAQDHSDYRYVAAALAVMRNVTQQINERKRRLENIDKIAQWQASVLDWEGEDILDRSSELIYTGEMAWIYQPYGRNQQRVFFLFDHQMVLCKKDLIRRDILYYKGRIDMDKYEVVDIEDGRDDDFNVSMKNAFKLHNKETEEIHLFFAKKLEEKIRWLRAFREERKMVQEDEKIGFEISENQKRQAAMTVRKLPFPQLSEARICSPKGFASVFNGTCCGES

SEQ ID NO: 9798 - protein, 276 aa, Homo sapiens
MALLDVCGAPRGQRPESALPVAGSGRRSDPGHYSFSMRSPELALPRGMQPTEFFQSLGGDGERNVQIEMAHGTTTLAFKFQHGVIAAVDSRASAGSYISALRVNKVIEINPYLLGTMSGCAADCQYWERLLAKECRLYYLRNGERISVSAASKLLSNMMCQYRGMGLSMGSMICGWDKKGPGLYYVDEHGTRLSGNMFSTGSGNTYAYGVMDSGYRPNLSPEEAYDLGRRAIAYATHRDSYSGGVVNMYHMKEDGWVKVESTDVSDLLHQYREANQ

SEQ ID NO: 9799 - protein, 249 aa, Homo sapiens
MSPPTVPPMGVDGVSAYLMKKRHTHRKQRRKPTFLTRRNIVGCRIQHGWKEGNEPVEQWKGTVLEQVSVKPTLYIIKYDGKDSVYGLELHRDKRVLALEILPERVPTPRIDSRLADSLIGKAVEHVFEGEHGTKDEWKGMVLARAPVMDTWFYITYEKDPVLYMYTLLDDYKDGDLRIIPDSNYYFPTAEQEPGEVVDSLVGKQVEHAKDDGSKRTGIFIHQVVAKPSVYFIKFDDDIHIYVYGLVKTP
